United States Patent Application Publication US 2008/0114160 A1 - sequence listing, part 79

SEQ ID NO: 30598 - DNA, 2925 bp, Oryza sativa
caattcaaatccacatcaaatccaatcatccaaccttaagagaacactatatcaatttctcacttcattctcaacaaacaaaaaaacatcaatacatgcatatatgaaacatcatacaaacataaaatggagaaattcatcgaaatcgtcgtcgcccgcttgccatcgccactggcgtgaccgccgcctcctccctccgactagatctgggagagggagagggaaagggagagggaagggaggaggaggccctccggtcgtcgtcaccggtcgctgtgatcgtcgtcgtcgtcgtggtggtggtggtggtcgctgtcgtcgtcatggtatgacggcggcggatccagcctccccgcctgcgcccgagcgccgccgccaggtccgcctgtcatcgctgccgcggcgggcggcggcccctccctccggctagatctgggagaaggagaggaaggggagagaggtgaggtggagatgagaaagagatagagaggagagatggatgcagtgggtgggtgggtgggtgaaattgcttttaaatgcgtgggtgggtgatgctgtgaaggaatcgatttgtgagctgtgcttttcgctggcggatccgttttttcgctggcggatctctatagtagccgctagcgaaaacgctgatttttgctggcgaacatttaagaggtccgcctcaaaataatatagtattttttatggcggacctcttaatatggccgccagcgaaaatcagttttcactggcgcccccccccccccccccgattttctacactggctgttttttcttatagccgccatgaaaaatattttccaaaccccataaaaaatcgtttttctagtagtgtgcgatggcgcctttgccgataaaagatggccacgtcgagcaggctagtgtgggggagaggggatccattcttctctctcaccctctccccatccaacccaattgcgtggatggagctagagcgcgtcggggttcgtgcaccttcatgatggctgaccaacggtgaggcgccagagcggtggccacgtgttgaaggtttttgaatggtggtggcagcggagtgtgacaggaacctttcttgggaggggcgaaataattatgagcgaaagctatgccttcaggccggcaacgacgatgcttgtgggtgccgttttcctattggggcgttgctgtataatctaatctcgtctctcccagttactttcttcaggtgaaaaccatgtcttggccccaggccaggcggcggcggcgcgctcggcgtcgtttcgaagatcgctagttcttgttttcgctctcgcagcagttgttgtcgtaaacgtatggtgtggctgttttttcttaactaccatcttctagaactatagacttatatttttctcctgctttatcaatacatgaaactcgcacgctatcagactttttggaacagaagtgtgctgttttgttttggacttgagagcacacttaaaacgggcggcgaatctatgtggcccaccataacgttgggcttatttccgtagtccggcaacactcgcgcccgcgaccgagcggcctagcacacacactacagtctcgcacgtgatgaacgcatggcccaaatggtcgcaggcagggcctagcacacacactacagtctcgtacggtgcttgggcctgttcctgttcgttgcttcggcctccatcaactcacaagcggaaaagcctacatagttaaggcccagaagcttctttttctggagaaaggaataagttcacaggatgtccctcaacttaacagtgagatttgtgagtaaattgcattagcggtacacaaacttgtcaggtgggtgcaatttagtgtatgaacttgtaaaatgctcgttttggtgtataaacttatctgatacatgcaaactaaggctaaaatagcacgacaagaccgatttttctatgttgaacattataaattataaattagtagatgagtagacgactgtgtgcacatagtagtagaaatattatatttataaacttagtttccactttatctttctttgtttctatcccttgcatcattactcggtttttgatttatgtaatcattatgccttattatatgtttatccttcttagacatatgtttacatagagtttaaatcaacaacaagattaacaagattaaccttgccgtgcaattttgaccttgttcgcacgcaccaaacaagtttgtgcaccaaacgagcgttttacaagttcatgtactagattgcacccacctgacaagttcgtgtaccacttatgcaatttactcgagatttttttagttcccttaaccacaaaatcagaaatgtgtatccctaaactcacataaatcgtgcactcaaggttctatggcagtatataagggtggtttcactaatgtggcatcctagacaacaaaaaaaaaaaaggtatgtgtggcccacatgtcaggtgcatatttttttcttctcattctcttctctttactttcttctcttctcttttcttcaagggaggttgtcggcgttagacagggcgaggcggctggcggttttgtactcttggtttgtggtggcggcggcaggcggagtggctggcgaggggagattggccgccccgggagagcggggtgagaggagggccgagagaggggcagagcagccggcggtggagggccgaggccgatccacgagctcgcgtcgggaggagaaaacaatgataggatgccggtaggagaggagggcgctggcaggatagtgttgacgacgacgagaggatgccggcgggagaggcggtcggcgcgaagacatcaccggcgacgagaggcggagggaataagtaggaaggaggtggtggcggctagaaggggcgaggcagcgagagcagatggatcttcatctatgggcggcagcga

SEQ ID NO: 30599 - DNA, 2259 bp, Oryza sativa
tcctacaagcactcttatataacaacagaatccgtttatacttacctaataaaagagtctgcataccgggaaaacgtacgatggggccggaaaaaatatacctttacgtactatattcatttgaaaaagtacgtaccgtttaccgatggaaaaaatacatttacctactgttcatttgaaaaaaaaaaggacgtacgttaaacaagctataaaaccctaaagaaaaatatatgtacatgtcagaatcatcattaaaaaatagacgatctttttaaaataggattttctataaaaaaaataaaatttattacttcacaaatatggtcacgtgatgcttctacaagcactcttacaccgtcatgtggcactgtgtaatctcgccatcgatttttatttaaattgatagacatgttatgaacaataggtgacgaaaataaactagatgctaaaatatatatctttatcaaaatataaatattgatatgatactctaaagattgttacggtcgtatgtatgtttagcgatacatttcttaatgatcaatctcactcatttcaaaagaaaatattttatctattccataaaaatttaagcagtattgattaacactgtaaacaaattgtctctactcaaaacgtaaaaaaatttatggaaagaattattttcatcacatctatcttctctttctttcttgaagggcatcgagcagttagccagttaacacaactataggagggacgtaaatatgattgagttgagacagactcaatggaggtcaccgttgacaatagtactcaacttcctacatactaatgcaataatctttgagggtgctgatagtgaaataagacttagaattatgctccacactggctttgagaggcacaagtacgtcactgcgaaacccatgtttgaaggcactagagaaataaatccttggtagctctacccattagagggtatattcatgtctaatttttaacattgttatccctttaaccaatagaagcggtatttttagaatattttttttatagatttagaaataagagttgacataaacatttaggtatgtagtggagattaatgttttatgtattaatgattaataggcttactttggtgatacatatgtagttccatttattaaaaaggcatcaagcaacaatgataattagtaatggtgataataggcgaatttacgtgtaatctagacaaaagtgatttttgcttgaatataagaaaattcttatcgtttatcaaagtctagggtcaatttagcgacaaagacttttttttaattataagttgaaatctaccatttataatatgcatagtgaaatatgacttaattctattaacattatttctatagataataaataaggtgcccgctcatatgcgtgggctttctttctagtttacataataatacaataaaaaatttgagcaaacccgtggaactcgtcgaaaaggttttttttttttaccttctgattaacctctggtaaaacctctgtaaggaaaggttgaattatacataccatttagaattaatttcttggactgaatatcatactattttataaaatttgcatgttagtatgttactctaaaaaatcctgctagtcaagggtctgttcggtacccataggtatggttggcgctgcaacagctgctacaatgaatcgatcgttcatttgtatggcgttgcgcggcagcggcagctctggccttcgaacatagcccctctccctttgttcatgtagttttagctagtggaagacacgttaagaaaatgttaaaagatttctatgtcctcgttaatatagcaatctagtactacatttgtatcaaaaatataagaatcaaatggaatattcttagtacaatatatctagatagggagtaggtaagatcacatccgatcataagttcttatattttgagatggaggtgggtgatagatgaaattagtattagtataactatgatgtaagtatcagttttttttggacggagggagtaataagacgaagggagcgttgtcttttgagacagagataggccctgtttagatcccaccctaaaatttttcaccatgccatattgaatgtttaaacacctacatgaagtattaaatatagggtaaaaaataactaattgtacagattgcgctaatttgccagaccaatctttttaagcctaattgtgccatgatctgacaatgtggtgctacagtaaacatttactaatga

SEQ ID NO: 30600 - DNA, 2884 bp, Oryza sativa
tattatttttttctacatatacattaatttggactaatactttttctcataattaaatagataataaatcatttttcatatttctcctataaaatgtgaagatggcattgtataatttgaaaattatattataagtgtatgtaatttaatgtgtatgatatgaacttatagcataagatttaactttttataaaaatgttgcacgatagtagataggtaatgaactaaacaaccataaaatatagggtaatttggaaccatgccattataatttttcaaaatttgagatatgccatcggtatctcaatgacatgtaggacccacatgagtcaatgacatgtgggtcaggatgacatatatcagattttgcaaaattataatggcatggttctaatttttcctaaaatatatagagaatccatcgtgtgttattgattttgtccttattctataatatgtcactaggtttgtcaagttctaatatgccatcgcactttgtttaacttctataacataccatcgttgtctacttagcatctgttagtattatataattttatcataatgaccgaaatagccatgggacgaaaaattccaaatatcagattgtaaaacttccaaagtttgagatgaatatcttctctgccttgtttataatatgatatttcagaatattcagccaaattttggaatttctgtcccggggatatttcggtcattagaacaaaattatacagtactaacgaagtctaaatggacggtgacgtatattatagaggttaagcaaaatacgatggcatattgtataacttaacaaactcagtgccatattatagtacaaggacaaagtaagcggcacatagtggattctcttaaaaaataatctagtcaaaaaatgtttctttattttattcaaaacaaaacatttttttaccgaacacattaggagaacttcgaaagaaggtaagaaaaaaaaaggaggtttagtcattagctcaaacacacgtgggaaaaagttactcacattcatggtatggtatatactcacattaatcaataatatactaatattaacaaaattgttcttcgtcttaatacggtgtaaaactaaagttttaatcttatattcttctgttgttccatcttcttctcgctttctcattcttatttattttttataataatattgctacaatcagcactagtacttgcacatgaatactagtagctaactcatatgtgtgtgctctgtaatatatattatctatgtttttacatgagtaaataataattagtatatttgttaataatattgtaattatataaggtacctaactagttttctaagaagtggaaagatatttttattaaacataatctagaatgctataaataatcatataattttttatagatgaattagagatcgacacttgttgagaatccaatgataataatgctctatatatactagttggcaccatgcgccttgccacgggatttgctagttttatcatcaaataaaatcaatgttttaaataattagatgtaactctgtatataaacaaaataaatgataatgtggcttcatatatagcctctgctattacaatacaattcatgttttattattttaaaacgtcattgtgtattgttatgatatacgtaagttattttcatgcacaatatacatgccgtcataattagagtagtttgcacatctttactttatctcaagcttatttcaaaaataagtttggattaataatgcctaattactctatgttatccaattgtttataacaaaacaaaattcatatcttatataataatttcatattaaataaagaagataagtttgcattatcttggattgcttgggaggagaaaacataatattatgtacagaatggataacaatgtcacgcctacttataatctaaaagaaggtgactagatgagtagcttcttgatccaacggctgataactatgtactaatgcgatccaacggcttagaattattgatgatgtggcttcttgcatgccatgacgtggtttcttgcatgacttgctttatataggaagatatgattgtttaagaagtgagtgatgatattctaattaggatgtgtttgcactacaacaaatataccttgtagagagattttactaatactatagagacatttttaaaatgccttcctaatactataaagacagttttaaaatgtctttacagtgttatagagacattttgaagagtgtctttttaaaacgcctttacatgcatttttaaaatgccttcctaatactataaagacatttttaaaatgcctttaccatgttatagagacattttgaagagtgttttataagtgccatttggtgaattttacggcaactatagcaaatcaatatgaaaaagaaagaatttacggcaaatatagcaaatcaatatgaaaaagaaagaaaaatattatcccttaccaatccttgaactcatgacctcttgagttgatcattttttatcttcaatgtactaaccatctcaacctcatataattaaatgtaaatatgtgatttgtgttacttatatctagttacttgatatatattaatatttggaaaaatgtctttacattattttaaatgccttaagaaagtgcctttacgtatgaggcaaattttaaagtgtcgaaaagatgtctctaaaagataaatttaacaaagtatcttaaaaatgtctctaaagtgtctctatagtaaaaataaatattttaggtgattttaaaaatgcctctaaaaagtgtctctagactatagagcttcaaaacttagaggtattttgaaaattgtctctacaaaagagcctctacaaaatgt

SEQ ID NO: 30601 - DNA, 787 bp, Oryza sativa
aacgcaggggatacattgggctgtcgcaccctcctcgtgcagcttacaagggatatatatagaagaaatttaggactcctaataggaaactaatcctataaactaatccgaatatattgtgagcccaaaattcggatcacatatttaacaggtcgaggtggcccattgaatagggcccacaatttttgggcctccaaattaagtatatagtattaatttcattaagtatatatttctatatactattcattaagtatatagtatatatatttttataggcattaagtatagtatttaatcagataaaagcacatcaaatccattacgtatatatagaagttgtgcttaatcattggttcgtagctctccgagtctcccgttggttagtctccctaattagatcactagtaatatgcgtggtaatgctacgatgatatttgaaatgcaaaccaaacataaatgtgtcatggtcaggattacgtacgtatcgtcgcagaggcacgccggctcagcaggacgcggcagcagggagcgcagcgcgtcgcgcctgatcagccgcgccggacggcaacagttctatccgcttgcaaattagataaagtttgttaactcttttccttaattaccagtttgttagctatttcttatagtaatttggttaccaattgtaagcctattaagaggtagcattcggatgaataaagcaagcaaattcaatctacaattctcatctccgattctctgttttctcatctcctgttgctgccgccacgggtcgatgttcgac

SEQ ID NO: 30602 - DNA, 2275 bp, Oryza sativa
ccgcgacgacgacctgcttggtgctcttcttggacgacgcggccatggcgcggtggcttccactccctgcaggcggcggcgttctcggcgtcggtgagagcggcggcggcggcggcttcttcttgcgcttggtgtggttgtggtggtggtggtggcggcggcggtcggaggtgtcggtggcagtggccgtcttggaggaggaagaggaggaggaggggaggaggagagtggagagcgccatgggaggggaggggatactagcttggtaagcgaggtggtactaataaattttcttctctcctagttagtgcaacatgggagaaggtgtgatatatatcaaggctcagctctccaccctattaaacatttcttttgtgaaaaaaagagagagaagaaatcatatatatctataaagtccatcccatcccccaagtatagttaatgcatatcacctcaattatttttagcctttggatgatttatcaaggatgtaaattgcatctcttcacatcaccttaattgtttttagcctttggatgatttatcaaggatgtaaattgcatctcctcacatctccttaattgtttttagcctttggatgatttgttgagggtgtaaattgcatttcatcccttcaaaagacacaccatacaatccaatcattataacctttggataatttataaaggtaaaaaatatataaatacatgaaaaaaatcgtatagtagataagaaagaaaattttagaacttgtatctactatattttcacgcaattctgcagcagcaacacgtgggttcccatgtagttaattaatatggcagtggatattgtgtgagaaatttggatctgaaaaaaattaatggagaagtgggcattaatgcaacctcaggaccagggtagtggggttggatgcatttattaaaatacccctggaccatagtgtgaaatgtttgagttcatgatcctttcattcagcaaagtactacagtgtaatgactgttgaaatgcgtgttgtggtaaattaacagagataatgaagatatacagcgcattgtattgtacttggggtgccatctcattctacctgggacaacatagcgtgtagatcatagatgatggtgcatccattgccaactctaatagagttatgtaaaaaatatagcaactctaaataggtgtagatcattgaagtcacgattatgaattggtttctgacatgtggatacatgttacctcgggtctatatgtcaatgacaaggtcatatgactttttgtgtcagaggaacctgatcccaaactgtattgtaacttctcttcaaccctaacgagtatatggtaatcggcccattgaaaaatcaattttttatctgcatttgtaattcatgcaatttcaattttctgcaagtttggaatgcaaataatatattcacagcacataaaaaaccatgtaaagtagacataaaaagtatagaactattggatccctggtaggtgagtcaaaaatgtgattccacgattgttgtttactaaatcaatgaagtaaatgtttctttttctttttcttttttttgctttgaaacacatagtcattaagtaaatatgatcataagtaccggaccaattgtaaagttaacttgtcaacatttagaattgttactctatattctcaaacagaaatgaaaaaaaaatggtttgcgcacatcttttcaaagaagaaatatagaatattgataaactgtattgtcctctccagcaaagatcgcccctattgacatttccttgtaggtacaggcttgcatgagacatcccaacatcatagttagcttagccaccaacaggtgagaaaacagtactactttctctgaaaacaacatgtgagaaaaaaaaagggggggggggtacatatatagtgcatagtatattgtcactaagtaccaatgaattcagcaaccattttattttcattgattggttaacttcagcaatgagagctagctatctaggtccacaaaatttgaccaccaaaagtgtttgaaaaatcgaccatccaccgcgaaagatcgcaggaaagaaactgaatttcttgggcttgaatcatgaatgccagatcgatctcgatgatttctgcctgcttgattcatttttttgcaagtggtaggagtgtgggacagtttcagaggacagctgtttgtttggcctgcaatcttgtgttgtggagtagctagtaccagaatgggtagagatcccctctttttgggttgcatactgaaat

SEQ ID NO: 30603 - DNA, 1194 bp, Oryza sativa
tttgggtcgggatttgagggcctgcagattctcatctgttgcaatgtttgatctttgagtaagttttggttaaaaaaaagaatcacatgttttatggttgaagatgctgaaagcccttagtaacatgcttgatttttcatgttacaaagtgtccatgaaatagtgttgaatatcaaaacttgttagtcgatattcttccagatatcctattattagatatgagatttgaacgaggatgaattctgtgaatctttaaaaccagcactatgtgccataaagtcaaactatcttaaatcttcctttttttttggcctccatcagtgaatatcttaggctttgtcctttttaaatgtggatttcagcatgtaactgatgttattttttttagtaaccctcgtcaggtgagacgtgtaaaccctagctcgcgaattccccatctaatttcgttgaaattttcttcgattgatttgatatatataatatatctcgcgtgtggggggtggtggtgcggggttcgtcgcgcatcggtgtgatccgttgatttggtgcgaatttgcccccatttttttggggggctttttggtggctgggtggatgaatgcgtttgtttagttggttggcggtgtgcagggtgcgttagggttcgtggagatctccgtggttcgtaagatagacgatctattggtgttgcgctgttgttgctcgcctcgtggggtttatggtttttttggctggaggtggaggggggctggaatggtggagggtgagtagatgtcaccatggggttggtgatgaatggaagtttttgggtcggtatttgagggcctgcagattctcatatgttgcgaggtttgatctttgagtaagttttgttaaaaaaaaatcacatgttttatggttgaagttgcagaaaacccttagtattctgatggcctgtagcatgtttgcttgatttatcatgttacaaagtgtccatgaaatagtattgaatatcaaaccttgtgttagttgatattctttcagatattctattattagatataagatttgaacaaggatgaattctgtgaatctttgaaaccgtaaaactgggcactatgtgccataaagtcaactatcttaaatcttccttttttttggcctccaatagtgaatatcttaggctttttcctttttaaatgtggatttcagcat

SEQ ID NO: 30604 - DNA, 3386 bp, Oryza sativa
actctagccttagtatcccgcatgatatctgaccaccacggacatcgtcttaccaccaagccgactcctggtccatcaccgcaaatactctctcgaggcatcgagtcacctacacatgaaacaaacaaagaaaccatattccgagaccaagctatctccaacttgactcattgttagcaaacaacagtattacatacgtatagtatccatctagaagccataaccatgaaacaatcacggatatccaaagaaacaacccgaaaccgaaaccaactcagcgtcggccggtcagaccgcggacctggccggtctgaccgcacacatagcaccggtctgaccggcaacctccgcccggtcggaccggacacataaaataacagtgaatccgatcatcacctgaaaattgattatctccaaaattgattatctccaaaaccacttcaatgataatctcaaaatatcaaaaccaataatcacagatgccaattgttcatcacagaataagaatcaaaacacacgttgatcttacaccttgtatatattaacattctaccccagttgtttgcttccaaagtgtctaattaatctaaaatcaatgttagtcaccttcatttaacaaatatcacatgtgcaagaaatcgggttaatatggataatctctttatgactcaacccactcaagtctgaggatcaatctatttatttagttagtttaagaggtccttgcaagtactgcatgagcaatgttttccgaaacaatagttcgatgtgcagagcaattgtatcgtaagtgataaagagcaaatcaaaattcagagcaacgatgctaccttttcagctcataggtttatattaaaaatgcaaataggcacgaagcttcactcagctatcaacttacttagcttaaacttctgacaaaacaacttccttccaagtacattcagggccagtggtcttaattagaaagtataagattacatagaagccttcccctgttctatcataattaaataagtgacaatccgaccacagctcttttccagatatattcaagtcgaggccgggtttatgttcatttcctaagataaatattcaagtggcagctaggtttcatattgaccatagatcactcaaatcagtttatatttgaattagatatataacgtgcagaacataaacaggagagtaacttaagcacatcaatggttgagatgttgctgccaattatcaatagctagagatgactagacacataattgatctggacatggctagtgtgacatcaggagtgcaggtataagctctgtgcattggaattggaggtatcaagaaaacaaagatagcgagggtagcagtgcaatcggaggtatccaggccacaaggcgggcagggagcagtggagaggacccccacatggctctctctcccagccgcacctccacgagcatctcctccccaagctgcattacaaatcgatggcagtgggccgagcttcttccacctgcacgacaatgctactaagctgggaagtagtagtgggaagacgggctgttcggcgcatcccacctttttgcttcctggaacggcctccttgtcctcaaccaccgtggttgcaaccagaacgggtcttcaggcggcgggcggacccgcctccgccggcctcatgacgggcggcgggcggcgcggtcgacggcgggtggcagacggctgcgatggagcatggcggcgcaggctcccctgcgcttcgaaggaggcgacggcggctccctcgcgtggatctgtcgggtggcggccggcaacaacgaagcattgcggcctggatccagcggtgggcgacgggtgtcgttcggatctagcagcagagctaggggttctcttgtgattttttttacagaattttatttttgcatgagggtgacataagcacccatttcgcgtgcgggtgcgtcgcccgcatggaaaaagagcaatttttgcataccttttcgggcatacctgttggagttctgcataaaaaactacttttggcccagctggaaaaaaagttttttctactagtggcaaccccatcactgccgtgatgaacttttgtgttgttggatgttgtgaattcttgggaaaaaaattgctggggaattagggccccttgatgtgaattctgtggaaagtttttctacggagctggggttgaaaaaacttttctctttgcatttttttcaccaaaaatcattttcgcagttagtcgtcttcacgtacctgtatgggaaaattgattttcacataccttttgttctaggcaggcgctccatccgcatgtgaaaagctattttggctaactgtaaggaattaaggatgtgttttgtagcagtgctagttgaggtgtactcgtttgcaagaggatggagagattaattgctactacataattaatgggcaatcggaggacggcacaatcagatgaaaagaacacagagtcagattggatcatatacgagaatgtatatatatttaaggttgagagggtataatctaaacgggtattagcatggcatcctttaaccttgatttaattggtttcttaaatatattaaacattggatcatttaaccttgattcatcacttgtacagttgtacccagccttgaagtggatcaacaaagaagtgtgagctagcctatatatattgcattggctactgagtgagcagggtaaggaacaaaacacatatcagatttccccaaacaccagctactactctttttgttccccactttgcatcaatcctctttctgaatgcattatgcatactgattgctagtgagcacacacaaagaagaaaattttgtgatagccctgaatattggatttcgaggcatcgggaaagtggagatgcctatgaattaatttaagtttatcatcctcaagaacgtatctagcttgcggagatgataatcttggaactggttaaatcagtgtgagttctcatccaagggttgcttgtcaaacatcataggttcagattcaactcactcgggccgcatctttgttgatatacatggcgataataaccatcgccgtgggttacaagataaggggtgcaggtggatggatagatatgatactattctattacaacaagctctatctattcgcatctgtccatctaaccatgcccatgtacatcacatatgcatattacatgtttaacattgccgaccgcaaacattacagggtaccgtttatgctaagtctagggactgcaaaagtcaatttgccatcatgttacgcaatacttcaacacactccgtgaatgcgcttcctaacacgtgcgaaacgcacaatggggctctaaaatgtaaaaaaaattagcataactaaaccataaa

SEQ ID NO: 30605 - DNA, 847 bp, Oryza sativa
ggtggcggagcaagtttccacgccgccggcggcaggcgacggcgcggcggcggcgaccggaacgaaggtgggggtggaggcggggggtggcgaatggtggtggtctcctcccctttttgaagtttgaaggcgtaggcgggatgggggaggaggattgaggaagaagccgagagcgagatggggagggggcttggtgggcccggcccgtcagggacccggaaaagggaaagtggggttttgggcctatatatacggataaggcaacttttgtggccctagaaaggaaggtggcttttttagttgagtacgtacggcccatgtaacatgtttgagcccggtccattttactctcttttttttcaatagatgacgttgttgactacacatatttgaccattcgtcttattcacaatgtttatgcaaatacatgagatataaataatgctttaaatatttttagtgataaaacaactcacaacaaaataaatgataattgcataaattttttgaataagacgaatggtcaaacgtatacccaaaaatcaaaagaggtagtaggtagtagtggacttggctagcgaaaaaacttagaggatagcattattcgcaaccttgcaaaagttttagggcttctttaggaacgcgggaatttttttattaaactttttgtaggatttagttcaattactccattccaagggagtcattcgctgaaaacacaatctatgtgcgaagagataaaaaaagggggtagggctttttcggaacgtagaaacaatctgtttaactgcgaaacttccccattccaaagagacctaaagtgcatttatagtgtgtagaccatgtg

SEQ ID NO: 30606 - DNA, 2302 bp, Oryza sativa
ctgaagttgtgctactatctttgtggtcttgtgtgaagcttcctatgtggagctatgtgattggtggaaaattaatacttctggtgaattgaggtccctttggtgagattaattctttatttgagatgtgtggcttctttgtgttaattagccggatgacgaacccgacttaagtgaggggtgccagacggtattagccgatctaggtatctcggtgaacggttgaatatacaccactttgtgtatgggtctgacggcaacatttatttacatattaccttttgtgtataaaaggggtcaagctatgtatgtcctgtgcaaccgtatatttaaatatatgcggctgtgttctttgccgtgagtcctcaacacatctccctcgttttccgtgtgcacgcttttcaaactgctaaacggtgtgtgttttgcaaaaagtttctataggaaagttgctttaaaaaatcatattaatccattttttaaattttttatagttaatacttaattaataattcgttaatctatctctccgttttgcgtgtggagaggaggggttcccaacccctccaaaagaacacagccagtgtacgtttatgtatacatgctgactgtttatagtgatgtttgttcgtataatatttccatgttattattattagtatattgtggtggtatattggacattatttatttgttttacttcaacagatgtgaatgttataaattttgagtggcttattcttgtttccaaaaattttgctagttaactgattaattaatgatatatgtcacataatttttaatttttttaaatagcttaaaattccgggttgtttcaccattgaaaaatctttggattaaaacactatattacgtacaagtcaaatagaaaattgagaaagcatctaaatttatctatgaataaaacaaaaaacagggaactagatgagcagaagtaagggcaacaccaatgtatcttgtttaactaggtaataagtagcagggctaagtagtaggtctttgtaaagtgggtcccatgaggaaaaaaatattgctttttagttgctttttgtccaactcagcatgcagtagtagcacatcttgtgttggaaggagagagtgagagagattttaatgtttttttattcttatgagtgggtcataagcttactatctagcattagttactacccacttccacaatgcttattactagatcatagaaatattatattgcttaatacctgctttttcctaacattgtggatgccctaagtagtaacttgtaatttcactggaaaatgatagatagaaattggcaatcgaagacatatttgttttaggatatgtatttccacctgattacacagattctattctgcacatctgaaactatctatataatggaaacagcactaactttttagatgccattttcccgtaatattgtcttccgcaatttcttgaagttaaatgatctatctagcagactagcacgtaaacccactaatcacgatatattcttattaattgaacgtttgtggataaaccttttatatctatggtattagcggtttaaaatccaatgttgaaaaaaatctatgaaaaaaaaactaaaatcaacttaaaattaagttttaaaattcaatttgctaaataataagcacaggctataaagtggttggcgcgccaacatgcgtgctcattttctactaatagactaaatccatcttatctgtagcgctcattgtctactaatagactaaatccatcttatctgtagctgtgttgcccgccctgtgtttgaggtggatttaaaaagtgtggaactagctggtgtgttattccgggaggagctctctctgaaacataacatcaatggtggcttcattgttgaacgcattgctgatgattctgctcttgagcatcttggtgttagacggggtgacgtgatcttttttgaggacgagtgtgggactactttgcctgaggtgaaatgaattctggtctcaagtaatagtttaatataaatcaacatttgttaagaataatacaaattctggaacagattgaagattatctcctttctcttggttggagatacctgcaggggatgaagtcgatggttcaaggtctgatattacacaataacaaatgcatgtaaatgtttttttctctttttgaaacaatgggaaaaaataattaacagaactgcctttcttgtgtagttgctagtacatgacattgaaggtccatgtaaggagacaattaccttgcccttagagttttctgtcgattcagg

SEQ ID NO: 30607 - DNA, 2043 bp, Oryza sativa
gacagatctgagatgaatctgtgatgtatttgatttcggtgtattttttaggatttgtgatatatttgatttatgtgtataagtaacttaagatttgggatgttactttgaattagggatttggggatatacatagcactagattcaggagaaaatatagggactaactctaaaaaacaataaaaaaaggaccatctgcattgccgctaccctctctttaccaaccgggactaaagattcctctctttagtcctggttggtaacaccaaccgggactaaagatctatctttagtcccgagtatttgaaccgggattaaagatagcgatctttagtcctggattcgtactcccgattagaaaattgggactatagggagttaccaaccgggagtaaaaaggttatctctaccagtggcttgaatgaaaattacttaccttttcttctttttatgttcctaatgagtatgtttctgccaacaacattaacaaagtttgcacgctttcttcttctccaaacaagaagctatggtcatgtataaaactatgttaaacatttagtacatgtaaacatgcataaaccatatacacacaaaaatattgctaaaacattagagccacaagcccaatatgatttttatatcgtggatgaaccatgaaatttctaggttatgcaagtaaaatcagtttgtatattctttagatatatagtatttgttgatttgttacaaatattaggatgaaaaaaaagtagtgggaattagttagttcatcccaaccgttgttatatagagacgactgagatttgatcaaatccatcgggtggagttggagtgaactccagggaatccccacccgctaagatatgggcatgtttagattactgccaaaataaacttttctaaaatttggcagcaaaaattttggcaagttagcaacattgcaacattgctaagttttaggggttgttcagattggtgtcattttaaacaatataattgtttgataaaattcataaccatatgactacatttagttttctactttcatattataaaactttctagcattgcccacattcttatatatgttaatgaatcttactagaaggttttataacctgaaacggaggtagtactaaacattggtaatgtgaaaggaatattgccatccacccaaaacttgataatgttgtcaacctattaaaattttagcattttcaaatttttataaggtttattttagtagcagtttaaatatgctcttagtagaaatgtagaatgggttacatatgatgttgccaaaattccctagatattacaaatgttggcagcaaactaattgtcatatgattgtcaatttaccaaacaaatgatatgtttaaaatggtaccaatctgaacaggtccgtagtaacttgatacggtgatacataaggtacacagatacatatttactcatataatgacattgatagatgtataatttaattgtcgcataaaacaaggatagaaaataattttttggaattttgttcaccctacccatataaacacctacgaagatagattgacgaagtcaccataacagacgcttagtgcttatatacacgcacacacgatacactcaccatacatcttcgaatacttgattctcatgtcttagtattgacagagtcaccacaacagacgtcttgttgtcaacgtgtcgtatatcctgaaagaataattaattataaatatgagtacttatgtgattaaaatccggatgggtagtttaatcggttcagggttatataatattcaaaacaatggcagcatggttaggccaagttcgggagtgagggttagtaacctttactccagcacgtaaaacgaagtggcagatagagcatgattaattaagtactcccttcatcccaaaatataaggtattttgggtggatgggagtacttataaaatcatgctctatcagccacatcgtttgacgtgctggagtaatggttacaacccccactcgcgaacttggccgtaccatgctgccat

SEQ ID NO: 30608 - DNA, 922 bp, Oryza sativa
acgaattgctccgtttcttgaggggaaagatagaggagaacgagaggatcaaaacccctcaaaaacccggaggaatcggggtcggattggagcggatttgagaggagaaggaggcggctcggactcggttagggcggccggccggaggttgaagacgagtccgacatgtgggccccacatgtcggcggctggaggaggaggggcggcggctgagtgggttgggccggctcgcccgcgggagaggagggagtattgggccaaaatcggcccaataacctaaagaagaggtttttagaactttttcaataaaaataatttgtgaaatgatgtttcatttattaaaaatacttcccttgctcaaataattcccagaaaaatctagaaaatagaggagcaagtatagtatttaataaaattttatctagctcatttttatgttgaaaattttcctagaaaattagggtttagcttgtaggcttttaacataatttctaaaaaatgatttaaaacatgcatttttaatttaatcgatttttttagggcgtgacaatttgcattgcctattttaatttccaccccacctgtattactactagcgtggcactgtaccatcaagtgtaatcgaagtgggcaatgttgtcgcttgctatgcatatatggattaatttgctattgggaagaaactatacgtgatagcaaatgcacggccagagtatatggatgcatgcatatgcgtatatcagatttttttttatactgcactttatatatggtgcagcgagtatacactgttttaagcaaatatatgtatgcggatgattttgagattataattttcactccacttgtattactactagcatggctcaaagccgtgaagcgtaaccgaagtgagtgttggttaattttatggccgaccatc

SEQ ID NO: 30609 - DNA, 1950 bp, Oryza sativa
catacgtaaacatggttacgaaggaataaggggtaaacaataatcaaggcatggcataatcgcaagtaggatgttcatcattgcatgcaattttatttgtaaacaaaacaatttcgcaattgggatcaacatgttcaaggaatagtgatgacttgccttgctcaaagtcttgcgggtcttggccttcacttggatccgcaactccctcgggctctatagtcacgtgcgaaaattgatttgaattcggttagaattcaaataaaaatccaaataaatccaaataaaagtcgaatgcgaaagtcgattcctttatattaactttactattcgtgaactaaggcaaacccaatttcgatttaaactattttgcgggtataaatattttgttgtcataagtttttcatttaatcttcccgagcattatatccatatgataggttagaaatttctatcacgagctaaatatcggacgaaatcatagaaatattatacgatttaatttagtatatgactaaattattaaatataatacacggctaaaatccctagtaattaaatctgaatttctaccgtgaatcgattacttatagagattacccaaaaataatctataataatctatatgaattcatttatttgtttagttattaattacatctaaattactgccgcgaattgatttcttatagaaattaccacgaataatccacaatttatattaaattttgcaaatctacgactataattaatctataattaaattctaattattttaaattttctaaacttccctagtctccctctaatttctttttattttcatttttttatttttttttcttttctttttctctcctcttttctctcctttcttttctttttccttctctttctctcctttcttttctttttccttctctctctccctcggcttctcccttcctctctctctcggttctctctctctccctacggaggcggcggcggcgacagcgcgcacggagggggggcggcggcttaccgacggcggcggtggcaacggcggcgcaaggcggtgacgcacggcgcggcggctccggggcgacggcgcggcgcacgaaggcggcggcgtggcggcacgatggcggcggcgcgtggagaaggaggagagggaggggaaatggaggggatgggtgtgggatggagaagggaagggccggattttataagggcacgggggaggggcgggcggcctatggcgacgcgacgggcggcgtggctagcggtgatggcgacaggtggccggcgcggcgcggggctcggcgcggctcggcacggtgctcggcgcgacgatgacggcgatgcgacgggcgagcggcacggcagtagcgcggggcgtgaggcggcgacacgatgggcgagcggcgcgcggggcgagcgacgtgacggcgggacggggcttgaggcgacggtggctcgcgcggcgcggcagcgggatggcgatggtgacggcgtggcagcggcggcgcgtggctcggagcgacgatgggacgtgacggcgacggcgcgcggcggcacggggcgcgagacgaagggcgcgcggagcgaggtggcgcggcgcagcagcggcgcggcagcggcggtggcgacggcgcgcggcgacgcgacggcgacggcgacggcgcggcggcggcgacgcggggctcgggtcgtggccgggcgcgcggcagaagagggtctagggctaggggaccacgtcgagcacttagagtgtaatgaacagtgtctttttcctatttctctcattttagtctatttcttatataaatttgcacacatacattttactcaatatttgtgttatctcaactaatgaattcaccctagattaatattactcatattttatttatataatttatttgaatttttaattagggttaattcttattccatcgcattttaaattta

SEQ ID NO: 30610 - DNA, 1678 bp, Oryza sativa
cagtcctaccaatggcgacaccgatgtagggcacgcctctccgcctacctcaacggctgtcccaccgtagcgcacctgcctcgctcaggggtgaaccatctatgcagggatactgcctccgctcggctatctaatccgctaggtctatacccatacgagaagtgcggttgtacgggggtcgtttcatgcttaacttcatggcttggtccttaattgaccggggacggtaatagcgttttccagataccacccaaatcctccgtccgccccagtcgaaaacagttgtttagttttatttctcctatcgcaaatcatgtcatcaatatcatggcaatgtggtgctcatgtctccacatgccgcatctcaattaccttcccaaaggtaattgcccaagcatatagcatttgataaatatgagtatgcatgattctagaatagcatttctaagcatttgtcatagttgactaaggactcatacgtaaacatggttacgaaggaataaggggtaaacaataatcaaggcatggcataatcgcaagtaggatgttcatcattgcatgcaattttatttgtaaacaaaacaatttcgcaattgggatcaacatgttcaaggaatagtgatgacttgccttgctcaaagtcttgcgggtcttggccttcacttggatccgcaactccctcgggctctatagtcacgtgcgaaaattgatttgaattcagttagaattcaaataaaaatccaaataaatccaaataaaagtcgaatgcgaaagtcgattcctttatattaactttactattcgcgaactaatgcaaacccaatttcgatttaaactattttgcgggtataaatattttgttgtcataagtttttcatttaatcttcccgagcattatatccatatgataggttagaaatttctatcgcaagctaaatatcggacgaaatcatagaaatactatacgatttaatttagtatatgactaaattattaaatataatacacggctaaaatccctagtaattaaatctgaatttctaccgtgaatcgattacttatagagattacccaaaaataatctataataatctatatgaattcatttatttgtttagttattaattacatctaaattactgccgcgaattgatttcttatagaaattaccacgaataatccacaatttatattaaattttgcaaatctacgactataattaatctataattaaattctaattattttaaattttctaaacttccctagtctccctctaatttctttttattttcatttttttatttttttttcttttctttttctctcctcttttctctcctttcttttctttttccttctctttctctcctttcttttctttttccttctctctctccctttcttttcttttccttctctctctccctcggcttctcccttcctctctctctcagctctctctctctccctacccgaggcggcggcgacgacagcgctcacggaggggggggggcggcggcttaccgacggcggcgcaaggcggcgacgcacgacgcggtggctccggggcgacggcgcggcgcacaaaggcggcggcgcggcggcacgaaggcggcggcgcgtggagaaggaggagagggaggggaaatggaggggatgggtgtgggatggagaa

SEQ ID NO: 30611 - DNA, 4187 bp, Oryza sativa
gaagatggtctccaatatgggttggagggagaaatgactccggacccgttagagaggcatgcacaccgtcaaggagacggaattacttgctgccaagctggacctcctcatgcaacacttggacgaccacgagaaacggccacaaggcaccgtcaaggccatggactcacacgttacgtgtaaggtctgtggcggcacgggtcattctgggaatgactgcccagaacccgtgaggaggcgatgtacatgggcaacaacaaccacaacgggtatcgtccataaggaggacaggggttgaaccagccatgcccatactatcaaggaggcaacaacaacagtaacatctctaacatactctaatcttgtttatgtaattcgtcgagttatcatatatcttacataatctctgataatatcgctacctaacctacagtcggctaacatctgttactagaaggcagccgattaggttaaataccgatgttgacttaaattatataagatatccaccactctatgacacatccaacggcttgattgtctagatattgtcctttttttcatacttatacttgtattagttgagtttgatcttatgagtcgtgattagaatcccaatctctagcctgtctttggttgctgattagggtagtatcggagtttcagccgatcttacctgatttaactacatttatttcatatgcttgagtgacatcttaaatatgccctttatattaagatcttgtcgcatttaagtatattaggctttcgtttggtatattttatttgctgtgatatcttaatatagagtggtatcggagtattagccgatacatgctagatctatcttgatcggctatgttatgaacacatatagactcgttattaatatatatttcgatctaagtgatttatactgtctcggcgtggcaactgatctatcccaatcacttgatttaagtatatatcggtataaggactatataccgttaatatctacagccgatcgagtagatttagttctttcttatttattaatgactgctgatcgatgcatatatgacatcggctcaaagataaatgatatgtcatcggcacttagccgatcggctatcatttatggatttaaccgcggtttctttatttttgttcttgttgattgcaggatcaaatcaactggcacgctcatacacctaaaggcaagcttttggacctgcactgaagttaagcagatctcccaggcctcatgtttttacatcaacagaatggcaacagtctgctgattctcagttcgccaacatcaacaacatgatgcagcaacagcacgatgaccttcaagcgtacttccgttttcaggggttcaatccttatcaaggaccctgagcgaaagccaagcttggggaagacacctctccccctccccactaaggtaacttgtatcacattacatatttccctctcctattgcatatttgctttccaattgcgtcttataaactgaaaacaacataaaaatttacaaaatagaaaataccaaaaggataggataggtttggatcatgctaggtaagacaagctagttctctttgttgaaatgatgaatagttgctctgttttatatctcttatatatgggttcataggtaagtgctctctcaaaggttaaatataagtagccaacaattatctaggaacctgaggtaaataggctgcacttgctaatctgagtctaggttgttgcgagatatgagatagtaaatgagagttactatgatcttgatcctagtttgacttaaatttcggatgttttgtttttcaaaatgataaatttgaaagttcctcaattgatataaattcctaccagagccaaaaatgtgctatcatgattgagccatttaaattttggttacttgccattccattgaactttatcaaactcttgagacttgtgtagatacttctcatgctctatgatcaagatcatacacccacataaatgtacatgccaaactcctacactgggagctaagcaaatattccattccattccatttccatgttaccaccaaaataaattctctatgctttcatgtgctttcttctcttaaaaagaaaaatccttttgaaaagaaaaagagaagggggaaaggcatggttataaaaaagagaataataaagttatgctccaccaagcatgagcatgatattgaaaaaaaaatgtagccatcccctctcctaatcagtaaaggaaagatttttgggagaagaaagtaagcacaaaggagaagcattttctttattttctctcataaaccatttccaccatatatcacacacacattgcacgatcttgatcttgagtatgtttagttatctgctttagtctaagcttttgacttagtaataaatgtgaatgcaagtatgccatgtttgatccctactgagttccacatatcaaaccttagagtagaaattaaaaaggcaaatcttgtgaggaattcatattgatacacttggagagactgagtggattatttgaggaacttggctttcttttgcaaaatcatttgaaaactttcggaataagagttgaataaagattggatgattggtgctctaattgttgttctatctttcaaccagccaaggcgaggagtagcagtgtcacgtgggaatcagggataaggataagccaccgcgccaaagattatttaatctgagagagagtgcatataccttgcacctgtatcttagagatatacagcatagtagcaactcctcagcacccgtacaaatgtgtgaggcaggttaggaaccaactgaagatgcacccggatggactcaagctccacgccacagcatcgtagtctcaaactgggcaagtgtcagtgaggaccgatggcatgcgcctcatgacatacattggggggggacaaccaaccttccagatcaagtggtgtgcctccatctccaagtaaatggcgctcgagttcctctcattgggacttgggtgaaatcactaggagaatggacacccttgatatgcagacaggagagatccagtacaacctcatggaaaatatagcacaaacgcaagaatggcaacaatctgttgacgctgagttcgcaaacttcaacaacatgatgcagcaacagcacgatgacctttaagcgtacttccgcttccaggggttcaatccttaccaaggaccctgagtgaaagccaagcttggggggggagacatctctccccccactggggtaacttgtatcacattgcatattttcctttccagttgtatgttttcttttcaattgcatcttataaactgaaaacaacataaaaatttgcaaaatagaaaataccgaaaagataggataggtttgagtaatgctaggtaagacaacctagttctctttgttgaaatgatgaatagttgctctgttttatatcccttatatataaggttcataggtaagtgctctctcaaaggattaaatataagtagccaacaattatctgggaacctgaggtaaatgagctgcacttgctaatctaagtctaggttgttgtgagatatgagatagtaaataagagttaatatgatcccgatcctagtttgacttgaattccggatgatttgtttttcaaaatgataaaatttgaaagttcctcatttgatataaattcgtaccagagccaaaaatgtgctattattattaaaccatatacattttggttacttgctattccattgaactttgtcaaactcttgtgacttgtgtagataattctcatgctctatgatcaagatcatacacccacatatatgcacaagctaaactcctacattgggagctaagaaaatattccattccatttccatattaccaccaaaataaattctccatgcttttaggtgctttcttctcctaaaaagaaaattccttttaaaaaaagaaggggggaaaggcatggttatgcttgatggagcatagcattctcctaaagttatgctccataagcatgagcatgacattgaagaaaaaaattgtagccatgcactctcctaatcaataaaagaaggagttttgggataagaatgtaagcacaaaggagcagcattttctttattttccttcataactcatttccaccatttgtcacacacacattgcacgatcttg

SEQ ID NO: 30612 - DNA, 2853 bp, Oryza sativa
actcagtaattaagtatttattagcttgttttaaaagcaacattagtaaagaaccattttgtaaaaaacgcaccatttagcagtttgtaaagggtgcgcgcggaacacgagggcaaggagttaggaacacaagctgccaaacacagccttcgttaatggcggttgggggtgattgggaacccatctcctctgaacggaaaacggagcagttcattagcgcgtgattaattaagtattaactattttttaaaaaatggattaatttaattttttaagcaacttttctacagaaactttttaaaaaaacgcattgtttagaagtttgaaaaacgtgtgcacggaaaacgtggtagaggggttgggaaaaggttgaaacaaatgcagcctcaagtgttacaagttcattattttacttttgaatcctttaaggccctttttattcagagaaaattcattggagttttagaggattttactcatacatgaatgtttcctatataaccctttgaattaaagaaataaattctataaaatcctttaaaattcctacggaatatctcctcccatgcaagttttggagaaaatttaacataagatacaaccgcatagaaaaaatccattgagtctttatcttttctcagattcctgtgtttttcctgcggcctaattaaactgtcatttctacgtttttttctgtgttttgcaatcatctgttttacacttatatttctgtcagaatcttattttttttctattcgtatgttttttttcattcatgtgattaaatggagctctaaacaaagtcaagttcacattcccgagtatatttgaagttgatgacaaccctactagaaaaaggtttggcaattgattcgcatgtcatcccaccaattggcaattgccaaccttaaattgtggcgaaaggtatggtgtgaggaaaccagcgttgacctagttaatcattgaaagcgtgcctatcactctagttagtttctttagtccaaaaggttcaccttttgttttcttagctagagccaacttcaagccttcaagactaaaatcatcaatcatctttcaaccccacgtaaccttaaagcccatctggtagtactaccacgggactacagcttttagtaggtcctccctccgtttcacaatgtaaagtaattctatcattccccacattcatagtaatattaatgaatctagacttatatatttatctagatccattaatattaatatgaatatgaaaaatgctagaatgacttacattgtgaaacggaggaagtagtagcattacggtggtgtttgaaagatgagataaaaattaggtgtttcacgtaaaataaggtggtaataacatgtgattaattgagttttaattattacaaacttgaaaatcgattaatctgatatcttagaacaactttcatatagaaagttttcacacaaaacacatttgttttggatactcgtggcacgattttcaaactgctaaacggtgcgttttgtgtgaaaactttttatataaagatagaggtaatcttatcatcattaagaagatatatacatggttgtaccatatttttttctactgtaaaactttgcatctccagatagtaaggtttctcgaggtattaaaatttttagggtgaaatttcggtacctacatataaataatgcaagcataatatcgggttcattaggagcaccagagtattgagattaactacgtgaaagagttggtagtcgaatggtgaaggcatactcgtgtgcaacttgcttgatctttggtgtatcaaattatttttcctatactttatgctaccatcttttaacttgttattggtgttttcagctaaatcaaattgttgagatgaattctattgtcaaaagaagactgtaattagacgaaatttatcttattaaatcaccatgcaccacccggcctgaagtgtatggcttaatccttctctggtatctttatttgtcccttcatttcggtcattttctcatcagtccctaattctatcagcatcattgtcccctttcagctccaacatttttagtagaccatgcaagattttttgcttttgacctctaaaattttctgaaacaacgttgttggttatgcccactgtactcatcgggacaattgattgatgtcaatttggtctggaactgagctttcactagctttatacatggagtaatgcaatgacctaattacctaactaagagttgccatattctactcgatgcactcgatccatctctagctaagtaaccaataattatgatgaactggcgactgatgtgaaaattcaactttcaggtaggaaattcagatcaagagaacacaagaattttctctgttcccctactaatgaactactgataaaattcctacaaaaatcatgtgaaaattttcgttcggaacggggctaagtttcagatagaaatcaaattggaatcaacatgagctctccgatgccatttcctttcttgaggttaagggaactatgaaatttaagaaagtattgacggccttgaggaaaattggactataaaataattctaatgccacaatgcaaattttttcctcttttcgtgttgaaattgatcttgctgtgaaatttctccagaaatcatgtgaatgtcctcctctcggaaagggagattaggattttgaagtttccaatggtgccatttcgtttccaccgaccaactggagacaggagtcaaaacaaatgaacatgaactgcaagaagtatcatcggccttgcggcaaaattggacggtcaattaattcttcaatgtgccaatttttgcatcaaattttcatctaat

SEQ ID NO: 30613 - DNA, 812 bp, Oryza sativa
gaagagaggcaaggttgttttgcaaatcttttatttgaagacattttgaaatcactaagtgatttatttctttctaagtttgggccgaaaagagacttgcgtctcgattcgactttaagagatgtttttcaacagctcatttggcaatgtaccgacctcccgggtcagatcattacttctcggctcccagagccattccacttgattaatcggctcccagagcctttttcattttctcggactcccagagtccagctacccagcagcacaacaatccgcttccactcgggaagcctagtctatgatgcccgcagacatcccgaatcacacagattcgtttctgaccactcaggtcgtccatctgccacataggctgattctggttacgattcccacaccacaacaacttttcacaaagcacaggcaaacaaatctacgcaacgggaaccacctcacatccgcccatgaccgtgggcacggctgttcgaacagttagttaacctctgcagaggggtacactttacccacaagacacgaacttactccagacactggccggtgtcagaggttcgcgacaaagcctttcccaagccgacccaaggttacctcatgccacatagaaggatcaaatcctcacgtaagtataggccattttaggcattcacaaatcaactccaaccaccttgatcggtaagtgagcaagcttctcgtccttgccttaccaggaacccggtttgtccgaccccgccccggcgttcccaactattggcatgcgaggtttccctgaaccgactagttacttagccagggtg

SEQ ID NO: 30614 - DNA, 1887 bp, Oryza sativa
atcttgcatcagttaggtagaatcaatgatcaaacgagaagaaagttacaagacattttcagctgaatcagcaagcaattactagtactccttccgtcccaaaataagtacagttttacattattcacgttcaacgtttgaccgttcgtcttatttgaaaaaaatttatgattagtatttttattattattagatgataaaacatgaataatactttatgtgtgactaaatatttttaaatttttcacaaattttttaaataagtcgaacggtcaaacgttgagcacgaatatccacggctacacttattttgggacagaggtagttctactttagtgattaattagaacggtcaaatcacaagaaaaatccaaaattgaaataggatgcaagctaagcaaacatgaattggtgaaggttgcaaatgaagaatagggtgatggactgatggtgatgtacagaacgtaaagccgtttatggtgactcagtcacatataaacaacatagattcatgtcttgaaaagtagagattgtcacctgaccgacttggcactgttaacatcagagaactactgagctgttttctcaaaccatgtaatttacaagaagaccttgatataaagtattgcatacaattatttgttcaaaatcatatttatcattagggcaaggaaagcccaaaggtttgaacagcactggcacctcggaacaagaccgaccattgcataacagagatataagcagagggtaacaattaattctcatacacactaataagaaatcttaaggtgataagttgagctaatctgcattgaacattagataacacaataggtgtagaatttatttaagtttatattttgaattagcacagtttacctccgggcacacacatgggaggatagcatatgcttttggaaaccgatcaaagtcaggacgcaaatatccacttgattattcaagcagtgcataacttaagcatgatttattgtaaatttcataataaatattaagaagggtgatgctgttggccaaacaatattgaagaagcatgaaaaggagttatatctcttgtttgtttgttttttgagatgggaattacatctcttgttagtacttgctgatgagacgtttttttttccatcaatgtggtaaaaagaaagacaacaaaaattaaatgcacaaatttaaacaacatgcatttttggttgtctagagaacttaaaagcctacccctgctagaagtgattacaaatagttacttcatttgccaggttggttaataatcagagcttgccatgataattaatatatgcaggaaatgaaatgatactgaaaatattttcaacaagggtcaagggagccgtgcttccaaagtttagttccaaagtttcaacaagggtcaaggctacggccctgtttagttccaaagtttttttttcaaactttcaactttccatcacgtcaaacctttcatacacacacaacttttttatcacatagtaccaatttcaaccaaacttccaaacttcggtgtgaactaaacacagctgtattctagcaccttgaattcatttgggacagaagttccattgaaatctctgttcctctgtaaatatactactccctccatcccataatttaagtgattttgacattttgcttgcactgtttgatcactcgtcttattcaacaaatttgtgcaaatataaaaaacaaaaagttgtgcttaaagtaatttggataataaagtcaaaaaaaaaataactccaaaattttttcaataagacaaatggtcaaacagtgcaaacaaaatgtcaaaatcccttatattaggggacagagggagtactatcagtgtaaaaaataaagaatgtgatctaccag

SEQ ID NO: 30615 - DNA, 1103 bp, Oryza sativa
cctaaccgctttcaatgctggcaaagtcaacgcgcgccacaccgcattaaatgcggtgtggtgcgcgcctgataggcctgcgaccgatcgatcggtcgcaggccgaatgacggatgggacggtgacaacccgcccacgcccttaccgcgtgtcaggcagcgtgcggcaagtatgccttgtcccatcgtgatgatgagctccctcgagccactcaccgcaaccggagtcggcgtggccacgccgaacgtgccctggtttgtgtatccggcgcagtcatgccccccaagtccttgttcattaaatgatcattgacgggggcatcccctgtgtcagccgacacgatttggtgggccccttacgacagccgatgcgaggatggcttctgagctaagacacgagacatgcatttaatgcagagaatattttcttcctctctaggtagctcttgaggcacatgtggtaacctcttgatgtataaaagaagatctaggcctactgaggaagggattagatatcacaaactctgaggagaggctgagcttgagccttcccaccatagattcagaaactttgtaagctccaaaaaacatcatatacaggagtagggtgttacgttccttagcggcctgaacctgtcatctcttgcatctctctcatcccaggggctgaccccctcgggagtttctttccctttttcccgtttcctctatgttcacccgctgccccccgccgaactaacaaagggggaccgcgcagtcccccgctagcagagttcatcctctgacatattagtatatctattattataaaattataaaacatgaatagtactttatacgtgacttatgcttttttagttttttttaaaaaaaattaaataagacggacgatcaaaattgagcacgaaaacttatgtgtgctcttattttgggatggagggagtatttgcttgcttgctcacaccgatgccccaaactccaaaccaatcttaagtctcaactgttcgtgcggatgttggctacgtgtgcgtgcggttgttggccgcctccattgatccctccgacctcaaccgtgtcgagggtatctacattgcccccccccct

SEQ ID NO: 30616 - DNA, 2626 bp, Oryza sativa
actacatatttttcccactagtccaaccccaacctttccacctttccaggaggaccatgcccaatagtttttagcttggcaaagcagatgctgatacatatctacacacatagatatatcagttggttgggttgccgccgaaatggtcccatgcaaaactctgatcagaagagtgaaagtgggataatataagctgcactgcacactgcactgtgtgtgcaaactgtagtaagttagttgggtaggataccctgtcgactctcccctaatggcaggccacaaacctttatttgttctgtgatcattgtaactttcttgctgttctttcatgtgacaacctctgttatgatgatggagaattttaaccatcccaatcagacatcctgatttgcatgcagagaacagaaaatgtccatgttgctctacaatgtgtttggcgtgagcttgaagggatgcatttggagctgaatgataggtgatggtaattaactggtaggggcgtcccccctacctaagcgaagccggaagcaggggctttttctcattggggagatgtggaaagtgttgatgtcttcttgccaacctgcaacatcggcgcagctaagcgatggtcctctcgctctcctatgggtaggacactccacaaattattgggcaacctgccggtgcactgaaaggaagggtttttggatgtagactttttgtccatgtaacttttacatgtgctgtggtcaggacaactatcgattgtgtcgtggtcacaagacaaaatttgttgacgggtgctgttaaaagatggtataaaaaagcatgaggacatgcaactaatgtaaaaacatataatcaattttcatctccgtcacatatggatgcgacactctttgcgccaaacacacatgcaagtgttctttaaggaattgggatgcatctaaaagttgtatatttttcactcaacccaaatggtcccaaagttgtgaccatttctatttgcttttgtaaactcaaatgttatctctaattagttagaaaaagaactcttgtttataattaataatgagtaaatttcacaaaactatacatgctttggctaaattatcacaaaactatggatttaacaccaaatttacctcaaaactacatatttaaggtaaagtattgcaaaactatagatttagtaacaaatttatcacaaaacgatatgtttagcgtcaatttaataacataacttgaacgtttataacttaaaaataatgttagcgctaaggatttaaactcataatatgtagttttatgataatcttattattaaatatattgttttgcgatacttagtcttataagtgtagttttgtgataaatttattgttaaatatatagctttatgatacattactttaaatatgtagttttttgaaatttactcattaataattaaaaattaaggtgtaccaaccatccctatcaattgtcctttatgcatacaaataatattaaattctctcttttgtgattattcatttctctagtaaccctaccctatatagttaataattcactactccattcaccatcctaaagctaaatggctaaacctaaccggtgtaccggtgtttctctactgcttaaaaagaagtcgtctattcctgctcccctcctcccagtgtgcatagcatgagagggaaaaccgctcccatgtcacgcttcaactaccactacgaataaccgagttaacactcctagttaacctattgacggacgtatacataccgactctgtcacgaaataagcctatcctgtactacaatgtgacatatcttaatacaatgaattttgacatattctgtatttagattagtagtgtatgtcattgtcattgacataggaagctgacaaattttttctctctctctctttttcatttaattatcttggaaaataataattttgctagaggcaagttagttggaagcttaaggtgctagcccgcttttaattggagcatcttacaagagaactacccacgtgactacattcattggagaaacaaaatcaacatgctattaaagcaacacaaatactgaaaatgatagacctattcctctcgggagcaaattgtgaatactcatgaatttgcccacggaagggtaaaatgtgatcgaatatatagaaaaagttatttgaaattaacgatgccatattttttcataaaaaaataagagtaaattccatcaccggtacctaaacttgtaccgttgtgtcattccggtccctaaactcgcaaatcgactgtttaggttcttaaacttgttcgactgtatcatcccgatccctaaacttgcagatcactcgtttaggtcctccaacttgttcagttgtgtcaccccggtccctaaacaggacggtttaaagactttaaaatttaaaaataattcataactttttcatgtgaactttaaagaagacaaactttatatcaaaattgtagccctcgacgcgacctacaactttgtagttgaaaagtttttgaattaaaactgtttagggtctaaaaatattgttacatgtttatagattttgaaattttaatgttaaaattacattttgggataaaaaatgacttaaaata

SEQ ID NO: 30617 - DNA, 637 bp, Oryza sativa
gtcccccttacgtttcaaaggagtgacaaggttgaacgtgtttccctcgtcgcaattactttttagttttcgagctcgaatttgggtaaatgctttcgagcttttttttatgtcgtgttttcgagctaaggcaaaaccttgttcgaaaaccgccgtcccccatacgtttcaaaggagtgacgaggtcgaacgtgtttccctcgtcgcaattactttttagttttcgagctcgaatttgggtatatgctttcgagcttctttttatgtcgtgttttcgagctaaggcaaaaccttgttcgaaaaccgccgtcccccttacgtttcaaaggagtgacgaggtcgaacgtgtttccctcgtcgcaattactttttagttttcgagctcgaatttgggtaaatgctttcaagcttttttttatgtcatgttttcgagctaaggcaaaaccttgttcgaaaaccgccgtcccccttacgtttcaaaggagtgacgaggtcgaacatgtttccctcgtcgcaattactttttagttttcgagctcgaatttgggtaaatgctttcgagcttctttttatgtcgtgttttcgagctaaagcaaaaccttgttcgaaaaccgccgtcccccttacgtttcaaagg

SEQ ID NO: 30618 - DNA, 586 bp, Oryza sativa
agcacctggcggcccatgaacagttgcgccaggaaaagaaaaagaaagagaagagaaaggataagggaaaaaggaagggttaatctgtaaatttgccaggaaacctaatttaacatttaatatccaaaaatctagattttactcaaaagttgtgatggcacaattatatttccattgcattatttaaattaggtttaatcccaaatattagcctagacaattttgggggcgttgatatatcttaggagtttattaaaataatctaagtagacatagtgatggtgtgttgctccattactttacacgaccgtttattttatatgaatgaattttatgccctgagagacttgataaagtgttttaaatatttatttaaatattctagcgaaacactcttttataatgggattagtgtaatgaggtggtcattatttcatgtgagattggattcagatgaattcgatttaatcttactgtttccatttgttaaataatcaaacatggtttgaatatttaatatttgatttgtaatttatccaatagaaattactccctccgtttcacattgtaagtcattctagcattt

SEQ ID NO: 30619 - DNA, 638 bp, Oryza sativa
tcccccatatgtttcaaagaagtgacgaggtcgaacgtgtttccctcgtcgcaattactttttagttttcgagctcgaatttgggtatatgctttcgagcttctttttatgtcgtgttttcgagctaaggtaaaaccttgttcgaaaaccgccgtcccccttacgtttcaaaggagtgacgaggtcgaacgtgtttccctcgtcgcaattactttttagttttcgagctcgaatttgggtaaatgcttttgagcttttttttatgtcatgttttcgagctaaggcaaaaccttgttcgaaaaccgccgtcccccttacgtttcaaaggagtgacgaggtcgaacatgtttccctcgtcgcaattactttttagttttcgagctcgaatttgggtaaatgctttcgagcttctttttatgtcgtgttttcgagctaaggcaaaaccttgttcgaaaaccgccgtcccccttacgtttcaaaggagtgacgaggtcgaacgtgtttccctcatcgcaactactttttagttttcgagctcgaatttgggtaaatgctttcgagcttctttttatgtcgtgttttcgagctaaggcaaaaccttgttcgaaaaccgccgtcccccttacgtttcaaaggag

SEQ ID NO: 30620 - DNA, 1130 bp, Oryza sativa
cataagaattatataaaggtcatgaacgaattatattgtctaacacatatatatcatcaaaaaaaaatttgcatgttgttttactcaattcctaaggtgctgtagacagctatattctccatgaaatgaagtgcttgcgagccacttgatactaaattatagtcacatacacaagtcaacagttcaatttatagcgcgagcgagttctataaaagtactaaacatggcattgaaagttgacattgtgcaactagaatgctagatttatacatatgaaaagaaaatattaatgtatatatagctcacattttaatctgtcattttggtaatggggaaactaaggtgcgtgatgatagcggccctgaagaaattccaagagttgacctgggctccatacaatactaatccccttagcgttagaagcgctctctcccatcatgcacatgaccaagcccccacttgacttcggtatcccttgtcatttggatcacaccaccgtgcacttcacaattcacactactccttcagattaatccatctcgttgatatttcatctcgagtcgtaaaaaccctcatattgtattcatcactgacatgtgtgcccccaaaaaatatcaataggtgtagaaggtcgtgtatatatacgcattcatgtgtgtcaaggcaatatattttgttgaatagagatgacatgggataataggattaaggaggagtcttccctcctcattgcccttttaatacgtcttagacacccagacattgacttagatgcctcgggagaagtagcattaggatttaagaccgttccccattttagctgtaccaagagagacaaaggtacacaagattaccagaaagaggccaggagcatgtcatccaagaagaagagagctgccatagatctctccctggaggcagagagaagacggccagaagaacgcggcggcggcagcgatcgcgaagccagcgatggcgccgctgctgcagctgaggaagatggtgatgtcaagcaacgagagggccctaaagaggaaaccggcggcgaggaggagaaggtagttgaagtggttgtggaccaaggagacgacggctccaatgaggagatcaaatataggactcaacaagca

SEQ ID NO: 30621 - DNA, 837 bp, Oryza sativa
accaaactcatactaagagtcctaaacaccttaggaaaccctctagtacaagacacaaactttacataaccaattgtaccaaatttggactccttccaaattcgactccgcatcccatacgcacacaatacctccatcgtatgccatatggaatcttcaccaaccacgtgcatcaactctagccttagtatcccgcatgatatctgaccaccacggacatcgtcttaccatcaagccgactctcagtccatcaccgcaatactcttccgaggcatcgagtcacctacacacgaaataaacaaagaaaccatattccgataccaagctatccccaacttgactcattgttagcaaacaacagtattacatacgtatattatctatctagaagtcataaccatgaaacaatcatggatatccaaagaaacaacccgaaaccgaaaccgacatagcgtcggccggtcagaccgcgggctggccggtctgaccgctcgatcaccaccggtctgaccggcatacaccacctagtcggaccggtcacataaaataatagtgaatccgatcatcacctgaaaattgattatctccaaaaccacttcgacgataatctccaaatatcaaaaccaataatcacagatgtcaattgttcatcacagaataagaatcaaaacacactttaatcttacattacgttattatacgttcaccgtgaataacatttagacccatcactctcgagttcatatatcagccaccacatcggaggaaagttatgtgagagaatttcaatcggtgataatataggcacgtacgtgtcgcctctcgcgacatgtaaga

SEQ ID NO: 30622 - DNA, 812 bp, Oryza sativa
ttacagggaatcggggtgctggtcatgcatcaaggctttggtttattttagtgtgtcgactcgagagagctgggaatttgctgtgtgcttatgactttgtgctctgacttttgacttaattatgtgagaaaatgatgcaagtagaacttgcctttacagtaattaaaaccacagggtgcctgctctgtagatcctagaggccatttccataactacaatactcggcttctcaaactaaccaagccgctgttaatcaccagttctgaacaactcccataggacgtttgctgcaagctcatgcatgatcttgcaggctttcacctgctaaaaatatttgcccctgacgcatgtcctggaacacggggggaatcaacaaagaaagctactaaattatgatcgctccaatgctgcatcacagccgatctaatggaggtcggctggtcgaatttgccgatgcacgtatccatccaccatggaacgcgggtccggcccctgatagtatattggcgttgatcattcagagaagcgtaaaggaagcaggaaagaagcgacgagagtgtacaggcaggatctcgagtggggctcgtgcgtgtgtgcatgcccggtgtccgtgtccatgagctccccaggattcacctgggcgaggtcatttctcaggcaagctgcattcgggggtggctggatccggcagccaccaaatgccgtctccttttcttgcacctaagctggggttattaggaggtcaggaaaaaaacttcttttttgaacctcgatcaactaatccatcagcctgtgtttagcataacacggcc

SEQ ID NO: 30623 - DNA, 950 bp, Oryza sativa
atatatatatatatatatatatatatatatatatgtggataatgctaaaaagtcttacattctgaaatgaagggagtattaattaagacagatcatacgaattcagcaagtattgttttgtgctgtactgctacagtgcaagagttgttccgcgaataactcatttttccttttgatttttcggtttgagaacgtcgtctagcaccattcaaattaaggaagcctgcagtgcactgtgcactctgcatggtctcctgactaattagcaatctggcgccgtcagctcagctttctcttgtaaaacatactccctccgtaaaaaaaaaaagacaaaccctgggttttcgtattcaatgtttaaccgtctatcttatttgaaaaaattatgaaaaaaattaaaaagacaagtcacgcataaagtattaatcatgttttatcatctaacaacaatgaaaataataattataaaaaaatttcatataagacggacggtcaaacgtttgacataaaaatctagtgtttgtctttttttttttaaggcaagggagtacgtagagattggcgcggccggggatgcaatatgcaagtcaaggccgttgcagcgaaccagcttgttggtagcggccatcaggatgcaggccggatcgatgcctgcaaactattgttgcgcatgaagcgactgttgtagcacattagaagccagtatggtggacaggatcttccggcaggcctctgtaaggccccagaggaatttcacagagagaacgctaagccgctaactcttcagttcagtaagatatcttatatatggggtatatagggcaaagttgtctcggtacccaaaaagaaaggggaaatgttatcactaaacaaggaagaacagagatcgcatattacattcgtatagaggaaaacaatcactgtacgctccggacaagcttctccagact

SEQ ID NO: 30624 - DNA, 1243 bp, Oryza sativa
ttggttttgaaggaaaggagataaatagagcactcagaatacgagattttcacggataggtatttcatcagttttgaacgccacgtaaaaaacggggcattacactagctataatctcaaaagaattgtaatttagtaacgtttggtttggctttaaatccactattcacaggatgagaatccagagctgaagctttgtcgtaaaggacagtaatcgtgccctctggtaggcagtgcacctatttgctcgaaaacttccgtaagtttttttttttccttcaaaactattagatttttaaccattggattacctcgagatttgcgcatgaaagaattttttttctagaaataattttttacacatatcacgcgtaagaacatgatgctaactaatcaaaccatacttgaatacaagtttatataagttactatatcgtagttaccatgtaattacagtacagttacaatgtaattgtgtctcaattatatactactattgttatatgtgaaagtttttcattaaaagaattgagacatttttttagatactcccgtaccaaagttactaccactatataaggaaacatgcaatttatcaaaattgtagtaaaaactttatattagactgaaatcgtcttatatccgtgtgcatgggccataactttactcagttaaactagtttagcggccgtccatgaaatgggcctggatttagcctatataaaataggccgtacatgggccgataattggatctgaacgatactctgaatattaaattctcgcggagatgcgtcccgcccgcccgtgacgcgtacagccgtacacccattcctccacgctgtttgctccccgcgcgccacgaagtagagtactccatctcccaacgattaatgccaagtcaacaagcaacaattctttttgtcgaacaccagcaagcaacaaatcatccagtcagcccgaacacagataatgcagccgtcgcaacgatcccgccggccaccgaggttgagccgccgcaatgccatccggcagtcggcgtacgtggcccggccggcgtcacagctctcgccgccgtcggagtcggaccaacccgccttctggtattcgacggaggaatccgttctggaggaaagggttgtggaagatgaggtcggagatcatgcagaggcaggtggagccgaggcggccgcattggtggtggaggaggcgtcgacttcgagctcgtctgcggtctctgtcca

SEQ ID NO: 30625 - DNA, 636 bp, Oryza sativa
catgaagacgttcgccgggctggtccgcatcatatcgaccggtggctcgacctgacggatgggaagacgacgcacgcggctcgtctgcgaggtggacgtacgtcgtcgccgaaccatgcgaggtgccgcgcgtcctcgcgctccacctcgtgcccaagtggctcgtcaccgtcgtgctgcggagacgcgacgacgacgcctccgatgacggctgtgacggcgagtcggctaaggccttgttcggcacgcatgtttccaatccaggccaggaattgatcaaggccaggtttcagtggatccgggtggattcactggaaccacctgtggattgaatccattccttttttcaatccacctcttcaaaaatctgtgttcggtttgacctggaatggaatgaagccattcaagctgccgtggattgtcgatcgatcagatccagtgattcagaactcaaaacattcagttaatgtcatcactcattagaattcagaatcatgcacatttctaatttctaacagtaatagtatattgcaggagttaattaaccaaaattcccaaatagaaagacagggaacaccctgaatagcatcaggacaattcttcaccatattcagttgctgtcatcattcatcagaa

SEQ ID NO: 30626 - DNA, 614 bp, Oryza sativa
agtcacatagataaacattagttaacctacaaagaaaagtatcaatacatgtgtctgcagccttgcactttcgaagttcagctataattttcaccatgttcagagaaaagaagaattactacccatgctggtgaaaccattgatgccaagctatcaataaagagactaattaagaaattaaagccgaccaagtataaatatttggtacacagctgagacaacagaaaacacaactctctggaggaattaacaatggatacagtctcaggtacactacaaccaagcaatctcctcatcacacatgcacatacatgaccagggacaagtaagaaatcaatccatttcagctgtctgtcttcaggccggtcgatcacagattcacagtatgcaggttctttgaaggagaaactcaacagggatcgaaactacaactagctgaagcaacaccatacatgcagtactgcagcatatgatgaactgataaataaataaatatatatatatatatatatatatatgtagcagatatctccaggcgatgtcgatcaattgaacggcaatggagacacgccagatgacggtcagttcgatgtcatggtattagctgatgtgga

SEQ ID NO: 30627 - DNA, 1012 bp, Oryza sativa
  unsure (1)..(1012): unsure at all n locations
caacttctacaagttgtagaatttgaattttaacttgcatgcttgtggagtgatatattacatattgatctatcttgttcatattttttcaatttttttcatatttatttaatgnatatgcaatanacgggtagacatccactcaagttgttaaaacagtttccctgttatatatattctctggatcattcttgactcttgagtagttggttgaatcgcggaggacggtaactatattgcagggcagttgtagcgtagtactaacacctcttgtttaatttcagttcagttaagatttttctggaatgctaactacttacttgaatttttactgttgctggaactttgtatattccacctacgtaacagggcacaagaagcatgttatatattatctacaaaagcccaatgcaactgtagagaattcatttacctggtctaacatgtacatgcaaatttatttgtgattaacatcactgcttctgcataaaattgttctaggtgctcgtacatagattaaactgtttcaggatgatgctgattttaataaccttacaatttacttgaagtcagcatcaccggtatgtactagctgctccttatgactttcctagtagccgcttggtggtcactggtcagcatcactaacatgtattagttggtccttatgacttttcaggcccaaatcaacttcaaattctggtttttctgcagcctgcaggtaaccacccatttctcacttcctgccactttttttttctgctgaaaggggataattccaaccatggaaataaaattcgatctaaaacaacaccgatgctttatatttgcaatttccaggaacattatatggccttatcctgtattcctgtactcctgcagttttgccaccgtgcaatagttttttacagactcataggagcttgttgaatattgcaaaaaatatattttagtcgcatgcttaggggcaacaccgtaaaagctcattccttttggattggagcaaggccag

SEQ ID NO: 30628 - DNA, 840 bp, Oryza sativa
tcgcagtagatcatttcctacaaaattgttaatcactactacaacaatcaaaaagcttaaaagcatcaacagaagctcaaaagatacattaaagggtattttgctacgccattgcggccaatcctccaatctacacgcaaagaatacaccgagaacaccgctctcgtgctactggttcaatgactaaaattttgacaataggaggccccttttgctcgcccatcttcgtttttaggtcaaataccccagcaattgtaaccacagtcacctaaatcctcactgagaaggcataattcaccttgataagatcaaattaggccatccagtctgagatcccgacctagaccactcccatcagagagctccacaaaattctcccgaaggagcgccaagaaccagccagaaaacactcaaatcagcaccggaaccccccaaattcccccaaaccaagaagaattcctcccatccgcacccaaatcacagagatagaaccccgaaacaaagctccctagccaccattccaggacaaagaacttgggcctcggcgcctggcgaaccaacccaccaccaagatacccaaccaaccaaatctgacatgttcgaatcgggacgaagggcatgggcaggggggcaagggcaagtacctagacccggggggcgagcgcccgatgcgggagcgaggaggtcagccggattccggcggcggtgagcgcgaggccgcgacggagttggagacgacgacgaggaggaggagagcagcaaaccgagcgagagagaaaatggcgaaagacaaggacacccctagttaagccaaattaacgaaaaaaaaaacaaaacgaa

SEQ ID NO: 30629 - DNA, 970 bp, Oryza sativa
ttcatatttggtgaatggtgaaacaaattccatgctgatacgatcgaacattgaagtcgtgcggattatctaagcggaaaatgacccttgattttgacaataataattaagcagaagattgcatatagcctagtggctacagtgacctgagtagtaccccaaggttctgagttcaaattttctatggagcgaatttattgtttgcagaactaaattccctatttcaatggatgcatatattcggttggatatagaggccgggtaaaaaatacccttctaaaaaaagaagcagaagactgcattttggccttgattttgtagtagctagaccgtggacaaccgaaggcgacgcggcgtcggtatcccattccagaccaccatctaggtggaataagttcactttaggtctcttaatttttcgcttggtctgattttcgattttgaaaaaaaaaatagctagaccgtggacaactgaaggcgacgcggcgtcggtatcccattccagagcaccatctgggtggaataagttcactttaggtctcttaatttttcgcttggtctgatttttgattttgaaaaaaaagccagttacaatggatccaggagttgaatctggagtgtaattgttgagtagtctaaacctaactttgcctctctagttcattttataaaaatgctccaccgagcttcgcgagctccgctcttgttttagctagagctacaaatgtttggttggttcagctccaggacatgtggagctggaacccacaaattggtcagcccacaattgctgaggccggcccaacatatcggcacagttcacgggaatctggctcaggcccagatcgtcgttactgggctggtagtttgtggtctgtccatagcgcgatatcagcccaacattcgcgacgtgggaatccagttccgaccaatatttccgcacgtaggccgcattaccgttccggcccat

SEQ ID NO: 30630 - DNA, 686 bp, Oryza sativa
tagtcaggactcaagaacatagatgaagagcatcatcattttttgagtcatgacagaatagtttataagatggatttgtttagttgataatagttgagcaactgttgcctcttctgcagtcataagggtagaggtagactacatcactacactaaaaattatcacaatcatgttctactcttgagtcttgaccttgcatcagtgtgcagattatagctttttttctgaacagcattgcatgacttacttgtatactccaaattaggctaatacaggtaccaaattaccaagtataaaagccttaaaagtgtttggtcttgtcatcattatgatttattttcatcaaatagatcattatgattattgtctcacataatattatggacaactaattaagagctttctatttgtgacacatgatcttgttctgatatttttcctgggatcaataaatttatagaaagtaataagcatatcatattcattgctttaaataaaatacaaagaggttataggggactatgaggtatttctgctggcttgtgtgtatacagtatactgaacaagcagacattattaagtgcacactagcactgtataagagctttcccagcattgttgtcatcatgctgagcaattgtcattctttagtcctaaaatatcatgaactatcagactaaaatggg

SEQ ID NO: 30631 - DNA, 1597 bp, Oryza sativa
aagaggcgacggcatgcggctggcgacgcgagaggcgacggcgacgacgacccgcttcccatccgacgtccacgctctccgccgccttctcgccagtaacgcatcaccgtcgacttccttgttcctttctctccccggcgctagggttgttgcttgctagggttcttggccaccgcctcctcccctgccgctgtagcacgccaccgccgcctccttggtttttgcttgctagggttcttgtgctgctgctgctcttcttccgcccaaatgagggctttccaagggctggtgtttgttggggattccgatccgcgtagggggtggggatgggggaatcgtgatgggttcttggagatttggtctgtggtttaggttcttgcagtgttgcgggggattcttggtggaagagccctaggttcttggttctgtttcttgccctagatcttggctgaaggatcgatgtgttgcatagccatggatctgtcaaccagcttccctttcagtttgtcttcttctcgaatgaaccaggaaattatgctgaaaaaaaaacatgtcactgtaagtggactggtgctccatctctgtttttgtactcacccaagccaggctaagtcaagattgttattaaattcagtgttgcataagaaaagatcctttgataaccagtttttgtcagttcttgatggcatttctgttcattattcagattttgataaccacatgtcctcatggattagctgctttttagcttggatacttaattttagccagcactggctgcctcaacaaactactatgctaattataaaccttttctatttcatctttctgtttatgattcattaaatcttagccattttccatcagatgctttggtcccttctccctttctctgcatatatcattgtagattgtccttgttccgatggggccatcctctttctctgaggatcatcatgcatgacaatttgcacctcataaccagaatttgcaggaagcttcaggcgttttcaacagacatgaaggcctggcattactgacaactattgttgagggtggtgaaactgcaatcctgctagtgatccattaacaaaccagcccctgttatcagcaaacatcattaacaagcatatttttctgctttatttggagaagaaagctttgcgcatcgatgctgaaatataaattgaactgcagtaggaagatgattttgttgcctcttttttggctgcctcattctggcaactacagtgcagtatcttaacatttttttcagctaaattgcctcttatgtagtctgtaataaatgacaacaacaaataggctcatatttttcaattacatctaagtcctggaataggaccattttctttctaagctctgggtagtttaggctaattaaaaaactcaaacatgtgaataaatggaaattctctgttcattaccaaattttcttttgaatttacttgatattatgttgtattagacttcacatatctacttattatataagccgacaagtttggttttttcgaatctgaagatatcaaatgttgtgtccacataggatagcccttttatgatgataacacaaatg

SEQ ID NO: 30632 - DNA, 727 bp, Oryza sativa
tcctgcagcccttgctgcatgcatgcacttcgccactcctgtcgtcggccatccatgctttgtggcatgaggtgccatacaatttatttccgagatcgcgcggaggggactgggctttggtcaatcgcgagatcgcgagtaatcctagtcgcgtgcgagatcatgactgagcccgttcgtgaggctatataaggcgcagcgatatgatatctaacgaaggacacagtgctgcagacgcacacagagctgttcctctctcagcgccggcggcattagcttttcgctcaactaggcaacggcagcgagcagcaacgattggtgacaggtacaagcacttgtacagtgcgtataaactatacgagcacaggtaaaattttttgctagcaaccatgtttttgctttgttgaattttttttttatgtttttggtctcacaatgtttttatggaataaaaaacataattcgatatgatgaataaatatttggaaaaacggaaggcctagctaatgctctacacgaccgtgtcatcaatctgcagattaatatctagacgaccctcaatgttatgattttttccggtcaatgacatttttctttaatttgatctgacaacgtcgcaaggggaaaaacttaatttgttgtgatgaataatggtttgacagttgatttgatccaagatgagtcgtcctcgctcctcgtttcagcggcttgtggatgaatcatcgtc

SEQ ID NO: 30633 - DNA, 652 bp, Oryza sativa
cttcctttaaatccctaggccattatgtaacctccactcaggctgcctcactttgaaccagccaacaagtagagccgcaggctcagaagattattgtctttaacctcccaaagatagaccaatgcccatacgacgtcggagcagatctttcccatcaaatctgactgaattttgctcgatctcccaaaattggttgagggctttcaatccactcgatctactctttccgtcttccaaaatcagaggtaaaactcacgataaaaacaaccggggaagatcgcctatagtcggagattaaatctggtaaattaaaagtcgcatcaaaaggggaaatcatgtagaaaatgatgagagaagagcggggaatcgattttttaatcaattagagtagataatgcgcaatcgacatgaaggcggcatggcgctagggttcggcccgggcagcggcaggaggtgcgcggatggcgcggtggaatagatcggggaataaaacggccaaaaaaaacccagcggaaactgaaaaaaaaatggaccaaaaaaaaccagacggaaattgaaaaataaatggacaaaataaagcggtgcaatagatatcagttgggatcgggataaaaaagctgcaacaaaagaaatgatagaaaccgaaataaaa

SEQ ID NO: 30634 - DNA, 537 bp, Oryza sativa
cagacaaggaagatcagccccgttttcttctagggtgcgaagggcccagaaggaagagtttgtgagaagaacaatatttgtcagtgatatagaccatactgtaagatactgatatttccatggattgcaatgcgatgaattttattttctatggcttgcatatatggagtaatttgtcacatccaaatataatgtgtgacacttcatttgtttctgaaagataataatggtatgcatttgtgtgtttcaggttactgaggacatgttagctgaactgttcgggagctattgcagcgtacgcctcttccttcccatgtgtatatatatgtgcctgagtaaacatttttttagctccactattttttttatccttttctttttgcgaaacacagtgtagatgcaagcgtttatataaacacgcgcacacttagcttcactagttttctaggtatataactgtgatatgtatggtgattgagtaagactgctttcgatatatatgaaaaacttttgatattgtgatatatatcattcata

SEQ ID NO: 30635 - DNA, 718 bp, Oryza sativa
caatggtataaaataacgggtccactaatttaagtgaaaatcgacggtgagatttaataatgccaagtggcagcctaggagcgtttgtaggatgccatgtggcagtttaggagcgtttgtagaaagtttaatggacttttagtatataatagatagatagatatatgaaagcatatgacttgtgaatatatttgggggatattttgttttttagttctgacagaattgggtggagcaccaagcccttgtttagttcccaactttttcttcaaacttccaacttttttatcacatcaaaacttttctacacacataaactttcaatttttttcttcaaactttcaattttagtcaaatttctaattttgacatggaactaaacacaccccaaaatggggtcatgtctagtcaagtcaattgtgcagaaaataaatgaaaactgagttaaaattctcgtagcactaaggtcgtattctttacacattttacacgtggatttttgagggaaaacgtgtaatatgtggaaagaataacatttgtttttctaacaaaccttattcatgactctccttcgcccatatctagaggagcttaaaattctaaaaaaatagctggtgagaatctagtggtagtaatatggaaaaaatgggtttccccatttctgtcttctagttcattttgtaaattctacaactatatatttcaaaatctgaggaag

SEQ ID NO: 30636 - DNA, 964 bp, Oryza sativa
cccattattttttttaagagaacttatgtgaaaaaaaaagaggatcaagttgacttatagtataatcgcacctgtcttttaactgtcgagtgacgtctgaccagcgtaattctttcataaatttgttggccatgactttaattccgtattaaccagccacccaagattaccatttctctgtgtgccatgccatatttattctcattttactagtccttcactgaaagccattagtacggttttgtcaagctgtccatattaaaagttcatttaggcatagacgcatagtagccttggagtatgtcggtatattactccatctcgcaactttagtactcgtgtcatcgcgtggtagcatccaccgcaagtctgcaacaatgagaacatattccactgtcagttctgggttcatgaaggcatgaactgccacggcaaatggtcaaagttggtcagcgtcggcgacttaaggctgaggtcgttgcttgggttaggtattcatccctagttcatgcaaaatgacataactcattaacgtatgattaattaagttttagtttttttaaaaaaataaaattaatatgaatataaaatttaaattaactttcatatagatttcatatagatttttgttaaaaaaaacaccgttcagtaattaaaaaaatgtgcatgtgaaaatcgagtgagttaagttgggaccttcaaacaaaaaaaaactttcatcgttcattggcgattgttgctgtcgatgataaacaacacagatgtgctgaccaactttagcattcccagcaaaaaagaaatatatcgctgagtgaaaagacactgatcaggtggctgaccttactacaagtgtgtgaatggaaattagtgctcactttgacattgtctggagatgatgcctcctttttcgccggactcaagctaggtgtctgaaaccactgaattacgagggtcaccggtaata

SEQ ID NO: 30637 - DNA, 1918 bp, Oryza sativa
caacctcgctcgctcgccagcgcggccagccatgcaacctcgccgtttcccgccctcgcgtgcgagtcaccgctctggccgccgccttgcctccgctcgccgccaggcgccaagctaccatgcctgcctttaccgtcacagccggcgtctcaccatggccccgccgctagtgtccaaggcgtcgacgccggtcagtccgccttgccagtcgcgccaccagaagcagtcaagcagagggaggcctcgctttttcgcctcgcgcttttcctttttcctccttgcctctaccttgtcctctagctcggggagacgcggaggcaggcacgccgatgacgtcgccgctctgacgcgctcgccccaccttgaccacgccagctctgttagaataggtgtcgaatatactagtcctatttggttatagttggacttggagttgtaataggtgttaggggtggagttagagtcggactctgtaacccggcaactatcttaaatagagaggggggcaccacgatgtaaccatgacgactacaatgtagcgtagacacgcagtgagaggatggcggcgtggccatggactcgtagcggctaggtgctatgttggttggggaggagcgtccataatcagagccccggggatgtaggcttcggctgaacctcgttaacaaatatcgtgtgttcctgtgtcgtcatctggcatgtcttgggtgatcaacgactgaagcgatcgggaaggttagtcgtcgttccgctatatcgactaaattttataacaagctcggcacacaccgctggctcggtctcctccagaccgatagctctatgaactatgaaagccgccccagggctctctttctccctcctagcttccactccttcaccatccctaaagctcgccgatcgcttccaccactccggtcttgttcaccgcgtggctcgcccggagtgccggtgcttcctggcgactggggcgaggcagctttccttaccccgacctttattggttcgcgccgaagtctgaaaaatacttacgctctgctggcatttcttcactacgcgcccttcggtctcggagtctcccaatcctttttccctagctcatacaccttccaaaggctactagctagctagcttaccgctgtgtcttgtgctcgccatatttccccacactcgtgttcacctggttccgccgctaattcgccgttggccacctagatgcgccgcgccatgccatgaggatgcttgaaatggtatcatgaaccctacaggatgccctagccgcgagcccgtgacgaatcggtcttgcgtttgctccggtgaaactttcccctttggcttgccggcgggatgcgccgccgccgaccacgggttcaattcattctgggctgctgggtgtgcatgcgaactggaacgtcgaccattgtagttgtatacatttaacaaactgtacttctagaaagtcccttatggaaaaaaaaaaaacattagcttctcttaaagaaagtttctcttatagtaacaattctagttgtaaatgagattttacatgtagtactattccatatataattttttttggagataccaagaatatagaaaaatacacacattaattgtcttcactttatccaaatacaacttcacaagctacctgtcacaccctgaagttctttcccaagcctaaattgaatttataatccaccagagaaaatatcgtgtaaaagcaagagaaaaccctaatgaattgatgccaataataatcggatttggcatgtggaatttttcttgagttctacattgtcgaaatacgcttacaagatttttagtggaattttcagagctctaaaaataattttaccaattaaaattgagcacaagcaatatttaatccctggaaattcttttcctttttcctttt

SEQ ID NO: 30638 - DNA, 719 bp, Oryza sativa
atctttgttctgattcctgtgcatgaattgcttatggtagcctctagacaaatttcattaggatgtgtcaattttgactgctacttcttcagatatcatcagttagaaaagaggattgatcttgcacatttcattactagtgcttaccttccatcaacttctcaatgatgaaacccgcaaataaagaaaaacttgacattccgaggaattagccaaatgctggtgtacatggttagaaggacaaattgttgtaatatgcccttttttttctatgatattttgcaacatgcgaaatattttcatagaaattagcactgaaatattgaaatgcccatcacagcacaagtaaaagaaagaccatgtttaattgaataccatcacaagacagaatcaagaagtgccagtaactattatctatccaatagaaacaataagagaaatccatgttcaatgatcagttttgtcagctatgatatgtccatactccataccagcagtgtattacaagtttacaattggaataagccattccacgaaaaaaacaacagcagtgctatttgtattcagtattcctgaagaaattgggtgacacaaggaagttgcttctagattaacattgtgatttgttgcagggattcacactacacaaaagcctatttcaagattaaaggatctctgaatgtaaatctaagcatgcaagtcaagcattggagctttta

SEQ ID NO: 30639 - DNA, 704 bp, Oryza sativa
atcatttttagcacatccattcttctatgtgtcctttttagtcgcaactgacaaataaaacgtgtccgaaaaaggagtcaatactctgcgattttgagacatacatgcaattccagtgttctgtttgcttgttcaaattattggaaccttcggcaggcttcttttcaagtgaaaactatgatggacctaactagcatttgccgggtgctgcctggagtggagtatttcagagacgcaaatgatttttcagaaaggttaggcctacacctgcaccgatcgagatgattttggaacgtagttcatgcaatgagggaacgagaattgcattactcgctgctctgtatttgcatgtaccaacgagggtccaaagaaagcaagaactcatgccgccgaactttactcgcagagagagatttaccaatactattccctccatctacttttgatagtcatattttatcttgacacaatgaccaaggaaaaataattctacttatcatccatttaaacatgctactaattattcctcgtaaacaagcgattcattaatatttacatttctcgatgcccatgtagccaatcttgtgtggaagaatggagagtcacgcattaaatcatagaaagtcattaagaggatagatgattgaattgaaatatggctatcaaaagtaaatttttcagatttggaaatatgtctatcaaaa

SEQ ID NO: 30640 - DNA, 752 bp, Oryza sativa
caatcttgtattgagtaattccaaaaaaatcaaatccacaaaatataatataataaaaaacattaagatatattttgtgtgtaacttagaagcaaagtacatacgtctaagaattctaattttcatatttattaataagcttaaattcaatttattccaaacttctgaatactaaactagtgattagaagtgcgaaaagttcttttgcacgataacaagtatggaaatgagaactgttcaatactccctctgtcaaaaaaaaaaagacaaacttaggtttccgtatcaaacgtttgaccgtccgtcttatttgaaaaaaaatatgaaaaaaaattaaaaaaacaagtcacgcataaagtattaatcatgttttatcatctaacaataataaaaatactaattataaaataatttcatataagacgaacagtcaaacgttggacacgaaaacccagggtttgtctttttttagaacggagagaatattgaactagtcaaagagggcacaaagacgtacttagacttgggtaagctgtcacaaacgcgtgtcatgcatacaagcgccggcttttgccaaggagagagtcgcggcgcgaaaaaacctgtatatcttataggtactgggtttaacttccatggtagcaaattttctagatttatcggagttgtgcttttagtggtaggcgacgtacccgtcaatagcgagatgtctgtagtgacttcgtcaatcttaaggatttgatggtctagtc

SEQ ID NO: 30641 - DNA, 518 bp, Oryza sativa
gctcgagatcacgagtgctttaggtatgacctaataatctaaagaagaagaggttctacttcacttcaaatcgtgatgcatactttgcaaggttatacatataatgtacgagatctctttgaactctaagatttttttaggatttcttaatcctttgcaaggttatatatataacgtacgagatctcttttgaactctaagttttttttaggatttattaatccctgtaaaattcagccagggaaagttgcagtgagccatcttgctcggttcatcctgcaggagtagtaacatttttctattttctttgtactcgtggagttgtggtccggcgtagggtcggaatttaggcggtagccgttgccttcgaaaaaacgacaagcgacggggcgtgggacatcttctcgtccgtccacgctgacaaatccttccttccctccctctagtagccgttggaagccaacccacagaataccactagtactagcaacgcctcgccatctgcgccccacagctta

SEQ ID NO: 30642 - DNA, 936 bp, Oryza sativa
aggctatgggtacatatatacttcttttttaacgtctaatgtataatccattataccatgtcactgactttgttacctgtctacgatttgccactgactttatcacgttctacaatatgccactccatttagaagttaagcaaaaatcgtggcatattgtataacgtggcaaagtcaatggcaaatcgtagacgtgtgataaagttcgtggcatataatagattccctctctaagaaatatcataaagacggggacaaataacaattagggattgaaacataaattacaatttaagagtggtctttttttaaatgtgtagtgtgattttttgtatggtcgtctgaacacgaatctaatggcacatagaaattaggagtaactgttgtttaaaattttatcctaacaaaaaatatatttttgaacggagagtacttacttttgtagtctaaaccaaccatatatttctgagaaaattgaaaccataccattataattttacaaaatttaagatatgccattctgacccacatgtcattgactcatgtggatcttacatgtcattgagataccgatgacatatctcaaactttgtaaaaattataatggcatggttataatttacccaatatttctctgcacgttctgcaaaagaactcaaaactgtattctaaacatgcgagaccgtatgcattacagtgtagatatacataggattaattagcatggcaaaggaactaatactggtcggttagtagtgtgagtccaatcacagagagcgtgcgcgcttaacggctaaatgacaatcttgcgaagggcctaaaaatggcgacgccaaggcggcccaaccatcttcgaaatgcggcccatgacgagcccacctctcctctcgccctcctcctcctcctcccgtctcctcctcctccgcctcctcctct

SEQ ID NO: 30643 - DNA, 963 bp, Oryza sativa
gacgaggagatctcatcgcatcattctttgtggcgtcttaattctttcttgggtgctttgctgcttctttcactcaacaaaagcttcaggatcttgttctctctatggggcccagctgaggttgaatgacaactagttggggtataagttgctgctgctgtcaggaaggcgcgaatattgtgatcatttggatattcgtgcacgggcaaaacaaatgccttccggattcgctgacatatgggaccggacatgatcatatatatgcaaacatagaatcgataatgacatcatacaaccctcttttttttcttttccgaaaatcttgctagaggaaatcatcgtttcgcggttttggttttagttataagacaaagtacggagtgatggcgctctgttaacgtgaaaattgactcatggacaccgtgcccattagaatattcgccgctagttaaataagagagaaaccatgtgaaaatactaaaatagcccaggacctacatatcaggtccaccatctctctatctctctctacatgaatattaacatggggaggagtggcacggtggtgtcgtcctcgttgctgggcttgcacaaccacttggaggcagccttgtcggcggtcttcatagcatacgccttcatcttgcagcagcaagaccgggtgttttctgtcgcagcagccatggcggcagtggcggcgaggggttggagtcgccgaagccctcgatggcttgggcatgggctacgtggacaagaatgtggtcgagggtgacgtggagccccaccgcaatggtcacgttgctccgtgtgaacctacaccacgcctggctctcggccatcacttgtcggagccgctccgctagcttggccgcgcgacgccgagcgacttccaacttctcctcctcctcccgccgcgtccactaacgtcgggcatactagcgcctggcactgttgttttcgcgc

SEQ ID NO: 30644 - DNA, 1161 bp, Oryza sativa
atcttacgtagtacatgcgccacatgagaaagtaattaacttgatgttacaataaaatagtaattgaccacgccgaccttgcatcaccctgtaaaggataattaatggtaaggggcacagcatatatatatatagcactattggtcggcatatttatatgccacccaccatttaattttttttcaaccaagtaaatttacattttcttttaccaccacgaataaataacatgagaaatcagcaccagttaatttaccaaattaacatccctacaaacagggctataatagcaatatcctctttgtgactttttcaagggtttggctagtacataacatgttataagatgttttgactttggtcaaagtcaaactattttaaatttaactaagtttatagacaaatatattaatatttataatactaaattaattttattaaattaataattgaatatatattcataataaatttgtcttgggttgagaatgttactacttttttctacaaactcccaagtcaagactttgaccaaagtcaaaacgtcttgtaatctgaaacggagggagtagtagcaatagtacgtaggatgtagcagagtcctactttgtgattcattaaaaaaacatctttgtgactttttaattagtagacaacacctcatcctgactttatgccatgaagtatttgtagagcgagtacataggcggtgtagatttgagtcttagtgcatgcgtttattagttcttgatcctcgtaaagattcatggtttttttgttttcattggtgtgctaccttgatcagtgcgtttttgttttgttcttttagaaactttttttagcttagggtggggcgcacatacgtacggtggcgcacttttggtctttgcggcaacagggccgctgtccatctagtggaggcggatttcattgggtgaaggcgtaaagccatctccttcagtagtcatgcatccctcttccatcatcgtggaccacgctgcaggtccatcttttgacttcctttccttcatcaaaggcctcgatcaatggtggagcatggaaggtagtactccagtatgaaacatgatcgacaggtcagcatcaagtaggttctttgcgatccacaatataatctggtacttttgttaattcggccatact

SEQ ID NO: 30645 - DNA, 2358 bp, Oryza sativa
ttctttaaaggctgcgtacgagagcagttataagctaaaaactatggttgtgtttagtttcacatcagaattggaagtttggttaaaattagaatgatgtaacggaaatgttggaagtttatgtttataggaaagttttgatgtgatgaaaaagttgaaagtttgaaggattattttggaactaaacacggcctataagagaaaaaaaaaagaccatcatttttcgtgcgtacgttttccaaacggttaaacactgtgatttttaatatttttttagaaaagttgtttaaaaaaataatattaattcatttttaagtttaaaattatcaatacttaatttgttacacactaatagttaacctcgttttgcatgtcttctcaatcttctctatttcttttcttctaaaaatggaatattctcttcaatagaaaataccgttttgatgcctgataaactgaaaaaaaagtttttgagactaggtatactactttcgataggatatctctgaggaagaaaaaaaacttattaatacagctacagtatagttgtaatataatatattgtaagctacaacgcaacttttatataatttggttggaaataaacaagaaatgtggcacgacgagtagcttggaaggctgacacatataaacaacagtaccttttttaaatctctgatacaagaaaagaaatagcccttattttcttgaggttgtaaaaaaatgtattgtttttttttctacggcgtgaaacatggcattggtaaaattgatgaagtggatatagatgctctggctactccattattgtccttgtggtttgtggtgatggattggcctcgccaagaaccaagcgttggtaaaagggcaaagagcgttttgtttacgtcgtcttgcgttggtaatcaccacgagagcatctactggactaccactactagcagcagcatctaccgatggatcccaccgtttctcgttactggttggtaagtaataagagtagtttaacactatttatctttaacgtttcatcgtttattttatttaaataaattttatgattactatttttattattattagatgataaaacatgaatagtactttatgtgtgactaatttttttaaaatttttaataatttttttaaataagacggacggtcaaatattggacacggattttcacctctgcatttattttgggacggagggtagtacgtgtgttggtggtgagcttcgtcctgtacataccgccgtaccattttgaaaatgtttttggattcattcgagattgccaaattgtttcgaattgtttggtctcacactccggatctgttcggcagttgtccttgttaattctttaatctgaaggcacaatcattggtagtacctctgtaactgttcgatcagtgttcagaatttgagatggttgttttatcttgaaaatatatttacttgaatttgttgaacagcttgcaatagagtttcaggtactagctacatatgtcttgtttcaggtagctctaccaatttgttgggagaagatacagttattagaagctctcctaaaaccagggtcggccctagggggagggggggttaggccgtgcggccgcctgaggcccccaaaatctagggccccctatatacacatatagtatactatataattctagtccatgggccatgtgcctatattaagttagacaactgaatagcccaatatagaaaatgaattttagtccatcgtcaggcctgtctcagcgaaaccgaagcgatcttcatctgactctcgtcgcttcgcctcgatcacatcacgccactcgcgtcgtgccgtctcgatcacatcacaccgctcgctgctcctgcgctctcggcgacttctcgacttctcggcgtctcgcaaacagaagcaacaagtcggcaaatcgcggctcgccagtagccacactcgtgtcgatcgtccgccgatcgccttctctgctcgttactgctatttatttctctttgaaatttcataatattatatatagataattttatcacaacgaatattcaatgttgtgtgtttataagactatataaatatatattagtttatgtatatatataggggcatctatataagtttttgccctggggccccaagaccctaggaccggccctgcctaagaccatcacagtagtatagccatctactagctccaaatcatctatagccaatataatagccaattcatacaatagttgcttactatactattaatacatggtcctacctgtcatacacacattacgtcttggaatctgtgctgcagctggctacagatctgtagcctgctgctcttctctctctt

SEQ ID NO: 30646 - DNA, 1983 bp, Oryza sativa
gcgacgaagacgagtacggatccgtcgtcgatcggtcgctgagccacctcgagtgccaccttgccctgtccaccccattctgcgccgcggcggctggaggaggagaggcgtggcggccggacgaggaggagggatgcgcgacggaggaaatcagaaggggagagggaggcgacggagaggcagaggagctcgagcatgaggtcgaggccgacattgattcggagctggcaccgttgctgctcgggctgccccactgctcggcactgttgctgcatggaccgtcccgccgaccgccgaatttgccgatagagagaaagagagaggagagagatggaaggccgaaaagggaaagaagaaagagagaggggaagatgaaaagggaaatagatggtactggtgggacccactataattaacttggaccgtggaatatgtagcttaacacgttcttcgtctaggtgatatgtaacaacaaatatgagggacacactgctattgccctataaagacccatagacgaattcctaggcaattgtagtgatgttatttgataatgcggtgaaactttctctctgtggttaggagagaaccaagcaaccgatcgagtcaatatgtttattttctgatattgacatgtttaattgggtcgttgttctaatttaatcgggttttcacttattctaattaatgtacttgacagggttacatcttcaattaatatggttgactgattgttaccttaattataaggtttacttatttataatgtgctccaatttaagaaataagtgcttttatgatcaacatacatccgcatggcaaatatcatcgcagttaaattcacaaattccttttctcatgattgaagaatcctactctcttggcctagaaaatattcactattgcatgcaattttcttggtcgttgtattcaacaaaaatcaacttgcctactggctacagcatagtagtagatcacacatactccatctatcccataatgtaagacatgatcaaacttgacacggtcttcaagactaatgtttgtcttataatttcttatatactataaggtttgtagtaacaaaataataatcatatgaaagtaaattcaaatgtgaattcaatgatataatttttagcaagtaaaatttaatttatattgtactaaacgttggttaaaatgttttgaatgtgaaatcttgaaatatgtgggaactttatattatgggatggagagagtatataattgatccagtgcctaattgctcaataaacaactagacctccaatctttcggtagaatatatgtttagtatatatagcaagcaatatgattgatccatgagagcttgcaaaccacacataggtgaatccacccctccagctggaatgaagaggacatcttgtgttattgttccttggaatagatgcctttgctcgtctaagaatttataaaagcatgattccatccaagcttaccacatttattctacttgtctcaataacagcaaccccagataattaataccagtactaagttatactagtggtacacagatggagacccctccccaatttcttaagagtaattaatcatccagtgataaaaagaaaactatgtacttccctctgttagattttctttatttggtacattcaagtcaaattaactttaatttgtatattttaatcaatagttagtttaattacatgtaattgtagtgtgtacatattataccaacagtttcatatttcaatatattggttcttacatttatcaggaatatatgttatgattaatcatgggtcaaattttagtcttgaagattttttttgaaaaacaaaacccatcctataaaaagtggaggtagtatatgaaaattaaaataataaagtcgtgatgtccctaagtaggagaatactaaaaaaaaattgaagaagctacatgtacatttattttattttaacaaaactctcacat

SEQ ID NO: 30647 - DNA, 1109 bp, Oryza sativa
tgcagtgtcataattgcaaatcccccagttatatatatgatcattggaaacacatgttaggtttagctcgacgttggttagtaatatattaccataaactcaactagccctgatgggctaattgatattttcctaatgtgtagtatagttatggtagaattatataaagttttcgactcgaaaaacttgcaataatttttttaggtattcccttgctttaagtataaattgattgcatgggactacctatttaatttaggttaagtttgctcggaaagatcggaactttaccctgacttcaattgagtttgcaggcatattagttttcctcctaatatagcatgggctcaagtcattgttgaccacacagaatatacgagcaaccagaaaagacgctccctctcaactcaaatgcgcatacaactaaacacaaaggaggctcaagttatcccttctctgatacgcagcttacacacgcatggttatattctccataaagcccagcacgcatgagacatattccatggaacaaattgggttttctgcatacataagccacacgggttttctgcatcctagaaaccaataatattggcgaatcatgtgctcgatcgaccacaaatccagcatccaatccacatgcaattccactcacacgcttaattaggccggctatactacatggatcggcgcatatgcgttccatgtgcagatgaaatgacatgatgcatgtacattgacatccaccaatggttaccatcaagtcaaccacaatatatatcatgcgtatataaattaaacagcttataaaccatacattatgtgtgtccgtcatggcctccttatgtggtggatatgtcaacaaggactgtagatgctttattaattgatttatcaattaattgttagtgcatttcaagagtcaactccataggtcgcatgcagcactagcaacagatatagctacttaacactatatcagagcatgcctccagccccaatcaatctctctatgatagtgtgaagcccaactccccaacaatttcattcacacgtgatacatatgcacacgcgtctaatttgacctgctcgatcgtctaaattttgga

SEQ ID NO: 30648 - DNA, 983 bp, Oryza sativa
atttccattagcaagaagacttaagtaaggggataacaactggactagtacgcatatctagtggttaattaccaaataattgttaaaataagtctattgtttcccaattggccattttttttgaaaacttgctatagttataatataattaaattgcatacaactatatattatagttatatatactatagttctttttaaaagtattttttttaaaaaaaaacttatgacagtgcaattaaacattgttaatccctccattctaaaatgtattgtatatcatagccttttacacgggctctagtgaggcaagcccatcgctgcgagagttcggtgactcgacctttcctcccccatcttccccctcttctataaggacatcagccagaaagctcgcgggggacaattatcgatggcactcatgacagcaacagggataggctagctcacaatgaagagattttgacactccaacctcctcgtcataaccctcctcacgacttcattcaccacctacaaatcttggtcgtggagggccctagagatggcccggttacaatgtgtcctccatatatccatggtagacaagtcagcagagccaccttcatccttcgcaaactcacgcgccacccttttatccttctttcgcagccactaagcttgcctggaaaaggaaagagatgtcggtgctgaggggaaatgtgatggatggtaggtaggtcttggtagcacacattaacttaggagagacaggaggggggggggtgagagacaagagaagagggagaggaagtcaacaacatgtgaatcctaacatcgaattatccatctttgttgacataagtgtgctaggttagaccgaaaccgcctagcttgggggttgagggtgtaatttgctccagtttaagggcgtgagggtgtcaaatgtctggtgttgtaatttaatattataaatcaaactattatagtagttgaggtgcact

SEQ ID NO: 30649 - DNA, 554 bp, Oryza sativa
ataaattgatctatatggtgacaccgtcgagattatttgtagaaagttccataaacaagaatgattattagttgatacacactatcagacaatgattatactaacaaccaaagcatagaggtagcggagaacaaatcatgttaacgattgctacaaggaaaagcaaagtgggtttaattttgcctttttgctggcctctcagcattttgtccagctatgaatccatctgcattagctgttttaggttttctattatatatattttacaaaaaacaattgatgaacatataattgggttgcgatctgtaaccataaacaggtgaaaatgtatacgtataaacccggagtaataagaaactgatatgtttttcccactatatacgtgtgcttatgtacacatggtgcaatactatatatcaacaacgagggctcacaatactgaccccaacaaaatgtaaaaaaatcagataatttctaccaattttgatcaaatttactgttttaaaattgattttattgaaagccgtttgaaatcaccctcgaaatctgacttc

SEQ ID NO: 30650 - DNA, 676 bp, Oryza sativa
  unsure (1)..(676): unsure at all n locations
acttagagcatcactagcagtacccctattccattcccaatcatgattttttaagattttagttgaaaaaaaacaatggccaacagntattgccctgaaaaanttggcaaggtggcgtggcggcgangangagangtgttagtcannctctcatccccgcgtatatcgagggctcgctcccaaaattagctcgcgcgccttctctatccatcgatctcccggcagtggatcttgtagaggggccacatcaaggagcgagcactattggggcagaagctcactattgttttcggttgttagttcagtatgggcctaccttttagtttttttgaattaaattaaggctctctcttggagagatgggttttttcactacctattttcagtttaggaaaccgaataattaaaaaaagaagtggattattcacattctgttggtgatgctcttagccctcctaaaattgaaatgtttaagtgaaactgataattggcctcaattcaaataaaaaaggaataaattttacaaaacactagattttggggcactcataacacaaaaccctaggtattaaggtttgtttcgaagaaccctaggttttgaggcaaaatgttccaataaacctcattattagagactttgtactgtgtttataaattacatgggagggatatgtgg

SEQ ID NO: 30651 - DNA, 507 bp, Oryza sativa
taaaagcacaaaattcattttaaccaattaaaaaaaaagaaaacaaataaaatcccctcccctgccttttgggcttggcccaagccttcccctcctctcccgtgggccgcgtgcctcctccctctctcggccggcccgcgccttgcgaaagtctgctttacgtcccccggttccctcctctctctccatccggccgacaggtgggaccgtggaccccacctgtcagctcctcctcctacctctcgccagccaaccccaaccgccattgccggccacgtcccgccaaatccggcgccctcccgctcgcgccttcgcgcccaaaccaagtaaaatcggttcctcaccacctcctccaccaaatccctcacttttccccaatttttggcgccaaatcgagcccccacttcgcccacgatgtcgcccacgtcgccggccgttgcccgctcaaatccgccacgttcgggcacgatttctccttcccaatcctataaaaacgatccctggagc

SEQ ID NO: 30652 - DNA, 753 bp, Oryza sativa
aatgacgacggccgcggcgggggcgacggatccgatgccgccgccgacggatccggcaccggtgacgacgatgggtggcgggggcgatggatccgccgccggcgacgacgctgggcgacgggggcgacggatccgccgccgacgacgacgccgagcggtgggggtgacggatccggtgccgccgccgacggatccagcgccggcgacggcggggggtggcgggagcgatggatccgccgccggcgacggcgtgcggcgtggatgcggcgctccggtggcgggctagggtttggtttggggttttttcgattttattttttttgtttgctcaatttattttcgcatgcggccggtataagcaaccgcatgcgaaaataggattttcgcatgcggttgcgccggccgcatgcaaaaagggtgatttttacagacgatttcgtccatgcggttggcacaaccgcatggaaagatggttctcagccgtatggaaaaaccatatctgtagtagtgatctacccagaatattatttaatagattattatgtctattttataaggaaggtagctcttcaacacccaccctcctccccatcctagtaaacttaaaagcaaatattttccatttgagataatccattatatgccactgactttgtcgcacatctacgatttaccactgactttgtcacgttctacaatatgccatcgacttttgcttaacttctacgatttaccatcgccgtccggttagcc

SEQ ID NO: 30653 - DNA, 698 bp, Oryza sativa
attatttttactatggacaaatgggatcttgtgaagtggattcagagaaccatctcaaaggatgccaacttcaaagcaacagtggttgtcagtatctatgctgggttgaactttccaaaggttttggctcagatatattcagggttgataaggttgccatttgattaattagcaggtccatcctgcaaatcatcaacaattggaatgttgtcttgctaaccattctatcattctttgccaaaaaaggaaaaagaaaaagagaagccattctatcatcagacaacacttgctcttctagatatgagatgcaaaaaattcagcttctgttcaactccattttgatttgtctaataaaatttctgtccctaatatagcgcgctatgagtctatcttgctatttcacgtcaaaataattttcagtccctaagaaaaccaggttacaaagtgtcaatggagttgatggataactaaaaaatccggttgtgccaatgcaagagttgtggtaagatgacatgaccatgaaacagaagaaatgtgattattcttatttttcacaacagcgatgcttatagtcataggtacaagttaagaaagtccaacagagtacaataatttgtgggacctaaagatgaatttcttatgtttggagacttacatgtcaattcctctaaggtttaaacttaccattctttttgtca

SEQ ID NO: 30654 - DNA, 557 bp, Oryza sativa
gctccaccacgtggtccagcgcccggtcccgcacccacggcacccgcgcctccaggagccccctcgccgggacgcgcagctccggccccggccgccgctgccgccgcggcagccgcggcaggagggcgcgcattttcgctgcggttttgcgagggttttgggtgcggcgtcggcggcggcgaagacgacgacgagatgagcggatcggacggtgggtgacgcgcctgccgcttttagccgccgcgatgggtttttgggccgcccggtggcccatgttttggcccaaaatggaagcggaaatgaggaacagaaacttcgccgtgttgctcgcgcgcgcgtccatcccatccactccatatgctcgaattcgcagcgattcatttcatttgggggaaatttctccaacgagaagctgtgggtgattaatggcgtcgccatgaatccgatcaaccatccaggagcaccattaatggcggctacgaggtattcgtgaggtacacgatgagatcttcctcctcttgttctttcaccggagacaccaatctctctccgaattg

SEQ ID NO: 30655 - DNA, 687 bp, Oryza sativa
ttccggaatagagtcatggagctgtctaacttcacgtctagttcatttttaaagagcacatcactcaatttcactctcattttggatggagtttaaaccgtttggttgggattccgtctaagaggaaatagagctgacgctgtgccaaacgggccttcaaaaaccactttgtgcgttgtccgtacttcaaaagggctctagttgactagttcagccctagtactcttaggggtagatgtgtacgtagtgtgcttcttgaaaaatggctcagttctttatggcctacgttgccagtaatgaatatcagaaaaatcactggacaaatccgtgcatgtgtcagttatacttgtttcgttgtaagtaatataatgctatttttatccggtctcaaacactagtaccacttgttattttcagagagaggcttgatggagatcattagttagtttagcagcaactggtacccacaagtcagcaactcgatcagcgacggccaacaagaaatcaagtcaactcatactttttttttcctcgaatacacaggaatcaacttacatttcatactttagcactccgtaaaacgttgttatatttaactccgggagggaaaatatctcgtgtggtaatatattcttcaggttgttttcagctggtgctgctcggtgtgacactgtcctatctgaagat

SEQ ID NO: 30656 - DNA, 1954 bp, Oryza sativa
  unsure (1)..(1954): unsure at all n locations
tcaacttttataaaaaaaatgcccttgtgttgcaacaggtgaagtctattttaatcttattattgttataaggtttagctgcttaaaacctaattctgaacaaacatgtaactatttcatttgacatttttaaagtaataagaaactcttacacttttaagcctttggtctttttaaagctatgagacactcttacattgattaaccaaagaggctagattggagtagcttattcagagatacaactctatataagccaaaaagtcggcttaaaaatttaagccaataagcctatgcattgtcacatccggaaaaattttctaatcaaaattccaaacgcttacatgtgtgtaaaccctcgtccacgaatcagccgacgcacacaataacaaattgataatagagtacaattattactctaattaataagcgaataaaatgttattacagaggtagatagttcctctgtcacgcccggaatttctatccaaaattccaaacgcttacatgtgtgtaaaccctcgtccaggaatcagccgaggcacataataacaaattgataatagagtacaattattactctaattaataagcgaataaaatgtcattacagaggtagatagttcctctcaatcaataaagttctgagcagtggaaaaaaaaaagaaatagcgcaggcgactcctctccataggcagcttgaccagggctacgcctaatcatccacaccatcagcatcactgtagaactcctcctctgatgaatgattgcaaggtgagtatatgacatactcagcaagccacgcagcaaatatgcaagtgcacaggataacaaaggatggcatagtatagtctcatttgcataaatagcatttaataaatatttcagagtttaataaaacagcagagtagagtattaatttaacaatattaatccaacgctatacagcataccctgttgcataggcccaaccgttctgaacaaccaatcccagttgcacagttctatctccaaaccaggaattaaccattccaaaccaggagctaaacaagttattaccaagtacagncatcagtgttacttatggnntgagaatgtggtgcaaactcaatcacagaaagacattgttagacccgcccataaccgcgggcacggctatttgaatagttcaaactctggccagaggtgtaccactgtacccacaaggcacaacctcaacatcatgtcaaccatgcgtcgcgatacttgacaagtacccgaatagagattgtgacaataccctctatataatataattcaaagcagtgcactgttcccggatcataatcacccccttataaacaaggtatggactccccagcgacccccgttggcttatctccgccacttcacagtctggtgctctacgatgaaccatactatacagaaagtaaagccgttgcccacgctggcttgtggttggcatggtaaatgtttcacaaccgaaaatcgtgaaccggtccttaattgtcatgagcacgaccatcaaaaccatatgctcacaacccaccattatcaggttttagttggcaaattaattacttaaccaatcatgattaaccatcatgatctatcattaagttatcattaaataatagtgaagcataagttattctagtagtgtgctaatgtttctaagcatggctaagcaatcatatctaatatctagctgaactaatatgtaaagctcaactagtcaaattataataacccacggtatcaaagaataaagtaatcaagaacaaaaagggctataacaaaacaataggttatttccacccaatgacattcaaaaatatatgcagtagttgaatagaaacaatagctttaaacaggatcaacatgctcaaagggttgtttgggatctgtgtgacttgtcttgctggccttggaactcttcaaactcttctcctgc

SEQ ID NO: 30657 - DNA, 726 bp, Oryza sativa
  unsure (1)..(726): unsure at all n locations
atccgtttcttgataggtaagttatcttttaaaaatttgttcaaaccagtaaatttaattgtgtaatgcaagggtagctaactattcaatttccttaggaatttgtcaggtttttttgttcacctcttcatgtgtatatggaaaaaaatgaagaactgcatttactagctattaatgtaagccctgacaagcattgatcattcatatattatattttataattacaaatatttaacttataaataaatgtgcaggatggtgatgagctaagataatttttttttgctaaatctactgatgtaccaacaaaatgaatgtgaaaacaacatccctagcggcgcacgagattttcttaagtgtatcacaaatgcacaacattagggtagttctttacctatatggagtaatttaatttgaggtgatcatccttaggaanaccatatatatatatatatattatatatcctatcaattatagagagccaaatattaccagttcattgaaaaggtaattattcactatttttgtaataaagttatcactatcttcgtctactccattgacctcagcccctttcagcaagtcagaaagaaatgggttttcataatacactttcctatcggtatttgcttgctccctcatacaatgtatgtatgcactgatgatctattgattcaataaaaatctataattactaaagaatatcttggcaattaaattctaac

SEQ ID NO: 30658 - DNA, 692 bp, Oryza sativa
ttttactagcgttcttccttgtactatatgtagaacatctttgtggtccagcaaagagtaccggccggtactggtaccgctcggtaccagtacacatctggccgttcattcctgtatgggtaggatggggaatagaaattcgctcggcgctcgctcggtccttctccttccacagccgcgcctgcgccctcaatccatcgtccccaacgcgcttctttcggccccacacactttccttcgcagcccaacgccggaaattgattaatgttcgaattgctatggagagatttctttagtaaaattgatttctccttctccgccgctgcccaacgccgcccaaccctaaccccccatatcatcgtctgcgtcgtccttcgtcgctcctcggcgcaagggttcaactcgaactcgcggcgcaggagcatgtacacggcgacagcagcgcagaggataacggcggcggtggcggcagagcaacatgggagtgaaaggcaaggagagcaaatactagggttcgagcgagctgccagccccgatccatccctcctgatccatccagcagcaacgcgaagttacaataatacccttccaaccaatttgtctaggcggtaccgcatcagggacattcttggtaccgggcgttaccaaacaatcccagccgttggatcaggccagatccaatggccaacatt

SEQ ID NO: 30659 - DNA, 578 bp, Oryza sativa
aatgcgcctacatgtgaagcatgacaaacagtgttgtccatgtaactaaagggaccaccaaacagtgtttggacccaaaaacatctgggaatcaaagttattaccctctttagttcatgcaacattcatatgcaaatccatctagttcatgcaagattttctcacaaatcaattgcagaagaaacctcaattctttcaaaaatatgtgtagcaatcaagcaatagcaaactgctcactaaccatcactccatcagagaacttgctattactcctttctataaaaagctggagatttctcttggtaaaaaaagggtaacaatcaatcagactgtgaaatgatgccttgaaaattctttgagatttcagatttgcaagctagagaaaataggagataatccaataattcccttgtgtttacagatccaacccagctatacatgcatgccaaaattcttcatttcaattaatcacctttttgatttacttatgcaaagaagaaaacaaaattcacataaacttattattattatctgacaaagatgaaaaaaaaaagaagcaaagaacctcacctgaaaac

SEQ ID NO: 30660 - DNA, 608 bp, Oryza sativa
agcagcaccatcccgccctcaaggggccggtctgaccgcgcatgtgccgccggtcagaccggccttatgcgccggtcagaccgccttcttgcggccggtcagaccggctagggcacgccggtcagaccgccactatgtggccggtctgaccgctcctggtcaggccgaacccagtgaagtgtgtgtgtgtgtgtgtgtgtgtgtaaaatgtgagcacaagtctaaatgcataatgacctaatgtggcaattaaaatcatctctttgctaggtcattacccctcttaatagtacggcgaaactaaaaataaactagcaaatttgatcgccctacacctcgatcaattctaaattaaagcgctagttttaccgtcttctttccctttgctttgcgccgtcaattttaatccatcgataaccatccatgcgcacgtatgacgtggacctaacttaaaatgtatagctcaaagacaacggttagtccacaattagcgcttgtcattagttaccaaaattaacaccgggggcctagatgcttcaatctctccctttttggtaattgatgacaaacaccacaaatatatataatcaaacatagagcacatggac

SEQ ID NO: 30661 - DNA, 620 bp, Oryza sativa
ttattggttgctacgtgctgattgtctgtaaacttatatggatgtcgtgcagttgctggaaacacaggattatctcctctatttccatgcttatacggtctgtttggttggagagagtttctaggagggattgggagtttaaaaggatgaggctattaactgttttgtttggttgggggacatgggaattttggtgggatggggatggggaattgaggaatgaactccctccttttcaatacctgggtaggggcaggtaattaggagggaattcctcctttacttcgcctaaacaaatctcaaccatccattttcattaatgatctaatctccaactaaactccctatcaatttccaccacctctaccaaacaagagactgagatgaaaaatcaaattcccatcttaatctcaccatcaattttctcgtgtaaactcccaatcctcttccctcaagttgccaaacaagccgataaggttatgtaccattaccaactgtggtacacctgtcaatgcaacctttctaagtatctacctctgctctggttctggccagaatttggcccttaaatttggggtttcccatatttaaaaaattttttgggggaaaaaaaaaaaaaa

SEQ ID NO: 30662 - DNA, 3881 bp, Oryza sativa
cggcaccatttaggatttctgtagtagtggaggcactgcagcgggccatgaatgcatggccagcatatcaaggtcaccacgaacctgagcaccggccgagcctcgcgccacctaactccggcggtagcaacaaggtgcgggcgttgcacgcagcgttggcaaagacagcggtgcaagtccggcaaccacggcgagcttagcacaaggtcgaccggcggcacaccaagcatgacgatgagcagcggggcgacaaaggtggcctgttgaaactaactgaggtgtttaacaaaattcatgacggatggcattgttctaattttgaaatagtacagtggcatccacccaatttcacgaacagtaatgacgtattcttaattgaacaaatttgcaatggcatccatcaaattaaccctatcaataataaagagccaacttaagagactattctttgtatgagtgctgtttttctctgatgtgaagtatttgagagcccctctacctttaaacatgtcctaaatactgaatcacaacttcacaagtttctaaaaaaaaaagttaagcaattctaggaatgtgccatatgatcgatgtggactagagagcttccagccctgtcctttcttaaatatttgaaagtatgtgaggcttttgtaaaacacttgctcccaagtctaataattaaatagtttctgtggggtataagaaaactgtataatattacttttataactattaagaaagcaacatgtttgtcgtttagaaagcaatcatttaattttaagtagcaaaggtttctttcaactggagttagttggagcacggtgtatgtctcgaattgtaccatgcctgtacacgtgctctttcgaaacatcaacattttggaattatgagcattaattaatttttcaggtgtgtacaatatgaggtactgcaacttcataattagcactaattaaaatatcagtgttaattaatcgcgagtctcggttaactaacgtacgctagtggtgcactacagtaggaaaaaaaaaatctaatcttggatagcatagaccttgtgaaaaattaattccatcgctagctcttcaaaaatcggtgctcatgatattatatataccaaaacgctgttgataatatatttagtcattttttggtgtgtatttttttaaagaaaatctaacatgtatatcacgatccttcttgatctgcatcttgtataatcatacaaatttaaattgaaaatatggacgctgtctaaactgaaattaaactgaaaacatgcatgcatataattataattaataagcagtgccttctttttatagaacaccatcgtttaatatattccacaaagaacatagtaaatacaaatactcgtacattaatttctttgtggaatatattttgagttgaaactgtcgatgatctgtgcatatatacatcagtcgctttaattaaacttttttagattcaaataaatttatacaaaaatatgacaatctttttagaaaaacaaacatattatcaaaatttaatcataaacatatattataggttagttttaatggaactaatttagtgttatagccattgttaaaaatttattaaaatcgatcaaacataagaaaaggttataaaaaaaaatcaattgaagcgatttataatatgaaacaaagagatgatattaattgcatatctcatactccatccatccgttctaaaatataactatttttagcatagtgtcaagtcaaatatttgcacttggactattaatagcaaaaaaaaaaaagatcaatcacctaaaattgagttactagatttattattaaacaaactattattgtatgcaactctttttatttaaaatatcttacttttatagatatcattagtcaaagtagcatttcgaagaccatgtcaaaatccaaaaatgtttatattttagaacggagagaatacttctttttctgcaatgtaaaatgatcattcaagtgcatatatcgatctttgtgtgctatgggatcgagtacgatcgaggtactcaaatgggcagcaggtctactatgtttttggatcagttcgatcgattgccctggtcggacggttgtgagtgacatataaaacctgcaagttttcaacgacattctcacgtgtgcatctggagatcacttacacgagcaagcaatatatataactatgctcctacaattattgcaaacatatgtgcgtgcacacacatatatatatatcctgccgatcagggaatcaacattatcatatgtgtatgattggtcgttggtttttctctatatatttgtcggcaggtgtggggatatatatccaatggattaattcatcgagtaaactagaattaaccatgcattgcatgcatcttaattttaattacttgcattgcattgtatataataattgggtcttcaaatactaccttattactccctccatccgtgaatataagggattttgactttttacttgcactatttgaccattcgtcttattcaaaaatttttgaaattattattatttttatttgtgacttactttattatccaaagtactttaagcataacttttagttttttatatttgcacatttttttgaataagacgagtggtcaaaccgttacacgtgaatagtgaaaatcccttatattttcggatggagggaatactagctagtgacagagtcattggtgggggcaacttgtcagtgactctgccctgtgggccggtcgagccagcccagttgggtgatgcatgcattgggcccatgacacaattaatacgtacgtacaacacagtacgtactccactatactcaaatgggccgggaccaactccatatctgtaacccactttaatttaattcagatttataggaccgcaagttattgatccattcactgttaaatataatccttgtcgatcttgaaaaggaaataacaataattaatggtacggttattaattatcttgtgcgtgatgattgcttttttggagtgaaacaacaaggctgaattgggcaataagctagctcgatggtagtttagctgctacaggattgcaaattgacaatctatagctgctacaggattgcaattgacaatatatagtaatccctccgttttgaaatgtttaacaccgttaactttttagcacatgtttaaccgttcatcttatttaaaaaaaattataaaatatataaaactatatgtgtacatgaaagcatatttaacaatgaattaaatgatatgaaaagaataaataattacttaaatcttttgaataagatgaatggtcaaacacgtactaaaaagtcaacggtgtcaaatattttgaaacggagggagtaagaaagaagaagcgacagatcgatatatatcgatcgatggctacagtttataatgtgcagatttatcgctgataataatagagggaggcaaagagagacgatcgatcaaccttagcttttccttttccacaaacactggggaccagaaggaatgcacaatgcatgcattgctttctttgttcttcaagcaatcatcgtatcatctctttacaatgatcgatccatcgatcaatcaatatgtagtgtgcacaatgctcaccacatagtgacaggagattattctaaagaacacggaatgacgccctttttttttttgccaagccagcctatatatatatatatatatacactggtggagaaaggggctttactcccggttcgtaacccccctatagtcccggttttcaaaccgggactaccaatccgggactaaagatcactatctttagtcccgggtgaaaaaaccgggagtaaaaatccatttttagtcccggttggtgtt

SEQ ID NO: 30663 - DNA, 711 bp, Oryza sativa
tcgaattcctgcaccccgtatgcttattaattactaaaactaagctagaatatatgtatgtagctttttgtcatttacattgatctcaaatatataggaaaataatatatatatatatatatatatatatatatatatatatatatatatatatatatatatatatatatatatatatataggggggatattatataaaaaagtggcgcatatatgagggcgactgagaccccctcagctcagctagagaggagtagtatatgagttgagctgagcaaatcaaaatggcccccatgaaacactctagatcactctgtgggatatcttcacactctagcacgctctatctctgtgaaaggagcacaaggtgaaggtgaaaaaaacacaagagccgcgcgtttgagtgggccctctcagccctctttgactacaccctctaatttgtggtcgcaattaacatggcaatcctattgccacgccgcactacgcgtgctatacaccgcagagacatacacatatacgcgatgtgcaaaatgtgcgcgtgattaaaattaatagggcgtatgcgaaatagactacacatttgtgaatagaccccatgcgatatatgtggggtcgcgtgtgtgaaatacttgcgtatatctcactcagagacgaaatcgcgcgctagctcgctcagctatagctcctaatatatgtctgagcctcagg

SEQ ID NO: 30664 - DNA, 2199 bp, Oryza sativa
aaaaaaacaggaacagtagctgaaaagaaattaatcatgtctgctaggctgtgcagtgtctgaaatctttccactaccaggatttcagcaacactgaaatcaaagcagagaaaattacaaaatactgatactgtatcactgtaataacaaagcaagggccatgactacaacaatagtagtgtgattgtgagtacagtgtggtcactggtcaggcaggctacacagacaaaggactcaaggacatgggcccggcctgcactactactctagctgaatgagacgtctccatctcacagaaccggcccagcccatcacatgcatgctatagtgctatactgcacactcaatgattagaaaagatcttgctactttgtactatgcctctaatatttacatatgaaataaagctggtaaagtagaataattttcacagaagatactgcggacttgctccaccccttctggtttgggtgatcaaagaatcttgttttgttatttgtaacatcatattaatatattatcactgatatatactagagagtagagattaggttgaatttgtgccattcaaactgttaaaaagaaggtgaatatgttctataagttttaaggaggcagaaaacaaaattgtagttgttaattctgtcacggttaacatgttaaaaattttgagcaattgtcatttgagacaagacgatctttgaattggagatgtgcctgcaggaagaacagacaaaagggaaaaaaaagttaaggaagagacaggtgatgctcatccagtctaatcatgtctactaagaatcatgtccagggaacagatgagctagcatcaagttctcccaagcacctctcttccacccaagaggccaagacaattatgcagattaacttacacacttcatctctcatctcagaaaacaaatttaatcagacgcttgaacctagtgaaacaaaagatattgcctagttgcaaggaaacatgaagtcccacatcttttcacttatgattatacttattagccaaaatttgaattttcgaccataaatttagagttgattttggggttttttcatcaaagtttatttttcagcctttgcttttagatcgctaagaatacgtatataaaagttttattcacaaactacttttcatttgcaaatatgccatttcagttattcccccgaataagtgaaacgataggtccggaaaatttctgaaaacaaaacaaagtccaaggaaaatcctgctactcatcatataatcttttagataatggattaaaccggtctctacatccaaacgaatgtacacagccaagctactcatcatatacaatccattgatcctctcttccagacagaagttttattttattattttttttaacaaatataaaactaatgcattataagtcccactggccaaaagcgtaacattacgaggttaagtgttagacttggtcatacacatacaactcgacccagttagagcctagagatgatttcatgaatattaacaattatacacttgcgtgtaatatcaaattatgtaaaactaatgtatggctcatggatcaagatcaaagaagaacatcaggaaattcagctactaagattcacatatgcctgaaaaaatacaccaacaccaaatcgggtatgacttgcaagaaacaaccagtaactttgtagtatgcatcctccacaagatgaataaaataaccacacataaaaattaaatcctatttatgaaagtattaagatcgatctacgagtctttagtccaacttgatgaataggaaattaacaatattgcaactagcgatataatttaatctattgagcaactgaaaaaaaaaattaagggggctatgagtttggagtgttatactgttatgttctgaattggacattgcacgttgtactcttttctatttccatgtggtttgttttgttcagttttacatatggatatgtcatagggtggaacttcaccccccctaattttttagcggttcttttcaaaaattgtggggagaggactgatctaagaataattaatagagtgaataaatgtatgcttcttgctgttctatgctggcaatgatggctaaactgagaaatggcatggtttccagagatgatataaattgcttttgacccccattaactatgatgttttggataacatttgttatgcta

SEQ ID NO: 30665 - DNA, 979 bp, Oryza sativa
  unsure (1)..(979): unsure at all n locations
ccaggaaaaagttcttttgttaataaaacaaagagaggtccttttttaaattaaatatccctcccactatgtgggacaagaaggataaggtttctacaggtgagcaccggaatccacacaactaaggatggtattggacgctaaaaaactggatctcttgagtgtcacaaaagttggttggatcatttaatttcttgggatgaaattgacaacttttttgtgtgctaatgggggacgcctcgcgaatgcataaggaccatatccggttgatccctatgaatagggaatggaggggatatattcttcaccacaagtgggtggaattattccccctcaattccctccaatcctcttcaatccccttcaaaccgaacaaggcctaagaataaggaatctatagacttcttaggattatctatgaagtcaaaccaaaatgttatgatcaaagctttgcaaacaaaatactattatatttcagaacgaccccatatcgaatattaatggtggatactgtgtgaatgcgtgataacttcactaacatttagcgatactggactaaacccaacaacaaaccctgtaagctagttatttaatttagcgaaagagcaactatgctcacggaaaaggacaaaggatgagagagatgacaaagaagggcatgaaaggaaagagagaatgagagagaggtgagagggatatatagattgagcctagggatgtgtgaaattaaaggctgcagggccttcacgaggggtggcacagctagcaagctgcagtatctccttctctcgctacttcacttctctcttctctactcgtttctttctccttgacactagtagagcagagagaagcagagcaggaagaagcaggagatagagagtatgtacatacactagtagctagtataggacatcgatcatcaatggaggggctgatgaactactgtcccatctagtggtccaattaaagncccacg

SEQ ID NO: 30666 - DNA, 821 bp, Oryza sativa
  unsure (1)..(821): unsure at all n locations
cgccctaacacgcaattaaagagatacatacaagcgtcgactttacagcgcttgtttancagnctgtgttnatcctcaatatttataccccctcnnccncnacgcaggcgacattgatgattgcnctgcacnnacnacannagcangaaaaaagcagctagcataangnaagaaaacgaagagncacaacanacgngcatnaattaacnatnaanccacgcacgacaangagggagggggcaggacaacccagcaaaacaaaggcggcaggcagcagaaaacaaaaccacgcgcgcgcggaaaacacccgngaacacgnacgnaggcgggaaagaagaaggaaaacgcaacaaaaaaaacggagcacccaacnaaggggaacgggccgaaacaaaagcgggagcaacgaagaccagcggcnaaaaaacaacgcactaactataataaacatgctaagtggactagctagctaagctaagctaatacagtacttctttcccacttgaccaccttagcttcctcctactttctcatactaagaaagaattcagaggcaaatttctcagccacctcgcctatatatacattccatgcctagcttaattccatcatccatcattacacaagtcactgaccagcagcgcaggctcattactcacgaagcatcaggtagctagcttaacttggacactacaccttcatagaacttagttaaataggttaaaatatacaagtggtcaaaggaagaactggaccaaaggcaatatcaaaggggcccgcgagaataaaggcgatcctccttccggcgctttttaatgccc

SEQ ID NO: 30667 - DNA, 1440 bp, Oryza sativa
tttggcattattttgccatggggatcaaatcatgaatgtgtgtattattgcagaaagcatgaatgccatcagaagtcaggcaaaattattttttacacatcttactaattcagatgcagcaaacactccctcaatagatgtttatcaaacacaaattatttcctacaaaaatgactggacatgctaaggacatatgtgaagccaattgagtctgtctagggtgtaaccactagagcatcctgcaagatttctatggaacctcagtggaccaacaaattctactaattgacagcaatgcaacaatgtggcattggcatctaaggtcgcctgtaaggttagcaatatcaattcattagttccattgaagaagggagttgctgttagtcttaacctgaacgaaaggtctcatctttttcctacatttcaaggatctaattgcactatctcaggttttgagaataagactccagctatgtttatgctgatttactaagaaagccaggacattacagataaatggtttcttaaaaaacacaatttttcaataacaatgactttcacaagatctgcattttagtgatattaatggatactaacatatatattgcatccacaggaaaaatcttccctaaagctactgaaagaaaaactgggctgtatggctgccgagaaacaaactgatacttgggaatagttcactcttgtttaaactatcttgttccatttaaatcattttgttcttacaggttattgcccttcactgcagactttgcttgctttgcaatcaaaagtggagcgatagactcaaacaaaacttatgatgataactatcaggctgccattatgtgttatctgtcaacatctgagtttcgggctgtgttgtttggtgccttcaaacaatgatcactaaaggtggatatgatctggtacctgttaatttgattcctgaagacacaaattcttatggtggagttaattaagcctcagtgaatgttgtcaggaggctggtaagaaccttgtcatccttttcgttaatgggaagggatggtcccaatacctccagagaattctggcatcattgatcttaagagactattcaacttttaaaaagatataatgccaggccaggcaaggcaagatctgcctttattttccttgctcagattggttgctttgatatacaaacaaacaaaacgttatcaatcatccgactttcattattgagttgatatttattgcatcgcaaatgatttcagcagcgcggctcagcgccagcacagacagagttgctgttgatactcttctatagaccataactagactgagagaatgtcactcagatgaggtaaataggcgtgtgtttggttctgggactaggtgggataggatgaaaccatctctgatttgaggattgggatgattccattcgggtgtttggtt

SEQ ID NO: 30668 - DNA, 1650 bp, Oryza sativa
tcatgagctgctgccgtcctatgtacgtacttgtatattttcttcctataccatacgacttattaattagagtttcatccgtatgtaacaaatattcattctactcgatggatcgatcggcagcataatgtaaaattgaattaaacgtgcccaagatcgatgatgacggacaacaggaagaagaggagaaacagaattaagcagagcagagtgctctgttaagttgcctttatcctgtctgtcctcaatctgcgtttcaacaaactctatcgcctaccttgtactccaattgatggcaacaaatttaagctgatgattcatatatgaacctaaatcaattagttattaacaacattaattagaataagatctgaagaagaagaagaagaagaggaggaggagggaggacaaaaattcaaaggtgggcaggagaacgagagatttgtctgtctgtccatcgatgcaagttcccatggctgtgggcatgaatttgcaagcaagcaaggaatgatgggtttccttgtacccgtacaaatctctctggcaatggctatggctatggcttcttccatcttttgaggaggcggcttcctccgcttgctcatccctctcaaccgggcctccgaaccacccaacaatcattcctcatatatgcccgtgcccacccctcttctttcaaggacctcaactactctcaaatcatccaatttctgattcctccattacaaacttcaccttgtaccatcctacttcatatttgttttttccgacaagtattatccagtactaatacttttaaacttggatgagttgatatgttttcttaattatttgcattggttcgatatatgtaaatcatacaggagcatgtacaatttgtcctaaagaaatgctacatgttcttttattttgaatagccgaatggttgaatagctgagtgaatttgtgatgattattcaaatgtacaaatgaatctattaagtagtacaaaattgaaaaaatgatttaaaaccatttttttaggaaatccatattaaaaagtttttacagaaatcgcaacgtttagaaactccagaagtatacaagtttatccacattctattcctcggaaaagaagtatacaaatttatccgcattctattcctcggaaaagaatgctcttattgaagttttatttggaaagccgtatcaatgtctaaaatggagggagggaggacggatgattcttatgaaagcacaatgccgttaaatcctgaaaaatttgctcccatgggaagtcaaacccaggatctaaggtgctattgagactcctgtaactactaggttacaggccctttcgcaaactcgactatccttagttgaatactctccacaaaattcgatctaaaatttaaaattatgacaatcaattttatattaaaataagttgataggtctggtaagtttataacattatgatagttaaatttttaggcaaattatttattttgtctttaaacgcttgtcaaaattttaaaaagcttaaccaaatcttattctgaacatgatggtgtatttcttttactagcctgaaggaagtagtttttttttaggattcttgttgaattggctccacaaacgagacaaagtatgttaatatcattacaatta

SEQ ID NO: 30669 - DNA, 765 bp, Oryza sativa
  unsure (1)..(765): unsure at all n locations
cgtgttcattgacttacacatgctcagtagttcatcacctagttacaacttactccctattgccacctgatcccatgcatcatctaccgattctgcaataaattccaccacatctctctctctctcttccttctcccaacaacacatcgagtaccaggacaacaacaagcagctaggttgaatagtctcattgcggttatgaaagggcaagtgaccttgcgtagtttttgggtgagaaagactcttttgtgatcgtacatttcatcaataaagaatatacattggattatatttttcacaattgattaatatatactccctccgtttcgaaattgagggaatnctgccgtttttttagtttaaattaaggaagtagtggtagctgaaatcttttagatcgatccaagttgtgaggcggagcataaaatactatgtttgaaacgtaaaaactctatttataaaaatttacagatgaaaattccttgtattatgggacggagggaagtagtcgttcatgaccactggttgatcatcgcatgagaagcctatttgatggttgagacgtgaaatctttggtcatttcaaagatctgtggtattgataatttgtcggccattggtaatttggctattttataatgcattcatggtgaacagtcttaattagtggatataatttcgaatttttaatccagaactttgagtaaaccctcaagtgtaaaactggcctctttccttggaattgatttccgccccgaacattgtg

SEQ ID NO: 30670 - DNA, 1556 bp, Oryza sativa
  unsure (1)..(1556): unsure at all n locations
cgtaggtggacnnctcctataaacnncaccacaggtacacattggctgcagcaggaaacctacgaaatcaatgcttgcattcgttacacactcatcacacatgtgctacatgttcacacaacacacaaagagagagagagagagagagagagagagagagagagagagagagagagagagagagagagagagaggtgcatcaccttcatgtaggatgtctagaatttcatctagcatgtctagaagaaacatgcatgggagcttgagcacaagaactcccatttaattctggcagatagttatcagtcaagtgcaattaacatagtactagaagttggactccatgtctccatgtcaaaataggtagatgcatatgcacctgcagttcactagctggtaataattattagctactagtaattaattaatcaagttaacatgtgtttgttgtcatggaggagggagcatgagctaatatgtcccatattacccctatttgcttattctccttccttgttctccccaaaattattatatacccaaagattttcttcttcttaatttgctcctgtgcgcgcccaatcactggcttccagcaagtagtacccatcggtagcgatgcaagtggggcaggcaatgattctttccctccctaattctagttaactctttttccaaattttgtactagctagccaataggaaataaattatgaagcatgtttttatgccggtagcgggattgccgacttgcatccttagccacaggagatggcccaacagccactatgtatagctagcattcatgccatgtccaacttgtgagaagaagggggtgaaataaaaggaagaatttggaacaccaatttaaggtttcagtgcacacttgtgatggtatatatactcctttagttccttttttacttcttgcatcaacaacactatgtaacgaatttttaatatactaaatattttgtatgtaatagagtgaagattttgagggttggttgcacgctttctaattaaatgaatagagtgtgcataaggggaaaaaatgatctagagcaataaataaaagtcacaaatcataaacgcgcagattaaggacaccacggaaaatcattaaggccttattcggttaatccccatgatggagggattggaggggatttattccacacctattgtggtgtggaattattccccctcaattccctccaatcctcttcaatccccttcaaaccgaacaaggcctaagaataaggaatctatagacttcttaggattatctatgaagtcaaaccaaaatgttatgatcaaagctttgcaaacaaaatactattatattttagaacgaccccatatcgaatattaatggtggatactgtgtgaatgcctgataacttcactaacatttagcgatactggactaaacccaacaacaaaccctgttagctagttatttaatttagccaaagagcaactatgctcacggaaaaagacaaaggatgaaagaaattacaaatatggccttaaaggaaagagagaatgatatag

SEQ ID NO: 30671 - DNA, 718 bp, Oryza sativa
  unsure (1)..(718): unsure at all n locations
tgctgtanagtgatcgactgttatgcagtagttcatcagtatggaaattgatgctggttccagcaaagctaagataaaagccagttctgcagccgttgaagtgacaccatcaccaccagtgctggcccagaacaatatattgagtaagcttaagattagttactccactagtttcctacctcatgaatttcgacatctgcagtgatccgcaaatagtggaaagtgcttttagtttactcagtaaataaatttagtttgtggctgtatctgcttcttggatgtgctcgctatctttgtttacttttttttccctcaagacactttccttacacgatttattaattggaaactcacagtgacaaaggacgttgctgaaggaaatgcgacaagtgaaaatgacaggccttcagcggtggacaatatggaagttgatgttggtgaaaacaaagctaaggttaaaaagaaccaggcttacctgtcggagcgatttgatcacgatgacctcgtcaattacaggatatatcggcagcgttgttttaaaggtgctcgtaggattaggatatgtgtgtttgtatttataaagatgagtatatgtgtctgtaccgcgtgtgttttttttttttttttttaaaaaaaaaacaggttcaagttagggtcaatggggtccgaccgaaccgtgccagattatatggacattggtcaatcaaggccctattcg

SEQ ID NO: 30672 - DNA, 3848 bp, Oryza sativa
tggagctgaggaagagatagagaagctgacaggccagaagtaagaattaaagatgcatggcatgcattttaattttatcgatatatatatcctttgttgtttcatatatatgtccgtcctaattgcaagggactccctccgtcccaaaaaaaggcaaaccgtggattgtcgtgccaatgtttgactattcgtcttatatgaaatttttttataattagtatttttattgttgttagatgataaaatatgattaatactttatgcgtgacttatctttttaatttttttcataattttttcaaataagacagacgtacgttggacacagaaaccagggtttgtttttttgggacggagggagtagtagctgctactactgtcagtcagtccggccggcgatgcatgcacatatatacgcatggtggagttagctttgtgatgagaaactttggaggtttccctgtaggttgcggcagctttattaacattctcttgtattcatgtactcgatcgtctagctagctgttagtctgttactgcatgctgatacaaaaatatgtgtatacatgatgtgcaacttctacatctacacatacatactccctccgtccccaaaaaataccaagctagacattgattagacataatctaggacaacgaatctggacagcatgtacatattcgttgcttaggtatgtcccatccatttataaattgtttttctttttagacagatgaagtacatatttatggggtaatttattagtactacaaatttagataaaacccacattatcgtaaaactataaatttaaaggtgggttcatcaaaaacctacacatagatattataaagctatatatattttactctctctgatcataataaatatttgatatttagaacaaaagattgattgagactttaaaatcaaaaccaccaataattctttaaatgcttagggcaaaaaaggtatatatataggtaggcttgtcttaaaaagtactatcacaatatcgtcaacttattagattttataaaaaaattaatataaaattgatggttggaattttaaaagtttatgagtactaatttatatataactcatgatcatcaggtgacgctttggtgtgacgttctatgtattattatatagggtaattctaccttccacttcaggcaatgattcataagaaagttttctgggattgattaaataattaagttgtatatcataattaattagcttttgcaagcagcatgtttgacctatggaaagtgcctgtataataataatattgtacttacagtaaagctagctcttttaattattttaccctgcatctgctaaactaattaaaaatcagctggaatgcatagcaagtggcatgtgtagggtgagttggttggcaaggatgcattcatgtcaggaggaaagacaagcttgcttcaaatgttagtgcatggcagccaactcgatgatgtcctcttaattaaaactttgctcccagctgaaataatatatatcaataatatcttcttctgtcctagtaaacaatatactgtctttctgcttcctcactctatattttatgcatgcatgtgcagagatatccacacaaatctgagctagctgcccatgtatagacatgtatatacagtcttgcatgcacaatctagcagcttatagctagctggacatacacatataatactacatgctgggtgccatgtgatgccccttaacttgattggaattgtttcctagattccaacttgcaatgcaacgcggccgctttttttttaaaaaaaaaaatcaatacatactactcaacaaaaagatagaaaaaaaaggaatataccacacatttgggtttgggtgtaacatgtacaatcacaatgtggatacaaattttattctgtccatctaggtatggacatgtagcaacatttttgctatgtgtaccattcattcatgatcgatctgcattgacaaaaattgaatgaagcagttcagtatgtgaccataaatggacctattcagatccagctttctacaagctgaagctgagaaagtaaaaaagaagagcgaaagaaaaggaagtcttggctagggcatatgcatgcagctagggttccacactggccgaactactttaatttgctcaaaagaactattcgccttaaaagaggcaaatatatatgaatattttaggaaccccctcttttagagaaagctcgatcatttgcagtgtcaaagtaaagcatatagggagcctcttgatgcgaaagcatgcatgcttgattaagtaccctccgatagctcggtccctaaagctttctaaccttcgcgtttctaaatagccgccaacaaaatatatgtatgcttgacgactagtttcaaccaccaagacaaggagtaaacttggcagctattttttactgtcaaagaaatcagctggccgccaagaaaattctggactatatagtgattgccagacatgcatgctgattgggtatagtactcatcaattgtgcatgcattattagccaaaaggaaacaagttccaaataaaatttggggggataatttatttttgaatgctaaaaatatctttttcctgcgtacagtgcagatggagtacttaatttatataaccaaaactaatacaagatcgatcgagccactaattaattactagaacacagtaaatagccttgtgtattaatgctagctcctgaactgaagctactcgatcgttaagatcagctgtgaattcaaggacatgatacgcatcagttattatgttcaagtgaagctgtcctgttgacttgactacaccttcgtacagatcagtgtatacaggtttcaagaagattaaattaatgaaccgatcgatgcagcagagaggcagtaattttctatgtgcatatgcatatgcatgccaagatcgataatactagtatatgcatgcattgtctgagcttagagaactgaggtgtgatggccacgtttgtcttgattccaaattgctccacactttgaaattacatttttgtaggtactacctgcatctctgcaggataatattcttaactaatttaattaatactttggttcaaaaggccaagtagatagctagcccagcaggttgatattatacagttgatcaaaagcatatcaatctttacacatttcttttcaccttaacaaagcctagcttaattgagtatctatatatctagcagcttgttatattttttttatctaatccttgttttcagctgaggaaacagcagcatatacacatgtatgtagtagaaagcaaagtaaggaagagatacatatataggttcttgtcggacaatatgcagctgctagtgttggatcgagatgcagaggcagcatgcatgatacagggaatgggtaagaatctctgctcacacatgacagtgtccatagaacgacagaatctatcaacacaagctacaaaatgaaattaattatctactagtaccattaattaggagtagttaacaatgcatacaagaagacattgatgaataattaaatggtcatttacatgcattgttcattgcactattcaactaactgtaattgtggtgcatgcatgcatgcaagcaatatcattggcccaaattgcccttgatcatgtgcagggacacaagaaacgatgttgcatgttaattaatcgatgtcaaaatacatcaaccatatatatagagtaccataatgcgatggttgagacgatggacatgaggagcaggaagtaggctatgtataggcaacaactccttgtccactcgcggggggggggggggggggg

SEQ ID NO: 30673 - DNA, 865 bp, Oryza sativa
ctgcacccgccttttactgtgtatgtgctgcagatctctaggaactgttgcaggtgtgcatgggcatcttcataagagaactgcgtaagatcataaaagatatgttcaatagaacaagggtgcatataaaggtaaatagctagtcttataccgattctaatcccagatggaaaagtcttacaacaaaatggctacttccagtagctggatattaacataatactagagttgctagtggttctactgctggtcggtaggtccaacagcatgggtaggtccagtagcatgggtatgaagaggaccactatctagcttctgatcttcaccagcgtcgttgtcatcctgttggccccgcgcagctggaattgaattaaacagaaatgagttgcatatggttaatgctctataacaagaatcagccgagaaaattgatcaaaagagactctataataagtcacatcatcaagattcagactcctagcgttacatggtaccgaaccacatcccatgaacgttgacttagtggtggcagcaaccacagatgtagctttgtgcttgagggactctatcagggacagtgcaacctcgcccgcctgctcaagagcttggagaatccttttagcgtatatgaatcggctgccagcagcaagagcagccatccttgtcttctgcacctccgatctggcctcccccgccatctctgctatatcaaacgctgattttgcatcctcaaatatggagagcttcacctcagcctccttgcgcatcctctcaatgctgacatgcaactcatccttgctacgtgcaatttgctgccgggagtgggacagaacctccttgaggcagttggcctctccgaaggagt

SEQ ID NO: 30674 - DNA, 592 bp, Oryza sativa
ccgtgtcactgtgcggtaatagcgtactgtacattactaattcattattattgggtacaaggtacaagaaaacgatggatacgcatgcaattgctacatagtccagcaccatattttagaaaataatcatttggtatatctaccagacctcactggtaaactacgtggtagcttctattgtttaccttgcagtttatagatttgctccggtccaacaaaaagtatctcaaggtaccagtacctctcggtatcaaatcgttttcgatcgttggatctaataatgcccattaagatccaacgataggaaatgattggtactgtgaggtatcggagcaaatctcttcagtttataagccactatcaaattttaaactttaaaacttaagcttaaagttgatattaggtttttttcgttatagtttgttttttaaacatagattttagaagtcactaaggacacgtataaaaatattactcataagttatttattttaccgataaatcgtaaaacaacttattagttgtaggccaaacgataggtaaaactcagtggtaaactaatagtgttatgaataattaaatgtatccaaac

SEQ ID NO: 30675 - DNA, 659 bp, Oryza sativa
gagtggaagagctagccctagaaggaattggagcaggcaagtgacgtaataatataaatgattgttatatttgtaatgcaattaattaagattattagacctgtaattagacttatcatataagattgtgtagtgttctaatattatttgagttttaatataagattattttattgcaaattagacttagtatgacattattgactacggaattggtgcgactcctaagaattgactattgtagtcttaattagacttagcatatacgcacgaaacacttagcatacattactattttagtcttagcatgtaatattatttgagttttaatataatattactttatttgtaatcagtctcgacacccgaagtcgcaaatggttacacgagttcattttaagcagaagtcgggggctactatcagggttacgggttaggcataccctttacccttcgatatacgttacatatcgatatggcatacccacgcgcatgtagatatttcctgtatattctaaagaaacctttcacagaatctacagatgggaagaaacctactcgggcagaaccaagtcgttggcgtatcgtatagggtctgataccttcgagttctatgaggaaattctcacatctgcgatataaaaggggcccccccgggg

SEQ ID NO: 30676 - DNA, 527 bp, Oryza sativa
aattcctgcagccccaaaattcttagctacaattagtgggggatgctgatcccttcttaatctcagtaccatcttttttacgacaaataattttctgtacttctaactatcagatttgaattgtgatttttaaggggattctacttcaataagcatgtcttaaatattctggaatgtgtttttgacttggtgttgccattcttcatattgatgtggaatcacgaatcaggaggcagacacggttgttttgcactggtggactagaaattgttttcctgtgtttatattagcgtcatgtcgtcctacccatatggctcgcagaattaagagcggatggagatgcgcgcgcttttgccgccaaggtggcacgaggaaacttcgctcatgggctgagctaaaggcccacgataacgagaaattgagcgcatcagagaaagcgtgaaaaccaaatagggtgggaaattggaagagaaattaacttatgtgtagtgttttgaacaatattgagttgtagaggggagagtaga

SEQ ID NO: 30677 - DNA, 523 bp, Oryza sativa
tcttaatttttaagatgtgcagggtgatggtttgggtcctacatgatatttaatttaatgtgcatatttatatatagaatgagttaagatgatatagttgttgtcatttttttatattgtttaatgactgcgacgctagggtctatgtccaaacgtatttcagtttttcctttaccttcgcaaaatatatgcaataccgatcttgatgtatttatttaattacaaataaaaatagcacaaatgaatttaatgttgtatataaattgagaatcatgcttatttagctatttaaaatttaaactattttgtattgagttgttagaaaataggagaaaaggggagggcatatggaatacgcatcacatatacgtacatacgtacagtggcatgcatgtacggcaggggaagggaagagatcgatctaataggcgacttagggcattcccaacccaatgactaggatggtgtccatagtattaaataagctgccacctaggataaaaaatgatgtggcaagtgaata

SEQ ID NO: 30678 - DNA, 705 bp, Oryza sativa
aggtgtgcgcattttgcactgcggtcccttgccgccctctgcaagggctgcaagggggcaaatgtaattttcaccctgccaaaaatgcatttttctttcttttttcatcttgtccgtctctcacgtcaccctgccgccctccttgcaatatttacttctgtaaaatatttacaccggtacaatatttctgtaaatattaaaaaataaaaatttaaaaatgaaaaaaaattcggcaaaggcagcggttagcatttagcaagaagtcaggtgggcctattttattttcgggaaaagtacacgcaaggtccctcaacttgtcatcgagatacaaaatcgtccctaaaccgcaaaaccggacatccggcatcccccaacttacaaaaccggtcataaaaggtccctaggcggttttcaccccggttttatcccacgtggtggctgactcagcgtgggacccacgtgtgccccatatgtcatggagaccacgtcagcctcctctctctctctcccttcctctcccttcctcatctctctctctcacttatctgcatcatccgtcgtcgtcttgcatccagcaaggagccgcggcggcagcgggagcgggaggccgtctccgccgcggccgacggggaaggagcggcggaaaggagatcgaccggccggctccccacccggcgaacgcgagcgcgagcatgaggttcatgc

SEQ ID NO: 30679 - DNA, 671 bp, Oryza sativa
aattcctgcagcccgccgtcgaagaggccggtgatgtcgccggtgaagccgttgccggagacgttgagcactgggaggtcgccgcacgccgccgggacgaagctcgccgcggcgccgcccgccaaccggttcccggacacatctatcgtgcgcagctaggttaggccggggacgtacagcccccctgcgatgatgttgagctacaggctgatgtgctcgaggccgtggcattggacaaggtcgacggcggtgagctcgccgccgctgccgatgtctggacaggtcgagccactgtgagcgccgcgagccgggagaagttgccgaacgcggcgccgctgatgggcgaacccgacaggtgtagcgcctggaccctggcgcacgcgtctcaggtcacgccggcctagcgggacggatacacgtcggactgcggacaccggtcattctatcccgagctgaacatgttgttgagatgttgatacctcttcagctcgactagcacctgcctgtcatcatgtctggctaccaccgtgactctgacctacgaatgattcatcatggttgggtcaaatgctctgctggaaccatgcaactaaaccggaccaaaccaagatcagagagctacctgcgaagaggagttatctgaggaattcatgatgcacgggagacatggc

SEQ ID NO: 30680 - DNA, 538 bp, Oryza sativa
  unsure (1)..(538): unsure at all n locations
taccaaaatattggtagggcatgtttttggtagcaattcaaatagggcatttgtgtgtaagaactctgtagctcttcccctcccgtccacgccctccgagagaattttgcatatgtacctcagttaaaaaccggcttcgctacaatgccatcgtttaaatgggattcgctcaaacgccatcctcaagatgtgggtgttcgctacaatgccattttcaccattggttgcaattccaaaccattttctactaaaataattttttcgcggaccgttttgcccctagatctagttgaactgaaccacacataggggacgctaccactgctgcctagacgcgccgctctcctctcagcgcgacgacgcgacctcctctaccgccatccatgccgtagccttccccacctcgcacccggtgctttttccccctttccgaaggcccttttttcccgggggcccccccccccgtgccttccctacctcgtgacgccttccccacctcgccgccgcccaaaccgtatgggtgcaccnggcgcctctt

SEQ ID NO: 30681 - DNA, 869 bp, Oryza sativa
ctaaacattaatatgattttccccattgtgaactagttgaactaagcatggctaagcaattcctagtccaaactctaatcatgttataaccccaagctaacaaaggagcatggtatcaaaatagtatggctgtaacaataggtaaccatcccatagtaatattgcaaaaccaatgcggtatttgaaagaaaacattaggacatttgcaatataggatcaatatgatcaagtgacaagcatgacttgccttgctctgctgctggaggaacctcggcgactatctcgaagtacaccggagcgtcagaggaatcggaatctagcgacatacaaagcaaacattgcaaacaggctataagactactgaaacagggaacaaaaccatttttaatggattctacacatttttcttgatttactgagacttgaatgggattaaacggagctcggatgaattagttatgaattttagaagattcactgtgtttattactataaaagaaaaaccttaaacaatttattgcgcaatattaaccagggctgacgtcagcacgggggagtgcggcgccgacaagcggggcccaccggtcagcggcacggggaggagagagggcgccgacacgcgggacccacaggtcagcgacccggggaaaaggatggggcggcggcgccacgtggcggccggaccgacggccccgatctacccaagggtaaattggacggcggcgggagctcgcggccgggatgcgcgggcacggcgcaagccgaaccggcgaccatggcaccggcggcgcggcgctcacgcggcggcggcgcgcaggcggtagcggcgcaaggcgacggccgacggcgaccgaccggcggcggagagc

SEQ ID NO: 30682 - DNA, 540 bp, Oryza sativa
cccgtgaacagtaatgggcatgatgggccggtgtgctgttactttcgtcgtttcattgttcggccagccttaacgggaaattaccgttccgtacaccctggcgacacgtggcagtcccttactgggtggcaggcgaaccgtcacgcgggtgggttatatatacacttaccccctagcgtcactttcacttttacctctagtcacttttaccatctcctctgtggctggtatcgctttgtttctccttgcgttcacgagatttcattgcctacttcgaccagtgtgacctcggctcttataccgggctttccagacttttcatccatggacccttgtaaacctgctcctgcttcggccactggtcctgatccggggaagattggtgaaggtcacatcaggtatctcggcgcttcgcttatcgataagacggagttggcgaagctgttctcggccggggtcatggccgaaggataggcctttgctcttggcaaggcggtagtgccgaagcctggggacaaccaaaccgtggtctttgctgca

SEQ ID NO: 30683 - DNA, 651 bp, Oryza sativa
cattcttcaatgttttttgtggttataatacttttggagctatgtttcacacattttttttttgtctctaaaacgttgttgtaagttgatgagagagaaaatttttgtggggaagatgaatatatagaaattttggtttgttacttaaaaagttttattctcatagtttaaaatataatgaaaattaatcttaaaaatagaaaataaaataaattgaaaattaaaagaagtacaacattaatattagtttagaacttcaaaaataatataatacaacattaatattagtttagaacttcaaaaataatataaaagaattgtttgttggattattttataattattaattgtatgagtaatgatatgtcattattgtatgactgtttaaagagtttttaattattttatcattattgtatgactgtcattattgtacgaaaatttatttatgtacgattttttttcatttcatgtaagatggatcggcaatggatgtacgctgaccggcggtccaaagagtttatcgatggcgtgcattattttttgagagtggccgaagctaacaagcataaggcttttatgtgttgtccatgcaataagtaagaaccagaaggagtattctgcatctaggactattcatttccacttctt

SEQ ID NO: 30684 - DNA, 504 bp, Oryza sativa
ccccccccccccccccccccccgtggcccgtacctcagctcagctcatcatcagtagactattatggggcgttcgatgccgttgcggcctcaaccgctgtttggtttcttgagttgcactcgccaaattgttggccctcttcatgcatgtgaggtgtatgatgtaatgctgcaccatgaacaagaagagagatgtagtagcgtcgtgttaatatagtttgggcgttatgaagaactggcgattggctgtgtacaactgaacatcatgaggaggcttgcatgacagtttgttgtcaattgggagttgggagtgttcatccaattagaggatttgactgattgctaagtgttccatcggttaatgtatttggtttagtttctgtgatgggattgtatgtttttttccccaagaaatgaaacctgatcaatagttaaaagcactaatataatgtgcttatcaattatggttgcaacactgattcatatctataatttacactccaga

SEQ ID NO: 30685 - DNA, 614 bp, Oryza sativa
aggccctcgcaccctcagcactgcccgcaagagcacccgacccccgagcaagaagcccaagccagatccagaggccactacttccgagccgtggggactcaggtttgcccgtgccagcgaccaccctctacctgccccaggatcctgcggatggttggatgactagactggaggattattgcagcttcgatctcgcttcagatggtttttggatagtatgcgagacacacccccccttacctagattgacgagtagcttgatggttagttcgatgcatcttttggatgaaccttatttggactgcgtatgtgtgcagtcgattgcatcatgatttatgtactatttgtggaactctatgatgttatttatgatattattgttggtgtgttataaatgagtttattccaccatgcttgcaaaacaaagttcacatcgaaacaactcccttaatgggataaaaccataagagctagttagaaaattaggatacttacttaatcggcctacacagatggcaagccgacgtcgggcgtcaaccagcaatgaagaaactttgacacctgacctaaccaccctggccagaagtatggccactgaaacccaacttctacaa

SEQ ID NO: 30686 - DNA, 506 bp, Oryza sativa
ggcgaattcgagctcggtacccgtacacaaaagcaaatactccttgtttcgcattatatatctggtcctcggtccaataatcaagaaaacataaaatcgtaatacagttgataaaatcagaccaaatttgatgccattagatagagtacttgtacatctatctaataaagcaacaattgttcaattccaccaaaaacaatagttcaattccacatttatctaatattgtgcccccttagtatgtacaccagaacaatattgtgaaatagagggagtaacaacctagtagagcttagcaatagaaaagctggaactctgccttgagaaaccggacactcaaaatacctggtaagttctcccattgcagccttgaacagtatgtagcaagcaatatttgttcgcaaagtcaaatttattgctgccaagcaaatggggcctgaaaagccagggaagtgtgatcagaaaagtttgataagactaacacaatacaatggcattcacctttt

SEQ ID NO: 30687 - DNA, 604 bp, Oryza sativa
attaatgtgtcgtctctgtctttcgttttccgttttgctttgtgtatgcctctctaaaattggcatttcgctgtcaagatgggaatatgggatgatgccatcgcaaaagggaaggagcccctgtgatgatgcgacggtgcctgctgggttacgaaatccctggggaaagaaaaagcatccactcacagggagctcgtgctacggttgatgaattatgatgatggctggctggttggctgctgtgtgtagagcaccccccctgacccaaacgtccagggtgcatcctcctatttcgtttgtatccaacgacgttttctttctgaagctaaacacgttacacggacaaatattgtaatggtacatatgatcttaacagaacaatcgatcactttaaaaaaaagaacaatcaattttagtactctctttatctcatattatataaaacttttgtattataaggctgcattctttcaaaggatattggggagagattggggagattgtcactcgttttccgcgcacacgctttccaaactactcaacggtgtattttttgcaaaaaaattttatatgaaaggtggtttaaaaattcatattagtctat

SEQ ID NO: 30688 - DNA, 565 bp, Oryza sativa
taccatgaaaattctactcgtaaacaggaatactagctacttacgagttctaaacttgttgctaatggccaatgggatgaacaatctgacactacaaatattgctccatgcacattttacaaaacgtttagctatttcagttatcctgggattagcatgcggtttcatgaaaagtctaactgtaatttggtgcagtaaaagataaattgactgtgcctttcttcaaaaaatggaaaaaaagaaaagaaactgattgttaatttagctgggtttttttttgctaccttacatttagattcatttagtatagtacccttgcccattgtgtcatggcaatggcatggaccattgtggaacaaacggagtataatgacttgatgcatgtaagcatttgcatgcatggttgcatcatttaatcaagtgatagattggagaaccaaatgtcaagtgctttgcatgctgtgcttaatcaatcagtgcttagtggtactaattaattacaataatttatggatttgattacctcgatgaaagtggtgaaaggctgcatgaagacctccgagaa

SEQ ID NO: 30689 - DNA, 518 bp, Oryza sativa
ttcttttatcacctgaaattaagcatttatcatgtggaaatgaatcaggcatcttactataatttatgcttacaacatatgttacatgcagacagatagtcatacattacacatatacagcatcactatttagtggattgtggattaaaatgcttgaatatacagctgttcttaagaaaaaaaagtaaaatgtaacttcttttagcacttgtaagtactccttattatgattccttattatgcatctccttttcttcatacacattcatgttatctttctactttttttttccttttctatttttgtatatagactatcatgacaacccgagttctgttctgaagtttactagttgtgcagtcatagtcacacagtctatttgtatacaggttattgagcaccatttttcagagcaacgcatctatgtcatgggctgaagctctcttacctgatgagattctttcacgtattatgtggataattggaaacacagtgcatgctaccttacttcagaagg

SEQ ID NO: 30690 - DNA, 567 bp, Oryza sativa
taaattggggttcacaaacagttaaatcaccgtagaacaatggaatgtactgtagcaattaatattgtccatccaaatttgatctaacggctataaatagcttatggcatggaccactgtagttctctaccattccaattagaatgacagaggatacgattccattaaattggtgattttggcattattccttcatgagttctggcgcctaaactagaggagtaatatggtggttttgaaggggaaaagtcatgataccgtatttctatttggactaattgtgattaaataacagaatgagtatatatatgtagcctagggcatcataactagccgaggaaaagaaaaaaaaaagacagaccaaaccaatttggtttgggtctaggttttatagcatagcacaaatgactagggccaagtttagttccaaattttttctttaaactttcaacttttccatcacattaaaactttcctacacacacaaacttccaatttttctatcacatcgttccaattttaactaaacttttaattttagcgtgaactaaacacactctagaagta

SEQ ID NO: 30691 - DNA, 831 bp, Oryza sativa
tctctcacaacgttaattttgaaagttcatgcattggaaagcaccgataatatgatggtgacatcatggatgcttaactcaatgtgctagtgttcatataatcttgatgcctacgaatgtttcccatatgtataggtacccttttaattaataatattctagtgagatcggatgtaccgctagtctccgcctatgtgaacatatattagagattgtattttatgggtgggtccttgtatagtggcgtggacgtgcatatgaaaaaaaagaaagctcctgcgcctatcttttgtgaaaaatattttctatgtgcctttattcacaacgtactcaggcggtgtgttgtacgatgatgatttgacaggatcttttttttactctagaagtataaaatgaaaacaacatggactgagaaaaggaatcaaatacactcatttgtaaaaaaaactagaaggtagctcgaatacgtaccattgtttttgcctttttgggctcacatttcctctttagagagtccatagagaatttctattatcttttatagagtacatacatcaacctgaaggtaccactttatgttgatcatgcacataaagttagtcggaaatcttaaatcttaatcctatttcctaatgttccaaagcttctctaacatattgtatgttcattgagtgttgaatcctaccaaatgaattactacgtagaaaataatagaaaactctagatcaaacgccaagaaaaccaacaagaggtggaaaaccaagaggtggatccctatctacactgaatcaaccaccttttttttttgttggtaggtgccgatacgaccga

SEQ ID NO: 30692 - DNA, 625 bp, Oryza sativa
ccggatcccgtaggaatctgctagtatatatacacatgcgtgaattgttcagtattgccgtgtgccatctttgaaaaataccttttcttttaaggattatgagagattttgtgtgagcattgtgtgaatctcacctatttcctgcttagcctctccaaatacaaacataccaatgtctagtatgtacgttgggtgagttttattagcttatggactcggttactttctcttttattataaacatgattctcaaaggactcggttactttctcttttgttataaacataacatgattctcaaactgctagaagatacattttggataaaccaatttaatatagaaatttatttaaaaaatctaaataataaaatatttaaagtagttaatatttaactaattatatgttaataatccattttgatttttgcaccactaactaactcggccaaacacaacctaagatgaatccatagatttcaccatagcgtaaagccgtaaagttataacttataagcatatattcaattgcctttacaaagcactccagtttacaatggaaaaaacacatgctacaaaaacacatatttcgatgttttaactgaaaaaaagaggtgacctcgttt

SEQ ID NO: 30693 - DNA, 616 bp, Oryza sativa
aaagtaaaaaaccaaatttcgcaaaagttcatatgatcttaaaggatcgcacttgagtaaattcccaagtgcaatggaccttacatagttacattcacctaggcactgttcaagatgaccaattcacagtggtttgcggtgcccagtttctcctccgtagtccgtatggtttggagttttgattcgcattgcgtcagtattaaatccggggtcaaatgccggacccagcaaagaacacttggatggagctgaatggctctgcaattctgcgttacaattggcaacacactgtatgagatgaaattatggacaggccctacattggtctctcattctgacactgcgtgagagagtgctcagggatttttgtcactcattccatttcttctaacgttcttgatcctgatttctgaataatggcactgcgacgccaatgtgggtggccctaagccaataaagatgcaaagtgtgctgcgccttgagcaggggaacgaggaaattgctagctgctgctccctcttgttctgacaacatggaccaccggtctctccgaataacagtgttgtagtagtatgaaattagtatatcagatctgtctatgtgaatgtgtgcagat

SEQ ID NO: 30694 - DNA, 613 bp, Oryza sativa
gatatatatatatatatatatatatatatatatatatatatatatatatatatatatatatatatatatatatatatatatatatatatatagagagagagagagagagagagagagagagagagaaacttttaaggcttctgtgatttttttagagcaaaattcattgataaaaccttttcgtctccggataacattttgatatcaagaggaaagttttatttatctatagttgatagttttcatagactttttttaaggctccaacaaattttgcaggtatttccttagtgaacacatttgatgttcgaaataaagggtactaaattagtgcagtaactctgtgattttattttatttttttgacaaactaaccgtgtgatttcaagaagtcgaaatgttatggaaatttgttagggcatccacactatgctaaaaagtaggtagcaaggagtcatattacctggttcactattgtgagggtaggtagtaaggtggatactactattgtgagggtaggtagtaaggtggatagtagtatgatccagtagtaacactactaccaaataacagcaatcaacaaatattaaaacactctcctttctcactccca

SEQ ID NO: 30695 - DNA, 578 bp, Oryza sativa
tcgattatgtcgattatgtcagttttctacttgtcaatgaactcctcagctatatatgagatcatttcttcagcatattataagtttaatatagatggataaaagaattaaggatggttcaaagtgccacaaaggtaaaagtatccgattcaaagtgaaaacattgtttttatggtggttaaaaacaaaacatcagtaataaaaaatgacccaaagtgaaatttactcctgaatttttctaaaaaaaaagaatatatcatacataaaatttttaaattagaatacatcataccgaaaatcaccaaataccggtagcatagtagtgtgtgtgtatatatatatatatatatatatgcaaataaataggaattaggcaacctatatgaatcttcacatttgctaaacctttcggccgtgcgaggacctcgctaattaatattgtcaaaccatcgatcgagagactgatatacacaccttgtctttttaggatgtcaactgtcaagtgccccataaattacactccatccctaaaaaaacgccaaaagataagcgaaagagcttcaaataatttttaatta

SEQ ID NO: 30696 - DNA, 553 bp, Oryza sativa
ttgcgttgtggtcgtcctcaccaacgccgcaacggcgtcacgttcgcgagagatgggcgcgtgcgtggccggggagccgccggaatcttggatcttggcagactctctcgcgcgatgaggacggccaagaaaccgagcggattctgtagcccaaatgatgacaatgtccttcgttcgttccaactaacaaacacaacactgttgagccatgagagggacttggtactggcttgttttgtttggttggttgggtcttttgaaatgacgccaaagagaaagttagtgtttttgtactttgcaggtttgggcgctgtggatggacacagctttgtttcttggaaaagttgaaaagggactcggtttcaattggaagcatcctacagtactgacgatcgatacatgaacgagcatccatgtaagtacgttttgttatgtgccgcgtgacgaaaatgtaggatggaagatgggaattgattggcaaatgggattttgctaattaggccacccccaattactctcttattattgctccgaataaatagtttttttcctg

SEQ ID NO: 30697 - DNA, 1059 bp, Oryza sativa
aagtatagccactcctcgtggttttgtcaatgtataagtcatcattcacgatggcattagcaaatggttttatgcttaactagttaattttgtgtagtaagactagtgagcaactacaaacacattatgcacagactacagagttgtgccatgatgatgaattatttgaggaaaaaaaaaaggaaatatggactgaatattgtggatgtttgtcatgctattgactaagatactaggtcttctgattaacaagtcaccttttcaattgttgtaccttcccattttctcttcaaccttttccttcaactccttatccccccccccccctcatgtcatcagaattttctataaaatttgccatttaagaaaatatatgatgtaaattagttggagcttgaaaatgttacagttacaaaagcaagtatttacggcagaggaagcaatttttttctacatagtcaatatggttcaaatactgtatgcgtttgttcgatacaggtatctgtttttttgttctttctgtgcatccttaggatttctcgctcttctgacttgagatattgtagctctaagcctgtaatagaatccaatgattgtcttactgcaatactatttcagcatgttatccaatttgaatctacgcatacttactgttggttttacagtggatctcaattaattgtgattatgaaatttctcttgtcatagctgctgcttaccctagccatgctgtggacatggttcccataagaactcttcaggtaagtttttcatcttcatttctctcattacatggtgtgatgcaatagattatagttgcacaaaaagtgacgagggcattagttcagacacttcatatctgggcatgtgcatctggtgaaactttgtaagatgcacttatctttacagtactgatttgactagtatcaattccaagttgctaattctgcaacttgcttgcctgggatcatcagatgttacgttacaatgaagctttcaggatgagaacagtgctagcgcagttggcaggggcagtcgtgggatggaatactgttgctt

SEQ ID NO: 30698 - DNA, 1070 bp, Oryza sativa
gaggtgtgtgcccagtcacgttcatcctcgttgtatcttataaacttaatttaagacctacagattcgtgaaaatgagtagtgagcaatgaaaagaatcaacggtccaaaactccaaaagcccatcatggcctagcaatgtgagttatagtccatctatctcaatttctcccttctcattgcattcgtgatctttcctcaagaatgtcggaattttatattattctcacatggagtagtagtttaattcgtgcaaactttctttttaagaaaaatcttcattccaaagtttttaccacattagacctttaagtttaaatttttgggtgcatcaaaacataagcatgagtaatgtgcacctgaaagtatcacacgcgttcgtcatggatttctacccacaatagagaaatcccatatattatcctacacacattgaaggcgaaatgatttctcaggatgcaatacaaattaatttacaccaggggaatgtttcaccactacacatgcttataatataaagagaaaaaactgatgactaataccaccttaatgatgcggttgcataattttgcaagttaacttgccacttacacctatatatttagatcaaatcgtgacacactgaaactatatattgaccatataagcaaggatattagtaccgttagtagaaaaatttgtacctactctgatcaaactcattccctgtccaaatttaactgataccctgcccaaagtaagtttgaaatttgttttcctccaatccccataacccatccacaactaaacaaatatatctccatagtggttttgaaaaatgcaaagcaactgtgtatttatcctacagtgctaaccaattgctgattgccatgttgcattagcacaactaacgaccacatgcaagaaaagacactgtttctaaaatgctttcacaaagtttacatgcatggcacgggcgtctaagagcaggtacaatagcagactattagccagctataaacatattttaataagataaaagataagagagaagaacagcgggctacagatctgtagccggctgtagcacgg

SEQ ID NO: 30699 - DNA, 1201 bp, Oryza sativa
ggaagtgacttccgtataacaatatgatgctcctagaacaagtatactataatattctcttcacaagtgatgtgtgtctactgtttcttcctctctgcatttggaggtttgtatgacaaacatgcataggaagataatgtaaatccttatagatgtaggtgttgtaataaatccttgtagatgtccatccacataattacttgcttcattcatgcttgctccataatttcttttcatgtatatattatactaataagtcaacaagttaaagatccgataacgtaagagtcatgaagaggccatcatagatgtcagtctaacatataagtaggtgttattactcaagtacctgcgatagcctttactaaatactaccaatattattatcagtggtagaagtgatttaagtcttgagttatgaattctactgccagtaggttaggtggaagtataaatagatgtgatttttttatggtggtctttattggtggtattctactagcaatattgtcaccaatagaagtaaccttgaccattgatttatgagttccactaccagcaaaagaaatattctactgcaaatagttgaggtagtaatagaaatagatctgatccttagattagaaaatatgagggctctagattaattctactaacaaaaaccattgtaaagcacctttagcttacatgatacatgcgtgcatgctagttttatcttcagagtttcatcaggtgtattgtcagtatctctaaaagtttcattgatcattcgtggcatatcataagtataaccatgtcaaatgaatgtttcaccaagttgtcatgaatgctttatcaggcctctgcaaagttcagcaagttttataaattttctgcaacaaatcaatgaaattcgaatcatgatgatttcccctaagctatatattgaaaacacctcgatgcataaaaaaactacagcccattcaacaaaacaaaaccccaaacaaccagactttattgtatcaatgatgcacttgttggcattggcatgcagcagctctcatggctgcctactgctccgccaccataccagcgacatcttcagcctgctactattaccaatcgttggtgcatgatgtttctgattatctcattctgtacaatgatcttttcttcaaattttttttacaatgatcacattctccttgcctagcacgctcgc

SEQ ID NO: 30700 - DNA, 630 bp, Oryza sativa
ctgcagcccacgaaggaagagaaggcaatacccgaaccgccaaacttttaatggaggaacaccccttgttgaactcgttaagttcggtgaacaggctcggggtgccggcgggcaagataagattacttactccctccacaaagggaaaaaggttcgcccgggtctcgaagtcaccagggcgaagtggggcgccgcgagggaatactctgaggcagatgcttcggggccgcacacttccccttcgccttgaccagcggcgaaatagctggctcgcgcacagggctcccgaaaaccctcgccacagccgacacgatccgttcggcggaggcggaagccccggcggcggcgctacgcctgccccagcaacgctgagcggagcaaggggagcagtcgaaaaggtccaaactgcggccagcaggtgaagtcggagtctcgtcagaagactcgtcgttgctaaaaacgcgagcgatgtcgacgagtcccttcttttttgagatcttcttgaccagacctcctttcgccgccttgcccgacgagaacgcaactaaggccttcgccccttccaaatcctttcgtcgaaggggggagctgttcgactccaccccggtctcgttgtgacctggacttggg

SEQ ID NO: 30701 - DNA, 752 bp, Oryza sativa
aaaattttatataaatgttatttattttcattaaagaaactctaatttaacttgcaactttatatatttctactaaatttctagttttaaattttaacttataattttatatatttatactaaattttgaacatttttaacaagataaaagttgaagagcgtcgcatataaaaaaaaaacccggagttattagtatatttaatatttcaatacgagatcccatcgcagtcggtgaaattaatttgctggcgtggagcaagggctgctgctgacatgcatggcatggctcgcaaagagctaaaatccacgtaatgcatgtttgaccttggcgcacgtgggctatatgcatacatgtacatgtaatagatcagtctattcgcaattcacgggaatagaaaggaaaggagataagaagaaatggaaaaaaagaagaagaagaaggagaaggaggagtgttttatttttattttttttatgtgtaacatatggatcccactaacacgtacgtgtgactgaggagtaccacatcagcgcgcggagtaggttggagtccatttagactagctatggtacctaagacaagtttaagagcttgaaaatgtgtataagagtttcggaatctagatgatatagctgaacaagtttaggaatcatccatacacttcactgtttaatactccatctgtttcaccatgtaagtcattctagcatttcccatattcatattgattttaataaatctagatagatat

SEQ ID NO: 30702 - DNA, 580 bp, Oryza sativa
tcctgcacccctctacgcgacatacaaggcaaacaatgcaaacatgctataagactactaaaacagagaacaaaacattttttaatggattctttgcatttttcttgatttactgagacttgaatgggcttaaacggagcacagtggaccgagtccacgggactggggagaggagcaccatgtgacgctgacgtggcgccgaggtggcgcacacgctggcggccaagtgggcggaggcggctcgcagccggcgcgcacgggcggcttaagccggcccggcgccatggcgacgcggcggcggcggcgcgggcggcgacctgcggcgaacggctggcggcgaagagcggcggcgatgcggcggtgctacaagggggagagggagagagggagaggagatgctggtcctcaccgagggattcggtcggcatggaggaaggcgacggcgaacggcgaacggcgacgatgggcggcaagatgtcgacggtcacgggcgaccgagcttcgtggtaacctagggaacacaatggggagcgccggccgaaggcggcggccatggcgatgctcaccggcgcgaggtgga

SEQ ID NO: 30703 - DNA, 696 bp, Oryza sativa
ccaccaatggcaggaggcgaagcgtggcaaaataataccagccgcacaagtaacaaacttcattcgcaggaataatgtaggtttcggcacgagtatcggtcgaaagggggcgccgcataccataccacatggtttgcacggtctcggccgaagctccaatctcacccttgccgtgaggggcttgttggcggatggcatgtggcccttcgaccaaatctgccgaaacccgtggcgaagactatggagcaagaacggcgtgaggcgaagagtcgtacgagtgccttgccaggccagaggcgtctcaggcgaagggtgcaaggcgaagactatttaccgaaggaagacgacttcgccatggcaagttcgcccctacgagggccgaggaagcctttccggcctatcaagcctaggggctatagggctggcgatcgccagacggcccatcaggggcccatgagcccctataacattatgtacccctgtaaatgtccctttcgcaagggtaatcatgtaaattcccctgtacaacctaaaccctagtagtaagaacctataatgaggctataaatagtcccctagggccatgtaatggggggatcccgaagaagaaattttaaattcaatacacttcgtttctttccaaccattgttgagtaaccacgtccttcgacgtatgcggttgtcatttcgacaaca

SEQ ID NO: 30704 - DNA, 542 bp, Oryza sativa
gacgaacaagagagaggaaataaaggaggaagaaggataatttggtttagaaattttaggaattttggtttagaaattttaggaattaaattgaaggaataagtagtggtatatttcaaataatagcaaaattgtaatgacatgactcgaaatagatgaataacagtaaaattgtaataagatgactccaagtacatggaacccttgtttaaagcacaacggtctgcgcgctggttccctctctcatctctcttctcgggctcgcctgagatgatgctgctgctgctgcaacgctccccatcccatggcaagcctccagcctaaatcccgcagcactctcaccgtctccatcaaccgccgtccgccggtgcgcgctttgtgggcccgacctaccggagaaacaaattaccagcaagggcccgacccaccgtcgccgccattcctttctcggcttagtaccgcgtggggaacacggcgcgcaacaacctcgccaccgcttctccccttttctcttctcttctcgcttcccaatccgccattcc

SEQ ID NO: 30705 - DNA, 598 bp, Oryza sativa
gtctgttgttttaatttgtttatgcatgcattcagctcgaggaaatgttctggtcggacttaatcagacagctgacctatagtttcttgtgttatgagaagacctagagtttctgctgagcgaatagacatggacaatgccacatcttaacactccacctaaattacttgaccatttcttaaccaccattccacctaacatttctgtctaccaaaaaaaataaacacacatgtaatcctgtttatcacgctgactttagcaaaccggacaggttgattagtgtctgtgtgtgtgtgagagagagtgtcgaatggcatggtaattagccgggcacttgctttccgaaggagcgaaatcatgggtactaatcatggccccggtgcacgtcgcttcatgccttaatcatgaccctgcatgttagctatctcctcccaaaacctttgaccattgcctttcttctaattagcacttgtttaatttgcttaatccgctcaaagcggaaaggaatttgttgtactcacctttctagcttgcacagttcctccgtcctttcgcgccgattccatcgttagctctcactgccctgtttaataagtgg

SEQ ID NO: 30706 - DNA, 681 bp, Oryza sativa
tattctcatgcttccaactaaaacaaaggcttaactgatcaccttatagcacccggtaaatacaccaccagctgcggccaaccgacattaatcgaagttgccgggtaattcttgttatatgacatgggctcgtatacgagataaaagtatttgctgggactttacaatacatatttgaacatttggctacattaaaaatgttatggaaatatataacatctaaaccatgtctaatgtacttagaactataaaacaactgacaacaaagtgaattgtcacaatgttaatgtttacaataaaagacatgatcttacgtgagactaaaaatcagtggacgtgtctattaaaagacatatgcatgctgatataccgaacatgaccatatactgaaatcaaatcactgaattcttttaaagtcctgtaaaaaaggctcatagacaccttctctttcaatatatgcctctcctatatgatccaaacatttaagctatttttttacgtacgatgattgcagcatgtggagactggagagatattgtgcatgcatgtcctactgattaagcggttgaaacataccaggacaaaaagaagattctgcctgccaagaccattgaagaaccttacgcatacacgcaaaggaacctataatattggcgctatctacagattatgttggaacaa

SEQ ID NO: 30707 - DNA, 685 bp, Oryza sativa
gctctcatggctgcctactgctccgccaccataccagcgacatcttcagcctgctactattaccaatcgttggtgcatgatgtttctgattatctcattctgtacaatgatcttttcttcaaattttttttacaatgatcacattctccttgcctagcacgctcgcttgacacaacagttgttttgtctcatgtccattcaactagatccttccgagtgttatactatgtttcaatcatatccctgaaaatgtggatgtgcttagagagaacctgttacaaagatgtaatactctgaagtctttctcttgtttttgttcatcaaaagttgttatgggacatactaatttgtcttgtaacatatactataggtataataagtaacatatacatatactataggtatatgtgttacttcttctatgggtacctctggatttctttctcctgatgcttcccatcctcaagctcagatatctcttgagaaatggacatctcatgagatgcaagataaactctccaatgctagcatctatgttattcgtgagataacaaatgctcacttttcctttattatttggtttttatctcgtgttcgctctccatttgttatctacaacttgatgtttatgtatcaaagatgaggagacacaacaatgaagaacaggttggtgttgcattgatca

SEQ ID NO: 30708 - DNA, 569 bp, Oryza sativa
agatccgataacgtaagagtcatgaagaggccatcatagatgtcagtctaacatataagtaggtgttattactcaagtacctgcgatagcctttactaaatactaccaatattattatcagtggtagaagtgatttaagtcttgagttatgaattctactgccagtaggttaggtggaagtataaatagatgtgatttttttatggtggtctttattggtggtattctactagcaatattgtcaccaatagaagtaaccttgaccattgatttatgagttccactaccagcaaaagaaatattctactgcaaatagttgaggtagtaatagaaatagatctgatccttagattagaaaatatgagggctctagattaattctactaacaaaaaccattgtaaagcacctttagcttacatgatacatgcgtgcatgctagttttatcttcagagtttcatcaggtgtattgtcagtatctctaaaagtttcattgatcattcgtggcatatcataagtataaccatgtcaaatgaatgtttcaccaagttgtcatgaatgctttatcag

SEQ ID NO: 30709 - DNA, 2147 bp, Oryza sativa
agggggggcagcaaatcagcagaaaaattatcatagatggaaaacataccagatggaacatgtggttgctgatttacattccatgccaaggaataaaagggaacatataatttataagtttgtattgtccacttgctatttaaattcagaatatgtagattattttaaagtaatgatattatctgaatatcctttttccagaatatgcagacacatttcaggtttataagcttggaaaaaaaggcactaacgaacattccatcgttggtcaaagaatcccatcatagatcaactggcctaaaaaagaagaaaaataagtgtttcatgcatagaaagtggtttcaattttatatccatctgttggatattaagacaaaacttgaaggagaataactattccacattggttccagataattaattacatccttttcatgagaaagcaacaattaacaattgcttttgttccccataacacattgggccagctgtacttcccaactatcatgaacaatttgtttaaacaaaaattagcaataaaacacatgggacattattcaaataccagtatgtccactatcattgtcagtaagttccaaacactgtcaatggattgtagttcctacactataagaactacctcatccaatatcctagtatccccaactggttgtcaataactgtaagcctacctgaccatttgaaataaaatatttgatagttttggaacacaggtagctgcttaaatagtatatagtcttcaatatgaaatgtcacattttagcaatatgactatgcatgtagcatgttaagcatatttctcttatcaataactatttcaattctaaacaaaaactacaacatgagtatatgtttttctttattgcctaaattcacacacctcagatgagataccatacttcccaaaaatgcattagtgctcgtacagagagaacctagctagtatttcttagtatacctctagctaagaagaggaaccaaattaggcgacaaagactaatgcacctcgtgcaagctggtgtataataaaaaaaagtcccatggctacagcataggacaatctttgttaaaattccagttctaaataggttacaatgacttcgtatgatgttcaaaaaaagtaattgattcgtatcgaggcaaaacaaaacttacatagatatgttccacttcatatgcactgggagggatacctgcatctggagaagcttataagcactgataaataaagaacagtagggcatttagggcatttatagtatggtctgaaaggctttgagttggatctgcactattatgtttcttgtgtacataatatgaactgaatcagcccaagaagaactttaccttggcaaccaaagagaatcattacatacatgtcaaaggtatcctaagcttgatataatgaacgaaagccccaaatcgcataaatatgccctgcatcacaaatgggaacaaataaacctatcaacaatatcgttttgccctccaaagctgtatatgcaattcctaactgaaacaattaatcacagcatagagaaatttgagtagcagcgtgtgttgtttcaagctaaacagtttgatcacacatgacagtgttgaagtacatgcagagggaaatttctccacacaacctacacactataactgaagaatgccatacacattaaaagcaaatcaagactggcactgtaactaaatcaaggcttacacattagaagcaaatcacggttgtaatcatcaacaactaaggtccaaccacttccttctcatggccctatggcactgagctagaacgaaaaggaaaaaagagaacaggaacgactaggcagctattgtcgcggagccgcagctgtcttcatcgtggtcctggccaagccgacactctcccttcccttctcatggcactgagcgaggctctcatggagagggagaggagaagatggcagtggcggcggcctactgactccgtctaggcagagagggacaggagaagagggcagcggcggcgccctgttgactccatccgggcgaccgattcaactggaggggaggccaagatcgatgaatcagacggtccccgagccatatttgacaccgcaaagagggagcggcggtggcagcac

SEQ ID NO: 30710 - DNA, 691 bp, Oryza sativa
catcatactcaaagcagcccaaaatggttacagttgtcaagtttgcgccaagagcatacttgcatttacactttattaatattttcaagatcaaatgtgaattgttctgatcggttcgttcagagaacaatttgtacaaccaatgcacaatagtgtaaaagcctttccagtgtgatgtagattacagaaaaagatcaatgttgagtcggtaatcattagaaggcaaggcgcatacctgaaaatttttcatatagaaatcttcatcacgaaacaatgagatcttttcacatagcacctgcattgtgaaggatattttagtgtttcggcgcaataaaaacaacagtatataaccaaatgtatgtgcagcaatttagatggctgctgcttacttggaaagtgccagtgactactgagctatgtccaataggccaacattatgtccaagagttcggttttacatgcatgaagtggaaacaaaatgttgcaatttcgattgattaagcgcaaaaataactaatgaaatcataatgtcaagtcaacctatgatgcaaacttcatagaagtatatgtaaaaacagagattcaatttgaaagatgatgggtcagtagcaaattccagaaatatcgctgtaaggaaaaaagaaagaaagaaagaccccatgtgcacctattgaagcatattttttttata

SEQ ID NO: 30711 - DNA, 2990 bp, Oryza sativa
cctctccccctccccctcccacccctaccccaccccgggaccctaacctgtagggtcctttatcgaagtctagggtatcaccggcgcgggagaagacgaggaggttgccggagttggaggagaaggcctggagtacgaatctcgaaactcatccggtggcccaaaatctgcaagatttggggatacaatttctatccgcatgaggttagcaattctgtttaataaatactctctccatctacttttgataagcatattaacaaatctgaaaaaattatttttgatagacatatttctatccaacaacctatcctattaataactttctcggatttaatgcgtgactctctattcttccacacaagatttactacatgggcatcgagaaatgtaaatattaataaatcgtttgtttacgaggaataactagtaacatgtttaaatagatgacaagtagaattacttatcctgcaaggatgaaatagagtagatggggaagtacaatgaaaaaaagacaaaattccgatcgtaagggtggcgccgtaaacatgtaatatacgtggttgtttttgcaaaacgtccatccccctcaccaagcccaccggccgcccctccggccccctccctgccgcctcgcacgctcgcatgggcgccgcccccacgcacgcgccccgcgccgtcgcctacgcctctcggcgcctcgccgcctccctacacatagcaagctgccatgacggagggttcgacaccgatcgacgccgtggcagtggcaccactacatgcacacgcgcgaggccgggtgacgcgtcggcgagcggcgccgctatccccctcccggcgaaaaaggtaaggcggagcgccgcccatctggggcttggttgccggaggggaagggccgggggcgggccgcgactagctcgaagtccagctcgtgtgcgttgtttcctactttcctgtgctagcttggctgccctctttgccggcgtacgttggccctaccgcttcttctgattgctctgcacttctctgcttgctggctactcggggtgccttgacttggcggcggattcaggccttttctgtggggtcagcacagctttttgaaaaccatcctataaatctcgattttcatgtataaattcaaaataatttagagaaatgcctcacttatagtaattgattctacaggcttaaatttctggctccgccgacttactatctttggttggtgaggggatcgggtcgtgcaagcaaccccgcccggcggcgtagtgcctcgtcggacgaggcctggccagagcaacgccattggaagcaggtgttctgttccctgcatccgtccaatccccagccgatcctgtacctcgcatctgcatctgccgtacgtccactccgttcactctacttgtttattcgttcccacttcattaacaaagtaactgttgtcggttccaatcctggttcttgcatatgcactaacattttgaattttttttttccaggcttgagcatccacagtgtgttttgtttggttctaatccttatttttcttctgagttctgggcttctggccttttcaagaacagagaggtggcatcgctttgttgtcaccagatgagttgaaacagactttgcatttctgacttctaagtctgttagcaccctttttttcccatgttctagctaaagagtctatgttcatgtcccgatttgtgatttttgtgtccacttgtgcatagccatcataattcgaagacttcacaatccttaattcgaagacttcacaatcctgaaaaaataatcacatgcttagtggacatgtatgtagccttttctcatctgaacgacagaatgatcttggttaatttatcttgtattgttctcttagtttttaagtgcaaacaaaatttaacacttctttattgatcatctagattagccgtctcctctgttcgcaattcttgtttcttcattcctactacttggacaaattaattgttgccagttctaattcgaagactgctgctctacgtagtcctatattcagatatgtgttctttcttggcaggggcacaaacttccgcttccacaggttaagcaccagagaaggtctaaggtgtagattgtatacaaacaagcaataaggccactaattttatagtatgcttgcagatcagtcagatggagtattgtagtagtattttgttgaaataaataaacattctaggatatatatcattttgtagtcattttggacaacatcactaggtgaatggatgtagtaccatttttcaaatgtcaaaatggaaatataatatatacatcattttgtaatgccattttggtttatggatgtatatagatatcaggatatatcattttgtaaatgtcattgtggaccagtgaaatgagaataaatcatttatttcctgaaaaatgtcagtatggagatgtactccgtagtataaatttcctgtacaaggacacctcgtatatttgatattttgctattttttagggggggggggggggaattggttattttattcttcacccttttttattattatctgaagtcagtgtttgtgttttggaatgtcttttttgacttggtcacccttttttttggcagatattcatccaattcttccataccaacacatgcacaccattgttacatttcttttttcatctcttgcagctgcccttctgtgcaggggcggaggactcggttgggcaagggttggcgcgcgccatacctcgctcccgacgcgagtacccccacccccgatggcgcaccacacggctgcaccgccgcaggcccgtaggcagtagagtcactgccgaccaagagagctaggggtgacggcgagcatgcggcgcgggcgtacagcaccgtggcgcgccagtgcagacgcaggtggcaggacgtagatggtcagctcttgaccggctcctgccatggcatccacggaaacagcaagaaaacg

SEQ ID NO: 30712 - DNA, 732 bp, Oryza sativa
attcctgcagccctgatacaaaagatgcacaatacttctgtgcattctcaaaaaaatcccatgtcgtgtactcgtgtggtttggcatcgcgctgcttctgaaactgttgcagatgtggataatggatgtggagcccaatcaattggcaaagagctgattatgtgttaatggcttagtaacgaattattattattattattattattattattattattatgtataaaatatttatatatgtgtccttggcaacttacaaattaatactgaaaaaactacaggcctatttagattgacgacgttttcaatcatacaattatttggtaaaattgataattatgtggctacgtttagtttgttaggcaatgtgtatagaattttgacaacattattaagccaatcctaccaaaattttgacaatgctatcaatttatcaaaattttggcatcatcaaattttgataatgctcattttggtaccaatccgaacagatcctacattgaaaataatttagcttgaaaattaatttttgaaatttaaattttgacagtcgtaggacaaacaataaggctacactggacgggtttcatttccatcttctcgcccctcgcatcgaactgccgttttctcaattatacggaagacgcgcacatgccaccacgcatgcacaaaagcatgtaccgcgattttgatgggagcgctagccatggattccaatttcatacccacaca

SEQ ID NO: 30713 - DNA, 559 bp, Oryza sativa
agtcgaccggagatgctgccatgctaacaactcttgatcgatggatgatgcatgctttgggagataaacaacgcactgatcaatccgcctaagcacccctcaacaacccccccaaataccacacgctgatcctgtcctgcactgatcttcttggtcttctcttctctcaagggcacctaactgacctaaccatcactctttctgcgcggctctgcctctgctcctcattgattggactagcagctggaaaggccaaacgttacaacatgcccctcacgtgtgagcggaaagctaattgagagaggccaaccggttggctaatcacatcatttatgtactactccaaggccctgtacttcatgaggatggttgctccctcacaatgttcaccaaaccgttaatcaatgctttcataaaatattccgtacaaactgttgagacattcagtaaaacccctatataacctataaaataaacccatatgatcctgcattactattggtaccttctaaactttaaccgagttggaaaaagattgagtagggactgacgatgacgc

SEQ ID NO: 30714 - DNA, 1209 bp, Oryza sativa
atgccttatattatggaacatctaaaaaaaaagtggttgtgccttatattatggaatggagggagtaatgattagcaagatacaattgaagacatgggagaatgaagacgtgtggtgtctaggaaactgaacttttgaaagaacgacacgagttaaagccaaaaatatttaactttttatggtaccatgtcaacgattagacctattttctttattttcgtctattcggattttagttaccgcttgaagcactgaacatcttcaattcaccacatatagatcttgcacaccttccttttgatctaacttgatataactcacctacaatcacgcacaatcactatgtaaataaatttctatgggtaatgcacttgtgcagcactccagctttacggcattctaattaacttgatagctggcaaaacctgacagaaatttactcatcacttcaacataatgatgtttgatatctagtaagctgaattgtaaaaacttaagtgaacagaaaaaaaaaactgctgatagccattgctaaataagtctcaacataacgtattgaagttaagtttatcctgaaaggtttcctttaaaaaaaaaaaacttggacaccaaaccttgattttcattattttaagaagcaacagtattccatcccacgactgcccctgccaactgcgctagcactgttctcatcctgaaagcttcattgtaacgtaacatctgatgatcccaggcaagcaagttgcagaattagcaacttggaattgatactagtcaaatcagtactgtaaagataagtgcatcttacaaagtttcaccagatgcacatgcccagatatgaagtgtctgaactaatgccctcgtcactttttgtgcaactataatctattgcatcacaccatgtaatgagagaaatgaagatgaaaaacttacctgaagagttcttatgggaaccatgtccacagcatggctagggtaagcagcagctatgacaagagaaatttcataatcacaattaattgagatccactgtaaaaccaacagtaagtatgcgtagattcaaattggataacatgctgaaatagtattgcagtaagacaatcattggattctattacaggcttagagctacaatatctcaagtcagaagagcgagaaatcgtaaggatgcacagaaagaacaaaaaaacagatacctgtatcgaacaa

SEQ ID NO: 30715 - DNA, 674 bp, Oryza sativa
taccataccagttagtataaaatttagaccaaacaaaagcatgccagtgattgcgttatcatgtataggatgatcccagcatgcttggtcatttttatgtttctcaaaatcaagtgaaggttctaagttgaattgctcatcgccaccctcactttgaatggaatactttgcgcatgaaaaaaaagaaaaaacaggctgcaattccacccaataagttggaacaaatatataattccgtacataattgcaatgcagaagaagatgtgtgcaaggaagaagaaagaaaaatctatacctgcaactcccattgcaaaaggagatgagctgccgccgggaatcatccgcgacgacggccccgggaacccgccgctgccgctgctgctgccaacctcgaaaagtggcatgtaggcgagaactccccgaagtcggtcaccggcggcgacggcgacggcgcgggtaggcggaagaacggcgagagcataggtggtccagttccgccgccgccgccgccgccgctgcggacgggggaggcggcgtcccacgcggcgagcggcgcgccacgcagcgggcgcgggctccagcggaagggaccgaatccgggggcgcccatcgggggaggcggcggcggcggcgtgcgggactcgtcggtggagacggcgtcgtggtggtgctgc

SEQ ID NO: 30716 - DNA, 2138 bp, Oryza sativa
atataatttggacaaattcaatttagaaaaaaaatgtttttttgaaaaacaacgtatgagtagtatataatatctagtgctagttgcttaaaaaaagtttgtaaaaaaatgaagctaacatcatattttgcaaccaaaccgaaatcgaaactaaaaatagaaaaataggctagggcaacagtgagcactatccataaaacccatttaggcttgcttgaggggaaaatggatttggcaaaatttgttaaacgacatccaaaaaacatgtaattagcatatggacaccgcaagaacgtgaatttgctgtcagataccaccaaaaactggtaattagctggcagataatcgtggtcttattttattatttccggaggaattatacataaagcatttcatagtttgatagaactggatgtaatgtagatttgatctgtcctaattctgcttctcttcgacctgctgatattctttgctactaattttctcgtatcgtctaccaatttgttttctctcccttgtcacccattgtcacacacgtagaggaactgaggaatgttggaaacaaaatgtcatgattcagctagctatttctcaatcttttacgcgaaatcctgatgggtatagagccttgctttgtctattttccaccactcacggctctgtttgataagcctgaaagggtatacgaaaataaacatgttacaagatcagatgtacacaaatgaagtagagtaagtaatccgctaatttgactgactaaagaactcggtatggtgcacatagagtttcttacaatgaggttccagatttctgtgcttcttttccctgatgcttcccatcctcacgatcactccaaaattcggacggattctccaaaattcataaacgttctcgcgttcttgacttctttccaccctactgttttggatgtttgtataatgaagatggtgatgagaaactgggagagagatgaggtagatgctgcaacgactgattcccaatgattcccatccttacgcataggggcggagctagagcgaaacagagggtggtgccacttacttaatttactctactatagatcaaatttaagctgatacgggtgcctaaatttgtattgaggggtgtatacatggtgaaaatagatgaggtatagctaaaaaaaaatttttttgaccgggttcctaggcatccccctaacatatactagccccgccccttacacacacatatttagaaacgaacatagcctatggcaccagatagactctacagcgctagttgaaatattcagacggattctccgaagtcacaaatgttctctcctttgctttgtgctatgttcttaatttcttctgttttgatttggaagtttatataaggaagatggtgaggcactgcaactctgtaagggagatgatgtaggtgttgcattgatcaggttgttaattagtacgtagcagctaccgttgcagattataggacaagaagaaatcaggcaaacgaattagatatggaaataataaggctcttccttgctagataatagttgggagaatagctactgtagtccataaagtttctatgtaaaattagtttagtccctaacctttttaatagtctaaacaaattcttaaactttgtcataaggcttagaataattcttgggtccaccaaaatcgtcatatggatatgccatgtaatcattcatgcaaaatctatgatgaaaatgtaagagtgaattagacataaccataggaaaaaatacttttcctttttttcaccctttgatgtatatttttgctcttacatataccatacttttttttaacttttttcattttgccttttatttttctatgatatatgtaagggtaaattggacaaattatatagattttacataggagggtgacatgacttgtccatggagcgattttggtgggaccaaggacaatattagcccatgtgacaaatttaaagaatttgtttggataatatgaaagattaagaactaaaatgatccaggagtgaaactttagggaccattttggctattctcccataatagttggtgcatgcaattaataagttattgatttttgggtaatatggctaattgatgcagttcaatgtag

SEQ ID NO: 30717 - DNA, 1305 bp, Oryza sativa
ccagagtacatacatcaacctgaaggtaccactttatgttgatcatgcacataaagttagtcggaaatcttaaatcttaatcctatttcctaatgttccaaagcttctctaacatattgtatgttcattgagtgttgaatcctaccaaatgaattactacgtagaaaataatagaaaactctagatcaaacgccaagaaaaccaacaagaggtggaaaaccaagaggtggatccctatctacactgaatcaaccaaccttttttttttgttggtaggtgccgatacgaccgatgtcatatggcctgcaagagatatctatgctcacgtagtataattagttcagtagcgaagaaggtgtagccataacgtcgattttgttgtcgctttgttgatgtccactagatagagtgacgctcctatactaatcactaaagtcaaatatgcaatgggaaacaacatatttgtggtcatatgtatttatatctgtaactccttttaatttatacacgcattgatcattatgtttgccaccacaaccattacacatgttctttgacattattattttacatggaaaaaaaaataaatctagccttttgcccttacaatcatgcatccataccaaaatacttttacaatctctactaggggtgcattcggctggccttgctgccgcaacggctacggctgtgacattgtaaacggttgtagcacccagccggtttgaactaccacaatcctcaccaaaatacttttgtaaactactagggctgtgttcagttggccttgcagccgctacggctgcggcagatagcgcatgctattagggcctagttttataatctagatcaatactttgaatctattcttattttcaaatgtaaacaataaacaacctcaggttagaaagctgaggtctaaaaagaaatttagtaccaagtactagtatatttttaaagctgttataaaatcacacattattactaacataataaaatggtaatgaactaaaatagcaaggagtaaccctatatgacaacaacaacaacccaaaaaaaaaaaccatctataggcatataattgtgaggagaaccacagattgtcctgattttcacataaaaaacctactttttcccagcccaaaatctcccctttgcctggtacactacctaccctttcttttgttgtccaattcatttccatttcttgccgttttcttccacattcttctctgctgctggtgtctcttgtgggccgcgtggaaagccactctctcctcctctttgacctcgctatctatccat

SEQ ID NO: 30718 - DNA, 685 bp, Oryza sativa
ttctcatggaccataaaagttctcttttcattatttgttccaaaatagaagaagaaagactgtggacaaatgtcaagaagaaagcaaatgagagaatatttgtgatttgaagaatccatcagattatactagatattgttagcactatatagtccatccatccggtgtcccatgaaatgttcgtttctgaatctccgtgcgtgaggatgggaagcatcaggaaataggaaaccggaaagaccaggatgaatagtaagaaattgagtgtgtggtgtacgtatcaattcttctgacatgttctcttttcatgtaactataggccttatcgtttggctttcttgtaacggcttattagagaataaaaatgaatttgtaggtaaaacatttatatatgtgttctcggtgacttaaaagccaatgctgaaaaagaatctacgttaaaaatatcttaaagtcaatgtcaaaattaagtttaaaaattaaaatgttggcttttttttttttggctgaataggccatccgataggagcctatacctttttagggatatgaaacctagcactgagcaaaggagaggagatagagcggactatgcagcaacgctcttcgaagtagatgatgagtgtttcgtcatatttccatgctcccgtctcctttttcccttcttttttcaacccgacaataa

SEQ ID NO: 30719 - DNA, 688 bp, Oryza sativa
tcttaaaaaaatgaaatactttatccgtatactattaacttctattgtaatatttatctattttttactcaaaaattttatataaatgttatttattttcattaaagaaactctaatttaacttgcaactttatatatttctactaaatttctagttttaaattttaacttataattttatatatttatactaaattttgaacatttttaacaagataaaagttgaagagcgtcgcatataaaaaaaaaacccggagttattagtatatttaatatttcaatacgagatcccatcgcagtcggtgaaattaatttgctggcgtggagcaagggctgctgctgacatgcatggcatggctcgcaaagagctaaaatccacgtaatgcatgtttgaccttggcgcacgtgggctatatgcatacatgtacatgtaatagatcagtctattcgcaattcacgggaatagaaaggaaaggagataagaagaaatggaaaaaaagaagaagaagaaggagaaggaggagtgttttatttttattttttttatgtgtaacatatggatcccactaacacgtacgtgtgactgaggagtaccacatcaacgcgcggagtaggttggagtccatttagactagctatggtacctaagacaagtttaagagcttgaaaatgtgtataaaagtttcgg

SEQ ID NO: 30720 - DNA, 903 bp, Oryza sativa
aaaggatatagctaagagtatggaaattttggatgagattctgttattaggaaatcctgtcctgatgacacttattctgtcttcctgtttctctcactgcctcttgtcttctttgctttcctcatcacagctcctggtcagtgacgcttggggccaaaaccacctacccatgacagttacttgttacaagtcccgtataattcatgtcatgtccatacttaccatgtcaaccagttccatatacgatacaattagatatgtatatgttttggcatgtttgctttaatctcaggaagctagatcatttacgagtatattacaagtctagcctgtatcttgtatatgccaggacaaccgcctggcataactatgagttttaacacttgctagtgttgaatctaaccattactttatttttcacccctcataaatctttagaagcacctgtgatgttccttagttactataagctaattcttaatccttctgtattgtcatatcttcacttaataactagatctccttgctgccttctattcctgttcatcatatactattaccaaaaattaaataaataaacattttcaggctagattgcatgagatcatcattacaaatgctaaagcaaagaataccaatgaaccagtggagtttccatggatggttgatggtgcaggattgcctgcaaatgcttcgcagcttctccctaagatggtacagtactttgactggatataagcttggtctttttcataagcatcttttgaagtattcaaataatttacagcatttgtttcaataatgcatttctaaaccactctaggagaggttttaataataagagaagacagctatggaaaatattggactgtctaatgtagggcagtcttttcttcaaaagat

SEQ ID NO: 30721 - DNA, 726 bp, Oryza sativa
aaattaaaaatatttaatcacacagaaagaaattagaaaaaacaaaagtcataaatagacaaaatggtacgatcgagatcgaaaatggtatcccttttacataaacgacttttgatcgatcgggaattttcgtgatagttttcaccctatcggtgagtgtccggttaaaaaaaaaatcgaagaacttattcaacaaaagtctagcccccacctccatctgcatcgtgggccagatgttaggcccaccaggtttgccccacccttaaaccccaccaaggcccaaaacaacccttccgtcacgcgccgccgccgccgccgccgcctctctcctccgtcgagcgccgccgacggccgacccactctgtccgaaggcctcaccgtccgcaggtccggctgcggctggaagtgggggtggctctccggtgacatcaaacagttgcggcgcctcactccatttcgagggttctgcttttgcagagtccgagattttcgttccagatccacgtgagttttcttcggtcatggaggcgtcggattagtccactccgggcacgggattgacgcctcctcttcacaaaagtcggaagctcccttcaaattgggcatctcgtactcaggtggtaatggtattctagttcacttctgaattatgattcgttcaagaaactttgtatgacgtcccttgtatttttagtgcaaatcctttctgaaattctttgaaaatcg

SEQ ID NO: 30722 - DNA, 716 bp, Oryza sativa
cggtttttgctaaaaaactgttgacagttcttgaatattagggggaggttgtcaatttgtagttgtaggcttgcagcttggcttcctgatggaatatctttggaaaccggcataatccgatggaaaatgaaatattttaaaatatttttcatattcttattatctgtggttgaaatggctgacgtatactttcgtaaattttacctattttaaggtttttatttattgtcattttatcatatggaggtataacaacgttgtcttctatagttagtgtaggaaaattttcaactacatattaccatactgcatttgttaggattagtagtaaccagaatttaaaatatagtttgtcttccgtcacaaatatatcaactactttcaaatgagacacatactaatattatgaatgtagatagatcttatcgaatggaatacgtcctacaattatgaaactagacagtgtgtcccattcgataagacttgtccagattcgtaataatagaatgtggcatattcaatattagttactacttaaatttagaaattgtatttgtagtcttattgccataactaaatttatcataacggggacatttttatcattatattgtatttctcggccttggcttctggactgtttagaatagaaatatagaaaatcttaggcttcatttggcagtaagctatcctaacttctactccctagtttttcg

SEQ ID NO: 30723 - DNA, 1286 bp, Oryza sativa
ttgttttgtgtcagaaatgttactatttttttaataaacttggtaaaatttttaaaagtttgacaaaatcagtttagatagttttcggtatccgatcttattttcggaaaatgatatctcaaacgaataatttttatttagtaccagatacggaaatgaatacatattgcttttctcagaaatgaaaattaatatggaagacaagtatcagacggaaatccgaaacggtcggaaactatctgtatttgttttcgaatatccgcaggtagtaattagtttttagagaaaacatgtatatatacataactctatcatataaagtcagatgaagacgaactttgtatcaaaattgtagtgctcgatgagatctataattttgttgttgacaatgttatcatttgaaatcatttagagggttaaatattcattacataatctcatatccatttttataaattcgcacaccaacaattcaaacgactttttgatggagccgtgctgcttgataggatttactcctttgtagtttatgaattctttatttgatattatttgaagtgcaaaacagatagtacaagttttggggaggtgaaataaaacaaatagtattttcaatctagacaacatgagcttaataagtaagttggtaagtaaacaatgcatggagaagagatcctgggtttgatcaaaggactgaaaatcagttctcacatgtggatttcttaaagaaataaccatgaaaatcaaatttcacaaacagttgtgagaccaccttaaaaaaaattgacgatatggaatttagaaatgtaacaaactatatctcttccttggttcaggaaactcaatttgacttgtttttataattccaataaatattcgtcaccatatttgttccatttcatatttgcttcgtatatatagtcgattccatttctgttccgggggtcttcgatttcaattttatctctgaagaaaataatacaaacaaatatggtagagctgttcctgtccgtttctaatccgttttcatccggattgaggaggacgtgaattaaattcggtccatagttgaggaacttatgttgaacttctttactaagaaatgtcggcctttcgagaagctgggcctcacggcctatgaagtattcgaaccgggatagaattgggccgtgccagcaacaactcgctgggcccattaacggggttcaccgtatgctccgtatgttcgaagatccctttccgaccgcgccaccgccaccggcatcgcccattgccatcgccatcgc

SEQ ID NO: 30724 - DNA, 585 bp, Oryza sativa
taatctttttctactatcactaaattatattctatattttattgaataggtgtatgtataatggtaaccttctcatatatatgtttacatagggtgagtttgaggaggaggggattgagaagattgggaagatacgcaaaacgaggtgagccattagcgcataattaattacgtattaactattttaaatttcaaaaatggattaatatgaattttgaaagcaactttactatagaaagtttttgcaaaaaacacaccgtttagtagtttgggaagcgtacgcccagaatacgatgtcctttctcaccctatgtcaccagaatgaacgctcccatagtatcctaatcgacccctaaatcaacaagattagtcatgtaatgtcctttttacttccccgcatgcaccgcacaagtttgtgcaccaaaacgagtattttataagtttgtatccatctgacaagtttgtgtaccgacgatgcaatttacttttaaattaaatagaatatttatagctcactttttaaatcgaggtataaatattctattgcatggttcacgatttaggatttaaattctcaaaattaaa

SEQ ID NO: 30725 - DNA, 611 bp, Oryza sativa
actcctaattgcatctcatgattttctaaaataaaatatttaatagtgaatttctcctgagctgaactgtataacaataataaaataaaaattgcattcacccgttgcaacgcacgggcatcttttctagtaaagaaaaaaacaaatcatactatgaaaagagtagccacattttctgtttggatttgttacttgttattctatgaatgaagtttggtaagtgaaatgataggtggtaaaataatttatgttgtgaatttttcatgactatttgggttgcatgtataagacaagggcaaccctggatgacttaaaaatcaacttccccatgataccaaaatcctacatgtatatgcatctcattttgttcttttattctcatcacgtttaattatagcatgatggttcatatttcaaacatgctccacatagcatcttccatttttaagttcctgaacgccaaaaataaacaagaagggaattcccaatccatcgaggtcctcagcttccctcctccgcttttcttccagtctttctcctccgtctctcatcctctcgaattttctttccccccgtctctcatgcgccattgatcggatcgcttgatgccg

SEQ ID NO: 30726 - DNA, 1384 bp, Oryza sativa
ttcctgcagcccgtcctccaacggcggagaggaggcatggtaaaaccccataattaggattttgtgtagggctttaggaagtgagatggttgaccaatggcagttttatggtagagaggcggcagtagaataggttttaccttgacggcatatcagtggtaagcctagttaactttggtaaccgacaataagtgaaattctacggtaagagccaactgttttgttgataagagtatgtacaataatagactataagtcagttctaagaatatgtaaaaaagatagaagaggagagagaagagaagtaggctatagattttagccagcggtagcacggactccaagacgatttgtgtgtatgacatgtgtgaccaattataaatgatgtagtatatatttatagtaaactattgtgtgaattgactatcgattatttggagttagtagtcagttatactactaaatttgctctcacaggaatggaattgttgagatgacaaacaacgtaactgattaggatgttgtggatctggtgaaggtagcttctgaatatcgatcagggagaaggcaacgacacaatgtatggtacctcaccctatcataagaagaagccaacatgaatggagaagcgaatgggggcagaattccatgagattttataaatagcaaaaataacttggaaacaggagctatacaaatatgacttaaaacattaaaaacaggtgagggaaggacaagccctaatcaacattgggactctccacacgcacttctatattacccacttcatagcatactttgctcgttccccttggcgtcgtgggacatcaagcgagagtcagcttttcttaccaccttgcaaggtttcatcatccacaatttaccctctgtttctcggagatgcatcaaaagattagagaaactgcagcaatcgatcctgttggggattagacgttacacagtgctttggtatatatgaacggataggatattcagccctgcacatgcacagtgcatgcgaattccctgtagaagcctgtatatatacagtagctagaatcgctggatcgagtggcatcgaagtgcggctagctatagcttacgctagctactactacctccgttctaaaataagtgtagccgtggtatccgtatccaacatttaaatatctgtcttatttaaaaaaattataaaaaattaaaaaaatgtcacacataaagtaaaatttatgttttatcatctaataacaataaaaatactaatcataaaaacattcaacgaagacgaacaatcaaatgttggatacaaacagtgcaaaactacacttatttagggacgagggaggactgtactatttcctccatttcataatgtaagtctttc

SEQ ID NO: 30727 - DNA, 2005 bp, Oryza sativa
acgttagggggcaatgaattgttgacaggcacgcacgcatcattgcgaacttccctgtgcgaagctgtgagagagtccatgaaagccatgagtgtgtgacgctgtgtaccatgaggccatgaatttgccttgaatagtggctgggtaatagcagggcagcagtagccaattcatctcaacgtagagtaccagttgaattaattcaactttttttttcttatgaataaaccttcagtcatcagtactagtacaatcttagagcatcctaagtttgccgttgttcgtgcattgtaacagtaataattaatggctatgtaagaccagaaatacaacgctctttcagatttatcctaggacgccgtacaaaacctaagaaaataccagtactatgtactgatagtgctttcattttcttgtttgagattagtagtagtgctagtgctagtacaagtcgtatacagtttgcaacattttagtgcttgtgtatacggaagagggtggcgaggagtgatgcgtgagacttgacgagaaaagggttctgaattctgaaactgaaagaactggaactgaaaagcttggccacacttggttaaagttgcatacatcacatgatgaaagaagccaaagactgggcatcttaaaagcgtgtatgacgaactggcaaagtggcactcgcttcttttctttcggcttactgttcacaggcgctgttccagtctttgtttttagctcgatgatttaatgacaatgtcggtctactcatcttggatgcaatcacgtaattagttctcagcaaccattgatagaattcctaccttgtggtgagtaaccaaccaagtatcatccatttattagtggtctcagtttaatagaaaccggataaatattggtagtactgtcacacagtcaccaactcaccaaccaaacgaaatggaaatatctctatactagtactaaggcaatagcattatagcattaacaaaagaagtctaccattgttcgcaccaaaaaagaagtccatttcatgactccaggacaggcgtacagcactagatcgtgtgaagctaggaagcaagaggacaaccacccatgtcgcactttactcttctacagaattacaggaacatgtcgaccagcggacaccataaattatagcatacaccaggctcctagatatacggatagatttccaccagacattcatctagacatttgcttgaccggcatgtacatgtcgaacacatttaaaaggtcaatgtaattacagcttacgaagttacaagccaatgagaaattcgttctttaccaggcaggtaccatacagaaatcttatggaacccaccagcttgccctgtacaagtcatgtgttacagtgttaggacgcagttgctctggccagtgtttatgaacagcacattgaaatgttaccaacgatcccatttgaagccacgaatatattcatcatgatggcgcattggcacttcaaccattcattcccacccaatattggatggaacaaaaccaaaagatacctcctggtttgttggagaggattttgaagttcctactttctgtttttagttcatgaaatcagggtctgttattgcctcctgtaattgtttcgacttttatatctgtctgttcattctctttctccataatcgtgctggaagtatcgttgcctggcaaatcctctttatcatctaatatcctgcttgcctccccgattgcaaggattagttcaagttgcttctgttgttgttcctgcagaatagattaatgggttccattggtcaaaggcaaaaattgcataaggctaagctccataaggaaacgattatttactggggtgtattggctagtcattagtatttcggagggcaacatcagctatgaaaaacaagtgagtcaccttgaaaagacaacaaaaacattgatgtaataattaaccaaatcatgatgttaagctctagtcggtacatgatggttactaaatttgtggtga

SEQ ID NO: 30728 - DNA, 633 bp, Oryza sativa
gaataccggatatttgacaccctaaacttgcaaaaccggacaaattcccccctccccccgctccaaatcggaatggtttggtcctacgtggcatacatgtggcactagcatggcattccaatccgaaaaaaataaaaaaataaaatgggccccacatgtcatagggagtacacgtagtactaagctctctctcctttgatgtcgcgggcgcggcgtggcgcagagccagacgcagcgtggcggcggggacgacggggatggcaggaggagacgtgctcgccggcgaagtccaaggaggagctgcgcgccgcctgtggaatcacggaggactagtcgccacggagctcgtgatggcggccgagggcagcgccgacgcagttggggaaggcggctcagctcaccgggggctgcggcgccgtggaggtctgcgacgatagcgaccaccccatccccgtgggctccgtcaagcgccgcgcgccgacgccgctcgattgggccgacgacgctgcagacgtgggaggagatgggtatggaccaagcgacggcgaggccgacagtgacctcactgccggcgtccccacgcgctgccgtcccccatgcgctcccacacgccggcgtccccccgtcgcgctg

SEQ ID NO: 30729 - DNA, 939 bp, Oryza sativa
attcctgcagcccgtcgacggtggctgcagccccgctccgcgccaccgccgggtagctcgacctgccgacttgacttgcactgccaagctccatctccgccaccactgccccacgcctggccagatccggcggctgctgccgagctcgcggccgtgggaggggagaggacgtccgctgctccgcgttgcccccgcccacttgttgctcagctcggtgcttgccggagacaagctcgatgatttcgcgtcgggtcgctccacgcagcgtcgagctcgtcgctcgattcgcgtggccgccgcatagcttgtggcgacgggaggggaggggggaggaggaaatgcgagtatgtcgtcttcgtcctcaactcacgcgtctgccgacgccggcaggaggaggggagagccgacgccggcggaggaaggaggggagagctcgtcgtcgtctttgtcctcaactcgcacgtctgccggcgccggcgggaggaggggagaaccagccggcgccaatgggaggagagagggagcaaaaggggatttgaggaggattttgtgggtggtttgacgagggagaagggatgaaagatatttgtgggtcccactataaggttacttgcattgtggagaaaatatttttgaatctcttcatcctatgtgtcagctcgtggtctttcctagttggtgcttgcactgttagtgtcctaattacactctccgtgaaaaaaaaacgctcaatcgatattggaatttgacacaatctagaataatcttgtttagattctttgttctaggttttgtgacaaatttccatctagattgattttttagacagatagagtactaagatagaatataagcatactcacgaaggtaacccgtacttatctttggattgtaggtagggcagtacttaagattaatatcacttctctattgtatcgt

SEQ ID NO: 30730 - DNA, 763 bp, Oryza sativa
aaggctgaactgaatcgacgacgaccaaggatagcgacgacgctgacgacgaccaaaacaaaaaaacgatctttgcgtgaggaggaaagaacggcgacattttgatattctacttacaactaccagttccggtgagggcgtcggccgcgcgttttcgagggtcaatgccgacagctgcggacagccgttggatggtgatcgtggggcatcaccaaaactccaaaatgtgtcaaagaaacagcggccggtaaccgatccgaagccagagaccagggcgtgtggttaccggccagaaagctacgaatttatagatttaaaatttgaatttatttgtttggttactgatcaatttgtttgatttttttagtccagtaagtgattactggtttttacgaaaatcggtaattttggaccagaccaagataccataatctacttcaatgcaaatactactttttttttggataatagaaatcaatctagctgttcgtatctgattcgagattttagattttcgtttgtacatggctgtgttcggtgctctgcttcctaaccctcatcctcgttttccgtacgcacgcttttccaactactaaacggtgtctcaccctcgtttttcgcgcgcacgcttttccaactactaaacgatgtgtttttttacaaaaattttctatacgaaagttgcttaaaaaataattcattttttttaaaacaagataatacttaattaatcacgcgctaatggactgcttcattttccgtg

SEQ ID NO: 30731 - DNA, 1107 bp, Oryza sativa
atatgcgagtatcttatgggaactacgatgaaagtcaatctatctataatatactaaaagtccatcaaacttcctacaaacactcctaaaccgccttgtggcatcctataaacgctctcgagtcgccatgtgtcactctaataaaatagcaaaaatctgaccattgattttcatttaaattggtgggcacattaattttgatcgttagatttatcttcaatcaaaggaaaaaaatctctgtccggagtccggacgtcagccttggtgcgcacgtatgtatgatccctccaaccaccgttcctctcttttttttaatccccataacaattaaaattaaataccttttatgggcctaaaaagcccatcaacctattagatctagccaactctttatatattctctcctaataaatagtttattcaacatcatataaatatttttaaacatatgtccagatttgttgttcttagatatgtcacatcatattctaatttgagttttgatgggacggagggagtatatagcactcttaaattagagaaaatctaaaaaaataaaatctttttaaaaaacattccaaacctccctccgtgctcccatgcagcgttaaagcacattaaccatcttataaatgtttctaaaccacccaatgacacttctaaattagagaaaatcataaaaatttaaaaacaaaacatccaactattggtttcgacttaaatcgtggacatatcatttaggttgtttttagatttttattttaaaaaactcccaaacctcatttccttcctccctgcctctacaatgttaaagacttaaaactacactaaacagacatatcatttaggttgttattagatttttattttaaaaaactcccaaacctcattttcttcctccctgcccctacaatgttaaagacttaaaactacattgaacatcctataaatatttctaaaccactatgggtctcttttaagtttaaaaaaatcataaaaaattatgagaggaaaaacgaaacatccgaccattggtttcgacttaaacatcaacacattattttaggttgttagatcaatcattttttttatgaaaaaacaccccct

SEQ ID NO: 30732 - DNA, 730 bp, Oryza sativa
ctgcacccctatatatgtaaaaccaaagctagctagatagcaattccccgtgtgccgtgccggccgctaggcttgaaaatgacaaatcgttgccagggcatgcagggacacgtagccttttgtcaatcatctttttcacagtacttttccctggtgttcatcggcgctgctagctagctgctcgatccaaagcgacgactacacgcgagcgtggtaaccacggcgacgttttgcaagcctttcgcttttgaggatttcgatcgtatgctattttgctagtagcacactacgcaatgtcgttggatatgatgtaccaactgccaagaaatagacgacggtgtggatcagatggcttcgtcgatctacttttatcagagtgcgtacgtggtttcaggtttgacatcggtttcggctttccttggattcctaaactttactgtactttggtttggtcctcgcaccctttgctactttggtttgatcattgtcatccttggtatacggtcgtgtgtatgtgttgggactttctactttctagagagacagcttctggggttttcaatttggtgagcttaaactcggcaaatttgagttagtcaaagctaataatgtaatgaaatcatatcaaagaaggtgaaatcattcgataaatctcacaaattaagttgagccattcacatttcacaagaacatcatgaagggttagaaaaaattcactaatcggtactat

SEQ ID NO: 30733 - DNA, 1054 bp, Oryza sativa
tactgcttaattttataggaaaaataagcaggatgacaacctgatgaaagagtttttcttttctattaaatggctccttcgaaacacaggatgtcgaaagcacgtgagcatgaaaatcacaagaatatggtgtcatcccataacgaatcctataggaagtaatttgctaggattttgcaaaaagcattgtttggtagcaccatagaaaaagcaaagaaactttgagtcacaaggataagaacaaatgaggtctaatctcatgttagttttcctccaaaatttctacaaaatgagaaatttcaaaggattttggggaagacattcctatgttcaaaggaccatgtagagaaattttccaatggatttgagttctccaaaattcttccacttttcctttgttccaaaggagccctaagcataccaattcttgcatttttcatcttcatatatggttttcctatcatgtgttcaaagatagccttaaattttaaaactttattttagagttggtttggtgtttctttaccttatcagtctatttatgttcaagctagatagagtcagtgcgctgaaaacgaaacaagccatcaacgcataactagtcgagtattaactattgctagtttaaaaaataaatttatttgacaatttctaaaaaaaatcgtgtaaaatacgccattcagtcatttgaaaaacatgctaacgagaactaaggtataatatacatcttaaattaaaaacaaacgaggccttacttactagtagttctatcatttcaatcaccaacaacacatactccctcaggccttatatgtgcatgagagtatatgtacattagtgcatgtgtccatgtccacaaccattacacaacaacacataatgtcttggtttgttattagctagaaaatattagggatgatgtatgtattgagtttattatcagagtaaatatagtacgagagagttattgacttttcttgattgtgatatacccatgtaatatgtgattagttgggaatagatagagtaaaaagatagaagttgatttatttta

SEQ ID NO: 30734 - DNA, 1471 bp, Oryza sativa
ttacaccaagtgctagccactacaaactaaccaacctaggactaaaatttgttgataatttacacatgacaaattaaagtagtaatctgctagttcatgaaccaattaagcatggttaagtaagtcatgcatatggtacaaaatggtaggttatattgtaatcatcatagttgatttgatcaagctagtgaagattacgcgaaaaccatcaataaatacttgacacggtaacataacacgagcccatgatagagaatatatatataattcatgtctttcttgcactttcttaacagttcatgctattatatatgctagattttcaacatgcacgtgcaagttcataattataaacacgttcacaaaatgtgtttaatttcaggtgtagctgtgttgtactgcatctgacctggtcaggactattaattactcaggccagccatatacgactaactacacaaaagagatgaaatgttcagacacatgttttaactctagtcagttagcttatctgattgattaatcatccatccaatgagctcaattgctaccaagaagcttaagctagcaacccaatcttactagctaatgcccacatatttacactaatgaggagtaaaaataaatcagctgttctatacttaatcatgcatggttataattaatctttattttcttaagcatcctaatctctcggtagttgggacagatcgaatagcttatgcttagcttggtaaggatgaatacgaaagcatgtacttctgaagagttcgttttcttgtcattcccatctcttcttaggattggttgcaagtccctgtcagtgctggaaataaatctcatgccttttggacattaaccgattgatccaaccgtgcatgcacactagctaatgttttctaacacctacgtcatcatggaaccctaattgagcttgcagcatacgtgtgttaattagttctttcaacttaaaccaacctgctgatcgagtcaatgtgccgtttgacgatcacaatttgtagacgaatgttcatgttagtattcctaaattacacatgctattattctagatgatggataatatttttactaatttgtatctagcaatactttatccatccaaaagtcataaatattttctgtttttttttataaataagatggtcacatatttgtagtctcttcgtgcatccaaaacttaaatggagatattgcatttatattttgcaatgctagattaaattgttaatcgaaacccgagcaactatcttaatactaattggttacatacatgtatatagtttcttagtctttgttacatggttaatttcttcttagtcttggtggcaaaaagaaatatgccttggactttttttatagagggggtatatatatatatatatatatatatatatatatatatatatatatgtatgtaggctcataatatggacaaataatattcaattat

SEQ ID NO: 30735 - DNA, 850 bp, Oryza sativa
cctgcaccccagccttgtgtgtggctctatctacctctagtctccatgcatgtgattatatggaaatatggtagggatggctgttgcaccagtgttgctcaggaaagagattaaaaagattactgattttgggagtggccggtgtagctcaccactcatatgcttctggctatagcttcttctgaccaagatatgtagcatggtaagggagaagcaaattgttggagtggagtgaagcctctctaaccaattggttgcaaccttcactacttctgtaccttttcagttgcttgcctgtatttcattggtgaaattaatataattgagctgcaccatatgtatatacttatctagtgggaaacctgaaaacctgtaatggctgcaaattgatatgcaaattataacagattatggaaattaaggaaaaaaaaacaatatttgttgttggagacttggagttccctttcactttttgtactgaacttgaattttgtatttgatgtatttatgctggtgactgacagttctatgagaggggacaaatcaatatacccttctctgtatttatatgagactatatatgagagaatgagagatagagagagaaatatatttgggagagagagttagttggatcaaggtcgactgttcagagcgaaccagactagtttggtcaggccttggtcagctaagttaatctactacatcctgacctaatctagtacatgtgttcttatgcaattcagttaattaggcttgacttggtcacttctgagtcgtctcagtttagttaccataatacaccagatacagtaagaaaacagttaagctaatgacataaatatgaatt

SEQ ID NO: 30736 - DNA, 1293 bp, Oryza sativa
tgtccacaataagcatcctaaagccccaatggtctaaaagatcaattggtaagtcctgaatcaaataattcagaggtaaacagttaactgcttggtgcttgcctggacctacagatcagacaaatggtggtcagaattctgatatggcactgcattgttcatgaatctttacttgggtgtttacactaaattaggtaattgaccagacagactatgccctgactgtgagcttgtttgaacctgtgtttgaggcctagtttagttcccaactttttcttcaaactttcaacttttccatcacatcaaaactttcctacacacacaaactttcaacttttccgtcacatcgttccaatttcaatcaaacttccaattttagcgtgaactaaacacacctggagtagtctactgttaccatgaacattgaacttgacgaaaaaaaaagtctacgaatgtttcgataattcaatgaaacctatccttaaatctagcaaacatgtctctttctggatgatttgttggggaacacaattttggggatgattaaattccacagtggggtcttttcaatgagaacattcattaagttaaatatgacttaattgaaacttctttttttgttttggtctcaagtgtctttcaagtactacagcagatgaagactgcaactgctagtgaacaccatcaatttggttaataagattcagttgagcagaacagacaaacaagctaggatcctgaattagttgggcagttgggcctacatgcttttacgaatatttgtttgacgaaaattatcagattcagattgctgaataacagtcaatccctagtggattctccataaaacccaaagttattatacatcaatggcaataaaaggaaacgtagtaaggttaattgcatacgttatttgtagattctgaatttctgcaatgttatggaaacttagctataagaaaaacgatgtgtctcgtaagatttcaagtgtatccatatattgtctaatggggaacctgaaattcatctgatggagtctgaaatttccttagatatgggtgcacttaagaaacttccttagatatttcgttatggggattctgaaactctgaatgtgatgaaaacaatttcctaggtcaggttctgcagttctgaatatactgcagtttacttgcagttatgcagtttaggaggcaatgcataactatctctctgttttttttttctgaaagtaggaatgcgtaactgtcaaactatttttcttaccggcattggtaatgttaacaggttctt

SEQ ID NO: 30737 - DNA, 946 bp, Oryza sativa
agtttcaaatgacgcggtataatatataatttatcactaaatttgtagttttgtataaattcagtgttaatttttagttttgtgatacatccttttaatatatatagttttgtgatagtttgattgaagtatataatttttaaaaatatgatcagcttcaaataacgcagtatagtactacctctgtaacaaattaaaacatgtcgtttcaggtatgttttaatttaaacttataaaaatttaagcatcaatatcttgtaaatattcagattaaatgcatgctaaattgcaaatcatacatttagttccacttccaccaaaagtactttcttattgttataattttagtaggttagacaaatatctcataatacacatcagatatgtatttgtgaaatttggattaaaaaacatatcataacataaatttgtgatcaaatttcatttctaagactgcatccagtgcaggacaacatgtttttatgaccagaagtatctccgacgcgcgagatcgatcggctgctcaagccccacattaccattaaccacaacaactaataattaattaggccaccaacaccatgtgccagctaggccatgaaaatgaaaacccccaaaagtacaccaaaagggccccccacaccacacaaaaccggtactgggaactgggaaaaattctgtttaacagtccggattgacatccacccgctgcagtcatttgcatcttagctcttgtagtttgactcttctgtgttgctacttccattctaaaatatgctaatcttcgtcccaaatataaaaaaataatatcagatagaatgtattctaatattacgaatctagataaacactatgaccaaattcgtagtattaagatatgtctcatccagttctaaattcttatattttaggataaagggagtgataacttttaacttttgacata

SEQ ID NO: 30738 - DNA, 768 bp, Oryza sativa
gaacttcctagtgggaatttttgagagacagagattcccacccggaggtttctcccggtctgtccggatgttccgggtccctggcagttcacaagactagtcacctcactttcttgtggtgctttaccttctctcacaaacatcaagcattctttcccatttaccatcacgcgcttagacacaggacttccacccgaaaacccgagcccgtgtccatccttgttaggatgagcggtgatggtcttgtaaagggcatcttttgaatggtatgtcttcatgcatccatatttcaccaatgtgcccaacctttcattctctttcttaagagcttgcatagcatcaatattagtaccacaagagttcaaatcaatattgtaacacctagcataaccattgctagtagaagggttagaagaattagaaaccacatttggttgagaggtgctattccaaagagtgtcaaattgaacttcaagatctttatgacttttgtctaaattaacaaatttttcttgaagagtttcattgacatccctaaggctagctaaagaaccattagccaaattaagctcattagcaagttgttcatttttagcacattctttagctaagctctcctctaaggcaaggtttcttttcttctaaagaataagcaatttttcttgcctttcgagtgattgttctttactatccaaagctctcattaacttagccaaatgttgcatagcgggtttgctaaagctcttaagcacatcatctaattcatta

SEQ ID NO: 30739 - DNA, 700 bp, Oryza sativa
ccaccaaccggaaaaaaaatattttttagctacatgtgccataaacaagacatatttttttaaagattatgggaaagacagattattaaaaaaatttagttgtgtacacagaaatcaacatgtgccagctattattctatcaacaacttgtactaggcaaaacattacttcttattaaaaagagactcactgcaatcccaaagaataattatttaccaacttcatcagacccaagcatagagcaaataaaatatgacaatggagaacacagaaaatatttcagttttgctaaaaaaacagtaaatatttcagtggatgcatacttacttcaaggttcggttggtgcagagcttagattaatctgttgttgactatctactgtgtcttctcttctcttggatttcttcacctcttctttttggagaggcagcatgctgcagcctgcagaccagcgagaccttctcttccctcgtacgtgctgcctcctcctggatttgcttggggacctaagggattgcacaagaaacctgctactagttgttgatttggattttgcctatacgcttagtggatgggaggggatatggggatggtgaagagaggatttaggggtacagatcgagagtgatttttgggtggaaagtttagggatttgatggaggggagctgcgggaagcagggacaacctcaactgatggca

SEQ ID NO: 30740 - DNA, 2059 bp, Oryza sativa
taaagtttaaatttaacatttacaaagtttgtaacggatcaatttatagaggttgaatttaaacctgcatgttttagtgtgatatgatataacccatattattatcttaccttttcttttaaaaaaatgataattattaagttcatatgtaagaactagctaggattgtcttctggagagatgaaaagtcatcttccctaccaaggtggagtatatggaaagtgatttcatccctcaaggggatatcctcctgtttttggtaagataaattaatatgaaatatatcagtacacaaacacgcaagttaaaattcaacttctgccagttgtaacaaagataacaaatatagatgcgaaagtacgataattattttcggtttaatttgttctttttgttgtaacttatagatgtcgaatttggtcttgtatgtttgtggattcatattaatctatgttgtcaatttttttataactatttaactgatatgaatgacgaagaaatatcccctcaaggaatgaaaatccattcctgaagtatatataattatgtacactgcattgcaggggtggggtttaggagtaaggtagctagggttgcacccctactcttgaatctaaatatacattagaactgtaaaaacttcaaaaagtagagaattaaaggcaaaactatgtcaattacattagttgagccttagacttggaagaatcctggttctgctacacgtactgtatagtagtcacactgctccactcgatctctgtagccggccttaccgtatacgtacgtaggcataagtatgacatgtacagggatgggctctatatctcctgatgcgtcacttgtcatgcatggacacacacatcaccagctagctactgtacgtcactccactctctccatgagtcttctcgatccggtcttctctactgctctcctctacgacgaccttcgtacgtgcaaacattttccattggggcacgctcacctgatacagtccctgcttttatatctgaaccctgtactcttttttttgttcataccatacaccaaaaaccatcatacatcaatttggccggctatctcgtcgtcttctcacctagcaagtcgatcctaacacagagatcgaactagtgagagaattgaatcagtgagagattcagaaatcgagagagagaatcactgagagagctagaggtgtgtacagagagaagctggagaaggggacaacgcgccaattccgatcgatcggcggaggcgtcgcgtatgcgtatacggacgaaagcgagatgcgtgcggtgcgtggacggatgcgtgcgtggtctcggtctccgtctccgtctaccccctcctcgtcgagccgcgcgcgggtgggctagcttggcgccttgcgctacctcctcggagtttattttggccgccaccgcgcgcgactgacgagagaccccggccctcctccggcctaatttcgtctccttcggctgcatcgtcgtcgtcgtccccggccggtcatggccggcctcctcctgccgtaccagctgggccacaccaccgcagcagctgcctagcgaagaactgtgccacacatgtacaagccggccacaagctcgatccatctgctgtgtcgggttacgttaccgccagtaaccgcgcggttaccatggttaccagtcttaccgtgaggtacggtaatataattaccgcggtaacctccttaaatttaaataaatttaaaaaataatttgaacttttgataaattttacatgatttttcacggttaccgcttaccaccggggcatggtaaccccggccccggcggtttgggaaacccactcacaagagagggagagattgatcgatcgatgcatgatccgcatcgagatcgatatagaccagcggctattaataattctggatttctgtcacgcagagataaccaccgtgtatatacgtgctacgtactgtaaaccagtagtactataccaccagtgcactgttcaaggccttgatttgggagcggcacagtgctgaagcatgcagccgcgcctgtacctgtac

SEQ ID NO: 30741 - DNA, 529 bp, Oryza sativa
tttagaagcaaaggctaaaaaataaactataataaaagaaccctttaatcaactccaaaattaagttttcaaattcaaatttgtgttgctgcttataagctggaatgtaccttactctccttttggttttcccttttaacacaatatatatatatatatatatatatatatatatatatatatatatatatatatatattgtggtattgttggaagaaatgctatcttgacatggtactaagggaaggtatatatggaaactttgtggtattatttgatacctgtgaattttttataatatcaccgaagtttaatcttaaatgaggatggattgagaaaaggcgtaagattagttgaaaaataaatgagaggtgattgtatagtagcattgctaccgttgttccaaatagtttataaggcaacaaggtggcaaagagttccctccctacaagagagaaccgaagcttgaagacataggagaggagatgagtgggtgggacaggaaaagagggcaagttgagtcggctga

SEQ ID NO: 30742 - DNA, 656 bp, Oryza sativa
ccataccggatacatcccagctgtgctctgatggtctgctccttgcaccccaaaacactacccaacggattagccagattcccaacactatgaccccatcctctagcatgtactgctccaattttctggcctacagccgctatcaccgcctaacttacttggatttcacatgacttggatctggtccattaaattatcacccgactgcatacccttcacttgatcggggggctcggtaccacacatctcttattcataactatatgacacacgctcactggccgtagtattacttacatactgcccggacacctgtgtcgtctcacatcatattcctcatgctaagcatcacactcttaccagcgaggtatgtgaatagaacaggctaattccaaacactcgcttactagcatctttccaatcagaatgattatatggactcgccctcatgcacgtcataaatcactgctttcgtggtgtgaacattcagcctgacctgtacagtcaaaatgcctgaccagccaaattaattaacaatcctactgtgcttctggtgaaatacacatattactcccagaaagatctatgtacagggcttaatttaagacatcgatctattgctcatcaggaccattcatcactaataaataagaaag

SEQ ID NO: 30743 - DNA, 517 bp, Oryza sativa
gtatggtacagtagttcatcacctatacaaaatagcctgccagaaggaaagagatttgtatgtcaaatatgtcagatataagcgatgaggactatcaagcaagcataaatttcaatgggtaggacacaaaatgagctggcatggaacgcgagaaggaagaaataaattgtataatcaccttttccagccatagctcagattctgaaatcacattctaagagaaatatgatcaccctctgcaataatcttactgcaacctatcttctgctgatgagtttgaagatgctttgccgtagttgttcgccagttgcaatatttgaataataataacagcaagaaataaccatcttattatcagttcttttcttccatttacatacttctattgtgattgacagatgcaggaagaattcgattggccaaccttagtgttatcaacatcaccagaaacagaaaatgttacctccagctctgtgagaagcacaaccaagaatgacgtggttattcagcaaggttc

SEQ ID NO: 30744 - DNA, 1041 bp, Oryza sativa
gctttatttgcactgatctgatcgatcaagctagatgcacatgcatcgcttttgggtgatcaggattaatccctgtgttgacaatagttgccaaccaccttaatcttgagaaactcctacctaaaataggttcaaagattaaaaataacaaatgaagccgatttaactaaatatattaggggtaaacatccatcttataaacggaacgaaaggttttgagacaaacctacgaagtgattcacactctcatatcaaggacgaacggcttacggtgtaaaccaacaaagatggacgacctagcgtaaaaattaaaaatatagaaatatgaaaaaaaaagtagatgtggaattgaaagaacgatctaattggctaattgtattgttgcaattggctgttaattttattcaactgaaccgtcatagcccttataaagaggctagttttatttcaaggatggtcttcatgttctattaggcttatagattgactaaaaaaatatccgtgtgttgcaacaggtgaacactattttaatcttattattattgtacggtttagttaggaagaaattcattgtgggaatttgcttgtatattttttttaaaaaaatcataagctgcaaatagtagtccaattttcaactcaagttagcatgcgagtttttttaagagatttcttatacggcaccttttgcatttccaaaagcaaataaacttaaaatccgactcaaacacatatatgtatttccaagcgaaagaacttaaaaaccgacttaaatacggatgacgtattaaaataccggtaaaaatatctttaatatttatagtagtaaagatagagacaaagattatgactcaagaaaccttgtgcccaagtaaaaaaaaacagagaatcactgaaattagactcgatctcatatagggctctcctattagaccagccttaaatcaccgagtcggataaaccatgtgcaaaatgctcatatccttttcaaacttggccaaacctaactatatgctcatctagggttaaatttggacccta

SEQ ID NO: 30745 - DNA, 584 bp, Oryza sativa
  unsure (1)..(584): unsure at all n locations
agggccggggccggggtttgtttagttcaactaagctttcgcttcaaaccagaggggaacttattacctgggtatcccactgctacatgaaacaccgacccccccttttggggttttcccaaaaaaaaatccccccccaacttagtggcttccccagtacataggctgatcctgcctttctttttatcgtaagtataattacgccttcactaaataactatactagttttactcggtaccaatgtttatgttgtttgcttgcctgcaggaattcttggatcagttcttgtaggtggtgatgccaaactccctagtgccggggaggtactttctggtgctccccnnccccaaaagaaaaggggnggggtttaaaattntggggtatatattgggccccctcacatgccctaactatcaacccagaatactactgctatattgattatatatcttataactcaccgtcacatgattcctttcccccctagtttgtcaagaagcatggaaacgaagggaaagatacatcgtctaacaccgatacacacaccgctcagctattatctcaggtcaaccatctcagacag

SEQ ID NO: 30746 - DNA, 524 bp, Oryza sativa
caaacttttggcccctttcatcaacttcctgcacaaggacaggagagattagcaacaggacacccaaaagaaagagagaagatgtgtgcccctcaagggttagggattagaggagagcaactacacatgtacaaaaagatggcccattccaacaaggagaaaatatatttctcttaaaccagcagaggataaactgaatcgagccaaaagagaaggaaaaaaaaaggcagggtaaaaatgagaaaccagctccttctttattaatgaaaaagaggcagccctcctgccctcttattcgaaaaaaaaaagagaaaccagcaggtggtgaggcaagaagaggtggtggtgatctcataataaaacttgtgtaagaaaaagatgtgacgattaagctgaagcctctagaaattttggcatgaggggaggaaaggacgactcagctcacctgaagcagcagcagcaaagaaatgaagaggttgcaggaggtggaaagggagagagaagattaatggcaaaatgcagta

SEQ ID NO: 30747 - DNA, 626 bp, Oryza sativa
aattggctgctggggcatacatatataagtccttattctgggttggtgatgagctggccttgcatctcggaacaaaggtttttcctgttgcagacctctttctgtccattcacttgctcgcatatgtcatcagacctatctggttgctggcttgcaattcatgaaagaatgctggtatcctgttcagtttgggttgctttacctgattcagaaaatcttgggtattattactaccactgcctccggtttataatgtaagtaattttagccattcttacatttatattgatgttaatgaatccagacagacatatagatatatgtctagattcattaacatcaatatgaatgtggtaaatgctagaatgatttacattgtgaaacggagttcacagagggagtagttacttttctcaaggaagtccagtagactagagagatttgatactagtctgcactgctccagaatttgagcatatatgtataagcgatctatggagtgttgttgggctgatgtatactgaagattgtggcaagaaaagtaaaagcttgattagtgtgactgagtgcattgttattaatgcgtcgagtgtctaccccatttgtctcaaaataagttcactttt

SEQ ID NO: 30748 - DNA, 638 bp, Oryza sativa
ttttggccttatactgggcactgcactacgtagaaagaactagctgatgctacctaagtactacattgaacgcttgcaactgatgatgaaataaccgatgaatcttgtggtgtttgaatctcctaaagattaaagattaagtgtttcacgtaaaataagaggataataacgtgtgattaattaagttttaattattataaacttaaaaatggattaatctgatattttagaacaattttcatataaaaagttttcgcacgaatcacaccgtttagcagtttgaaaagcatgccactttaatccaaaatttaatccaccgttttcaggacattcgaacggggctgttgctagtgttgctgtgacttgacttgcaacaacacagcttaatctgggtttaataatactacaatttttaatcaggaaactgggctataataattactagtaaaaaaaataggggagtttatatccaatctttttcttatatgcaattcaagtgatgggactataggcagcaagtactagtgtagtatagtaaacattatggtgggtagatatatatatctccaccgcacattcctcatcgagtggaccttgtggtcagctgcatatccatatttgtatgtagagaagaatgt

SEQ ID NO: 30749 - DNA, 592 bp, Oryza sativa
atatatgtagcaaaatcaaaagtgcaccattcatagcatttcaagtaaattacaactagcaaatttcccacgcaaaattaggcgaagccaatttttttctttttctttttagtaagagctggatttggcatacacatatattttgtttccatagatatttgtattttgtatacaatagatctttgaaagtagaattacatttgatatacaaccactagcttctatgtctatacgtccaattgtattttgcgtacaatagatttttaagaatatgttttagatttcatacacaactcttaccttgtttttcaatagatacaattatattttgtataaaactgtgtcaattaatctacatcaacacaatataattgttaatgtggtagtttgtaaacctcaagagttatctcgtactataatagggagatactaataacatatagtcagcagaggcagtttaattaattgctgcaagtgcaaccaaaaccattgggagtgcagggcagcatcagtacagtagcagcagggtcccaaggaggaagaattttggtggcattttgcgtggcacaatggtaatggaaagcatgaagta

SEQ ID NO: 30750 - DNA, 875 bp, Oryza sativa
aatccaggcccccaccccagcaccagcaggcagcagcacaagaagaagaaagcgggggtgccgtacgagtgtgagagcgagaggccagtagtacagagagacagacagtaggagacgaggaagaagagactgctgcgctgcaatgccactcccttcaccactttcccctccttcacaattgggaaaactcgacatcataaacatggatggtgcttgtcagttgtcactgtataagcacttcttcggacctattcagttggtggaatgaaaatttttgaaatgtttgactggatgtcggaagggattttcgaacacaaataaaaaaactaatttcataactcgcctggaaaaccgtgagacaaatattttgagcctaattaatccgtcattagcacatgtgagttactgcagtacttatagttaatcatggattaattaggctcaaaagattcgtcttgcgatttacatgtaaaatgtacaattagtttttctttttatcttatatttaatatttcgtacatgtgtccaatgattggatagaatgtttttgaaaaaagtccatgaggaactaaacagcacttgaagaagggtcctcatcgctatacgatacggtcctactcctactactctgcaaatactcctaggtggtgactggtgagaatcctgaatattcacatgactcctttggagtactcttctgacctgctttcttttctttccccacttttgagatgagatgacataggcaaaaataggattacgcagccaaacgatgttagaattaccctagtcgcactagcagattagtatccataaaatcagatttagcaagatactaaaacgaagggccgattccgattagaagggggtgcagg

SEQ ID NO: 30751 - DNA, 598 bp, Oryza sativa
gaacagcacagcagcagatgaatgaatgaagcgaaacgcaggaggagcaacagtacatgtcctcgtcttggtactgtctgcatgcagtcttggtgacggtgaaggcagagatatcgatagtgtggattttggagcccaggaggagatggtacagctgagccagcaaccaaaggatccttgcgagatcttcaggaggttcaactctgtcggcttgccccactcttcttcttcagcttgctcacttcacttcacttgttgattcggcatctcctcctctatgtgatgctgcttcgtggccattcctagtttgtacaaatgttactagatagctgcattagtctggtaaatgcaacagttaacacatcatcagtcaccatttgcaaagaacataagctttgcttcttgctaatcaatcatgcttgtatctcaattaccagaatatgcatgggttctactactaatgaaagaagcagtggctgctcatctcgacctggtgaagagagccctgctgctggccttgctctccaacttgcatcaccaccatgttaatgtggctgctgccatcctgcaatgcaaaggtgaagcacagacagcgcat

SEQ ID NO: 30752 - DNA, 525 bp, Oryza sativa
gattagatagatgcgctcgctctggcggcgcacacaaaccacaccacatttattagctggggccaccatcaccaaggcgggcaggagtgctgcttctttgactcagatgggctccattcacttaacatctaggagaacgccatagagacagatatacagaaagagcgggagggcttggctatttgtaccattgctgtatcagctggggccggccagcccattccatctttaggagtaccaacttactaaaccttatcccatccaatccgtcatttatctatctgcatatactcacaagaactctcgatcagtcaggctatcatcttcttcatccaggcaaacaagtactagtgcacagcacatcaccattgctgcttcagttgattattatcatcgccatcgccagtaagcacagcactctctcttgtagtgcccatgcaaaacaccaccagtagcatacatatatagtacggcaataagcaactcgatgatgcatcatcataacaggtccaacagaggactact

SEQ ID NO: 30753 - DNA, 601 bp, Oryza sativa
agcctaattacgccatgatttgtcaatgtggtgctacatggagtaattaggtttaatagattcgtctcgcaatttataggcggaatctgtaatttgttttgttattagtctacatttaatatttcaaatgtatgtctatatacgttaaattttttttgccaaaataactaaacacggccttccttagtatacgtgtaatacttcaaattagtattagtgtccatatatctaatataacacgccaaaacttttcatccctggatctaaacacagccttagtacccctgtgtctacgcacgctgtagtaaaaccggcaagatcaaccgagcagagcaagaacaatagcagagatgagttgatggcaattttctggatttctcttctcaccgaaatcaaagtgcgtgatagtcacgaatataaaatcccattacaagtttttatgagatgataatgatgatgcttcatcgtaagttagtaacagatcgacaagctactggctgtttgttccaactagagaaatttacataaatactcctaaccaccagcgcagggaaacaaacacgtttcttgcacccgaatgcaaaattgccaagacccctgt

SEQ ID NO: 30754 - DNA, 1661 bp, Oryza sativa
taaattataaatataatttttatatacgtattcttttaaataaatgatgcaaaataaattttgataaaaaaacttaaaattaaaaatttaaattttaagttgatgaagataagtatagacagaaaaacgagaagatgatgtccttgggattggtttgttccaatttgtacgtacgggtccattttatcctcatttcagtacagtactaggctattatagcagttgaaaaggtgggtgaatcaatcactcctactagttctcaaaaaaaattaaaaaaaaatcaatcctactttacctacccaacaaaattcaggcactttcttgtgtattctttttgggcacttttgcatggtaaaatgcatcttgtctcacctgtcagtcaaaaaagacaaggcaatttcaccgtgcaattctgactctcgtagcatgatgtttagtccattttcttattgtgtgcaattacttcaaaactgatcctaattttctgttctatgctctcttttttcacattctttctttcttatatagtagttcttgatataatttcatgctttttaccactttattttaatcttttgctttctttttctctttctcattcggaatttcggatgttggatgtgggttagttgatgagttgttttcaacggcgcccatttgatctccatctcgttatctcaggtcactatacgtagcctagtaccgctagaaaaggtaggtgaatctcaatcaatccttatttctaccaccgaaaaaaaaagttcaggaatctctctttttctttttttttcggcacttttacatgcaaaaatgcatttgtcacgtgtcagtcaaaaagaggaggcaagttctcctgtgggctatggcttctattataactctttcctttatattgtacacctagtgtttgttaggttttctattttctacgtattgctgcaggacaatattgtagaaattaaatacaataaataaaaaatataatataaggtgtaatgtagagtccatggggttgcattcctataaaaaaatgcatgtatgttattatagtgtaataaattatttacatgttgagttttaggtgtttcataagttgatgtggcattctttagaatgtaataataattgatatgcttacatattgagttttagatacttaggtttgtaactatatactatagaagatatcgattgagtggtaattgctcctcgtttgttacatccccgatgtaccctgcgaccaaatgccatacacacatatggggcaaaaaaatgaaaataaaaaaataagctggaaatgggagaaggggctaccatatcgatatctactaagaggtagtgaggctcgaagtaaagtcggctagcctaacaaactacgatgctagcatttaaaacttcatgtctttcacaaaattgaaaatattcctaagtcgacacttcttatacttgatttcttcccctatatattttaactttgcctatgtggtaaagtagttgaaccctctcctttttcttttcagattttagactatcaaaaagtcttctttgaatagatgacattgtcaacttctaatcaattatccatctctatgcctattatggcatccctgaataaatgttgcatctttcatgaataaaattaaacaatataatctgcacgg

SEQ ID NO: 30755 - DNA, 1124 bp, Oryza sativa
cttctttcacctcactcccctctacgcccatctcaacctaaacctccagggcattcgccaatgggtagggagaaggtgtcggtcggcgaggaaaagctcgacggcggaggccgccggctgacgtggctcccaacggccgggagcgctcacgtcatgaacgggttgcgcctcgatcgagccgaggatccctcacaccaaccccgcgttcttcctgctcttgggcggcacaaagccggcggctagacctcgatctgacgaatcagcaatggcgctagagcgagacagggtggcgcggcacgacggttggcgggggctcggtcaccgcgacgacaaacccgaggtgggggatcgttggcaatcgcgatgatgatggttgtgaggaaattcggcggcggtggttgaaagggaggagaggaagatcacgagcaatgcagaacgtggagcggactgtgggcgtgtgatgcgtatacagagatacaggagtggtaggtcgagacgagaaaattgatattataccatcttcgaaaaatgtggcttcgctaaaatacaactctcaaacgagtacaatttgctgctggaatgctattcattttctccattttacatgaattgaaaatgttttggcacatagacagacctttttgcccctggcgggcagcggtaggcacgctatctgcccgttgtctgttgttcttggttggttggtgagaggaggggaagaagccggcgcgacgacgagggaggcagcagcgtgggtgcgagggcggtggtgaggcggctggacaggatccggaagcggggcacactgtcgtcgtcggccggctgtgctgctgcgatggagtggaggagggggcggcgcagccatgtcggcgaggaggctcgtgggcgcgcgcgttctggcagatgaacaaggagaggctggctgttcggggaggatcgaggtggcgcgctggagcatcatctgcttcctcacagccgcgtgccgatcgatcgaggtgagtgaaggcgaggaagagcagctgcccgccgacggagaagagcagccgtgctgtccattctgattattcacacgaacgaagcctaccaaccctgaccaccttattgtctgaaacaagcccttgctc

SEQ ID NO: 30756 - DNA, 524 bp, Oryza sativa
  unsure (1)..(524): unsure at all n locations
tgattcgagttcgnnnnnnnnnnnnnnnnnnccccttccttcttaaaattgttcatttggtccctgttaacaccagggggaggttcacactctatagcatggcgctcttggctcaactcaacttggccactgcttggctgcccagatgtctcacctgctctccccagcccctgagttttagctgtacccaacacttgcaattcccaaaggacagacacttctttgggcctctgagccttgccaccactgttcccttagcctgcagtcctcttcccccttcacaagctacctcccttcctgatcatgatccccaggcagagcagggtgtgcctgttctgtggtcattatcaccctggggttacatttttaagaaaacttctcacagcaaaccagtagctggccagatcccttgaatgtttgctgagttgggtttccttttctgcctttgacaaacaaagaaacaaaaagatgttttgtaggaccctagcaaagctggcaaaaaataagaggagataaatataaat

SEQ ID NO: 30757 - DNA, 625 bp, Oryza sativa
ccacctgatacacaccactatttattacatactctttatttttcagattcgcaactaatatgcatcatatctaactaaaatttttttatattttaaaatgaatgaataggtaagtgattttgatatttccaatactcataccctactatgagagtatacattaatatggtttttcttagacaaaacgatattgtgtttgatttgtgttataataggtgtataatatggtcctcatcggatggccaaatgttttggctgatcagccaaaactgcctctaattcagctaaatttcaatgtatattggttagcttattttgcttaaatggctgatcagccaaagcatctggccatctgatgaggccatatatgttctaccaccatttagttacagtttacagtagacttaggtttttttaaatcactgcttgattaaaaccaataaaacaacttataataccttaaagatagtgacttactatctataattgacaataatacgcataactattattttcttctcaatgctttataagttgtatgtagtctttgtgtttttctcatattgaaaaatcagaatgtctaaaatcaactttgatcgttgcgtcgatcgaattccacacacat

SEQ ID NO: 30758 - DNA, 653 bp, Oryza sativa
agtgattcaataactacaaatgagaaaaaaagattactattagtagtagcattaaagaggtatagtggaccactctaaaaccacacatttttaaggacgaattctaagactaaaactacaattaaaagatggagggtgtagtgcataatccttctatcccaaaatgtctatttctaggtttttcgagggagtaaggaataaaggtaaaaataccacaatgccttctttaaaacacaaaagacatgaaggaatatgtaggttagtgggtgcgaggtggttcatagggtgggtctaatgggcgagcgtgttcgcaagccgtaggcacgttccgacagcccagcccccttagcccccctccaccccttaaccctaacctattgttgttatacaggcaggaagtgttcgctagcaattgtgtgcacgttcgcgaataaggctttttggattcataggattataattgacataatagcattgacctaggaatagctatatttttttagacatgtttaaattttagaaatagctacattttaaaatgggtggagtattacagatcaagaaaaatagaaaatgccccaggaaatttattaacgagaagtgttcaatgctcagcataaataagccaaagcgataagtttatctcttaaatg

SEQ ID NO: 30759 - DNA, 653 bp, Oryza sativa
aatatagataaaaagaaaaaactaattgcacagtttacatgtaaatcgcgagacgaatattatgagcctaattagtccatgattagccataagtgctacagtaacctacatgtgctaatgatggtttaattaggctcaaaagattcgtctcgtggtttccagacaagttatgaaattagttttttcattcgtgtccgaagacccctttcgacatctggtcaaacatccgacgtgacacccaaaaattttcatttcaccaactaaataagcccttaattttctaagagtagcatatattagtatgtatacaatctgagcgcttgtggtaaagcgatgcccaactttgaaatgcagtgcaaatggataatatagtagtagtagcgacaaacataaaaatacaccaatacggaaaattgccgtatgcgactgcgacatattttcccgtgtccatggtttacattaccggttgaccactaaattttgagctccatcggtatcacggtttttgatgaattttgactaaatctactgtttaaccttcgaaatcgaaacttgattccgagccgtgtcgaaacgtcaaaattttgcggaattcgatcggttttcgttggtactgtgaaccttgcccgtgtcttccaatttctgcatatact

SEQ ID NO: 30760 - DNA, 650 bp, Oryza sativa
actcctattgaatggaacatttactagtacctgttcagatttagagtactaggaaatatcttatccaatactatgttcttatattttggacgaaggtagcaataaagttataatcaatgatgtgtacgtgagggttatataagagatagaatttttttttaatttacagaccaatagcagataataatatagaagttggtttattttaggacaaagttcaatctttagaaattacttcatccgtttcacaatgtaagtcaatctagcattttccacattcatattgctaatatgaatgtggaaaatactagaatgacttacattgtgaaacggatggagtagtttatttaagacggagagagtatttcattatttacaacaatgttaatagacgtcagattaaggtattgttgcaattgattatagtacagttggttagttttttaagctggaaccaatctatcttggtcaagggtagattcagtgtgggtgcggcacaaagggagaatgatgaggaagaagacgtaaggtggtgttggagtaagaagcaaccccacaactgatttcagcttaagcttttaattcagatgcttaaatttatagctaactatttacttttaaacgctggatgatatattaaaaatgaacag

SEQ ID NO: 30761 - DNA, 1071 bp, Oryza sativa
  unsure (1)..(1071): unsure at all n locations
accatcaataactttaaaaatatttagtttaaagaaactagaaaaacatatatagatttgtctttcaaaacactataataaaaataaacatgcatttatttattgtatatattataatagaaaaataaggtcaaagttatatcttatagaacgtgtcattgtccaaagcgtcaattaaaataaaactggagggagtagatgcttactacactattaataactggtcacacctatcatacatgtattacgtcttggagtccgtgctacagctgattataaatctgtaacccactgctcttctctctattcatttatctctttaaaatatgtttatagctagcttataatctgctactatacctgctctaatataacacctaatggttaagatttattgtctccatttaaaaatataaacgcttttagctgtgcagtgagtactgagggagtaacatttccctattacctggaaaagaccctcatgcatacacataatcacgcgcctacatcacacacacattaaaccttatgatttgaatgcaaggcatcctataattctatccactagtagtattcaaacttctaaattagactaaagcgaaatctgttttactattcatctgtcagaaaatgtattttataggttgtttagtatatattaaggttaagggaaaatatttctttactcgtctcagtggttaaaatttaggtaaattttgtaacaagatattgtggctgcgcggttntagatccgcgcaaagtgatttttaaagaaaggtaatctttaaagttagatatttgctggtgaacaccgtatccattaaaacaataattttcaggtgaggaagagagagtaatcacgtgaaacgtcaaaaattctcatgggcccacatgtcagctctcctatcactcttcctaaagaacttaacggaaagccgctaacgaaatctgttaggtgatggcatttctatgacaaattaccttgtacgataatattttataaaattcacgcttatcgatgatattttgtgaaatcgggtgtttgtcaatgacattatttgtattttctca

SEQ ID NO: 30762 - DNA, 655 bp, Oryza sativa
tattttgggacggatggagtactattttggagaacctaaacagggcctaaatatactaatatacctagagaaaagaacatttttttttcagttttagctcatttatttgaacaaatagagtgggtcaacggtatattagtgacccatgctaatccccaacctcatatttgttggtaggaaaattctgttctagaaaattctgttctatcctttcttgatttcttggcaacatttggggtaagattctgggagtttgattggcttatcttagctttctttgtgcaaagaaccatctttcgatacccatatgcagaacctagaatagatggtactaagtctgtttgtcctgaaacctgatagactggatagtccgtgcctttgaaccaaattgcttatcaggacttgatttcagtgcacttgcactctagtatgggttaacttttgttgccaaaggtactttttacgtactagtatatgagttattccagcaagcaattctggaaaaaaagaaaaaaaaaacagactctaaatgctaaattggagtctggaaaagtagtgttatactatgtactatgatagtggaactgagccttagttttcaaacagtagttgtacgtacctctgaaaaccgtattggtttgcaatttggtttcaa

SEQ ID NO: 30763 - DNA, 1656 bp, Oryza sativa
  unsure (1)..(1656): unsure at all n locations
aaactcaatatgcagacatgccacctcatcatccattagcaataattaaatacaaaacttatgcaagtatacaacatcatttataattcattgaattctacaaatcaacatccaatcatcttccttcacattatttttcacaatatttaacacacacacatatatatccatcatttttgtaatatttaacatatatttatccatataatcaaagtgcgtgatatcatatttcatctataatcttatactgagcctactaaatttatctctcttaatattaatatagtttgacaaattagttttatttgttattaagaactaatataattttttacttttagctcgattattaatttttttaaaagtcacatagtaatttctacaacaaagcgcggagaatcacgtagtgaactaaatgtgccagtttgttctttaattattgacataaacaaatagctcttcttgtacaataaaatgtactgctaattattactacctatattttgtaagctaatcgatctcttgaacaccggtgacataattttgaatgtctcattttttataattaccctttctaactaactgttacgaaaatttaaaaccataagacaatgttttgacgatatatctaccaacatcatcttcacttcacagttcaaattatatatatatatatatatatatatatatatatatatatatagannnnctattctgtatatatgtgattatgataaaaatatatatgctcataaggatataattatattttataagtactcttttagccatgtttctaccataagtaatcttttagtcatggtaaaacatacatatcaaacatatatgttcacgaggatatatggtaaaaacatacatgtacagaggatataataatattataaaggtgtccatttctatcatgagtattcttttggccatggtaaaaaaatatataacaaggatataattatatttttaggaaacttctgaatttgaagatgccaactttactatatgatataatttagagatgccaactttactctttatgttatacattttaaaataattttatttatgtaagtacactgattattaggtgtttaatttttttattttctttttttgtaaaagtgtttaaaaaaacaaacaatgactacgacggttattgatttaaatcgctgcttttcctgttcgttaagcataaattaaaatatgctgaagatgaccattgttgtcttagatgttgagtcctgaatttaggtttgtgttatgtatagtgtttgacacgtattttttgttagaaatatttttttcatacatattctataaagaatcagcttagacattgacatttgttttgattatatttacataatcatgtatatatatgagaaatgttaggaattctatattttcttaacttgtgaattgagaaagacattatttatctaagctctctcgttgtgtttttagaagcatacacatagtgttgtgatgttaaaagcatacacatagtgtgtggatgaatgggtaaagcatacacatagtgtgtggatgcatgggtagaggaattctatattttcttaacttgtgaattgagaaagacattatttatctaagctctcttccgtggggtttagaagcatacac

SEQ ID NO: 30764 - DNA, 702 bp, Oryza sativa
ttattgcaaatgagcttcatggagccaaatagcaaatgcactcactagttgcagcacactgaaaatcaagtaaacaaaaactaatttttatcaaatctgattcttgtttatcagatagggcatgtttgatgaaacctccatcacaatcacaaaagaatatcaacgtttgaagcttgatgctttagtaagaaaaagcacagcaaacagaacatatgggttagatgaaagcaaatatccaaattcacactatacaatatatgtaggtataatgcaccttaatgatataataaacctatttgatcatgaaaggaatattatttcaaaattcattcgacctcatatttccacttattcttatacttctaagattaagttcgaattttaaaacttttgatttttgcggtttctttccaccaaggtttattttatagttttgcatttgaatcgctaaggccacatatataaaagtatgtcaaaaaatatttttttaattacaaataagcatatacataggcgagatgaaacaaattctagtacactttgaaaagtttgaccggaatttgatcaaagcatgatatatgaaagcatagtgcggaatctatacaaaccgccgtcataatagatataaatcgctatacatcctaatccaataagggactgggcctcgtatatatttgcattcgcatacacgattttagaatg

SEQ ID NO: 30765 - DNA, 622 bp, Oryza sativa
ctttataagtgatcgtatgaatgcaacaacttgcaagctaggtacgattttgatacaataaatttgcaacaactcaattatttggagcattttttaatataaaatcaagttttaagtacttattttgacaatatactagcgcggatttgtataagtgtattatatttttatcctaataaataataactgaaagtcaattaaactggatgtagaaattattatattttggttgatatttgagaaggtgaagaaaacaaaaaaattcttaaaggtaattggatgtaaattgtactactatgtgccagtataattcttaaagattgaattcaatattataagataatatccgtatgattattatgtaatggcatattgaaatcatgaaaaaactcacctagcatatgcttagccaagttgatacaccaaaatactaaattgttaagttcttgtactagaacgcacccatttgtcaagttattacactcggacatttaattctcaagtttttacactctatcgtacccacttgccaagatattgtaccgtgggtacaatttactcgacatataatattactatgaatctggatagaggatatgactcatctaactaaaatctctta

SEQ ID NO: 30766 - DNA, 655 bp, Oryza sativa
  unsure (1)..(655): unsure at all n locations
gtaactaagaatgccttttggaatagtgttattaaaaatgttagataaacatttggtttggtgaaaaatgatatggttttatccaaatgagtggagaggttcagctgcaaatccatatgcacatcctaaatttgctttgtttataaatgccagcctgttcaatgcaactccttacaaatttatggccctagtgcacatatgtgctcatcacaataactgggttcaaagtgataattaacttggttttgcctatagcccaggtgtttgacatggacttacagcaaacacatttaactctctacagttggtgattaaccaataaaaagagctccattcatcaaatatattcaaccaatatattacagtattggctccacaaactagcttactataataagatatgcaagcatgtctatcaacacaaggaaaagtcaagacatgcacttggagagttgttacatatgtgcaagaggtaagcctgataaactaagcactgaaatttcgctcatgtggggtaacgccacaaatcatatggagttggcacgttgcatcccaaaatattccanattattatttttattttgaataaatattaactgtatgctaagaataggaataggaagataactagcaagatacaactcaaagttagcat

SEQ ID NO: 30767 - DNA, 645 bp, Oryza sativa
tgatgagtgggcaagagagattggggaagagatctccggatgccccgccggccctccgtgagaagacgagagaggagatgggcaggggaaaagtattttctacacctatatgctacggtgttcatatatatttatgtggtttaaatagttatttaaaatatttataaaatttaataagatatttgataatataagacactatataaacattaaatctaaattcaatctacacatgaagaaagaaaaataacgaattttatctacgttgtgtaggtactattcactccttgattttattattttttctctggttctaaattaaatttagtcttgtatttttgtttatggattcatatcatcctaattgatgttactattctttttccaattttttttagctattcgagttacatgtaaatagcgggtgatatgatgtcgagttgaaaaacctagcagggagtagacgataaggatgtcactgcaattttgtattttggtcctttagtaaattaaatttacaaggtaacctcagcgttaaacgtgatattcacctagttatggccttggtgcttcgtggctggtaacgatcaattacgattttacgctcccacataaataaacagttgacagaaaaataaaaataag

SEQ ID NO: 30768 - DNA, 551 bp, Oryza sativa
tttcaactataactataactatagtataattataatataatttcactataactatactataactataatataacttgtatataagtattaactagaaaaaaatatccgtgcgttgcaacgggtaaatattattttaattctattgttgttatacggtttagctagggtaaaattcactgtgggaattcgcttggatatttattttttagaaaatcataagctacaattagtagtccatatttcatctcaagttagcatgtgagttttttaaagagatttcttatcttttttatttccaaaagcaaatgagcttaaaatccaactcaaaaacatatctgtatttctaaaaatgagcgaacttaaaaaccgactcaaacacggacgacgtatcaaaatgccggcaaaaacatcctcaacttttataagtactagaaaaatacccgtgagttgcaacggatgaatactattttaatcttattatcattatacgggttagctaggataaaatttactggggaaatccgtttgaattttttttaagaaatcatgag

SEQ ID NO: 30769 - DNA, 916 bp, Oryza sativa
tttagttcacgctaaaattaaaagtttggttgaaattggaacgatgtgacggaaaagttgaaagtttgtgtgtaggaaagttttgatgtaatgaaaaattagaaatttgaagaaaaagtttggaactaaactcggcctatcactatcacaaacaacctttaatagcagtatctcaaaatgattatttgctaatattctctccatatataacctagcatcgaatgaggcacattataatacattagtactacgaatctatccaacattagtactatggtgtgtctagatttgtaatactatcatatgtctattcagtccattatgtatcacattcaaccataatttcttatatttgggatagtagcacactattcattgtcacggattgattatatggtaaattaaatactttaagaaatacatttagttggaataaaatgaagtggataaaagttcgttaaagaatagtaagcgtggatcaaataattctgaacaataagtaaggtgaaaaagatggagcaaatattcccacgagatcatggctgatcaaggtcgtcgggtcgcaggtccagtggtggggtcaaagctgtccgtaccacggtacaataaagacaagcacggccaaagccgggtttcacattaccctttgcaggcttttcacattaaccctttccagctaatttgatttcatcacgtaggaggataacactgtccacgtcaccccctgcctgcgcttttatttgtggccacgcacgagtcgagccactagcgacgtgaacgaaagccataccacattaaaggcgttcacactacatcattacgtggtgccatcatcaccacggtggggttattacggcagctcaaattagcggatgaatcaagacacagtggtttagaactaattaagcatatcatt

SEQ ID NO: 30770 - DNA, 711 bp, Oryza sativa
aatggcttatgcatttcggatatgattaaaagaactcttttgatttcaatctccatcgtacaaatatcaagtttggcaccatgatgttacaaccgtttttgtatttttgcaaatgtatagtgcttcagttgtcagttcgataaaaatagcccttttttaaaaaaaaaaatcggtggagcatttcgttttctctcgtgtttaatagtggtatagacgtatagctgtttaaagttaatataataaataatatgtccccacagccagcaatagcgccccacctgctggtcgagatcaattagtacttattctattaaactaaaccatatgttcagattctcttctcgagcattctctctttaatctatgctctttccaccgaatcaacttaagtcctgtttggttacatgggctaatgtttaaccctcatcttttagtctcaaattagtcctcaaggatttaaacaggtgggctaattttgagctaatgtaaattagcccctcctcgaaacattagcccctccaaggggtgctaatggggctaattttgtgtggggaacatcaaaaagcagctctctctctccttctctctcctctctttctactctctccaccttttagccttaaattataccatggatccaaacataccaccctaggctaatgtttagcctaccaattcataactaaacattagctctcaaaattagccctg

SEQ ID NO: 30771 - DNA, 571 bp, Oryza sativa
caattattttagaagaaaatacatttgaagaagacacaaaaatgtgcaaatgagatataaaaacttgcgtggacatgcatttatagccatgatataacatgcgtgtgcatggatagtagtgtatgggggaggcgaggtggacgcccgatttttagatcattcatcgagcacccggctcaaggcattgtccttttctatggttttttatggtggcaggtgggccttcatttcatctcatgcatgctccatatacatattatgcggcttgcactattcagatttaatcggatttgttaaagcacaagagagacaataatatgctgcttgcttaaaaaactaaaacttttgacacatatagaagaataaaagtataggcatgcttcccaaactattaaacgatacccttttttttaaaaaaaactatataaaagttgctttaaaagtcatattaatttatttctatatcatctaagctaattattaataattatatgctaatgagctacttattttttttataggtgcggagaaataagttcccaagtagtacaaccgaacacagtaatttttt

SEQ ID NO: 30772 - DNA, 546 bp, Oryza sativa
aggccttgatagactacgtcgattaagaagctgagtctgttaaggaaagaaaccaattaatatgatggattcatcatgctagcttgtctcttaatttgtgaaatgttcatggctaatgcctctgaatcagtattttatatacacctaatgtgaatttggttgatacacacagttcatgtatatctcatgtacaccatgtataccattctctcgccctccacctggcgttttttttttttgggaaattcattttgacctttgcttctaagaagttataaccaattattataaagtctacagccaaaacgattgcagaaatacaaaatgcatgttgatacaaaacaagaaaactaactacaacaccaacctaaagacaatgataacgacctctaatgctaaacctctctccgcggaaggcgaaaatccgcataatatgtatgtagttcttatcctcttaaacctttgtagcaagatcctaatgtcaataaagcggatacacatcgtccccacctaagttctgaattcaaactctaagcaacaaagact

SEQ ID NO: 30773 - DNA, 616 bp, Oryza sativa
aaaattttcacccccttgaaggacccaggcccttaatatatattccccgcatttctccctcacacccggaagtaggtgattcgaccctttttttcttggaaggggaatttgtcgctgcccatatatatcaagttagtcaggcttcttcaagtgtggctacgagctaagtccgacttgagtttattcttgggctattcctcgactctaggttgggtgagagacttgtttgtcacgagatgagatggaagtagcactaatctttggctaagaacaagtttgagttggacttatcacgcaatcacactagatgagcacgatctagcttggaatgagcaattttcaaagcgacagtgttggtttttgcaatataaataggtttcgaggtagaatatcaaaacaaggatgattaaagttgaggcagtttatgcaattttgtgataaaaaggaaatgggacggattaaaaaaacgtagtggcagtgttgtaaaaaataggattagaggggagcgtgggaaaaaagaaaacgggtaatatactgtctaacttcaacaggtgaccgtctcagattgagatctccccttggcctccctgccccgttaataattacagtattctat

SEQ ID NO: 30774 - DNA, 590 bp, Oryza sativa
gtgcattttttctttattctgttgcagactataccatactttctctttttgagaaatatatgatgtgttagcttttaaaatggcattgacaccaaaatttgatcatcaatattcattctcattatattattattgactataaaactaatactaatttaatgccacaaataattgtatatgagaccaatatggtttgatttatttttttccaagcctgtcatatatgctacaatactcacatgtatgggttcagctaacaggtcagtgatagctaactcggccagcacaggtgcacagcacgggccaatgtagctaggccagctgggatgattgatttttttttatagaacggggatgagagattaatgagagtgtttggcctaaatagcagggacgtgaggtgagacgacatccagaagctgctgttatttttgttttctgccgcacgaagacagcaatacatgcgcgagacactcgatcgtttgccgaatgcttcatggacacgtggcgtaaaactgaatgggggtaaacgaaccaatcagcttgctggagaactatttttatccatcttttatcaattgtatacatgt

SEQ ID NO: 30775 - DNA, 1384 bp, Oryza sativa
  unsure (1)..(1384): unsure at all n locations
aaaaactagacaaattttacacaaaaaatattatcttaaaaaataaaaattaaacttggtgaatatacattgtgatttccgttaccacacactaatagcaaatccctgttgccgaacgtaaaccgacgataatgcaaaccctggacacactatgccaattattgatccgatcgaatgggtgaaagcaaacaccccatgcatctttaccccttttgcacccatgcattgcttgtgaaaaactagtgactacaggcgaccaaagccccatcctgccatccgtatccaatgatcgatgtgactaatttttacacccgaaaaggcgaaaatataatgagcagctaggttgtcgcacgtctttgccgggataagatcggttagttgagagctgcacttcagctagctctcccctgatctgttcattcatcacagaggcgagatggatattcaccaacaaagctaaaacataagggatccgatcaacataatggatagacattgcactttggaggcattgtattattacacccnctagctaacataacatactacctctttntcaaattataagactttctagcattgcccgcattcatatagatattaatgaatctatgtatatgtatatgtctagattcattacatatatatgaatttaagcaatgctaaaaaatcttataatataaaacggaggaagtagcctacatacatgtacaacatgtgtgagtgcaacttccctccttttttttcagtatctttttttttttgcgccaaagtcaccatttggactctagctctcgcaaccccggcccctctccccccccggccggacaccgtctatacatacacgcacaacactgacgaccagctgaaacacgcgcgcgcgcgcccacacacacactcacattttttttgcacacacacaaacacaaacactaggaggagaagcttagttaattaacgtcgtaaagagagtcgtagtgagtgagagagagatggaggtgggcatggtggtggtggtggcggcaaaagtgttggtgagcctgtggtgcgtgggggcgtgctgcctcacggcgtacctgtaccgcgtcgtgtgggtggcgccccggcgggtgctcgccgagttcaggaggcagggcatcggggggccgcgccctttctttccctacgggaacctcgccgacatgcgggaggccgtcgcggccgccaggcattagctggcggaggcgcgacgccgacggcgagcacgcgacagcggcgatggcggcagcggcgccggcattgtgcacgactaccgccccggcgtgctgcccttctacgagaagtggagaaaagactacggtacgtacgtgctctctcgatcgcctcatcagctgctcgatcgaac

SEQ ID NO: 30776 - DNA, 608 bp, Oryza sativa
accaaagaggtgattctgagattctctatcagcacaaagcagtgtgtaaatcatgggaataaaactaccaatatctaatcaccacaagggacaagaattctacttccaaagaatggcgctagtttaatttcaactaaaatatgcgattaaaagtcaccgaaacaaagcaactaaaggagggttaatctgaaatgatagggtcgacgtgtaaaagacaaaaggcatcaataaagcagagaaagatgaggcaagaaggaaaaatagaaaaaaaaaacataaatatttcaatactagccacatagatgagcatatcacatcgtgcacgctgcactactttcttgaatggaacactaaagtatggcagtatgcttaccgagaactaaattcagtctagcacatcaacactagttgctaaggggtgttcagtttggtgcccacgattaccacacacaactttagcactgctatggtttcttaagtagtgtcagacactgcacgtttaggtcagccgtcagcgtaagtttcttcataggacagcatgcttaagctcgaaattcaagcagtcagagactaactgcggccttacactttttcattctctaaaaaat

SEQ ID NO: 30777 - DNA, 688 bp, Oryza sativa
acatgtacttttgatagcattatacttatgtataaagttttaaccttgaattcattatattttagcctaagataaaagttctgacgattttaagggtataaatagtccaaaattttgtcttttttttctccatatatagaatgattttgaagacgagactttagacataattatgatacaactaaaagtatatgtatatatttttctagaaattttttttgaagtttgttagttggtgtgtatagtgtatacacgagaagatgtgtgtgcataggatacgttcccctcaactaaaaaatattcattttattttgtttcttcctaaatatccactctatccacaaatataggatatataagagactttatgttcaaaaattcatattatgtccacgaatgtagagattttgaagtatactttacctatatcatctaaccactatatttattgctcactagtcatagtctttcttaatcaagtaaactttcaagatatcaaagcaatttcacccgagccttaaactctataaaacctagaattcactatatatgtggaccgagggaatatacaacacaccaactgcaatcaatcgatggtgcgacgagtcaacaacgctataaaaccaatccgcaaaaggccatcaaattcaacaatcaaagtcccatcgggggcacaatcaagtcacat

SEQ ID NO: 30778 - DNA, 583 bp, Oryza sativa
  unsure (1)..(583): unsure at all n locations
ttcctgatgtgacacgtaaaactttacccctcagttgctctttgtacatcctctggttttggccttatactgggcactgcactaggtagaaagaactagctgatgctacctaagtactacattgcaggcttgcagctgatgaggaaataaccgatgaatttggtggtgtttgaatctcctaaagattaaagattaagtgtttcacgtaaaatgagaggataataacgtgtgattaattaagttttaattattataaacttaaaaatggattaatctgatattttagaacaattttcatataaaaagttttcgcacgaatcacaaccgtttaaggcaaggttttttggaaaaaaaaaaggccaattggccccaancccttttttttaaaaaaattttcccccccaaaaaaaaaaaaaaaaatttttttttttttaaaaaaaaaaatttttttccaccgttttcaggacattcgaacggggctgttgctagtgttgctgtgacttgacttgcaacaacacagcttaatctgggttaataatactacaatttgttcagtcaggaaactgggctataataattacta

SEQ ID NO: 30779 - DNA, 688 bp, Oryza sativa
gttttctctccgcgaggttcttgcgttccgctttgttcggattagttagtagccgcgccctgattatatctgcgtgtagttcgtttccgcccggttacttgaagatcctgaaaattttggcattcttggcgttgcctcgcgcattttagaccttcaggcttcagttactgaactcgattatggtaacagctcacaaatctttctgcacaacttcgtgtgatgctcttagattgccgctgtaatgcctttgtgttgatctttcagtctagtaggtcctatttctaactgaactcccagcgcgctactgtttggaagcagtgaagaccggaagagagtagaatccctcaggggaaaaaatacttttcttttttgcttaaaccctaaggacaggaagagcattaggcttgtatatgttaggtttgatctttttgttagcttctacatttctcgtttctgctgaaaatagtggatctagtattggtagattggtaccaccagtctactgccagtgccatggttttatactccatttgggtagaatagcgccatacgcacggtgacactggttttgatgagcttttaggtggatagaaagatgtgaaccgcgagctcttgcaaaatcatgacctaacattggttttggaagggcttgccagtaatcgattgttcgccggaattaaataatgtg

SEQ ID NO: 30780 - DNA, 698 bp, Oryza sativa
atatatatagtatatatatatatatatatataatctacatctataactaattaaaaaatacttaaggttttcggtagttattttcgtccatctctttttttcttttcttttttcccctatttttcctttttttcgttccgtccaattcttttctaactaactaataattaaaaaatacgtaaggttttctatagttgttttcgtccgtctcttttttcttgtttttctcttttttttccgctttttctttttttttctgttccgcacgctttttttcctttttttcaccgcttttttccttcacctttctttttaccttttctcatccgccctttttctgtccatgttatttttgccgttttccctttttttataatgctgatataggttttattatagctattttttaggttgcttttttagtagctattttttacgttgctttctttcatacgctcgtaagtattcatttttttctcggccgggttttttgtcgccggaccaaaccctagcacccaccgccaccactatgatctttctctccttgctttcccttctctaatttattgcaaaaatcgattccccactgctccttcattatttttcccatgatttttcctttcaattccactttaatgtactggatcgaatctccatttaaaaatcaccatttttatccctgagtttatggatttgct

SEQ ID NO: 30781 - DNA, 666 bp, Oryza sativa
tggtatcatcttatattacttgatacctacatatataaatttgatatctactccctcaataaaaaaatgtaagccggcacctggcagctcatatcactggattcttaaatattggtatctacttatattacctgatacctacatatataaatttgatatctactcctcatatcccaaaaacaaatctataactagctgtctagatactacacattttagtacaacgaatctggatagatatattttcagattcatagtgttagggtgtgtcacatccagtacaggttagttttttatagtaaagagagagtacatagtatctaagggcaatcacaatcagtagcgtaactaggatgtaaagtaaaggttgtccatctatatgtactgtgtcaattaaaaaggtggttcactgtataatttttattatattaactagtacatataggttgtgtttagttcacgtcaaaattggaacgatgtgatggaaaagttaaaaatttatgtgtgtagaaagttttgatgtgatggaaaagttggaagtttgaaaaaaaaattggagctaaacaagaccatactatagttttaaatttttagtccatggaccacagtgccacctagctagctacgccactgactacaatatggttcaaaagcaggtagtaagta

SEQ ID NO: 30782 - DNA, 675 bp, Oryza sativa
tggtcttgagttttcattttgataccctacatacccatttcgttatttggccatgaactgaccggtatatttttttccctgaaatggctatactggccttctctcataattatgtgctagcttattgagaaaaaacacaattcttgatggggaaaattcttatatttgataaaatcaaaagggatggaattatttgaccctaaatatgaaagattcaaatttttagcaaacttcaaaatactggtaaaattcatacaaaatttcatcaagaacttggaaccaaaactatttttgtttggcttacatttgaattgaaaatgatttaaaaatgataaatttcaagtttaaaatttggggtcaaagaattataccccatttggtttttttaaaaaaaataatgaacctttttcccattgagaattgtattttttttcttaataagctagcacacaagttcgaggggtaatattgtcgttttggaaaaaagaaatctagcggtcaactaatggaataggtatatatgggattaaaaatgaaactcgggagcatgtaggaaaataggaaaaattcagaggcatagaaatgattgagcgaaaactagtcagggcacagaggaattttctctgattttttccacgcaccatactaactgggtaggatttcgagttgtggaca

SEQ ID NO: 30783 - DNA, 3231 bp, Oryza sativa
atggccatctatacctctgtggccacgtccttccacaactctagctagatctggtttgatttggttgtttcaattgacatctgtgtaggagataaccaagacggctaggagaatgcacagaggcctggccttgtgaaggactagatgaaggcaagatgcgaaccaactttccaaggtgcaagcaacacctagcacgataacaagcagcgtccagtgtaggatgtggtagttgggttggtttggtcattttgtttacttcagtccacaacgtaagatgatcacactcaacgaatatatcttggtcttggagatcatatgaccgaactactgacggagttcagttttttgggttcggtctcggtgatgagccgaaggtggggaagccaacaaggtaagcttagagaacccaagtcagtcttgtgatcgtgtcgtgttcgtgcaaaatactaagccacgtaacccatacatctgatttgaaccccacctcaccttctttgcttgtttgttgcttcacaatgacatgatatctcaacctttttttctaaaaaaacaaaacatatttctatctttaggcatatggtattatagagttataatatggaaatatttcttttttcctttcctgatcacgtgtagggtggtgctctatataaatgtgacagtctgacacatcagaaataggttaggccagaatggcccaatttgcatcccattttcaacagatccgcaaccccaactagaatacacccctcctgcggttaaactattagatgtggtatacctcgaagagtagtagcttgcggaaaacaaagccggtggagttgggatcgagcttggccaacatgtcgataggggcaggaacttgtagccaagtcgacgatggtgagccatcgaggcaaaggagaacataaaagatgtgagacgacaaggggtaagagttttcatggagcaacttagaacttataagttaatgcatagaggccacgctgaccgagagatcatggccctgcttggcgtagctagctgcaacaacattagttcattttgtattgttggtactgtagtcgcagtagcaataaagctacaatagcactagcaaatgaggccactatagatactatatcataagagcttctctttatatgggttgtcatgagatgcttttgaatgcgtcatatacacggtggagaaaaagtttaaagcttgtggtttggatcggcttggatctacttgaactcgtagtcataatgggtcgaaccaagctaggctttagctagtgagcttaacgagccagcttgtgagctgctcatttagctcattatggtaccacatatcaccatatcttcacttactgcttcttaaccatagatttagcctttaattaccatatcttcgctattatttaatgtttattattaaatttatatatgataaatggtaaattaaaaatataaaggtgatataaatgcgttaatgagcctaacgaacaagctcgtgagctgagctgagctaagcttttagttctctaaggttaacaagtcaaaccgatctagctcagtatccgcccctaaatccctaatattgttatatcttcctatcaacaactttcagactcccctatttatatgcggagaagatagcatgttgagttcccatcatccgcttattgcctcataagagcatcaccaacaaagtgccaaaattcaatcccctaaaatcttttgtatgagaatctctaatggaattcaagggataaaaatatcctcccctcccaacatagtcaaatttaacttctcaaaaaaattgagtcatgcgagaaacttcgtaacaaaatcggacctcttcttgtactcccgtgtgcaactcctcctcttggtgtgcacgaacttgcaattggagcgattgcctctcccaacttgtggaaagctagatttaaggagaagggaatgagtttagagctacctttgtagattgatttttgcttgaaacacaagattaagggattggtgttagggtcatgctctaaaccgcaaccaaaatttaaagagaaaatttcttatttgccaattaaagttcacgagtttccttatatgccatcgaaaatttgttatccctttatatgcgactgcttgaacttattcttcccctatatgccatctatgttatcatcttgtgtaatagggatgtaaaagtacaatattaccctcttagtccctcgaggggatgtctactctcttttttgcatgtcatctaaataattacaaaaatacttgttttaataacatagaaataatatgtgatatatcactaaacaaatatgcaagtttaaatttcacttttacattttttttaaaaaaaaatcaaatttggttatgagcacacctatactagttccaattaaatttgttgtttgcgttacttctattttgccatgttggatcttaattatgttgaacagaaggtatatataatggcttattatatacgtgatgagataagacaggcatgtaactagctagccgcgtatcaaggaacgaatcgtattcatttgggcttctcgattgagagtcgggtcggatcatcgtataaacaatgtataactactactacatatataaatatacgtactataccgtagataagataagtcatataattaaattaaagaagagtagctagctagctagggtaccaaaatatataattaagcagatcgatcgacgagacgacgacgatgcagcagcagctggagcaggtggcaagagcggtagccgaggcggtggtgcgcatgacggcggaggtcagcgccagcagtctcgccgccgtcgtagtcgtcctgctcgttgccagcggctacttggaaatcaagcgccgctgtggcgcccttccggctgcggctgatcgcgctgctgcaccacctcaagatgatgataccatgagtatgatgaccagggaggaggcagcagcacaagaagatagcaactgctccgcatcggcattggcacaatgcaactccatctgctgcagcctgtcggcgtccacgtttcgttcaggaggaagccgcaacgacgatgataaccactccgacgtctcgacgtcagagtcagatgattcttcttcttcggactcggcgatatcctcgccagcagccgaccttcgcagaagcccctcgctatcagattgggcttgccccttgttcacccctcgcaacttcatcaggggtgcaggaat

SEQ ID NO: 30784 - DNA, 2583 bp, Oryza sativa
tattagttaaaaactttcgagaaaagaaaaatcttatcttaattagcgtcattatctaaaactaatttagttagttaggtttaactaattgtgaagcacgcgctacgttagtttttcctaaaaataggaacatttttcgccgatcttgctttgttgcggagaaaaagaaaaacgtgctgagaaaaagaaaagaaaaacacacgtgagggtagaggccagaaaaatgcacgtgacttaacttccacgcgcgtacgcactaattaggatcgtttccgtcaagttaaaaagaataaattaaactgatgtttaattttttaataaattttggtcgaatttcactggtggtctaggttttaaatgatttttgcaaatactggggaaaccactcaagagtgggtttaagcggtttcggttatgtgaagcttgcacatttattacactggatacatggaaatgccatagcaacaaaaacaataacaacaccgacaagagagtaagtttttacagttttacactagaaattagaaattatggttacgagttctaggcattttggataaggtccatttagccatttaaaactttagttgccagtaacttttaaaatatttttttgaaaataaaattatttaagagaaatgagtgtcaacttttagtaggaggcaaataacacaaagcacatatggtacttaaaaaccgttttggaaatctaaaaatcaaatatgaagttctgaactacaccatacccgcgacaattttttatttaataaagatacattatcacttatggtatacataaatgaattttatatatgcagaaaataaagcatgaattaaatgactctttagtgtcgtaataacttgcattttgtttgatgttaaaatgacgaatcccgcgacaaggcgcagagtgccaactagtttacttaaatcctatttaccatctatttttttaaaaacacagtataaaacatgcgttcagaatacatgtacactcacctctataaacacacacatacaccatatccctatgatcatattcggaagactgagcccctatgttaaaaacaagttgtacggggttgcagttactattcggacttaatttgattatattcttttgaatgttcgtagtatatcccattgaagaaaaacatgaaaataataatatgtgcatatgggtcaaattgcataattttgcaatgttctagagatcgatatacacatttgttaaatttggaattaaggaaagaaaagttaggcagtcacaaattaatttccatgaataaaaacttgttgattttttttgaaaggaaaaaacttgttgattttttgactctattgaacggagaaaagttaggccgtcagtgggtagcaattaatttgcttgaaaaatgcatgcttctagaataattagtctccgtattcgtcttttccaagccagagcagtcacatttgagaaaacatgcatagatatatgcacaggtagactatgatcaaggctgtcagcatgggtaactaatttgttgcaccagctattattaatattgtaatttttaaaattttaagtatttactcccggtgcccgtcaccgctgcgctcgcatgctcgcccaccgtcgctccgcccgccacccgcggccggcctcccctcagcaaagaaaagaagagagaagagagaagagaaggagaagaaaagaagagagggcggctgacatgtgggctccacgtatttttttaattttttttctgactaggatgccacgtcagtgaaactacccatatatactgctatatgaccttaaatccacggtttgtgtgaatttaggggtatatatttctggttttgtggttaagagacgttaaaaaatctcgctcttaagttgaaggatccccggtgaacttattcctttgtaaaaagagaaaagaaaggagaaaagcgaggaggccaaaggggcagcccaaaaagcccaagctatgagcaggcggagatcggacggcccaggtaaggctaagaagaagggaagagaagggaagggaacccttgcctccgcctggttgtcttgttgatcaacaaaaacacaaaaaaggggaaggcaggcagggcaggcgaggcgatcgaaggaagaggtttcatcatttcactccatttcccctgtttcttcttcttcttctgttcgtctctcgagggctcttcttcttcttcaatatactactagttggccttcctccctaacaagcaaggaaggaaggaagggagaaaggcgatcgatcctctactctagccaggatactcgtataggagtagttaggaggaggatagaagttagggtttgcggtcgggcagatccaggcggccgtggccataagggaatccgtctgccttggtcggtggatgggtgggtgatgaaggcagcgcccacggcgtctcagcacctcaagcgtcctaacctcgcccgatccgatccgtcgtaagtgtcttcttcttcttcttcttcttcttcttcttcttcttcttcttcttgtttgcgagggagcgagcgcccggtgtatgccggccgatgcaacaatcctaacccttatc

SEQ ID NO: 30785 - DNA, 688 bp, Oryza sativa
acggttgggggtacatactagatagatttctactatcggaaaaaatacattcttatcaacacaaagggtcattaagtaggatctttgcatgaatgcttactaagtaagcaagttctacattttggttgcgtatatggttgatatgaagttacataaaagtgcaatgtgaaaaccctggatgaaataattatataacatatcctatgtaagtcattttcactcattaattatattatccttgtgagtctattttctacacattcacttttttttcttccatttctcataaaaatatcaacacactatttaccattagcactaggcgactttgttcctcttgctacttctcttataaggagagataggggatatttacatgattaaatgtgcttgttaatatgtcatcgtatgaaatagttgcgacattttttgttttgcttgcagtgatagacttggggcattacttctctgttgcatacttttcacaaacaataggaacatttcaaacttttagagaaagtatctcatgttttttagagcatcaaattgttcattgtgtcaaatttatatattactcgaatacacaagccaaaacaattggttttatgtacatggctagaaaattatactccatccatttccaaataactgacaattggcactattcattttaaaggggtgcaggaat

SEQ ID NO: 30786 - DNA, 1609 bp, Oryza sativa
ggtggcggtgccccctctctagccgatcttatctcccccttctttgtctagcaccagctgctaccgccacagcaggcgccgtctgtcgcagccgctcgacagcgccgttcgacagtgtcgatcgcctcctctcccgccgctgccgtcgcgccgtccgagagctcatcatcgcgccggtcgcctcctctccttttctcccgccgccgccgtcgcgccggccggctctctcgccgcccccgctccaccgctagccacctctctcccctctgccgctgcgtgcacttgagagaatcgggagaaaagagaagagaaaaagaaaagaatggataaatgtgggacccacaccattttctctcacttacatgtgggccccacatatttattttaacttttttgctaactaggatgccacttcagcgaaatcgggcagctatactacctcgggacctttttttggacggttttacatagtttaggggtacacatttctgattttgtgattaaggtacttatagaaatctcggtgttaagttgagggacctccggtgaacttattcctttcttggcaaaagcctgaaatagcagcggaaaaggtacactgaaggtccctcaacttgtcatcgagttacaaaatcgtcccccaaccacaaaaccggatacaacgcattccctaacttataaaaccagtgcaaactagatccctcggcggttttgactccggttttaaccgacatgacagttgactcagcatgggacccacgtgagccccacgtgtcagcgtggccacctcagcctcctctcttcaccctgttctctccctcctctgtccctctctctcacttcgccgaacaacagaccgatgctggcggcggtccagagcagcagccgtgcctccgcacccaccaccgcggtggcgcccgcttctaccttggcgcccaccgccgcggcggtcgagcggtccacgtggtggcgcgacgttgagcggcccgggacagcggcgtggcgctgtggcggtcgagcggcctgggctgccaccatcgtcgtccgtatgcaaccaatcgcaaatttggggatgaatctattgatgggagagggagacgacgaggcacgttgctgcatcaagacagagacaaggagcaccggtcaccaaggacatcgggctagcagtaggcggcggtgcatcgtgtgtgtcttttcatcactgaagtcttgtggagatgaagagttgaatacacagcagatcagcgtgcgctgtggggcagcaaggacggcgtgcagctgccaccgacttttgcccccacaacgcttgtcgcgctgcctcggccggcctctgccgccgctgaccgtgcgctgtagcctataggtggcctccatgccgtccgggtcgaggtgcaccgccgctcgccgctcgccggacccgtgttgtcttcgtcgctgtcgctgtccgcttccacccaccaaacgcgtccctctcctccgacggtgggcacgtcgtgcgcgcatgcgggatgggaggaacggcgtgacaagacggatggcaaagagtatatgggcacggcggacgcgggcggctgccgatgagggaggagatgccaccggcggcggcggc

SEQ ID NO: 30787 - DNA, 1729 bp, Oryza sativa
tcctgcagccccaactggcagcttttcttggacatagatgccctcacagaccaacacaaggtcttttcagcacaccttgtcctcattcgtgtgcacccgggaagaattttccggtcagtcacccatcctgaaattgctccaggcaaagttgcaacttgttggtatgagtattctattaatcctattaagccctgtgccaggatgtcacaacctatcatgacggctcgtagcagtgatgcgcacagagtgggacaaggcactagaggagaccacgcgattgaagcactccgttgctgacctagagctgaagctcgtgtttctcgagccctgcgtgcccccactcccacaaccgctgccttccttgccgagtccttcctccgggtgatcccatggtgtcccccgccctgtcgtatccctctccgtcatcttcgtcagcgtgctcccctctaccgctgttgtgtaagctcgagggaggggagacagcgagcgagacgggagtcagcgagtgcggccgtcgcaacattggggagatggtgagcgagctggtttcgaggcgagagagaagttgacgttgccgctgctgcttggaaatcttgaggctcctcgttgttgcctaccgccacccctggccttggcctcctcgtcgtcttcctcgtctgccaaaccaacgccggctggtccttcctgttgtcttcctctcccgcctccccgccgtggctagggcgagaccgacaacacctgtgtcggacctgagttccccaccgctgttctctcccgcctccccgcctagctgattctggccatgcatggccattgcctctcccaccgacgatgtagccgctgtctccggctcttcttccgcccgacgtcaccttggttttgtcggtttgcgccatcgtcctgaccagcgggagagagtggggtgaaagggaaggaaaaaggagaagtggtcactgacccatgggttccacatattatttttttattgtaatgccatgtcagatgacgaagactaagtcaatgcgatatgtagatgccattcaacgaaaatcaccttcaaaaccaccgggggagttattttgcatcggttttaataattgagatattatttttcagtaaaaaaaaggatatctgatattgcgttgagagataccaatcagactcgacctatattggagggagtcaacgtggacttattgcttacaagggtaggcttgcagcccatctttgagtccaaaatggactggactcaccccgtcctggcctgtgaacacgttcggccttgtcccgttgattttgttaatatttgggacactgagatcccattaatatgatcttagtcacgagctgtgaaatggttaaccgtgccttccagcgtgcgcgcgggttctctcgctctttttttttttcatttagaactcatgacttttattaatattaaccatttagaaacataggacatgagttattacactctcgtaaacgtaaggagagaggctttccaacaaactgacattagggcaactaggagtctaggatgatgacataaacgagaattactttaacagtaagcttaattaccttgtcgatatcttcttgcttctcctgccaatttatcctgtaatcatttgtcttccttggtatctactacttcctccgtttcacaatgtaagtcattctagcatttctcacattcatattgatgttaatgaatgtaaatggggtgcag

SEQ ID NO: 30788 - DNA, 1153 bp, Oryza sativa
  unsure (1)..(1153): unsure at all n locations
attcancggcgtcatctattaaaaaacggagggagtatgtagaatgatgattcaaatgtaaaagtaggatgttgtgcttttatgagagaacagaagaaagaagatcatttagaccatgcatctaagggctaaaaaattaaaatgatacggcttaatgagagaagaaaagaagagagataatttaaaccgtagattaatcatctaaggactaaaaacaattgatgcaatatgacttaataagagaaaagaaaaataacatgaactaagtgaggatgaactgtaggtatataggatattctaaaaaataaagagataaattgaacatattatgtgaattatgtgggatgatttgacatgcttacattttaaatctctaaaatttaataaattattaagttatagataatatagcatgcttgcatgatgtttaaatataacaattcttagtggggatgatgtggatcattgcatgttaatttttaggaattagtgtgctataattaactttatataagagaggatttctcgattttaagtgtattatataaaatcttgtatgaccagataactcactgcacgataagtcaagtgactccaatgccttgagatcactgagttctcgtgtattcttctacacagattgttttgagataagttcaaattctttagcgtaactagctagagcattgatctcattagggatctttcagtaaataatctgttgcaagataaaatcgaggtttactgtgtacacttgtggagaaatcatttttactcccggttggtaaccccctatagtcccgattttccaaccgggagtacgaatctaagactaaagatcggttcaaatatctttgatcttcagtcccggttggtgttaccaactaggaaaaaagagaggaatctttagtcccagttgataacaccaaccgggactaaagagagagtagcactttttttttcttttgccagatttaatctctatattttctcccgaatctagtgccatgtatatccctaaatcaatccccaaatccccaattcaaagtaacatcccaaatcttaagttacttataaatataaatcaaatacatcacaaatcctaaaaaatacacacaaatcaaatacatcacagattatacatctcatatcc

SEQ ID NO: 30789 - DNA, 723 bp, Oryza sativa
tatattatgaaatgtcacgtactgtttgttctagttagtgaattgtcatatggtaagaatatataaaaattaggttttctggactctatcttccaatgtatttttggatcctataacaaaatattttcataaatatattttttaagaatctaaacttttttgaaataaaagagcaacaaagaaaataaaaacgctctctcgtaagtaactcgtgaagatccatcgagagccactcgtttgaatcgtcgacacaaaagaacacttcattgattgcttttcgtcaattagccgcacagcacagtactctccaatctgctaaaccaaaaccaatctcatccatccatacccttcttgacaccaagtggcaactcctgattggacgcgccctatcctacatggcacccccaagattctctcgataggctacaggggccacaccgaccctccacgtcatcgtccacgtcaccctcatcccggcccatccagccaatcccagcccagcaaaaaatcttcccaagtggccaccagataagcctctccacgtattaatacgccaagtgttcgtcgccatgacacagcacgcacacacaccccaccagcagcagcagcagtagctgagcttgaagcagcagagcgaggtagacatggccgccgccaccatggccctctcgtccccggcgctggccggcaaggccgccgcgaaggtgttcggcgaggggcgca

SEQ ID NO: 30790 - DNA, 1022 bp, Oryza sativa
aggagattggaagatgagggagagggtcagaattatcgagagaaaaaggataaaaataaaaaggaaaaagggaaagaaaaaaatacaccggttggaggaggggcgtgcgaggcgccgagtggaggcccacatgatagggtggcaggatgatgttgggaggttgggttgtgttgggctgatatatgtgtgtataatagttattctaaactcatatcgaattggatacaaacgatatatactaactgaaatacggatgatgtattgaaattccagtgaaaacatctttaatttttataatagtatagaagtaaacaggtccgtcgtaacaaaataaaagtgcattggggtgatgtaactctttttattttataaccggtacaatgtaattaaatagtgtcaccaccttactatattcataaatttgtaaccgacttaacaacgtccatatactccttttgtttttacaataacccaatcatcaatataattgctagtaatatcttaagcaacttattacatttattagcttacactgatatataataagcacccaacatgttatggaacgatatgtaaagaattttccggtttctctttatccaatggtcataaagaaacaacaaccagcataacaatatacttactttttggagcaaaacacaatgcccaactggctagagttaaaacttacaaccatttctcattcgtggaaaaaatattatattttccatcgcttagcaatctccttggagatgggcagatggcacacaaaacatgaatagaaaacccaaaaggaaggatgaaaaaaacacacacacacacacacacaaaacacagagagagagagagagagagagcgagaaaagaaaagaaaaaaccaattcttttggtctcttccctctccgtttgtcgtgtcgaagcctttgcccccaccacctcctcctctcctctcccttcctcccctcctccccatctcgctctcctccctcctctctcctctcctcgtctcctcttcctctcca

SEQ ID NO: 30791 - DNA, 562 bp, Oryza sativa
actggaggagaaaataacacaaattgttgcaagtcatgtgtaacttcaaagatagaggtaaagatactcaatatatatactaagataatgttacagagtattttggttctgcctctgataaccaacacaatggaaaaacagaaagacctaggaaattgagatcattaatagaatattcatgttacttcaaaatgtgagtacaaaatgcagagaatgaaataagcaatggatcacattagaattgcagagtaaatctttactttctattaaaagttttgcatttcagatatatgaccagtgacaatgcaacaggtccattttaactggggtagagaagaataaaaaaaatattttcttcattgatatatcaagcgttatctgaatattccaatagtttgtcagacagcaaactcctgtgctctcgacacaacaacacatcagtagcaaagcaacagcatgagtcccaaaaggcatttatgagtccaaggcgcacacatcgctaaatccatgtttggaattctccattagtcgcgtagcataacaacaatttgtcggctagcga

SEQ ID NO: 30792 - DNA, 690 bp, Oryza sativa
ggcacctattgaacgacgggcagtcgacaaagccctgtcgaacggctggcgttcgacacgctcacctgtcgaacggagggagttcgacagggcccaccacccgcgccgcgaggcctgtcgaaccgggggcgttcgacagggccctccaccgaccctgtcgaacaatgggcgttcgacaggccggcttaaagccccgtccacccaggccgcgagttcgatttgtttgaggaccacatcgccagccgccgccgagagtcgccacatcgtcgccgtgagcgccgaagggagcgaggggaggggatagcaggccggggaggaggccgaggaggcgccggccgggaggaaagggttgacgacgccctccagcagtgaagttaaggtatacattagtaatccctaagtacaatgcatatgaaagtttaataaaaaattggtttaagagttgttaattgttttgcattattcgatgttagtatgtatggttagcacatatttgttattgctaaatgttggtagaagtatttaagtaattgtacggttaaattagttcttagtagtacatattattgatatgttgtgtgttaaaataggtacaaaagtgttatattttatttggattattaaactagttgtttgttactaatagttgtaaattagtacacggcaatgtagtataagttgtaatagggt

SEQ ID NO: 30793 - DNA, 2859 bp, Oryza sativa
gaatgatgaacttcagaacaattcagaaaacgatgaagttcagagctctttctcttactgagttactgtactgtgaacgatgtttcactagcagaaggttattcttgaatgctcttttgtattagctaatagcttcttaggtattattttacctatactattaatagttccgatagagctgtcaatttttatcagggtatactactctctattctctaggacagccatatatctttgagaatattgattttattccccctatttgtattagattatccatatagagactgctgttggccatgaatttatcccatagcatttgtgcgcatggaaatgtgctgaatttttttcacagtgattcacaaatataatctattgagttgatcatattattcaaaagcttcttttgatttctacctatgtcctttctattgatcactatacaggaccaccaccatcgtacctcgccaatcacgacaacagaggctgcagccttcatccttccatccatataaccttaggccattgcccagccatgacaatttgttactcttaactgcatttgagaactaattaatttgtttcttaacgcatgcattgcagcagggcatcgcatgcttattcttcccagttaccaggaaaaactaatccagtggaacaattatgaacaactcacatctgaataactctttgtagcatttacaagtggaagcaaataatttatggcgttgagttgaggtacctctcatgttctctgattaatattagcacgatgccttttcaaatactattcatgaaccaatatttatattctactgacaggtaaaatgaaaattcggaagggtatacttacaggactaccgtgaatttggactcaggtccacaaggggactgtaaagtcgtttgcttaatttatatttcctatttccaaatttcctggtaagtcagatgatatattttgcttagagatatccctgttacggattctttcacatcaacatgcatatccaaaactaactggagtgctccagcaattgatctgataggttttgctgtttactatgttagctctgttccattaattagcactggattgaaattaataccttgaccatactttgctcggagttgggatgaaatcaccactgggttaattttgtgatggcatatccatctagccatatggccaactacatagaggaataactatgtatttatttgcttacagaagtgaaatgctctgctgggtaaaaatgattaatatggtcaagggatttttgtttggcgtatattgttcgatgcaatagatatttggttgtattgctgacaaaaatgtttgatataaaattttattgattcatgtagattaacaattgattccacaagcaaacgaaagagtgtgttttttagacatttattatgggtacacttgctattatttactaaggaggtgtttcttaattttcaatcccattgttacttgaggtgctgttaaggagggaagatgttggaactgccaagaaggctgagctccaattggtctactgctccttcattggcgagatcagcctcaacctgcgtttgtggaagtttgacatgttaaatagcccggttgacttggtgttgtatcacattctgttggcgatagttttttattatttagcccaaaagacaatcgattaattttgtaaaactgaatcattattagcatttttttgtcagtgctatatatggtgatagattaatgtgattagttactttggtcacattgcaatgtaagatgacgtatgatcaatacgtaatgcatatataaaattagatctctgcttttctatcggctcaaaagctagctcctattattttagttattattttgtcctttcgcatatcaacgaattttcaatatataaatatttcatctttttgtgtatcataagctagctcctgtatgtttcagttattacaatgtttttagatattaataattatccagtttatcatcaaagtttaatttgtgtagcacgtatagttaaacgctacctggattttagttaagtgggtatgtcattttttgtttgcacgaacagagtaaggtgtataattatttaccccttgccacgtaaaatattcacttcttttattatctaagttgcgtttatatctgattttcatggaaaaatgctcgaggttactaaaatacaatccaccctaatgtacgaagctagctctagaaaataatttgtgcagcatagttaaaacactatccacctatagaatatggtgcgcaaattactttcttttccattatgctcatcatgcacgtcgaatattaagtttgatcatttcggatcctttcatagagattgtttgctatgttgtcactaatgactccatttgaacaaggataataactatgttatttaatttttataaatgtggcaatttaattaataacataataaatatatccatcaatcttaatttgtatttttagatgtcgtcgtagcgttagcataggctattactacttcacccctactcgcactgcgcggggttttctatctctctcgcgcgcgccaagaggccaagtcgcgcgcgtgggcccgccccgccctccactatctccacacggacgaccccgccgttcgctctctcccttatctctttcgatcgcgagtcggagcgagcgcagcggcgacgacaaggggcggtttcccttcggcggcggcggcggctccggctccggcgagcccgctcttcttacctccgacgagcccctcatcactccggcggccacgaggcgagagctgagtggcgacgccggcgagtccccttcctcctctcctcggccaggttagc

SEQ ID NO: 30794 - DNA, 681 bp, Oryza sativa
cgacgtccctcggtgagcatccccctcttccttcccctctgtcccgctgctcgccgccgccgcgtcattggattataaactactaataccacatagcagggattcgagcataatataatcagattatatactcaatagtttgaccaccaacaaagcccctcaatgaattaacataagacataagacatcctaccaaaaatgacactaaaactatcaggtccgaattttttagtccaggagggattagtgccggctaataagcctagcaagagagggacctagagtgtttgtggttgtgccggcacctctgccgatgtgccgggtggcggcgcgcggcgtaggtgtacgctggagttgtaggaaacaggattgccgggtaggtcgtggaggatgcaaagcgaactgtgaactcaccggcagcgaggaacacaacggggctgagttagggtttggggacatttaattatttgctgcttttaagatgtgtcaattaatgatttgtcactcgctgtttataacatgtgggccgctcatatatctatgacatatgggcccaatagcaaatcctttagggatgaaaacgataggaaaacagcctcaaccattaccataaccatatttttctcggaaacgaaatcgaaaacggtaaagtcggaaacgaaaacgatatcggaaatatcg

SEQ ID NO: 30795 - DNA, 1085 bp, Oryza sativa
cgcgtttctgacaaaactcagtgtacacagagttgatgcacaagatgtttttgcacctgttaaatcctttgtagttttttctctgaaaatctgacccaaggatgttactagaaagcaacaactatatgatgacacctacaatcagattgctgcaatccagcgttctgaattgactacctgaaatcatctcaaaagaaagttgttcagcacatctaaattgatttgtgccagatcacttttatcttattctacaaaacagatgccttgtatctgttattctcaaaacgatgaagcccatccccaaactagagtttacacatgcaaaacataacactggtggagaaaggatttgtagtcccgattggtaaccctctgtagtcccggtttttcaaccgggactacgaatctgggactaaagatgtccatctttagtcctggttgaaataaccggaactaaagatacatctttagtcccggttcgtaacaccaaccaggactaaagatttagtcccggttgatgtaaccaaccgggactaaagtttttttttttcttttttttcttttctcatgttcaatctctccaaatcattataaaaataacaaataacaaatcacaccacaaatcacaaataatatatagcacgaatcacagatacacgaatcatagatagttcacatatcacatatctcctaatatcattcacaaatcacagatcgcatcacaaatcacagatcgaacaaatcacacagatcccacatcacattaagaaggaaaaaaagaaaaaaaaagcaaaaaattccatgccgggcggccctccgcaactgccgcggggcggccctccacgactctgctgccagccgccgcggggcggccctccacgcctctgccgcctgccctctggacgggcagccgccgccgccaggccctccgcgcggggcaaccgccgccagcgcctccaccacctgcctcggcgccggccggcgcttgccgccgccggccctccgcgccggccgccgcccgctgccgctaggaagacaggggagagaggaaggggaggaggagaaggagaaagaggagaaggagt

SEQ ID NO: 30796 - DNA, 2056 bp, Oryza sativa
attaaggaggtgacaatccttcgttaagttctcaaagaaaaaacaatccttcattaagctagcatttgtgggctaatagcaaccataataaaattagtacataatctttcataggctgctagcaaccatcaagaaagggtgcatccaggagcagtgccagagtctgctttcattgctactaataggagagaaggggttcaaccaccactaaccacatcaacaaaagagggcagggccacattgaggaagagaagtgcagcacccaagaagaaaaactctcccaagaaaaagaaacagtagtttatactatgcactcagttatgcatttagttttcgttcaagttattcactgaattttattcaggatctcagtttctgttcaaaatatgcactcagaagtttcattgtgttcagattttgtcacaatgtgtacaattaagcattacattccttgctgcttcagtggatttaatgttcatgcggttaatctgacggcacaatggcttaattccttgctgcttcaatgtctgcactgaagcattggagctaggcttcaaagttgctatatgaattgtcagtctgagataaccgatgttggcctaaagcaaggcactcatatgcctaccgcagcatcaaaataaactaaaacttgattactgttgcagccaccaccgccagacttgacctacccgttgcagcaaccgtcggactcgactcccccaacggcgtagctgtcgggctcgacctccccgctgctactgccaccaaactcgacccccacatcgctgcagccaccacgcgtggattcgacctccccggctccccgccgctatgaacacctctcagattcttttcaccgagaaattatacatgatctaaataccaaataatagaaggggttttctgataaaaaagggccattgcatatgagcagcagagcatgcaagtttgtcctccttacgtgaatacgtgaatgcttagttggcggtctactcatcatccaactcagcaaaattagttttgctattctatttagtcatagttcgcacgcacctatacaagtttgtgcatcaaaataaaagttttacaagtttttacactaaattgcacacacattacaagtttgtgtaccgtgagcgcaatttactctatatttaatatctatgaattagaggtgcaaatagatatcagtttccaaatccgattcgaagaaataatatgggataggatacgggatgagtgatatattattcggcactacctgtacccaactccgaatttaaaggaaaatatgggttaggatatgagaatgccataatccgaccctagccacccgtttctctattttttacttaaaaagtctggtggcggtgaagccagcactgacagacacacataatatggaccatccgattgccagatccaacggttcggatcgataagcagacgcacgtttctctccgcatctgcgcatctaatctcctccgcatcgggcggcacctctcgtcacaacgtaacccaccgccggctctctcccttccgcgaatccctccgctctccaccgtgccccgccgcaatacgcttcgtccccatgtagccaatccctcgcgcaatcactcgtcgtcaggtcgccgtcatctcgctccggaggcgccgctgcgcccccacgccgccgatccctcgccactaggtcaccgttgtgccgcgtcaccagtggcaccctcaggcaccgctgtctgatctccatcgacgaccaccacatctcgcctccgtctgcgctcctccagccggccgatcttgcctccatatgtgccgtcgcaaaggtctcttctgctataaataattttcatatttgctttccagcatgtggaattgacaggagttatatgtatataggatctagctaacgcttgagaagggaggatatcaagatcttgctggcgtaagaaaccgatgttgatgaacaggtcatgcttcactgcccaattctgctctatcattgaggattttgacacttttttacccacctcgacaccatatcctttccaaactacat

SEQ ID NO: 30797 - DNA, 543 bp, Oryza sativa
agtaagtaaaagttttcttagccataataatagtgtggatcttccttagtatttgttgatatttttgcaaaatggacaaatgatcaaagtgtaaaagtgagtagtgccccgttgtcatctctactgccttaaaaatggtttaagtcgtccttcttctaccgcgcacagtacaccgactcataagggcctgttcactttgctgccaaaaaaaacctaaatgtacccacttttttggcaactatgtcaaaattttggtaatttgccaaaattttggcaggatttcttatatagttaccaaaatttggcagcaaactaaatgtacccacttttttttggtaactttaccaaaatttggtaaggttgaaaatggcacaaaagtaaacagcccctaagtttagtaataagcctaaagaaagatgacctaaagaaaagaggataaagaggataagaagtgggacaagacgctggacgtccggcttttgctaaaaaatggggcattgctccgatagatacagaaaattatgcatcatttgattagatgtt

SEQ ID NO: 30798 - DNA, 691 bp, Oryza sativa
atattatcttttttttgggtaaaataaaaaaaaaagtggctacatttagtttgttgccaaattttagtaagtacatatgaaatcttgccaaaatttggcaaccttgccaaaattttagtaagtacatatgaaattttgccaaaatttgacaatgccaaaacttggtaaggttgaaaattgtagcaaagtgaacaagcccgaatcttttgaggctaattagtccataattagctacaagtgctacgataccccgtatgtgctaatgatggcttaattagactcaaaagattcatctcgcggtttccaggcaagtcatgaaattagttttttcattcgtgtccaaaaatctctttcgatatttggtcaaatattcgatgtgagacccaaaaattttattttcgcaaactagcctaaggctgtattcggaggtgagtgttgggaacccatctcccatgcaagaaaaacggagcggtctattggtgcataattaattaagtattagctatttttttaaaaaaatacatcaatatgatttttttaaataacttttgtatataaacttttttaaaaaaacatcatttagcagtttaaaaagtatgtacgcggaaaataaaaggggagtgttaagaacgctcttacaaacacaccctaatttgggaatttccctcaccaccgtccagtcgttgcaagt

SEQ ID NO: 30799 - DNA, 1305 bp, Oryza sativa
ccctactcctgtttggggatttgaatccgctgggtgtgtattgatctgacgatcaggttgtctcatgccccctagaggcctcctgcccaccttatataggatggggggcaggattacaaaatagaaaccttaaccaacacggtatcggcttcctaaatctactttacaatattatcaaatcaggactttaggccgctccataatataaaaggaaacgtaatacccaagtcatgatctgttacatattccatacatatatgttatcccctattactagtcggataaccatgccgtgtgggtatggggtacccataatctccacaggcctactatttttttaaatttattgatgattggattgtcatgtagacaccacgtcaccaaaaccactctcgaaacagcctaggaagtcgttttgaatggttttaatacttgggacattatacatgattttacggttgagggatatgaattagatccaacctatatttaaggaagtcatcttggacttaacatgcgtacaaaattgcaaaaatgatgatagatatcgttctgagtttaagattttcccctaaaaagggtttgctgcaaataccacttctctctcctaactcacctttgcttttgaaatccccccacccccaaaatgttgttgcttgcccattcttgtaatcgcaaaccccatatacacccatatacgctcatatgaatactattagatgaggagctatggttgtcactcataagtcatgccctatatgatatgattgtggcattcccagtgatggcgcccaacacttcattggacagtggttgtcatgagtcttcactcttggacatcttagtcactaatgaactgttgcgcttgcctcttggggttcggtgagatatgtttagggacatgtacatcaatatatgcactaaattgtataacacatgcggaaagacaaaaaagaaacacacaagcaaaggcaattggggagaggtatcaaactggtgaattaagaggggttatttgcaataaaccatcttatatagggaatcataaaacttaagagaaatttgcatatatgctactcgaaaaaactagcttcgctagaatggcactctcaaaatgggattcaaccaaatgccactatcaatctgggggcattcgctgaaatgccaccttcgggcctttttctatttcaaaaatatttttcatcaattttagtttttctcggacgtttatgcccctaagtcaactgctgaatcgtacgttgaatcgattgacagtttcttctctgtttctctgggctgcaggaa

SEQ ID NO: 30800 - DNA, 1210 bp, Oryza sativa
aacatgtggttggacgtccaggggcaaaaccgtccaaaaaaattatttcggtgaaaaatcttttgcaaatgcaacagacactgaaaatggcattcgagcgaatctcattttaacgatggcattccagcgaagccgctttttaaggatggcagagatgcaattctctaaaacttaaggtgatatttggaatggtttatacaattttctctaaaaacaataaggtaacgagggagagtcggccacgtgaatgctctcatttccaggaggtagcaaaagtgcacatgaaacatgctaatggtattttggaccactattatttctaacattaagctactacatactcctactaaactggtaccaccaaatatatctaaggcggaaggccaaacttcactctaactccaaaacaagacatgccttgccctcatttctcatctgagagcatttcgactcaaaacaatttacaaacgcgtatcgttaatgcaaaacaaaaagttgcttatatagtatgaaaaaactaaaatgtgcggaaagcaaagcgaatcattacatagtaacaactcgtaggtttcgatttcctcttatttttgaattttttggctcctcaaaatagctgtcatgttttttttgcaacaagatttctcaattgggccagcagaatcagcgacacgcggttcgatggtcagctgctctatttctcattggtttgtgcaacgattcagtaaccgggcataagcagttgaggcatacatgtgtgcaatgcaacctcacacatggttttttttataaagaccttaatactctaaaaatctcgaagcaaccctttaaccgtttttaccctgttgtaaattttgtaaagccctatatatttttgagaaatataacacgaagaagacaaggtttcgtttttagaggtagcattgtaataccaagaagcataagggtttttttggcaaaaatatcatcccaatctgatgcagtcccctctcgtatcatctgaacttccgcctcctttgccgccgctttccgcttctgacgccgcactcgctccagccgcggagccgcctcttcttgctgttctccacctgtggtgaaggaggccaggtttgccgcccagccacccgcttcgccgctcgccctcccccacctcctgccaccaccctccccggtagcgcctcctgccgttgtccccacctcgcgcagatcgggg

SEQ ID NO: 30801 - DNA, 561 bp, Oryza sativa
atcagctttctctggtcgggaagtacatgaagaactttcagctgtataaactttttgccttccatacgattttgccgcaagatgcatgccaatgtttcgccaatgaagagtattggcaagaaagcaagattccaccgtagggtccttatcatgctgtaaggctatccacggcctctattgttgtgtgtggcgccactatacacatcgcattcgccggtgtgtgagtgtggtgttgcgtcgtagtgctgtgcatgcgtgcatatctaccttgtcatcaaattttaagtcaacttgtggttttagatgtcaaaatttcagttttgttttcgacaatgtcaggtagatccagtcgtacacatgtgcaacttgctttgtgagagcgggcaatgcaactaggctgagtgagaagagccgcaccctgattggattaaggtgaaataaatagctacatttggggtgcaatattgttttttattaaaaacaggttacacttttgacaatacgaattacatacatttacaaggtatttatgttataaaatttaagactgtatttttcaaa

SEQ ID NO: 30802 - DNA, 734 bp, Oryza sativa
  unsure (1)..(734): unsure at all n locations
ctgggtttgannctagaaacacatgctgcggcagacgncatcaacatgctcatgcacacatataacacgatggttaaagacgcgcgaacaagcgacattatattctagtaaaggtgaaggatgatcaggcctgaagccgaaacttgcctaccaaagtattggcattttatacggtcatcatggtaatgtttgacacggtaccaatccttgccaataccacataaatctcgtcaaaatattgtcctgggcaaaaacttacctataatatggcatcgccaatatgtttggcatatcctcaaaccaaacatgacctgaaacttttgttcattgtaccctacccatcttaaaactactatcaggaaaaattgaaatatatagcgaaaattgtgaattaccaacataacgctaccggagggagtatgtttcttttttttaaaaaaaaacagaactaaacgtatatttcggcagaacgccacccgtcatcagatggactctggatcctcctggatccatgctacacgcctagagccatacattactgcatgattgtgcatactttctacatggcagatgtccatatcgaatggctatcgcgtgttgataacacataagcgcgtaatgcgtcatgtcagttgtcaacgaatatagtttaaggattccatcaagctgaccgctaatcgcaatctatctattgatataagtgatactgatggggatacaggtaatacctattg

SEQ ID NO: 30803 - DNA, 776 bp, Oryza sativa
  unsure (1)..(776): unsure at all n locations
cgcgttgatggcttctcgntggtacagtagttcatcaatacttttgatccccaaagacagggatacgaatccaagtttgatgaccaccaacaatagaaaacattcatgtgaatagtccagcatacataaggtattgcattaaacaaagccgtatgatctgtagtgacacttgtgtataaccaaagtagtaggattaaaacgggagcaaaaccttacttttgtctacgcttttgtgctttgtcagtttgatttcacacatgatgtgcaaattatcatgtgttttgtgagggtaaattttggatatggtccagggaatatatatatatatatatatatatatatatatatatatatatatatatatatatatatatatatatatatacatactagtacaacctgtcaggtgtgggcctactatgaggcaaaaaggtttaagtgagaggaaccactgatatatctttgggcatatgcattggctcattatggtaatttaaaacaacattttttacgttttgatacaggagggtataatataatattatataatccatcaaaggtttcgatattgagtagaaagattatgggtagtgtacaggggcacaattatgctgccttctagttttttatagtacaagcattatatgaatattttaattggaatgcttatttttaaggagcattttctgttttataagaccattttattcctctttccactcgctaagcaaaatatgagcttcttttttgagagaatatcacttattcactccctc

SEQ ID NO: 30804 - DNA, 540 bp, Oryza sativa
gttgactttgaagatcgtctgatttctaaccagcatcttttaaggtgttggagaggttgttgtaaaaccacagacattaaaaattacatgatttagtataagatattcaattgttaagcatccctgtcacgaaccagggggctgctgcaacaccagagtcagcttctgctcctaatctcataccatttgtcgtgatctatgaagtaaaaattgtcattcagataattaatacgaagagaggaaaccttataattccttctagtggcaggccacacagttctaatagccttcacctccacttttgcagcaatgtggaagtaattttacaaaattttaactaggttagtagagtgcagatgttcagtgcaaaattactcgtctattttaatgcgcaccagttgtcttcccataaaacaaaaaaagtagttgagccttacaaaataaaaacttagatgcagggtgttgagcattatcggtgattaggaaatagttccagttctaaactagagtgtttacaaactgatcaaaatcaaatctatg

SEQ ID NO: 30805 - DNA, 695 bp, Oryza sativa
aggaattgagctttgacatgtgttcaggaaaattaaagcactaaggaaatgtcataaaaatttgactctgtagtatttattaaattgactcaaattcgttcgagtataacggaaagttagtgaaatctgtgaaatctgcctttcttctgtctagacataatatattatttggtgatttataaatcagtcatttaaaaaatcgaagtagctcaattaactaaaaatagactatcttattgatcatactcgtcatataactacaaaagagatgatcggcgttgagctatcgtcgctacaaattacagaaagttgaagtgtgtcaactggattttacaatgtgcatatgctcatatactgtcgaaaaattatccaacttctcagctctagccatgtattgtagtgtcttacttgcccatgtttgaatcaatttcttttgaactttcatgtcaacattgctaaagaccaccagttagtgctgacaaagcctaatttgatcaagttcgtatctatatcaatacatcattatatattaagggaataaccctgaaacctgtacactataaccggttagtcttctctggattcgcaccactggatacacagcctaaaatggacaccggtggttgaagttgtaacagatcaaaatgtcataacactggttttgctaattctttctccgcttttcactaggagaa

SEQ ID NO: 30806 - DNA, 740 bp, Oryza sativa
  unsure (1)..(740): unsure at all n locations
ccggttattgaaggtanggtcgttttgtacngnncncncatatntagttgggacggngccggccaagcaccccacactctacattatgagtgcggactagaggtcacaacgtattctttacactacttagagcctagccttgcaccatcacgatacgtgttcctgcatcctatgcatacttagaaatatgtctagaaccgttaagtggtgggcccacgccttaaacccacccacgtggcacaataccgttgtattggacagacttagtcacctaaactaccacgtcggggcaaataggaagttgctctgaatcatcgactaattcctcagaattatcgactaacttatacacaccggcctaccagaatgcaatgctagttctaaatagattaatcagcttaggccatcccatactagtacatgtggatgtacgaataactttaagttggtgacacaagttcggtccttacggtccttacggacttgggcaaacactccccctatcggcatgtaactaacaccatatgcacaccacttgccgcccaagtctaaaatcacattttacacattttagttcgtaaatacccatcatattcattttattccagcaaaggttcacatatgaaaatcacattttaaatatagatggaatgagcatttgcatatttctaaatatggctaagcaagtagttgcacatagagcatatataaacccatttgagcacaaagagtgtgctcta

SEQ ID NO: 30807 - DNA, 648 bp, Oryza sativa
gattattatacatttttttttacaaatccagacaaatacatcgcaaatatattgcaaatatgttcaacgatgaaaatgcaatcaaaggaatgagaaaggcaaaggaaaaggaaagacaaagaaagcaaagaaggaaagaacaaagaaaatagctgtcaatggaataaattgaattattgtggtaaaatttttattttttggttctcgcaagattgactcccggctagggttccagcggttaccgctaaggatccaagattaacgttgcataaatgcaaaggtaagttattttggggtaacttatccttatctattgagagctacaaacataaataaatcatcatattctacaaaattctcacgctccataacttgcggaaagtttacaagataacccacaaaggcgccttcagaaaaacccttttactccaagattcttgccactcattatcatggcattttgtaaagagtccaggcatcgctgacaaaatgaaccgggaaaaacagggaagggaaaaaaagaaccaagctaccgttttcaaagcactactctacaattgaattagcgagggtcactattacttacacaatgtcaacagatctggcctgttccacctgttcactcaaaacaagacttaaacctaagcc

SEQ ID NO: 30808 - DNA, 743 bp, Oryza sativa
  unsure (1)..(743): unsure at all n locations
ccccttgaagtacgatctnctctgcagnagctcatcacattaacaaatgtttattgttgccccacattggcaaatcatggcgcagtttggctcaaaagattcttttctcagtttacacgcacactgcttaactagttgttctgcacatttaatattctatgcatgtgtctaaacacctaatgtgctgggtgaacagctttttttttcaactatacacggccttaaagcctatagattctgtgaactctctcacaagaatgcgtctgccggccgcaggatacataaactgtgtgacgtcaccacgtgacaacgaaataagccactgcgtcataaagtatacagtgtgactaaggctaacactctaagggtgcgtttgcggcgcactgatagcggctactgtctggttacacatgatctaaactatgtgcgccgttaacacaagatgattaatctactatcaagtgttccaaacttcaaaaaccggacaatatgattctctaaagcaactttcctacatgagatctgttaaaaacaacatagttttttcagaagcgtgcacgctgagaacgaaacagaactgcctcacgattgcccatatcaaccggcactgtacacaggctctgactggaccaggctactgaaacttacggcacaggagtccttatactcctatgaatgaaggcccagcgtatactatttgacacgcgatattcatacgagaggcaaacggtttatcatggaga

SEQ ID NO: 30809 - DNA, 748 bp, Oryza sativa
  unsure (1)..(748): unsure at all n locations
gtgcgnctttgatttgcttgactctcanctcngcaanagctcatcaagctatgtcaaatgaagccaaaaaaaaagatggagaaaaacagagagaacactctgctcctcggcttctcgcatggcggcagccggcagcggcagcaatggcgattattacatttattacatgggccagagcgcgacgccgtgtgggtaggcgacggcggcggcggcggaggtggtggtggtggtggaggaggcgactactgtatatccggcctactggttggacgaggccattttccccaaagacctcttttgatgaatcatattggggccgctttgagattttgatcgctagagaatggttaaaccctcttttatctctcaagttcccaaaattgttttgcaaattttcgctatataaagttgtcacattcagtaaatatatttggactaaagaacccaatttcatagatattcaacgcatgcactgtagtgggggaggggcgcgccactcctttatttttaaagacttgagacgcgcctaaagaggcctaccacgtttttaagtacggctaaagtccatgtgtctggggtgggaatggaaatggaaacccccaatttcgggttgcagtgttccgattaagggcattgtttcctgtttgttccccccctgcccgtacgggattcattgttagcgggtaacctcaaaggactaaaaaaaaatcacttttaggtacgaaaaaactcggatcagactattttc

SEQ ID NO: 30810 - DNA, 755 bp, Oryza sativa
  unsure (1)..(755): unsure at all n locations
agcggnattgatttcaagtgtnatcannccnnggcttgtagattcatcactccaacctctgcatccgtcctcacatagccttccgcctggatgtgtctcctccccttctcttctcttctaaggacgcttgtcatttggtttgggcccgtcctaatccaggttgatctcatcctgagatccttaacttaattacatctgcaaagacccctatccaaataagagcactgtcttagtccgcctgggctgctatcacacatgccgcagactgggtgtctaaaagaacaaagatttatttctcccagttctagaggctgcaagtcccacattaaggtggcagcatggtcagattctggagtgggcccttttccaggttgcaggctgctagctttacactgtattatcacagggtgaacagcaggatctccgatgagcagaatgaggctcagagagggtgggcgacttgcctatggtcacacagcaaacagctggaatttaagccctgctcaggagtagcccctgagctcaaactctctgtgactctgtgactccctggaagacccacccgttggagacccacttgtctccactcagtgcattagatttagcttagctctttggtttttggttttttctcttttagcctctatctcctggtcaggttaattaagctgttgttaccaacccttcttggtcagtgaggaagcaagtccagagcggctgaggtttgtgcacagccccactcaatctggaagaat

SEQ ID NO: 30811 - DNA, 591 bp, Oryza sativa
ttccttctagtggcaggccacacagttgtaatagccttcacctccacttttgcagcaatgtggaagtaattttacaaaattttaactaggttagtagagtgcagatgttcagtgcaaaattactcgtctattttaatgcgcaccagttgtcttcccataaaacaaaaaaagtagttgagccttacaaaataaaaacttagatgcagggtgttgagcattatcggtgattaggaaatagttccagttctaaactagagtgtttacaaactgatcaaaatcaaatctatggcgctttccccagaaaatttagaatggatatgttttacacactttttcaagaacacacgaatatactgcatgcccttcatacaaagaaggaagatagggttagacatcgtattactatatctgaataataagaggatgatatagttaaagcccttcatcatgctcagaagtaaaagagagctgaaactcactgattcagaagtttggatcactgaaggctgcaacatggactgttcacttcagaaaagagtcgatacttcaaatttatctacagtgatcacacaacctaatagattcactgga

SEQ ID NO: 30812 - DNA, 523 bp, Oryza sativa
tcctcaaatacaaagcacttccctagttagatgtaggttagacttgccgttcgagaaactctaccttctacctgccctcaatttatgcacgattaatgaatgccacctgggtggaagcgagaggtggaaatggaaggtcttagttcggaggtgggatctctacctgatagttgcattgccattcatgatgatcccctggcattcgtccattcagccattcaccattcacccattcaactggaattttggttgaatgccggaattgtgtccacaaattgtggatggatagttggttggctggctggatggctggctggatggctggctggatggatggtgaatggctggcggcggttcggttgctttgaagcatttgttgctatctaaattccatttaaggtcgtaccttatcgcccagcatcatcttattctctatttgtattccctccatctttcagatacggatgtatcccttggatgtgcccgtgcccaatgaagagaaagagcgcaacatgaaacgtaa

SEQ ID NO: 30813 - DNA, 761 bp, Oryza sativa
  unsure (1)..(761): unsure at all n locations
tgatggtnnnnntttggttgtcgtcatcattccttggcttgcagattcatcactccaacctatgcatccgctctgacatagccttacgcctggatgtgtctactccccttaccttctcttctaaggacgcttgacatttggtttgggcccggcctaatccaagttgatctaatcctgagatgcttaacttaattacatctgcaaagacccctatccaaataagagcactgtcttagtccgcctgggctgctatcacacatgccgcatactgggtgcttaaaagaacaaagatttatttcctccaggtctagaggctgcaagttccacattaaggtggcagcatggtcagattctggagtgggcccttttacaggatgcaggctgctagctttacactgtattatcacagggtgaacagcaagatctccgatgagcagaatgaggctcatagagggtgggcgacatgcctatggtcacacagcaaacagttggaatttaagccctgctcatgagtagcccctgagctcaaactgtctgtgactctgtgactccctggaagacgcaccctgtggagacccacttgtgttcactcaatgcattagatctagctcagctctttgttttttgctttttctcgtttagcctctatcttctgtcaggttaattaaagctgattgtaccaacccttcttggntaatggaagaagccagttcaaagcgcctgacgtttgggcacaagcccactccatctgcaagaaggct

SEQ ID NO: 30814 - DNA, 570 bp, Oryza sativa
atccaacggagttaaacacgcagagcagacaggcttggtccacggcaaataaaaaacggcccacatcttcgcgttgacgccaccacgagccgatgcagtgcagcccgtggtgcgccgcgcccttgccacaagtgagggaggggaggcctatgctgccgtggccacacggtcacaacccgtgcttgccgatgaagccccctctgccaccaccctcttccttgaccccgtgccacacctccgcgtcctccctagtgccgtcgtgcgcgcgggagcctcactgcactctggctacctggaggtccgactccagaatcccgtatctaacggcacgggaacattcgctccactgcagatcgtcctttgtcgattgttccaaaagcgcatcgcccagtcgttcaacccacgttgctagggagctccggccgccggaaccgccgctcaacctcctcaagttctctcgagctggtggagcgcgtcagccgtcgatgtttcccgtgcgtggggcacgcgatgtcaccttcggcgagggcagagtagaaccaatcgaagatgacgctttcttttcatttg

SEQ ID NO: 30815 - DNA, 621 bp, Oryza sativa
acagtagttcatgacagagctcctcgtcgccgtcctccaccacctccccgcatccatcctcgcatcgcgcgggacgtcgacggcggcggtgggcacgggacgtcgacgacggaggcatcgagtggcggctccggcggcgtgcgggcgagcacgagtgcgggaggaggcaccggcggcgacagcacgagctcagcggctccggcggcgtgcgggcgagcacgagtgcgggaggaggcaccggcggcgacagcacgagctcagcggctccgcttctcccctctcccttcctgccctcacgcgccgccgccgcctctcgtgtaacccaccacctccgttcctcccttacatcctctcctctcctctctccacttggcgaggctgatagcgaggctaccgccgcagccgccgctgctctggccccgccggccggcgctccagctccagccgctcgtgctccccgtggccagccgaaggggagagaagagaaaaagaaagaaagagagaagggaggaagaagaaagggagagagaggatgacatgtggggcccacatgtcagtgggccccacaatttttattttgtgtgtgaatgactaatgggtcccacgcatattttttatttc

SEQ ID NO: 30816 - DNA, 548 bp, Oryza sativa
gaacgtgacgggggtcgacacgcaaccactcgcgcgacgtgcgtggacggaaggtgccgagctgggcaccctctactgctgacaggaacgagcggtggttcctgtcaatcccacggttcaacagtgccggtgtgtcttacgccatacctgcatcaaataggttaatcagaaacatataaataattagttcaacatatgtaataaatgttcataagcgaattactaacacatattaaacaagagtacaaacaaacaaaagtgtttagtccgaacactcatcacgataacattatgatacaacaccgaatagttcgcaatactactagtacaacaatagtcggaggtactcattacaacaagattgaattgaaattacacgatagaagtatttagtccgaacactcattacatcattttatttcctaaatcgaaagcattgttacaccatggaatcgcctgctgcgcgaccacgccttggccttgcgcgcctgcttgttgttccttcaccaggtggtcgactaccatcacttgcctgtacagatggacta

SEQ ID NO: 30817 - DNA, 584 bp, Oryza sativa
agtcccgaggtgttccaggtccccgtcaagttcgtgtttgataagctgacgccggtcgcgtcccatgggttctattctcaggattctatcgtgtccaggagtgtaatgtggtatttctctgtgggtggtcatccattctcgctgatacattcaatttatgtgttacgagcagtagttatctcgttgattgctcaatgtttttctccctatggtcctagcaattaccagattgatcgtggttcatatcattcgtcgcttggaggagacgataacaaaagccagtagaggggcagcataggagaaaggtgacaggcatcctcagatatgtgggcctcactactttgggcaggccacacatcctgctatcacagtctgatcccttgttcacagcggttttgtaagagtgagggatagagatttcaaataacgcgttttagctaacggagaatgagagcgtagagtagacgtattttggtgtacattttcacgggcccaagcatcccagtaagtgctcgttgtaaatgggctatggacctgttgtaaagacaagcgggccactcggaatggtacatgtaccttgtgcg

SEQ ID NO: 30818 - DNA, 8077 bp, Oryza sativa
ccccgccacaccacaaatatacaccgttgcgatgatgcatatatgcatatacacgaggaagatggccaaaggaggggagagggctactcccagactcacagtctctctctcttgcgcgcgcacacacactgctctcctagacttaacccaaaccatgtatgtcgccacctactggtccaatggaccacggcaccgtccggtagaggctgcccaaaaataaagaagcagggaggggaggcttaaggattgttttgccagcatctgtgctttatccaataatccagtttgcctttgggtgcatatgcatggtagagctaggtagtagtagtacttgtattattctcctctccccatatctttgacaaattccagttgccgggcatactgctcatgcatgattaatgtttttcctttccctttttttctctttttgtttttttgcgtagctaggctcgatctactgcacggttccaacatatattgctgcaggtacttcttgtgacttgtttagtaaaaagaattgcgtaaatatcatttgtttcattgtaactaattttatcattgaaggtatatatatttgcgcaaactatctaaataagatacatggttaaatatatgaccaaaagtcaataggatcgtatatttaaaaacagaagtagtaataaagaaggctaactttgcacgacaaagaaaattgcaaaatgatccccatttatagaaaaatccattgagcttgtgctctcaagcttactaataatgtaatcaacaaaacctgtgaattaattaagtcatgcaatagattggcactggtagatatttcaagagtaatattcagcaagggaccacatgcatatgatgcacagaattgaaatgacatctcaatgtacttgtgcatcagcaagggaccatatgatgtttgccctagctagttcacaaatcctgtgtctattcccggtcgtttctttattttttttatttgatgcattttaagtgggaaattcattttaatattttttcctcatgttttcttcgtgttcccacatcacaccatcgtcctagaaaccgtcccaacctttgacatcctttaagccacccactggtcatggtggaggcaattaacaggaggccagacatcctctgccggccaatggccaccttctttcaatctccaccagttggataagagttcgcaccacctctagcagcaatggtcgtccgaggtcgtcaacacatcattgcaggggagccgttggcttcctcaagtagccccatgagcacactgtcactatgatccactgtgccagatcctaccggcagagacgagaatgcgatcagggtggtggtcaagctaggaggataagtcggtagacacggggatatgggtagcgtggtaccaacaatggagcgtggtatgcgtatgctaccgtgctcatcacttgggggacgacaccgccccgatgaactggataccccaggtgcatttctgtcttttcatttgcacatgtgccttctgcgccctcatccattcaaaaaaatataaaataatggggagggcgatctctaccatgaaatcaattactacatctcaaagtctccctccaaaagttaaatatattgtgaggtgctaactaaaattaaccacacaatgatgatgtactttagcaaaatttgctagaaagaacggtatagctcttggcaacaaggatcattaaatctctcataaaaataatattcattttctttccgttaatttcttttttatcatctctctccagacaattcattttttttacaacagcaccggagagaaagtttaaatgaattacactgcaaatgatatccaaattaactatccatatcgtctataatcagttaactgaaacaacatatgatgatttgttagcatgcccattatatataagactttgcaatgtcacgactagataaaccatggaaaatccacaacttaaaacattctaacttgtagttagaacatttattaacattacccgagctaccatcatgttagatagaatcctttatataccactgaaaatcagtctgatcccttatataccactgaaaattggttcatcccctatatgccattggtccaaaattgcgcaccctatcatgcaacttccatcagttgactgtgttgaccgttaactctaaagtaaaaaagacacatttgcccttcttgagttgttaggcatgtcctatactcagaaaggcaaatacgtcttttttacttgagagttaacagtcaacccacagacaacagacgagagtggcataagagagtgcgcaaatttggtccaatgacatataaggacatagccaattttcagtggcatataagagattctctcgtcatgttacagtgtgcaccaacaagattgaacttgtcaagttaaaattatttttaactagtgttttaaaacatttttaagaaaacttttatacgtgtacattctccctagcaaaagaacttgtgaccgagatttttcattaaaattttattctgattgttagcgtagtgatggggatgtatatatggtttaaccctgtggacctatgttcgatttttgacatgcccacactttatttttgattatttgagatgcactttcaagtgtgtagttgtaggtgtgtatggttttaacccagatgtaggtcccgctcaattctcaacaagttcactctccgtccttaattattcttgtccgggtagcttttttttataatggcgaggtacattaattcaaaaaatgcaaaccactattatattacttgtgtacaatgataggcatttttcgcaagctctactttattggactatagctcatatggtactcatcaactcaggttttcagtgatttacaagttgtatgcaggtctttttcattctttgttgtagaacatgcatgtgatcgaacaggctctttcagagaggagagagagagagagagagggagagaggggggggggggagagctggctgagatgacctatcctatggaagacactgaacatcctaggtaaggagccactgacaagcagccagagagctacgtgtcgcccgtcctgtggcccgccttcatgtcgctggaaaccatcaaactgaagccgtcggtttcctccttgtcctttgctcgccggccgatccgtccgtctctctcctctctcctcgccctcaatcaatggccagctccggcatctccggatcgatggacggggagagcgctggcgagtgcgaggatgctatgcatgcacgctgtgtcgttggcgcgcattcacctcggggtccccgcacgcgcgggggggttgcaacaacgcattacgcatcgcctcgcgcgagcgagagacggccggcgagcgagcgaacgcgccgtacgtaccccgggttttcctcgccgatccatcgtacgccgcgcgcccgcgcgctaacctagctatactagctccgccccgccgcgccggcgcctcagtctcctcctgactcctgtcacgtccggcccgcgccgcgccgcgcgcccgtccgcgcgtagtacagttgatgtacataggcaagggaattaaagcgcgttcgatctggctggccgcgacggacgattccctccagcgccagaacgggaaaaacactcaactactcaagtagccctccctcccctgtggcatcaatgcggcgcatatctttcgcttagatctcccctgcatcactcacacatccaccactgactgggccggcttggctggctagccacgccacgccaccatacacaaaccgacccacggcacaggttcgatcaccaccccgaaagtgtcaatattccttctcgaaacgcagggagagcatgctccagtcgtacgtttccattgccggccatgctagcaagaaaagctttgtggtggctacgccacggagggaaggagagatcagacattagatcgttgcacaaactgggaaaggctagatcgcagagagagagagagggagagatcgcccaacgatcggttgccattaatttgctgggtgtagtagtgacatctcacagcgtcgatcgtctgatggtgttatcagataaaaagtatccaaaatgatcggcgattatacatgcaagatctagcaagctggggcaatttaatctgtagatcgaactggccttgagccccagaggcaatttaagttggtcgtcctatccgtatgtctcgtatatacataccacctccgtctcataaaaattgaatttctaccttttaacttctgtaccataaaaattgtatttctactaatatgggacccagtaaactaattacattttcttgtaatcttccttccttctatcccatctctaacccattatctcaacatttcttttaatcaagtttatatatggaatatgtgcatgtattgtatttattaaataaggttattgtagtcatttgcctatcctcctagtatgtccttaattctttagaaatttattttttatgggacagaggtagtacgtcgtatggacctcaggataggtgttacacgtacaggtgacttacttgcagggtcatcatggacataagcatccttgcttttggtagtggaagatgttcatgcagctagctctactggcagctagcgcatgtactcatacgtaccagctggttggctagctgaggtacgtatgtgacgggaagggccaaatcccacattttcagggcaggttttgcgcaacatggcaggtgtacgtgatatattctcctcaggctgtgactttctatagactgtatatagcagtataggctgtagatatatacgcataccaggtccctttgtgttaagtactcctagctagctatgcagatcgatgccgaccagctacactccgtaaagaaagtcttgatttgattgaggtaaagtcatggcactagaatactggatagcgatacgtagatagtatatccgtatacatgcctcgatctatatactagtctctccatttcagattataattcgttttgaatttggtcaaagtcaaacaacttcaactttgataaagtttgtagacaaatatagtaacatttacaataaattagtttcattaaatctataactgaatatattttctttatatgtttgtcttgggttaaaaatgttactattttttcttttataaacttgatcaaacttaggttgtgtttagttcacactgaagtttggaagtttggttgaaattggaacgatgtgactgaaaagttgtgtgtattaaaggtttaatgtgatggaaagttagaaatttggaaaaaaaaactttggaactaaacagggccttagagcaatttgaatttagccaaagtcaaaaataacttataatctaaaagggagggagtacattattgctctccagctatcctgatcttttctctttttgtttttgcaaggatattatatatttccttgcgctttagattacaaaaggtgtgctaggtggtctcgtcatgtatatcagagtactgaacccttaaaaccgggaacccagagcagcggcagttcttgcccttctttcacgaacaagattttacgaatacagataattttcaacgtgaagtagtgttgtagacttgtagcttagccttgtcctagtgaacgattgagtacttgttctttatacaattttctcccatttgttagtactccctcgtactacgaaaagttcttttaattaagtgattctcaggcagtttgatacttcggagaaatgacttatgtgccactcatttattactggagaaatgttaataataaactcttcgtggacaaatttgtggactccaaataaacactttgtagcataaaacttaaaataaactctttggtaaatagaggaagcaggtttgacccatgaccaagaaaaaaaaaaccttttattaaagtaagagcatattcatccgttcccacttcccagatatctcatatatatattttatatatacactccctccatcccaaaaaaaggcaaaccctggctatgtatcagcatgtacagatatatgtccagatatatatatatatattcatattgaaaatgtgggtgcaccagcagttttctattttcccatatccaaaaaatatataccaatgaatcaccccaactccttccgaatgaagggggagttgcaattcccccaataccatagttgatcctccgctacacctaaccgccaacgctagctcagccggccatcgaagacaccatgaggatcgcctggaggcgttgctcggcccccgatgaccattgtccacgacaggcgtgctgctcggtacttgccaaaaatctaccctagagctccacccgagttcatctaccgccttgagctcttacgaccgccgccactcaaagcttaccatgctatcagaggtctctctatctcgtgtgcgtgtgtcacatgggacccattaatattagggatatgatattagggagctataaaagcacatcgctaaaatttcttattatagtagtattgggacatcccaataacctgtttatagagatggaatattaggagactgctggaaatgctattaccaacaatttaccttacatgtcacctagctagttacttatctcaattagagacaatttgtaaccacatgtaaattgaagttcgttagtttaccattaaccactaaatcctagtcctacagctgccactaagagccgtcagattaatctaccatcgcatcatagccatgcatatcttatccctttgcaagggatcaatccaaatctaagaaaatctccttttctgcaggaaaatctaagaaaagtctgtccctatatatgtcccaattattttcaaaagcactataccatctaaagtgttgagttggcttgtcaaaattaggttaccacacatcacagtattccctttgttccacaccagaaatcattttcggttttgttctaatcatcaatttaagtttaactaagtgtagaaaaataataacacctacaaaaccaaactagttttattgaatccagcaccaaatttattttaacattatatttgttttgtgttaaaaatgttactaattttattttataaacttgctaaaacttaaaaaaaataactataattgagtaaaacaaattgagctgtggttcgcttaaaaaaaattatcagtggtcaagtgatgtcgtacaacacatatagggtggtcatccttccgggggcgcgtgccatcaacgccaagccatcaaccccgccagtcgccaacttcagatcggcagatcccgcaataataatgacactgttcgtagatgaatgcgatcactgaacacacgtactgttttttttctgtggtgttccatgacgagtttcatgtgtgcgctgggctagctcggtgattgctcgttgggtcacacatcacacaaccgattgcttttgctggaggcacagttcgtggaaggaaatgcgttgaatcgagagaactatttcgactaaaagctgtgctttgccggaattggcatggttactgtttgggccaggagaccagttactgcaatttcctcgcaacatcgatcaatgtgagccagcttttgacggggccttgaagttatcacatcatgagggaacaagttcactttagctcccttaacttgacattgagtttgattctcatccttgatccacataactatatacaacgggtccctgaactatcacaaccggtgcaatataggtctcatggcggtttcagctgacgtaacgcctacgtggctaatttgactcagtttcatctgacgtgacattgacgtggcacatgaagcaaaatttaacgatttaaaaatgaagcaaaatttaacataggcgcccacatggcaattaaataataagattaaaaaataatgtgacctacatgtcagtgggccccacttcctcccctcatcctttctcttctctatctcctctcctcccattctccttctcccatcttcccctttctttcccagattcggtcggcatggttgtgcctggtggtggtcatggccgccggtggctgttgtgtggatga

SEQ ID NO: 30819 - DNA, 1597 bp, Oryza sativa
acaaaacttagatatttataactcaatgtaacattagtgctagaaactcaaactctaaattatgtaggttttgtgataattatattactaaatctttagatttgcaatagtttagttaaattatatgtagttttgagaaacttacttggaaaagaaaatgacaaaaatcaattttcaagtatggtcttttcaaaagctacccgccttactttaaatagggtaatgggagaggatgacaataactagagagaatcaaagccaataagattggagaacttaagtgatgattatatgttaaaggtggatgatagtgtaaccactctgcttctctagattgaggagatagcgaaattgatgatgggagaggggggaggggtatacggcctagatagatggataatctacttgaaaaggttgaaatgagttaggtgatggtgcgatggtactagagggattataagacgtagtcaatttttctgagcaattttgtattttatctccagatctaaagacgcgattgcatttcctacacattcattgctataatctgcatcgttatagttagcatgatccaaatacatgtcacaatgaaaattttttttcgctggtctttagagcaactagaaaattgtgcttttcttaaaatatgaatttaataatctattttttttacactaaatgtatttgttattggactactggttgatcaaaatctgtaaaatttacgttttaaaatcaggacgcaccacataaaaaaaatttcaaccgaggcagtatcgctctaaagccaacaacacggggactgatgtcaaaaacattataggcgctagtcgccatctgtgcccatttcgtcctgacgaaaaaagatttaggagaacaagaacttttgcaagtttttaaggagagcatcttggctttgtgggcgcctgggcaatcatggatcatggccgcctcatggttgtgctctcgcaaacccctcttctaaaccccagcggcacagtggcacacgacggtgcacgttgcaatcaattgcctttgcgtgtttacatgggaagggtgcacgaattcggtgagccatcctctctgtcgcgaagaggcatgtctaccggtggcacgcacggccgagcgcatgatttcggttcgctgagcggtctctttcgcggttaggcgagtgaattgacaccgagacacagcgatgtgcacggcagcacggggaatggggtagaatttgccgcggcagtaagagattggttcgagttggctgttgctgtcgggcaagatttgggtcgcgttacgcagctacgctcgagccgcagcgtgaccagcgtggctggaaaagggttctcgtagacgattggagttcgagaatcaatgcgaaaagcaaacggtgccgaatgtaccaagaatgggtcgacagccatttggccgaaccgctgaagggagatgcatgacaggggaggcggaacaaatgaacaaaaacgttcacggagcaggtatgatagtagtaacacgacactgtttgatggatgattcaatgagtgtggagattatgaataccccatatctacatcacagttgtaatttagtcgaatatacg

SEQ ID NO: 30820 - DNA, 820 bp, Oryza sativa
  unsure (1)..(820): unsure at all n locations
cacacacacacacacacacacacacacacacacacacacacacacaacacacacactacacaaacacaacaacaaaacaacacacactacacacacactacaaccccctatcacacacacacacacactcacacactaccaacaacatacactactacacacacaacacaccacacacatnacacatatcacacacacacacatcacacacaacacacacactacaacacacaaccacacacacacacacaacacacacacacacaacacaccaaccacacacacacacacacacacacacacacacacacacacacacacacacacacacacacacacacacacacacacaacacacacacacacacacacacacaaacacacacacacacacacacacacacacacacacacacacacacacacacacacacacaccaacacacacacacacacacacacacacacaaacaaccacacacacacacacacacacacacacacacacacacacaaccacacacaaacacacacacacacacacccacacacacacacacacacacacacacacacacacacacacacaaagacacacacacacacacgacacacaactcacacacacacaactacaaaacaacacacacacacacttcanantcacacacacacacacacacacagacataaacacacacacacaccacacacataacaacacacacacacacacacaccacacactaacacacacacacacacactcacacacatacacacacactcacacaactactacacacacacacancacaca

SEQ ID NO: 30821 - DNA, 1362 bp, Oryza sativa
tcagccttctaatcctcgttgtgtagcaatctttcacatgcttgacacacatgaaggtatgatcagcatctaatttgttttatttttctgatttagtatcaccatccaatatgtgacttcaattcttggattttctattaatatttttttagagtaatcactttgacgattcatgaaattgtgaggcgcggttataatctagcacacaaatttgtaaaatatttatttttatatacaaactatatagtgcgtgtgaaccatagccaaaacaactcatggttacaagaaaatttgtgacgatatataacatatataacatattggacttttgatcgacatccccttttcaatgaaaccacaacatgtatgcaatgtttatctccagaacttcattccagctagtactgtttagttattgaataatgacaatgacatgacaatcagaagcatgaagatgatctcgtttttttcttgtaacggtatgggtgcaaactaattgtactattgaataaaggaatctgatcgaatttgccataacccaataattaatcaagtaggatgtcatgtgcactcatcaattgattggtacgtacatatgcattcaatattatacagaattttttccttcagtttctgtagattgctgaagctgtagcctttatctcacaagggaaggtggctcaacaggcacgcagggccatctgatcatggccgaaaatgattggtgttgctgatattgatgaatgtactttcgttcaaggtgagagaagaacgttggaagaatccagttaatggcgcaagtacatactagtagtagatttaattcaaactgctggtctagttaaatacgtactatattcatatttatttaggtgatattttatttaaacatataatagacgcaaatacaaaaacactcgtatacacttatatatttgtccttatgaacactcatgcacaccgtgcttctaactatgagtgtatatcataagaatgataaagttatcgtaggagcctcgttgttgacaagtacattgctaacaacttaaagaacaattaaccgtaaatacgaacaaccatatgtactaagtgtgatacttaaactcgatacacaggttcattataaaggaccttagcaggtaagctagactatttgctttttaaaggttaaatttgatgccaatgtgctttcaaggctgtgttcttttctcctgaagatgccccgtttgtttcttctgcaagggtaggataaaattttggattctcgtggcacgctttttaaactactaaacgatgtgttttgtgcgaaaactttctatatgaaagttgctctaaaatatcatattactccattttttaagt

SEQ ID NO: 30822 - DNA, 660 bp, Oryza sativa
aaattagtaataattaaaacccaatcaatcatacgttaataccacctcattttacgtaaaaaaacttaatcttcatcttctttatcaacaagagaaaagaacacattatccaatacagcaaagtatcagacgcaacacacatggcatgagtagagtaggtttgcaagtcaagatgtgctagacaattcagttgctgattcggtcttaaataacaatgaagatttggcggggaggaccaaccagattgaggttagatgtgtgtaagaaaacaatccatctaattctatcgactcgctgataagatatccaaacccagcatcgcaatccacatcatagcacccttccgtagaacacaagggaggttagtttaattgcggaaatatgcatatccattttccatctttgtactcctgcaggctctagtgcagtgcaccccaggcaagtgactttatacgccactgaaattgctaggtccaccactcatttatgttggaccaactcttctcgccctaatccatttctgaactaaattagccataatcaattactgaagtaatccactctcaattgaactgaaaactgagaagatacgtattggaaatggcaagcactctcaattgtttttgcactcttgtaaacaaatcgacaaaaacctgatat

SEQ ID NO: 30823 - DNA, 740 bp, Oryza sativa
actatagggcgaattcgagctcggtaccctataaaattatttattgaaaattggtatatgtatacttttatgaaagtatttttcaagacaaatctattcatataatttttacattttgggactcatcaacttaagagatattcataatttatattcataagatttgacttaaacattatcctaaacgacttcctttacgagtatagagggagtactagattaatttttatgggatagagggaatactagtagtactatattaaacacatagttgtactcccttcatcctattttaagtgcagccataattttccgtgctcaactttgatcgtccgtcttatttaaaaagttttttaaaaaatttaaaaacataagtcaaatataaagtaatattcatgttctatcatgtcataacaataaaaaatactaattataatttttaaaataaaacaaacgattaaaattagccacggaaactcatagttgctcgtaagtgagaccgagggagtttggttcactcccttactttaacaaactttgccacactttttaagacatatgtttggttcacttccaaacttggggcatggcacaattttttaatttaaagggccacgtgtcatacaaccacttttctagtcaaaccatgtctaaggtgtgttcattaatttataagccatatatatgggtatggtttggcaaaaagtgttggaattgtttgggaagggaccaacaaaccc

SEQ ID NO: 30824 - DNA, 541 bp, Oryza sativa
catggtttgagcacaagttgtcaccacttacgtttccttcaggaatcaggagtagttgcagcttttttttgctctcaaggtacgtacttacagcatcagtgtgtaataatcaagttttgtctggcgacctttcggtaaccatctagagccaagtcatgggaaactggagttgggactgattcaactgagcttcgtgtggttcagaggctggcacgttactggcacttcctagttgcaatcgaatcaaatatcgacactcgtcctatactcctagttgctgcaatcaatcagagcttgacactcgtcctagttgcgatcgaataaaaagcttcacagtggcaggaactccaatcgacacgatgggcactacaaactgagctggaaacttttcgtttcatctagagaagtagagagagccaccacttgttcagtcctcctgttgtgcgtgtgcctgccgagcgccatcaaactgcaaattgctagtagtagtgcggaaaggctgattcgcgatcgatcgacaggaccaactggttgcgatcag

SEQ ID NO: 30825 - DNA, 587 bp, Oryza sativa
ctacatcgttatttttcagagcaatcgcgcaaactggggtagttgtcccagtacacctgcgcactcacgcgctaactctgcctcagcattcagcagccataagcgacagcacttcgccctaattcccctgtagactacgaatcctctcggtacaaaaggactcaaggagacactcttctactccaagtaagccacacggtagaatctcccttcaaggaagacgacgactcccggagccaatcggacctacaggctacagttccctcagcacgatcaccgacgggaagccccccccccccaccccccccaacaatgcggatggaaccgaattcaaatgcaaaaatgcgcgaaaggagaggtgcggagagatgctaccgattccgagaccgaggtggatggtggcgaccagcagctgcccgcgccgatgctcgccttcggttccaacgagtcccccgccgcggacgccatcctccgacgatcgggcggccgccggttcaccgtgaggggcgtgaatgcatgatcggttgggccttggatcgccaggaggttggacttcacttccccaccgttgatgggctggttgggct

SEQ ID NO: 30826 - DNA, 643 bp, Oryza sativa
tggcttgtaattgtagtaaatgggtagccgaataggccctgtatagaatgatagaataatttttgggagtagattacatgcacgtgaaaatttattaaacttcagtataactatcgttttgttattatatatgggtttagtttaattttgatttaagtttgaatgcttttttcacgtaattttgtatatttatgaactgtaagtttatttcatgtttagggtataataatctactgctcaacattttatgaagaaaaaaaaaggttctcttttaaatgagtaagtaatggagtaacggaaaccattgaatcctcatctactccctccgtcccaaagaaaaacaaaccctagtttccatgcccaacatttgaccgtccgtcttatttgaaaaaattatgaaaaaaattaaaaaaacaagtcacgtataaaacattaatcatgttttatcatctaacaacaatgaaaatatgaattataaaaaaattttatattagacggacaatcaaagttggacacggaaaaccagggtttgccttttttttttgggacggagggagtagatgagaacttttaaaaatttcaagcaccttgaatctgatactcccataattctttatttgcgccgtgggccctctcatttatt

SEQ ID NO: 30827 - DNA, 725 bp, Oryza sativa
ataccgcagttacttaactttttaggagttggtacaatgcatcttaaaaggtgtcaaacagtaaagctttatatagctgtcccgctgacttttttatatagtcaaggtgctgtttggatttatcaagcaattgattggatacaatatcattgctttttgccacgtaagtgtgcatttttattgaccaatattatgactaggctgattatatattatggtcatttttcaggcggttggtaaatcctttatgagtttacttactcggatgttataccacatatgccatatatttccaggtgtggtgaaaccatgtgtcttttagggacttaagcacatctgttgaagcagtgtgcgcatggcgtatgcccaatactttggagatttctttattcacagcattcaagcttctttatagttgttttgctatgtgaactttcaaagatgttgtcaactttaggttgtacgcatcatattttacaaagcagttggtatatcactcggatcatgttatttggagggttcacaccgcatatgctatatattgatatcaagtcacttggttgattacgattatcaaaaccactcggttggttggattatttattccttgactatatgcttggtttgttcaattaaccacattgtcgggggctacacctattaggtgcatctagtcggtgcacctgactttattttccagccctccacagtcttcagatttggta

SEQ ID NO: 30828 - DNA, 740 bp, Oryza sativa
tgcagccccgttaatagaaaatggcctcttaaagaggagaagaaagataaacctgagacaactgaactgaaacggatggtagataggaaaaatatatggtagaaactagtgaaaccctaaaaactatcgttggattgagaattgataaatagatatttaagattcgtccacatttttcttaaacttaaacaaccattaatataaaacgatagagttcacgggaataaatctacattgccaaacagataaactgaaagcataaaaccatccgtttctaaagaatggggactgcactaaggccacaaacttcctaatgaaaccacacaacggagaaggtgcaaatcgacagggaggtgcggcaatgccgcgacgattgcgaccttgggcctcctttggcgtgcacaacgcttgacaaaccagcaatccccttcggttgcctccacgatgacggcacaaaatagaggtatgctactgagtcacaaattttggtgtaagcatccccatgctcagcaagagttgtccacggagttcgtcgttaaatctaaggagagtaagctcaacccgaacaacaaactctgcatggaacaagctgttaggaaacacatgggaagatggagcccaaatccaggttcccataaccactgaagaactcgaatggtggcaaacgaactgttgtcttcttggatcgacgtacgtggttggggaagcgtgtgaatcttgactaatggaaccttggcatt

SEQ ID NO: 30829 - DNA, 526 bp, Oryza sativa
atgtgccaggcactgtgctaaggctggaaatacatgagaacaagatatataagttatctccttatgtaaaacctacttgcatatatattagtgcatacattagaatgtgtattccacctttattcataccagaatcataccaggacacctagatagttcagtaatgctttggctggcaatcgtttggctgtcagtgaagaaacctgaaaaacattaacttaaacgttaaggatattatctcatttgcataagaaatttgaaagagagtcaaccagggctgatgctctgaatttatacttctatcgattactcaggatccttctggctttctattgtgccacttctaagcatggaaccattggttctaagcttgcaaaacagcttctccttcttaaggtatttctccaggttccagactggaaaagggggaaaagccaaaggaaaaaaaaaggcaggtgctccccgaatctgagctcataaaagagctttctccaaacttaagagttttctcaataacatccattta

SEQ ID NO: 30830 - DNA, 705 bp, Oryza sativa
ttgtagccaagattcatccacgttacaatgagtaaaaattttactacatttattacttatgagtaatggtgatgtgaacaaggagttaaatttttactcatggtgatgtggacgaatctcataggctcgtttttagatctaaccaatagtttttaagtttttgctgtataagtggtttgcagtatatattttcctaggtggatacttggtaatgcacacccgtgagttggctactttctcctctcctcaaacaggtcgtccgctgggtcaccaaccttcgctgccacatcgtctctcctcctcctcctctttgcctgcggcccccgcatccgctctctcccactgtaaacctctcccactgtaaacccccacccatttcctgccagtccccctctctctcctcttcgagagattaggttgttcgactgtgctgctgctcatgcagcaaaagggatcaagaacaggggcaggggtcatgtggtggaggtaatcaattaatcaattcaggtaatgcgggagatcatcatctatctggctaacctccgccgcgtgcatggccgaggcctacaagctgatactagttcttattgtggactagttttattgtgcatttaattggttaactacaacagtgtgccgattttttcgagaatttagagtatttactatcaaattcaggtgcctcagcttttttaccactcagtt

SEQ ID NO: 30831 - DNA, 730 bp, Oryza sativa
tcctgcgccccagtaaccattttagaaacaaactattgaaaataaggaaaccaaaagaagccttagcttttcgcaagtagttttgaacttagtatccttagggtcgtcctaaacgtcgggtttcgccctagggccaagcctgtgctctgataccatctcttgtcacgccccgaactataccgaccggaactagcccgcgacgctccaaattaacctgttagttgataccagtcccaagaaacagtgctggtatcacaggaagacagattatcacagcaacagaggtctctttattatagagtagaggtacagtcatgttgggctgcggacagatcccgagctcacaactgcattacaaaagggaagcggaagccaggacttggaccaaacaacacaggcgcgacttgggaactaggccgaaaccctaaaactcatcgtagccggcttgctcctggaagaactcctcatcagcaggatccacttcatcttcttcagcaactgggggggattatttatatagagcaagggtgagtacaggagtactcagcaagccatgggaaataagtgtttaatgcaggctacaaagaaagggctgctgtttttgcaattgattttatttgaactcttttctgaaaacaacttagtgagtgcttctcaaacgacacggatgagacagtgcgtctcgtccggtcggagtatgtgcaatgtatcagtctttagaattggccaa

SEQ ID NO: 30832 - DNA, 710 bp, Oryza sativa
cgttttcagggcacccccctatccccggcgctaatgctaatgactctgcccttccctcactcgtgccgtgtccgccacgggaggctgacgtgtggggccaacgagggggcggggtggtgggggccatgtaggcgtgactcaggcgggtaggttcgtgggtgcgccatgacgcggctggcccccaccccgggtgattagagcagctacaatagcagactatcagcgctataaacatattttaataagataaaagataagagagaaaagctgcgggctacagatttgtagccagctacagcatggactctaaaacgcaatatgtatatgatatgtgagaccatatattagggcacccgtaatggttatctataggctctctaaaagagatctatgtcagcatatttttctacttggaataaattaaataaagagagagagtaaagctatctactaacatggagatagtctgtagagaaaaacgaggcaatagaagagagagctatagatacccatgtagacatactattgaggtggtttactattaatctagtctattactgagatgtacatgttttatagagagcaacttactttaccattgcgggtgctcttaataatatagtaagcaaatattatatgaactggctattagattagttataagtgaattggaactaagtattgggctatgctattgatgaacgacttgc

SEQ ID NO: 30833 - DNA, 1081 bp, Oryza sativa
  unsure (1)..(1081): unsure at all n locations
aagaaggccacactaggaggctaggagaggcatcgccttaagtcggtggtgataatggacgatgacggaagatgacgatgtagtagtttggagcaaggcatacttgggctaggggagggtgggtaaggtggcactaggtgcccgggggatgtggcgcttgagttagcgatgatgatggactacaacaacggtggcgctgggacaaggcgagctagaggaagtgcgtgtgagtcacgtcttctcgcaaaggtgataaaggagagagaaagagaggatcagcatgggacccatgaatggccattgattatggctggcaattttgaacatcaaagggaggcatttggccaactggttggcaagtattttggaggttgattttttgatatttgctaaaatttagcttggagagccatctagtgagtctcttagtgttgctctaaggatttaatcaaggaacctacaataattctatagtgtaatgaaatctcaataccttgacgaataagatttacacacgttgggggtcttgtgctacacctaagataaaaacttgaatcaagtatttcccctccactagcatgatctctgctgagtggtttggatcttgacacttcactatataaagcatcgcttgtcgacccagactaaccataatactccctcttgccgcttcccccttcttccttcattgcctcccctatttcgtgcgatgccttcaaactccaccatatataccgacgagtcctatcggcttccttcgttactgccaatcctctctctagccctcatacttttcataggagactagcgacaataagattgttatgcccttgttacacatgtttaagtcgtttgtgctcgtcacctcaacctcccctgcctctagggggtggtggcgagggttgctagtgaagttgggcgtggtactatcatggaaaccaaatntttttccaactcgacgaaggtgagaaggggcacaaatcttcatgcacatggaaggtaactgttaatagcaagattttgttcttaaaaaactatatgtgtataggaaacgaaaacattagttgtgttagtgtcaagc

SEQ ID NO: 30834 - DNA, 655 bp, Oryza sativa
cctctcctaaagaggtgggcctggaaatgatacgtgtggtattgggcctgaagcccagaaaacacccaggaaggcccaaacaaaatcgctgaccaaacaccgatcactcaatctggaccgctcaaagacaatcgaacggcggcacaccgccaccgcggccgttccccgtgcctagcgccgtccaccggccgccggcgcgcagcagaacaccagccggcggtggcgacgacagccacggcggcggtgcgtggctggacgaggcgagcgtgccggcgccgccggccggcggcgagcctgggaaatcaaatgtcagctgccatgcgagtgtgactgacagtttctgttcgtgcaactgatggaattcagaggagagaagagacagcgttttttttatcttgatgacttttaaattctatgaagattccacgagaaccaaatgaaatgagaacaaatttagtaagtattggtggttcgttaggttggtgatagtatatgcagagtttcagcacaagacaagaatcaactgaacaggaacactataggaccattatattgatcataatgcagtgtttcctggacctagcaatcggcagggacaagttcttttgtttattaatttaaatatgttaggatgttggatataagcggttccatg

SEQ ID NO: 30835 - DNA, 1630 bp, Oryza sativa
caagttataaaataagtttagataaaggtagtagtattctttgtgcttctttcacatttatagtatagtggctaatcgaatattatatattttaaaacaaaaaaagtatacgggtttttttttcataaagaaatttttacataagatagctgttgtaccgataccaaagataggtaatctgcatgatatggaacgaaccgtatcctctgacattactcagtaatgtcacggtgtggcattacttcaatccacaccatccattctaaatcaacggccgtagattatttgacatgcaattaatcaaactaattagtaaattgtgcagctataattgtccctagatcagatattgcattttcaagaggcaaacatcgttgactggtggaagaatcggcacatgatgataattaggtttcacttagtacttgttagatgcagcgattagcacattatcctggaggaagtgaatcctgtgcatcaattttgtgctgccacatcctctgtcgtcggaacggggcaattcttaatctacaagccgatgggttaatgtttaatgaagatgaagagactgctttagtgttaaaaaaaaatccttcccacctattaagtacatacctacatagtacatactctgctagttagtttgattagttagatggagtaccaattaatctgtggccgttgatttagattggatggtgtggattgaagtaatgtcacgcggtgacattatacaatcagaggatacggttgggatatggaagggtttgtgttcggctgcaacacagctagcaagcacaataatttatgtctgtggcaacggatatactggctagttgtgttgtgtatactatatcaaacagtcgaatagaccctctaaaagaaaagagatgtagatatgtttatattttgatcttatcgatttatcattaccaattttttaagggcacaaaataaacaaaatccgaccattattttcgtgctaaaatatgatagttttggaagctttctttcttaaaagtatactaaaattttgtgaacttttaaaccaaacagagccccatactaccaaaattcgaaaaacttgaaattatgtcatcgtaaaaataggtttaacctaaatatcattatgtaaatgggctttactcttataccatttgcaaaaagagctgcacactagaaatgcccttggaccttcacttcttttctagttctggctgaacctcatcatccatgtcttctcctcggggggtgtaggctgttgtggccacctcatcccctcactgccatggttcctccttatgtcctccatgtgaagaccctcctctaccatgcttgttgtctggatccgtcctttagtccttgatgtttcactaccgtcctaggcactttctcgcactgccaccagctcaaggcccaatgctcaatcacaagtcccgccaacctcctttagcttccacgttgtcgtcctcatccagctctcgcgttgtgatctcttcaagcccatgcatcattgtcctcgtcaagctcctatgtagccacaacctcctcaagttcctggtctcacggaactccagtgttggctgtcctttctcatcatgctcatgtaccaactgtcctttgtggagct

SEQ ID NO: 30836 - DNA, 702 bp, Oryza sativa
cacgcagccttttgctgttgctttgctctctttccatgcagtaagtacattgatgagtgatgacctctttcttggtcctccctaaattgcactgtgacaaaggagtcctccaccaccatctcaccctggggattcagatttcaaaattcaaaaacagaagcaggagtatcaactggccacaagggacaaaagtcaaatcttaatcttagtgctttgacagctgatgatttgagagtcaatgaacaggaatttggaataaccaaagcaaaaaaatgaaacattgtccatgtgaaactgtggccgcaaagttttctataggtgcaggattaggtaaatggtgtttatatggggtattttcattggcaatattgtgccattatggtgtaattaaatttttccatagtagcctttcacacagttaagaaaggtttaatcttacgttttgacccgtctattaattattaattataaatatatataaaacatgtctattaggacatattttaaactttccgaccgttggacgttattttaaacttctcaaccgttagttataaatatatggtattatatcatggtactccctcaaatattaaaaacatgtcgtttttgacacattttgaactttcagactgttgtacacattttaaactcctcgaccgttagttataaatatccggcatgtatggagtaacagagtaa

SEQ ID NO: 30837 - DNA, 1389 bp, Oryza sativa
agctcgatgatggtggcgacggtagctcgatgatggcggcgatcaccacgcgccaccgagctcaccagatccagcatggggctcgccggatctggcctcgggaggtggcgacggcagtggctcgacgacggcaacgacaacgacagtgggacctccgtttacccacttccactacctcgttggatttggctaaagctcgataactgtggcgaggaagctcgacggtggcaacggttgaagatcaggaggggaccggctcattgggaccacctgacaatttctgacgaggttcgcgcatccaaatgaggcttcgcgttcttctttcaggcacgacccacgccaagctagctcagaatctccgagctggtgaggcgagtccaaacgccaagtcaccgcactgtgaatggccttactagcgccggtgttgctagcacactagtgccaattgcaatacaggggtgcgacgtacagggacaaaccacacaggacctgaaggaggaggaataaactaatttctgttagtagttttgtatgggatccacccttttgttctagggagttgattttacccaatctaatggaaagagaaccattttcacaccttaaattttgtttaggattcccataaacagatattgggggtaagatttagccattctcttaggctgcgttcgggaggaggggttagaaaccccttctccctggcacacaaaacaaagcacgcgttgttgcataattaattaaagtaccgtattagctatttttttaaaaaaagattaatttgatttttttaagcaactttcatatagaaacattttgtaaaaaaatacaccgtttagcagtttgaaaagcgtgcgcgcgaaaaacgagagagaggggttgggaacttggagataagaacacaaccttatagcaagtttaatagtatagccaactactaactccaattcatctatagccaatctaatagctcacttatacaatagttacatactacactattagagcacccgcaatggtaaagtaaggtgttatctataaaacatgtacacctcaacaatagactagattaatagtaaaccacttcaatggtatgtctacatgagtatctatagctctctaatccattgcctcgtttttctctatagactatctccatgttagtagatagctttgctctctctctgcatttaatctcttccaagtaggaaaatatgctgacatggatctcttgtagagagcttatagataaccattgtgggtgcccttaacacctggttacacctgtcatacacacagcgtcttggagtccgtgttacagctggctacaaatctgtagcccactactcttctctctccttatttatctccttaaaatatgtttataac

SEQ ID NO: 30838 - DNA, 631 bp, Oryza sativa
agaaactgtctacgtaacatagcacaagaaacagatataattgagtaatgctcctattaaatttaacgtctggaccatgtttttagaaagccattttgcacacttttattgatatgaaaacacagaacgttcagtaaaataaggggctcatcaatacaagaactcttcaaatcaaattagatgtatgtttagatagaacatgtgccaaaaaatttggcttcccggcgaagcgctcaacagagacttgcaaaatcacgtcaaaatattgcattcatataaatttgttgacgaaaagccgcattgtttccaccacttggaagtgtggctgcgttctttcaagggagagatagggaagattgtgactcgttttccacgcgcatgcttttcaaattactccctccgtcccagtatgtaacaagttttaagctcgtggacaagtattaaattttaaactggtaggcggcaaaagcacatacggcaatacaaactagtactctattcttttcttctctttcactgataactatgctgaggggtagaattggtagatttctggtaaaagttgtactaggttgtaacatttgggacaaattttgaatgccaaaacttgttacatattgggacggaggga

SEQ ID NO: 30839 - DNA, 701 bp, Oryza sativa
tgattcacatttggacggtgtttcctaaggctcatgattgacaccacaataataatggacaaaaactagaacatactagaataagttccaatgttcatcactaagacatatgtcaggcttggaggggttgttttatttttgcatcaccatatttctcaggaaaaaaagttcctatcaacaaattatggatgtacttctgcctgcaagtgacatgaagcataataactaaataatatttcacattatgtttcagactgccatttaattaaatcctaatggcaatttagtactatatttcccaacccatgtctgaacacatagcactcaattttcatacaaaattttgattattgaggcaactaaactaaacataaaaatttggatgcaaggcctaatgtcagtgcagtttaaaatgtgaagtaataatagaacgtttatggctttagttatgctccaagatgatacagaaaacttgataaagagttctttacaccctaaccaaaaagaattgttaagtgtgggcccaggtgtcctgtgtggaaggggtatgccagggataacaaactcatagtttaactcacaggaactcccacctacatagttgtcagttattgtgaattctgatactatctgggtatttaatccaatatgtgaccaattctactttgtgactcaaaaaaaaaaacactttggtgcaacat

SEQ ID NO: 30840 - DNA, 915 bp, Oryza sativa
atgaaacattcaaagcagccgcttctcctatcgcttgagcaagcaacacctcgtcttatccatccatcaataaaattagcatatgctaccacaaccaccaccagatgtactgagtggcatcacgatacttcatgtaatagccgggtttttccctatagtcttagtcatgctaatgacttggtcacactggctcgaagcggcgttgatcgagccatatggctagataagacctactgatatgttgaattttctcttttgctttgtatagcaatttatgaatggaatatttaatggccaatattaagtcatatgcatatgcatcattaagagttagactaaaccttgtgagagtgggttaagtcaaatgtggttcatgcatgccatgtgtttgtgcaaaaccacaccaaggtattgtatgattcctacccacgagtgggacttgtgatgaccgtaaagtgtttgtgcaaaaccacactcacaatcaaaacagaaggcatctctcaattagctgtcaatgtcactatcaggctgagacccctaaagagatgtcttgttcttcaaaagctaaagcaaattgtaaaatcaaatcagtaaacaaacattcagtgacacaaactcaaagcaaactcgcttgagtagagtgttgtaccatgtaccgcaggcacaggtgtcccagcactcagatagtgattttagtggagtatcacataagccaacatttatagtttttccatacttcgcggcatcagcgccggtagtatgaactttaagcaaatgcagtgtagtgtgctgatactgactttatcgtagcagactatgcagtgtccttttttttcaccagctgggtgcagtggcacgtagctgcccatcccatctatccatggtagactgtgcatcaacatgttacaatcagtc

SEQ ID NO: 30841 - DNA, 651 bp, Oryza sativa
aaaaattaaaatacaatgatctgatctctagatagcaattctcaaactagcttgaatgcttgatcatccataggggactcgatcatcatattgcatgttgcattatgatgttcaattctgttatctaggaagaatttgatctttgtgagagattcctgtagagacaaaatcatataggatcatgttttttactcataaattaggggaccgatacagtactacgaattctttggctgcatcagtgaagaactgaagaatcttccatgtaatgtaactcagagataaaaggtactatatgttgatttgctggagagctaattgatccattggattgtttcgtagccagtttcgtactagacctcacaaaacaccctaccatgttattagtcatattgatatttacaacctgcaagaattattgacggcatacgtcatttgtgcacatttgattgctatatatatccagttaattggttgctatccagtttgttaaaccaatccactaaaattcagttccatgtctacggaatttagttcttaaaaaaaaagaagtctatggaatttgcttgactagatcctacaagcacgaacccttgatgctgttcctcctgacagtaattcgttccagtgcctgagatgtcaggcgataat

SEQ ID NO: 30842 - DNA, 1379 bp, Oryza sativa
ccatcaaccattgtgtggggttcacatcatctgccattgaggctaacggcaaacattttgccgttgtattcatccgtgccacacattcttctatcaacagctgcatgaagtgatcccactattgtgattaattatgaactactaataagcagaattacttatttctcttttgaaaaaaaaatcagcaaatagaatacgcactcggcggcaaagcgtgcgagcaatcaagcatagaagcagagcagagcaaaatactgcagcaaagcaagcttctattatactgagagctatccaaatcctcgaacaatagtacatatcttataaaatactatttaagtattcatttgacaaaaatagcattgccgcactactactatgtccatacagagtattttttatccaaaaactagcagcgaaatgaagctactaacaaaatccttgagaatacaactcacaaccatttgaatcaccctacaaatgtatagactgatataagttaaaaaaatagaatttatcaaatcttaaaaaaacagtctactctacttttgttctcacacgctttgccgccaagtgcatattctgttttctgattttttttaaaaaagagaaattagtaattatgctgattagtaggccctaattaatcatggtgggatcactgcatacagccgttgatagaaggatgtgtggcacggataatgcaatggcaatgtttgccgtaagcctcaacagcagacgatgtgaaccccattgtgtggtgggagaagtgcttagggtcttttggctagctccacatggtggtgggttagccgaccaaagttcgaagcctcattcattctatttatttgatattagatcattctctaatattcacttttttttaaccatgtgtgtggtgggctggtgtcgttgctacgtaccttgaagatcacgagaccagagcctacatcagagattaattaggaggtggaaggggaagtgctgaaaagggtttccctcgcggctcattgcatcctgcgttatgtcggtgcgtgacggtagtatgcggtcgtgagaagagatcgtgagagctcatgctgataatagggtaactgataaattgggctattgaatgtgtcaactcataatatatagagtagatagtgtgattatgcatatattatttcataggatagtccgcatctattgaattttagggataccatattcgtattcatatcatattatttgaatccgtatccatattcgctaaaatttttataaacccatactataccgtcattttggacagactcaacgcagaactaacatacgatccgttattaccctaggaggagatgtgacgacgtgtgttctaagggcaaacgaatcctggccgt

SEQ ID NO: 30843 - DNA, 1010 bp, Oryza sativa
tcatcaatcctttctttttcttgatttgcaaaccctttgcaggcaattttaaacattacgaattctgagtgcataacaaaaataaaaactacattattccactgtatgtaaacaaattagtgaaatgaatgaaataacaggggcggatccaacttgggacatgggggttcagttgaaccccccaaacttttgggggaacaacaaacaaactcaaactgttacttgtattaaggttaaggctctggaattaaaagaagagcttcttccagatctacaagagaagctagggtttacgcaagcaaattccagacagaagcactcccggtgggagggagagattaatcatcagaaagaggatgtggatgctcaccaggatcccttgctcgccggatggagatcggcgcccctcccctcccctgttcagccgcgaagggcgcaagaagcggaggagacgacgagacgggagattttttttttctcttttacgcgaagggaagggggaagagatactcgagtactccacctttagctcagatttactatgttacccattatgtgtagcaggccaaatgggcggcccggcccatcacggcaaggggcccgctgatggcacggcaactgtaatgggccgtacggtgccagatcttgggcagaacggcccaaggaggtgttgggccgtgtcgggccggcacggctactgttgcatggaccggtggcccacccactagcacgataacgttattcgtgagaaactacagtcgcaagttttctatagtaggtaacacaattaggcaaaattgtgttttttttagatattggaatagaatccagcctttggtcaatgagctacaaccaattattacaccaattcatacaaataaaatcgcatggcaaaaaagttataaaaacacggtcctaaaaggtcaggaacacacaccaagtactaaaaaccaacgcaagaaaagatcacaaaattattgaattctatttgtgaatcttcatccaaagtt

SEQ ID NO: 30844 - DNA, 545 bp, Oryza sativa
aaagtattcaaggagtaagtaacatcatgatctatattgttttgatagtaaactgacctatccaatgctccatgaaagtagtaactacatctaaaactcagaaaatttgttgataatacagaatttgcatgcctataaacgatgagttttttttagcaagaggccaggcctcccatttccattagtagaaatggagatagacttacacagagttttttgactcattgactactacctggcaactacattcctccaaaagccaaccaagcagctggatcagatctggacatcaaataaatgacagcgagtatatatcaacaacaaagccgataacccctgccaagtaacaaggtcatggaataggcaaagaaaacatatcatgatcccaggaaatactggtcatggtataggcaaatataacatatcatgatcctaggagatactggtcatagtgtgcaggatctaacagttagaagagtcaaaaacagtatcaggtgtaccaaactatgccacatgctctttccggctttccaatttatgacgcc

SEQ ID NO: 30845 - DNA, 954 bp, Oryza sativa
aattttagggtgtgaataagtgttttcttggcaaatgccatttgcattcccattgccatggcaaatgcgctggcacaaagaggaaggaccttaatatttctcctcacgaaaaatccctgcaatttctcttttaattatgaggaaattgcaatttctgtcctcaagaaagcaacaaaaaaacttactatttggatggatggttggttatcctgaataataacttgatttgattgtagtgacacaaacagcatttgcaaggaaagttttattcagttggtattaaacaaactaaatattagctcatcagttgagtgttcagttatcacaagtaacttgacctggaaaatttgattcctggggctccctggttatctttttcaggaagccatttctgacctaattaatttgtgtgcaggaaacagagtagaagtacaccaccattgttgcttgtgtgctgcacacactcaagcatagcttgctgactagaactaaaaaatgcttaaaaaaataattttcgagctaagaattggtgtgttgattgaggtatatgcatcagttagctggtctcgttacctggctcataaacaggtgacagcaaatgagggctgtcatgtgacaagtggatacgaattttaaaattatttaggacaatagagaatggcctacgtttttgttttgttttctttcatttcttttcatggtagttatcagtattattagactaactcggcagtttgtcattcaaaatacaacaaacattggttttaaaaattttgagtcttgtgaattctgtataaaacattttattcgtgcttataaaattcataaaagaaattcttacatccccaaaagatcactctagacacgcatgcttcttctacttcttcttcttcttcttattgacgagtgtggaagttctcaccatttaccataatttgcgagaatcacttaaga

SEQ ID NO: 30846 - DNA, 1921 bp, Oryza sativa
gacggattaacttatttaggaccgacttaaaaaccaatatcgaaaaaataaatggcaacaaaaaagacatcaaagtcaactacaaaaaccaaaaattaggactcaaattttagctgtgggggataacctaaagaacaaacggtgcagttgaatatattggtcaagcgtaacaaagcccctaaaatgtcaatataaattactacggtaagaggtgaagttagcatagctatctggtgaggctcttgtggtggaacctatattcgcctaggtgcaaattttatatttgatacaaatgcttgtagttatggttaattttcagtggtaaacgtgtataaccgtcaacagcaagaggcatacgttgaattcatcaatctcaaaaatataccaaacttgctaccttgtggcgccgatgagttttagcgtcgggtaggcagcctcattgtcgcttgtagctgcagcctgtaacctttgaaacttgtaactctcttctcaaatcttaataaactttggctgtcattcgcaagcccgacaagaaaagacaaataactatatataatgtgtatatgtcgcctacattatatatattatgtttgaaaaacatatataaacaaatacgtgcgggtctctctctatatatatatatatagagctaagattacgtgattataagtgcttatataggtcatgatttctcaagccagccgccagctggcaagcgcaagtgcagttgcaagacatagatcccataagcgtgccggctgcaagacagaagtgcacttgcgctatcctttttttttttcctttttttttgctagcccggctctcccatccgagccctaactcacagaatctcacagtggaccgagacagggtccgatttattggacgtgtgggtcctcctccccgtggcgtaccacgggaccaggctgtggtttggctggggatggtttcggccggggcagtgtcgcggtcgcgttcgtacgacgcgtgggggaggcggccgtcgctctcgaatgctcgatgatcgggtatctattgctgcgctacaaatgctccacttatttagtgcggcgtacgattggatacgatgcgatacgagtaccgtttggcgtttgttgctcccggcgttttcttgttaaaaaagtaccgtctgtaagctccggccccctcgtattaaatatgttgggcgtaattttgtttcttgttttcaaataataaacttgacagtagttgttgatttaagtactatacgagcgggggtgtgacatgtaccatgatacgacaatgtatcggcatagcaatgatactgaggagatgatattctgcgctttgctagggatatatgttattttatttgtcccaaattctcaatatgctggtctttctaggattaatgagctacttctctcatgcaaaaaagccaacctagtattggtgtccagattcgttggattaggaaacatcctatccaatactagattggcttttttttgggacgaagtgagtaaattagttggaggtgaaaattactaaattgctccaagttattactcatactagttgcatgtgatcatttttgcatgtgatcatttcaactagggaattagcacaaatggcaccgtcaccacgcaagccacacaagaaatattttaagcataaaataaaatgtcaagcaatctgggacggagggagtaattgtgttgcagaaatgatcgctggatacgtttggattgaaatatcatgaaaataatgataatgatttagcatatgtatattgagttatagaattaagtaaatagtatatgtaactactataattgcatcttcagttttagatattaatctagcatgtttgtatattacactttaggagtactactaaaatactattcttgcatctcgtcgagctgttctctgacag

SEQ ID NO: 30847 - DNA, 775 bp, Oryza sativa
aggttgccccgttggtgccttttggctagccagcaaggctgggcagtggcgtggtgtcggtgtcggtggtggcgacgatggcgggaagagtcgagcgcattgtgctcttgcggtggctgggaagaagaaaagaaaagtcgaaggatattaaggtttaggggtttgcacgaatttcaaaacgatccaatggtccaaaatttacaagatgttataggatgtttttattaaatgtagagtagatagtctcaactattttggcacggaagtagtattgatttatggattggatggggagggtggccataccaatatcagaatgttgcgcttcttattatttcttctttcttttttttttactgtgtgcaacttttgtatgtcccgaaggtgaggtgtcggcattatattcacatctctttatatagtagtgcacatttatgcattacagatcgaatctatccatgggatgtaaaggttcaatcttatttccttttgaaaatgcatattggttttgactactctatatatactttatggattcatgaaaacatcaacaacactgagtgtaagcctagataagagctactccctcattttatatattataagtcatttttttatttgggagaattgcatattcgccactcctttcaccctctaactcgaaataaccattataaaatcatgaattgcaaatttgccacgaaaatagtgtgtgcagattctatatgccatcgtcgttccaatttgttcaagtaaaagggcaaaaataattcat

SEQ ID NO: 30848 - DNA, 1726 bp, Oryza sativa
attaacgttataatgcattttagttttaaggaatgtttaagataaatactttccaattttattatgatgtatggatcaagtagtatgatgcatgaacttcattggcggatctaggaggaaaaaaattaatgatggtttcgtggggttctcatagtggcggttctcgaatattttttttttttgaagaaacccatgcatgaagccaaaaatgtcaaatgtgagagaagtacgaaatggtcagtatctaacctgtggaaaatatggtcacattaccattagtttgagggcggacatacgttcagatgccatttgttgcccaaaagaatcatatctgtaaaaacaaaaatttgaacagatacattccgatttgcctatgaatgaataaaaacactaatggacatgagctaagggcgtttacagtgcattgagttggcattcggcctcagcgtttcccaataaatatttcgtgttacgttcgcttctgtcgcacctacttgaagtccccgtatttaactttgatcactcgttcttcagcctaatcctgggtaagtaacgtggggagagagagagcatcatcctgtggaagtcataaccccgcttcctccactcctcaaccgcatggggatcagatgtattatgaatggcataagaaaacttaatgtacttttatcattttccatactcctttcgaaagacttgtggcgatgatgccgccaacaccactgacgagtggggccatgagagcagtacaaatgtgagtcctcttgctttgtgtgttgcagtcattgctcttcctctccggaaagaggaaattgggtgcttctaatcgggttgcaaccctttaatgctatattgctttgcttctttctcacctctattcaagttaaaaaaccatgaaaatttaagtttcatttgtacatttaagttaattacactgcacaatttgttagtaatgagaatttcattgccacgtgaaaaagggtttatgtctcactttaagaactatactatgtcccttttctttttgtctttttaagataaagaatcccatttcaaccaaatagaagcaaccatttttttctcaacaaaaagactcgttttttttccttatatataaatcattgcaatacacgggtatttgaccagtaaaataaaatacaaggcaaagcaaggaactcatgcattccaccataaaatataccactttctccgtttcacaatgtaagccattctatcatttcccacatatatattgatgttaatgaatctacatagatatataatattaacgtgggaaatgctagaatgacttacattgtgaaacgtagggaacatctgaattggaaacatatggaaatgcaagcttgctaaaagaaatgacaaatttgttatatgtaaattagaacaatctgaaaattactgaaggtggcatccggtattcagatcacgcctcctttaccgaccaaccaaacaggcaccaagaacagggtgcactgaatgacggagtctgaaataattaagtagtgttctgcatttcttcctcgcatttcctgcactgcttacagcgcattcgccccccaaaatttacaacttctgttatacgatttaccgtgtaaaaacagcatcctgattcctagacaggtttgctgctgaacagttctagataggcactgagctgcgtggtagtaactgaagaaatgtacacaaaaatgtggtcagtccttga

SEQ ID NO: 30849 - DNA, 1168 bp, Oryza sativa
ctgatctagtagccatttgaatcatttcaacattcaccatttgcctcctttcccaccaaatataccgtattcccctatcgaaacaatttcagcaaatttcaaatcattgaggtgtggttacctcctctcatgattgtcttctagtaaaacgattgtcttctagtaaaacaaaacccgattgatcaatattggcaatattctcaattttgtttcaaattcacatatttatccacacttctatatagctctatcacattgaaaataatatgtttaatatcctcacatatacggtccaatcgtttggtttattcatcatcatgaaataaaccaaacaacatatttgcaaagaaaaaataatttgtaaattttatgatcgttaatagaatattataaaataagttagcgagaatgtgtattatgagagacggagtaacaaattaagttaatatgcaaggacgagccgggggagtatgtaatactagtattatcaccatcagtcatcaaccattcttactctttcgttagatatgataaggttggaaggttcattttgcctctaatatagtctgtattaatgaaactaatcactagattaagtctactaagtgattattagactaaacaacatcttctggtggcttggtgcttacgccacacggaagcttattagtagctactccctccgtcccaatatgtaacaagttttggcattcaaaatttgtcccaaatgttacaacctagtacaacttttaccagaaatctatcgattctacccctcagcatagttatcagtgaaaaagaagaaaagaatagagtactagtttgtattgccgtatgtgcttttgccgcctaccagtttaaaatttaatttgcgtgtgagtgggtttttactgtgtttaaccagctttctggcgccaatgtgtttgaaatgcacgtgtgagtttgatggcagcaaacagaccgccaccactgagttttagtacaggaataatcattgagggtagtatggtctttttgcaccttttcttaatacttgtgaacaagcttaaacccccgcctcgtttctggaagattctctcctcccccgctctctcagaaacaactcaaatcacgattcgctcctgcaacgctgcacgcgcgcggcacgaggagtaggatgccggcggcg

SEQ ID NO: 30850 - DNA, 1558 bp, Oryza sativa
tgtgtgtttcttttgggacgcaaagctctcgctcgcggggagcttactgtgtaagcaacatgccgcgttgattgcgccttcttttcccttgggaaaaagaggccgaatcgtcgtcttctttcgcttgctttttggcaaggatgctggattgctggccacctcacttcgaaataataaaaacaaagtaggagtagtaaggtagacggtaaaaaaaaaaaaagaaaagaaacttcgacgcacatctggccatgtgaaacaaagaagaaataaaagcaaaaaattccgttgccgggactcgaacccgggtctctcgggtgagagccgagtatcctaaccagctagactacaacggatgctggtatctattcctgcattatacaaattaaccatggcctgatctgatccaaaccataaacacgggtcgggccgtacatccagctgatgcattatgggctgcacgcacactcgtcacagtaggaaaaggttaaattgaggtccctcatcttgtcatcttgtcggtgagtttcaaaatcgtctctcaactataataccatatataacttatccctaatctttcaaggtatcagcgtcgtgttacgacccgacgcgccgaacacctgcaggatggacaccccgtcgtgcccgatggcacgtacccgtatgcctcgaattgccacaccccagaagtgtacgtcttctgctcgaaacaacaaataaaatataataatcacaaaattttcaagaaatcaaagacgatgaaattcacagcatggaatttagcccccattgttcctcgaaaaaaaaatagcccccattcgttttaaactgtggaggacggatggtagattattctggttttgttacaattatttaagggcacaaatgagtgaattaacattgaacatataaagtattccaagaaatctgtatatatagttttttctttagaaaaaaaatgccctacccaccgaataaggtgctgtcaaatttagaaatggctccaaaactaatctttaaccataaatctctcacatatataaaataaatttctcatatattataatgtttataagaaaaatcgtaatcataggaaattaaattaaaatgtcaacccaataatattaattgcatcaaataaaatttaatttataataaaataattattggccaaatgtttaaagcgttgaatattaaaatgcgcgcgccttgttcagtggaacgaatggaagcgcggaggaacgaaacggtctccatggcgcagttgtcggaagagttccatgcctagctggctgctagtcaatcggtgaaggggaaggctagggacacgttatatatgatactagctgaaaccccgcacattgctgcgaaaatttagtatgataacaataaaaaaataatgtgtaagatagctagataatatcagattaagtaaatcaatatggtttatgataatttaaatttaaatagtatgtagaatggtgattcaaacgtaaaaagtaaggtggtatgactttatagaagaagaaaagtagggagatagtttgtaccgtagattatt

SEQ ID NO: 30851 - DNA, 1428 bp, Oryza sativa
catcatcttttttcccccaaaaccttgataaaacctggagcggcctccaatccttcacaaaccaaacaaattgaagcattggagcccgatccggattggaggtggccgcggccatgttacggaccaccggagcggctgccggaatggcggattaccagtggccggccggtgtcggtgaagcggcggcggccggtgcatgattgcacatgcacgcacgcacacaccgatctggcaacgaacaagctaagcactcgccgagtcgccggcacgagcggatgggagtaatgcgataccacatcaccatttactcctattgccctattggcatcacatccataggttcaggcccctttgattcaaaagaaattcatatgaggctgtgtttagatccaaagtttggatccaaactttagtccttttccatcacatcaatctgtcatacacaacttttcagtcacatcatctccaatttcaaccaaaatccaaactttacgctgaactaaacacagcctgaatttcagagaattttattcctataggattttttcctatatagccctttgaatcaaaggaatggatcctatggaatcctatgaaattcctatggattgtcttttcctatgcaagttttgcaggaaatttaacatgaggtagaacctcatggaaagaatactttgagtctttatctctccttaaattcctgtgtttttcctgcggcccaatcaaacaatcattcatatgtttttcctgtgttttgatttcctctgttttacacttgcattcctgtcagaatcctatgtttttcctatttctccgttttttcattcctgtaattcaatggggcccttatccttttctatttgcttcggttgcacattttttttaattacacattaaagcgcacacatactcattcttatgaacatgcgtacataaaaccctatcgtgtctgatcacaattttgagttttccattgcgaattgtatgagttcccttcgtagtttaaaatcggtgtgtaaatgactaaatgcacaccaaatccagtcgacacacccaaaacttggcaatatgaaaatcaccgaaattacaaaaaaaaaaggtgaattccgaagcaaagagtggccagtgtgaaactaactcagcgaacactctcctcacagctataaattctatgcttcacttgtctcgcttttgctccacttacaccaacagagatttgcgagtagattttgcatggcccatgccacgctcggctcgcctgagccggcggcaaagcctcggctccggtgcgccgacggccgccaccgccgccgccttatcgtcgtcctgtgcatcgtcggcgtggcgctcgccgtcggcgtcgccgtggcggtggcgatcgccgtcttggggaggtcgaggatgacgtcgtcgtccggcggtggccgg

SEQ ID NO: 30852 - DNA, 649 bp, Oryza sativa
tccgaccgagtcgtgcaaccaatcactgaacttgttgactatcatgtgggtccagacaaacaacatatatatgcttatacatacactagtcggatggatgggtcagacgtatagaccgagtcatgcaaccaatcactgaacttgtttactatcatgtgggcctagacaaatagcatatatatttatacatatgacagtcccatcgatagagtatacatataagcatatatgctatttgtctaggcccacatgatagtaaacaggttcagtgattggttgcatgactcggtagaacacaaatcatggctcggtcgtatatcaagataccagcagaaatactatagtactactccttccctagcctctactagtcctctgaatcctgcattgctgctgccatagtgtcaatcctctgataattctgaagggagttgtcaattctgggctcgtgccgctctcatgatctcatccgatccggtcgtatacccaccccccatctgctggcttttggtggtcgccactcagaacatgacacgcagtagtacaaacgctgaagctctggcacgagaaggaaaatacggggtggattggctgtgttcgacggccattctttcccacccacatctctcgtttttttccctaaacgata

SEQ ID NO: 30853 - DNA, 738 bp, Oryza sativa
aaacatgatgctactgggagatgatgtaaaggaaaatttgacatttccgtgcggtattccaaagttgtggttggtctggaaggcattataaaactgtagctatctgccagagctcgttctgacataaacagtataatcatagcaagtactgcgtcagtcccaaaatatagcaagtgtgtccagatgcatagctaaaacttgctatattttgggacggagggagtagcaaaggagtgcaccgtgtttattttctcttggtacaatattgttgagagaaaaattccatatgcctcctctgtcctttcccttgtagcatgcccaaaagttcccgttttctgggtataatatgttcaaaattccatttctgacgttttgagaatattctatattttttcagattttaaaaacgtttttcaatttccttaacgttagaagtagtgaccaataatatttaatcaacactctaaaatattctgtttaaattcaaggtattgtttggaaaatttatttttctccatttttttagttaaattcgtatctttaactattaaaaacagatgggattttttggatttttgggcatacgtgggatctgagatattctctgtgaaacataagatagtgttcttttgatgggtcgggtgtgttgtgacaactggccacccttttggtgtgtatccaaacaaatggtcaatagcaacactgtcttgtagccaattttgacatcaaatgattagt

SEQ ID NO: 30854 - DNA, 735 bp, Oryza sativa
tataataatccaatacgagattattaaaattcgtaataaaaaagtaaaaagattagaaattagaaaaaaaataaaataaaagacgagttcaagtaggaatacaatttaaaattaactgaaattcggaattaaatataagcaatattgaaataagagtacatataaaaacctaatagtagactaattaaaatttggaataaaaaattaacaaaaatctgaaattagaaaaattaaaaagagagttcaagtaggaatacaattttgaaacaaatgaaattaaaaataaaaaagaaaaatattaaaagaaaacaatacgatattagttaaaatttgaaacaaaaaataaaataaattctaaaattagaaaaagaaaaataagatttcaactaggaatacaatttctgaataactaaaattggtgataaaaaataaagactattgaaataaaagaccatctaaaacacataagaagattaattaagtaacatatctataaaggagtagagtggtagtggttgatgggacatctaagaactattaataaaacaccaaatagaatcctaatgacgattaagaggaagaacatggtaaaggtggttggcgggacttctagaaagtaaaaaaaaacccaatgataatcataattgatttttaaaatcttagtggcaataaaaatgagaggcagcgggcgggccgtacatgaatacaatggcagagccgccgatgattagtgag

SEQ ID NO: 30855 - DNA, 641 bp, Oryza sativa
tccatttctcacagtaatgaggatgtagaactattatggttttatggctgactatataggctcgttttgcaaacaatgatagggaaatgatatcccacccatcaaaatgtaaaattgcatcctagccatccattctctccacctcatttcagacaatggtgtttgcctaatgccctttcacccatttcactattccaatcctgcctctcataacccatgtgctaaacaggccctataagtttacccaatgaaagaagagagaagacagggtaatacttaaagagactccatctgaaacttgtgtgcattgttccaggctctctttttttgttgtgtccaaagtttcaaatttggaaattcctctacatatattcctgttttcctggtccttgtcatacaacctagacagtaaacatattatgtgattgtcatatgccaatattagcaacatcttgtgtcgggtggtaaaacctcttttgcaggtgaaattttggtaactaacaacaggagaatgatatgcatttgtatcagtgcacaggaggattaccagcaaaaagaagagatatgaaggatttaacttaatcctattattgcaccttgcaatctgggaacactctgggatttggtcaaaagttagaaca

SEQ ID NO: 30856 - DNA, 907 bp, Oryza sativa
cttttttgtgctgggaggaaaagtttctaacaccctggttttaacgcagccttaactctcgagcgaaagcttatgaaaaattaaattttagagacgatcgccttaagttgtatcagtctctgaaaaatggtgtcactcatatgtatattttcttcataacgttctatatgtactattaaaattgtaaagctcaacaagatatgtacgacactcatttaaaatcgtttacatatccgaaaatcaaacaagtaaagtgatctcgtaatattgtagttccaccaggtgtatcaaatacactactactaatactttttgtcgtacacatatctagctgacacaaaatttaatagttatttaatcaaaatgggcaatgatcgcttctgttacgtacacagtatgcaaatatgatccaataattctgtgttctctatctcctgctgtgcaatagtgataaaagatttagtttagagattgagccaatgtcaaagataacatggtctttgcaggagcgtgactacaaggttacaccggtagtcaaacgaacgagctagtgtgatgggatcttaagaaaaagtacacaacgaggggtatcgatttcctgtgaaattaattgtggaggtcctttgcaatactggttttatctgaagagtaagggcctgtttactttgatgtcaaaaaaaaccttaccaaatttccaaaattttggcatagttgccaaaattttggtaagttgccaaatttttttgcaggatttcttatatagttaccaaaattaggcagcaaactaaatgcagccatttttttggcaactttactaaaatttggtaatgttgaaaatggcatcaaagtgaacaagcctttaatgccattttcaaccttaccaaattttggtaaagttgccaaaaaa

SEQ ID NO: 30857 - DNA, 651 bp, Oryza sativa
aagaaagggattgcaattcacatagctgaggaattgtgctgcaaccaggactgtgaaacaataacagatatcgaaccaaacacttccatattctattcggtcaatctttctataagagaattgaaggaggtttgtaggggaataatttcacacctttaatccctcccttctcaggattaaatgggcaatttcaaaattcccaacaattttgcaatgcgtagtttggattactaacacccttcaatccctcccttctcaggattaaatggacaatttcaaaattcccaacaattttgcaatgcgtactttggattactagcacccttcaatccctcccttctcaggattaaatggacaatttcaaaattcccaacagttttacaatacgtagtttggattactaacactgggcatacgaataaacggtcaccaaggttagatcttttggagttaacacccggttcttttttaccagtcggctctctcaagtgagagatctgtatgtcatgacggccaattagacaaaagcggttgcatctcggttgtgcctgtccatgaagcattgcacaatcagaaccttgtgacaacaacaatctgataacttccataataacatgataccgtgtcctgtctgatgttctgcagtagttg

SEQ ID NO: 30858 - DNA, 626 bp, Oryza sativa
atcctccgttaactgctcgctgaattggatagcacactacggcgactgccacacagggtctctctctctctccagtctccagctcgggcgccggtggtgtcgttgccgccgcccgtgtagatgacggacgggacgaagatgacgccgctgcggagggcggcgacggcggtgctggtggtggtcctcgccgtcgtcgtggcggcggcggcggcggcgaagccgaggaggatactggtggacacggacatggacaccgacgacctcttcgcgctgctctacctcctcaagcagaaccgctccgagttcgagctcaaggttagtgtggtgatgctgcagccacgtacgtctcagcacgtagcgtgtatagcttcttaatttctcttgcatgcatggttgatgacttgattggtggtagtagtagtagtaatggttttgcttaccttcttgcatttctctgcaagtccgcattcctgcctaactataggagttatccggtcattggtgggggatccaaattaatataatttattccccccaaaagggcccaaaaaaagggaaaaaaatatggagatatacgttggttaggcattgcctttgatcgttccttgcagtgacaactaatatat

SEQ ID NO: 30859 - DNA, 1505 bp, Oryza sativa
tctataagcctgattaaacctatagaattttaactaagaaaagaatcaaacgacttgcaatatggaacggagagagtattatttttgctaggcgtgatgatataacccatatttgcacgtagactaagtatagcctctggccgacatgagaaagtgatgcactacatgttgtcacgagaatccttctacggaacgcatatcaaaagagtatgtaaaattcgtctcccaaacgggtcctggcgcaggtacgacgagcacctaagctctggcctaacaaaaattcgcgatcgatgacgctagcatcccaatgggattcttgcttaattgctctcagcactcattgatcaacaaaagatccccttttttttaataacacatccaatcaatccttacaaacgatagaccacccataagagaacaatttacaaatttaccgcactaggaaattctaaacttgataccgtctgtctcatcattattattcttttcgattatatactcacgtatacaaaccacgaacccacgagaccatctttcttacacatactcttttaatagatgataccatttacttttatacacatatttaatcattgttttattttaaaaaatatgtaaatatataaaatataaattatacttaaagtattttttatgtaataaaataacacataacaaaataaataatgattacacaaaatttttgataagtcatacggtcaaacttatatgtaaaaaatcaattgtatcatctaatattgaaaaacggaagtgatatagaagtagtaaatatgatacggaggccaagagtagatccatactcaatcatgtcacccagttaaaatgatcagtctgcatctacatgcatagatctctagccagatgcttttacaccactaacaatttaattaaactgttagcgtagaaccatagaccccagatggaatcaagatttttccatttccgacaccaatggcgattgccatttaggctttgttccgaccaattgcggcagttggagattccgcggtcactccctcgcactccaaagtggcctctaaagtggattacatgtctaattctattgagagtgtcactaaccaaattgatggttgtctttagtggtaatctagtccaaaccggccggcccccacgcgttaacggcaggtatgaaaacgggctcgatcgatttgacaccttagtgcgtagatgcatgcatccgagacccacacaaaattgatataaaccctaacttgctaattacttgaaggctaaaggaaactcttgctaattttatcaaactgaacatttttcctatattttattcattaagaaacaacttactgatcgaacaacaatatgcatgacagcatgatgtttttctcctcctcaaaagttgattttttttcttttgttactggcatgttacaatctggaattaattgtacttgatcatagcattgcgagtagcactttttttcctggtccatttataggtggcactg

SEQ ID NO: 30860 - DNA, 645 bp, Oryza sativa
ttttagggacgacgtgtggcatacaaatccaatcgtcgaggtagaaataaaaccgagaatgttcgaatcgacgcacgataaataaatacgtcgattgattgtaaatattcgagggaattatcgagttcgaaacgacaaagtggttttaaaataaccgtaggataacaatttgagagagcgatattattgcggtgagggcttcaggtctgtgattaatttcgcactgaagcgcttaatcaataaacggagacgatgaggaaaggaaaggatgtcacacaggggacaaccttttagggaaaagaatttaataaagatcttttggcacaatacctaaacacacacacaaatcacaaatcttattatacaaactgggctaggcctttccgggagaaaaaccagactttatctgagaatgccatttcttttaaaatagccttgttgggattcatttggcaaatagaattcttataaataatttactagtagatattatttgcaagttatttttcaaagtacttaaccctttacagtgattcttagaaaataatcaaaacaatatttcttttgtaaaatagtatttatttttatgaactatcccataggggtatccatccaaaatagtaacagataactttatatacagag

SEQ ID NO: 30861 - DNA, 513 bp, Oryza sativa
tacgatgctgtttcttgaagaaagatgctcaatattcctacctttcctagctttgccatatcactgcacattaaattccatcatatgtcatttgtacttctacgtactaaaatattgtacctataattctctctacatgaaatgcttacttctaagcaactgcgaaagaacatttgtttactgtattaccgttttccgataatggaaaacagcattgtttttctatatcctagaaaactcagtttagaaaaattatctaaattgcttgatattttcttcaacaattttattacctacagtcatgtatagatttgtataattgctccattatctaagaaaagatatatcgaattatagaacgcatggtagctgtatataaataaataaataaataaataaataaataaataaatatatatatatatatatatatatatatatatatatatatatatatatatatatatatatatatatatatctcagctcgtttttttaattagatacaaaaat

SEQ ID NO: 30862 - DNA, 719 bp, Oryza sativa
atgaaaaccttagaaaattgcatttacgatattgcgaaagatctatcgtgtgattttttacctccaaaattatctctcttttttttacccaactgatgtgtagggtattctttggtctctaaaccatagatgtgtaaactcaccgatgtgtagggtactctttggtctctaaaccatagatgtgtaaacttgaggtgtataaactttagatgcataaatttactaaaataagaaagtaatgcagtgccaaaaaagaaaaccaggtggagggatgggggggggggcgggctacccgatcgctatgggcgagcgagggcgatccctcgctcagtagcatttccggtgtacccagatttgtgctaggtgggaaaaacaaaaaatcatgtcacgccaagattcatgctaagcggagaaaacaaaatcatgttgtagcccggggatcctcaagtcacgcacaaacacctctcactgagttacgggcgtacgtgaggtactaagaattaagctagttacattatacatttatatgtgatttcagtgaaaaaatatatcgactagtacatagatactccgttacacttactccgtaggttcaagtgaaactacttatgaaaaaaaaaagatgatcttggttatagaaccaaataagagatacggagtatataacacttgctcaagtacctaggtaacttggtactcatatcatagggctgcaggaa

SEQ ID NO: 30863 - DNA, 534 bp, Oryza sativa
ttcctgcagcccacaataatgacagtcatacaataattataagatatctttattcatacaaaaatcataaaatattacaccaaataattcttaaaaactatttgtaaagttttaaactaattttaatgtgttttacttcttttaattttcattttagtttgttttctattatttaagattaactttcactagagttttccttctcaactattttataaaaccttgtttagcaaatgaactaaatttctatatattctttcttccccacacacattttctctctcatcaacttacaactaaattttggagacaaaaaaagtgtgcaaaacataggtgcaaatgtagtatgacaaaaaaaacattggaggatgaagttgcaaaccttttaggcacctccgatttgtatgtaatcaccaaaataaattcaatagaaattttggcatgacctcccctcttttttgaagaaattttgaagcttgctcgggcagctggaggaggaagaagacatatatataggggtgggactttagtccc

SEQ ID NO: 30864 - DNA, 567 bp, Oryza sativa
cttcgctgcttatcaggtattcaggtcaccttaattgtatttgcaataataatgtagtatcaactgttcgctgcctctagcagcaataatataggtgtaaactgtttctttcccatggttaattttaattttgctgcatatgatccagcaattatctcgtgatttattgcattcaacaatgtggttaataagctacgacaggtagaggcaaccaaagataatttatgagtaaacttttgtattagtattattacagtttaaaagtaaggctggaaaatagatcacgatgaaaaaccataaaatcaactctgaaattcaaattttagttgtaggctgtagatgataagtcaacaagcagacgatgaaatgcatgaactttagctacttcagtgcatgtcttgacttcactgattatatcaatcgaaaaaaaaaagacttaactgattatattgagtaatagtgccgactctacgtttctatatcttcaggtcatacattccgggattccaatcacgatgattcctcttgatgcgaccaacacaatttcggtcaccgaggaattcgttt

SEQ ID NO: 30865 - DNA, 656 bp, Oryza sativa
tcctgcagcccttttatggctaggttcgtccttagttataaaatattatgattttactatgtttttcatagattttataatagtaactaattataaaaccaatatttttagaggacttttacggtacattctactgcaagtatatattttggtatttgttaaaaatctggaaagacttgtttagtaatttgaaattgagactcgagatttattttattaggagtaattgtccatggatcttagtcatctgttcgcgctagcgttttttgtgatgccacttcctcttactattcatttgctgcttgctgcctgtcggctgccctttccttgctgctgccctgcctcctcctactgcctgctgccgccgcccggatgccatgcaccattgttgccgcctgtagtagctgcgcccgggtgccggaagccacgacccttgactgctccgcatcaccttgccgccgcgcgcctcgggacgagcccccagcggcccggcgcccttctgtgtcttcgactatccaccccctcccgcgcaaccgagccgtcgatggtggagttggagaattttgggcagacctagagttttgggtaaggaatgttagaagtcacaagaggaggaaaggaggacggtaactcgattcaatttccgttagcggcgg

SEQ ID NO: 30866 - DNA, 599 bp, Oryza sativa
ttggatccaaaatgtacatcccagatctccttgttacatttatgaaatgacccccgcaccagcctatgtacattttgcacatacaccatcttgtttttttcccaaccccacattggtacagctccttttgaatcatcagatccaatcgggagagggggaggggagagaggctaatcgatggagacaccggccaaccagtcgcgggattgagtgaggaggcgtggcggaggaggaggcagcgacgacggcgacgacaacaaatcgtttgctccgctagccagatggatattgtctgcaccagcgatcccgcggtgagcttctctaaaggcctccaaatccctttcctcgtcgatgccgaatgctgagcagcgatcatgagatgagtttctttcttctgtttgcggggttggggagtcgtttggagcgatttgttgcagaggctgctgttgtgctcttcgacggcaggaggaatgcacagattgctgctgcggcccttgctcttaattattaattatattcctatagaatgtcaggatgtaggatgtaattaataatcctccaagctgtgttcccttgctcttaattattcattatactag

SEQ ID NO: 30867 - DNA, 706 bp, Oryza sativa
ttcctgcagcccggttaatattgcgcaataaatgatttaaggtttttcttttatagtaataaacacagtgaatcttctaaaaatcataactaattcatccgagctccgtttaatcccattcaagtctcagtaaatcaagaaaaatgtgtagaatccattaaaaatggtgttgttccctgtttcagtagtcttatagcctgtttgcaatgtttgctttgtatgtcgctagattccgtttcctctgacgctccggtgtacttcgagatagtcgccgaggtccctccagcagcagagcaaggcaagtcatgcttgtcacttgatcatattgatccaatattgcaaatgccctaatgttttctttcaaataccgcatttgttttgcaatattactatgggatggttacctattgttacagccatactattttgataccatgctcctttgttagcttgggtcataacatgattagagttaggactagggtttgcttagccatgcttagttcaactagcacacaatggggagatctcatttaaaacctagattatagggttatatgataatgttggattagtaccaccgctctggtgttggttaattaaaatgaatcacatggtgggctgtgggtgcatggttttgctggtcgcacccatggcagttaaggaccggttcgcgggatgccctggaagaatttatcgtacttac

SEQ ID NO: 30868 - DNA, 726 bp, Oryza sativa
  unsure (1)..(726): unsure at all n locations
tattttttanatttattaatctggtgtttttgttctagatgtcttttttaatatttcttatttttattcctaattttagttattctaaattgtatttctatttgaactcttatttttaattttctagtttttgtaacttatttatttttatttgtaaattttaattaatctcttattctatatggaatgttattttagtattgctttttttattttgaatttctgttacttttgaattgcaatcctacttgtactcttatttttctaatgttgatttttaatgaagtgttttttcaatattctttattttttatttcgaatttattttatttataaattgtatttttatttgaactcttttttttatcagactaatatgaaaatttctagtttcacaacgaacgtgatgtcttcttttaaggctattgtaataatataatagatgttgaacaatattagagtaatttctatgctacttaatgaggattaaaagcagtattggtcataaaaactaacaaacatatttatataagagaacaaactaaacaaccggaacaacatttgtaattagataggaaagaaagatagagagattgacctgcttattttgtgcatgtcatctctgttgtagccaaaccacatcacataggcatcatgtggtaagtgtgcaacgaatcagtttattcacgggattattaaaacagattatttgctgggctgcaggaa

SEQ ID NO: 30869 - DNA, 1074 bp, Oryza sativa
gcaactgccatcgccaaacctctcctgctgtcggggcacgccgctggccagcgctgacgctcctctgcgcgccactggtcgcgtccactctgcccttgccctcccgccgtcgctgtcggacatcgcctgcccaccgttgtcgctaaaatgtgggatagagggagaagcgattagagatagaagtgaaggaggggatagagaggagagatatgagagctgacatttaggcctgagggcatttttgatatttcacatgatttatctctcctcttcaaccagaaattattactttaatacgtgcggtgtccaccagcaaatatcaaatttttaggagtattttttccccaaaagtcacttcgtgcgtatcctagagctaaaaccgttaagtcacgatgtcctgtagtaaaatttctctattctaaaaatgtttataatgtaagacggagaaagtagcaaagatgtttaggtgtgtttgatttgggtacacactgggagtgggagtccgggagtctggacccgtgagcccctcaaaccaaacgcctccaaaatatctgtttcatcccaattggcattttctcccacaaatcaaacacagggagtttcaatttacatcaggaccatgagcgtgcacgaaaccagtggaatttgcatgcatgtgactgtcgctgaatacatcgcactccagtacagctggtaggcacgtatattacgcatgttccttcacgtacgtagaatgcccacgtttctgtacatccagctgaagtacgattatctggcaagttatcccaaatctctcggcgcgtttaattaacgtgctcggcgatcttaccctgagatttttctcttgtcaacgttgcgatagatgccctgtttattaatttcctttcggagcaacattggatatgttgcgtacgggcatgatccctttggacacaagctgaacaatcgaaagcaggcccgcaaggacagagcaagtggcagtgcatgtgcgtagttaagagtggtcaataagatcagaagaggttggcaactaggcgtgtcaacttgcttaacaggagaaggggggtccactat

SEQ ID NO: 30870 - DNA, 711 bp, Oryza sativa
  unsure (1)..(711): unsure at all n locations
tgcagcccaatagtattacctgtttgagagtcatcatgtccagttaagcatgacaactgtggtacacgatagagggggggaaatgatcactagtgttatcaccggtcacttgatgcaccggtgaaaaagtattgtactactctatcaatgatcatgatgaatagtcggtagtctcaaaactactactccagtatgtatttaccggtgtctcaacgagattttgatgggtttcctgtctgcacggggcacagtgctggaacccaataccaacgttcttttcctgattcgcaacaaccacaataaaaccacgcattttacatgtcaattatgccaacaggctgcctactggatggccataatacacgccacttgtgnggcnccgctaatccttatctcacatcgatctctaccatctactactaactatctattgtgaagtctactaatcttattatcatatcgactgaagagtgccaaggaacaaaaacactgacaatattaagcatcggacaaaccggtgggatcggtaggtacaatatttttccgtttaatcgtgacacatgtccttgatcttggtatggctattaactaaacactgctagctaacatgtatacatatcatcgtctaaagaacttcacacatacacggatcgatagacgttatcgtccacgaacataagtaaggtggagcattactagcctgcaatggct

SEQ ID NO: 30871 - DNA, 520 bp, Oryza sativa
acgttttttaataagttggggtcggccgtccccacagatatggcataaatcctcctctgccacaggtgccacatagttaactcggcatatgggcatatgatcccatcgttcacttttcagtcatacaatggtctgtgtgattgatgcctattacgctggtgcatgtagttgaaatggatggtgtacgcgtatgtgattagagtttaattgattggtattttgtcatattgatttatttgattgtttttaggtaggttagatatagataggctcatgagtgttaaattggaatttgagttaagatctgtaagtgttaaatatatgattccccagattaaattaatagtagaagttttatatgcacgtcggataacgttgcactagtgagcacatcctgcgatccgcataggttgcgactagattcgatcaacagcttcgcctttccggccggacatcctcatcagcgcgcggtcgtacgtgtccgtaggcgctccgggctctgtcagctctgctcccctcc

SEQ ID NO: 30872 - DNA, 721 bp, Oryza sativa
cccagaatttcagttaaaaagatgtaataattttcctcaattaatgaaacatatgaaacattttcgttggaacagttttcatcgtggtgtgcaatatgtgaaacattctgtgataatatagtgcaacaccgtccagtatttgcaaaaatataggatgttcaacaacactttcctattttatactctaacatgatacgttgtatttctggaatagtgatggtacgttaagcaaacataaacggtgtggatttacatttttaaagatttttatgcaccaagatatcacatgacaaaaagtttactagccacaaatatatttgactttttaaaggaccttgcaacatgtctattatttccgacccataaaaactctatttctaatcatcggtttataaactaatggttagtgtaaacaaccaaagtgtccattgttaattaaaaatgtagttattagtactataatagataagttgtatgcaaagaataaacttcttgattttgtgaaccaataagtaggtatgaaggtagaaatgaaattttgtttaataaagtttgagggctagaaatgtttttttaaatagaatgaataattgtttattccatagtctaatttaaaatgatcttgactactcccttcgttctaaaatagacaaatatacaaatatagcacaagatgtgatgtattctactttacaaatagacaagagtttgtctaaattca

SEQ ID NO: 30873 - DNA, 656 bp, Oryza sativa
gtaattatttataattttcatattattggattcatggttaaaaaactttcatatacacatatagtttaacatatttaaaaaatttttttaataagaggaatggtgtcaaacattttaaaacgaagggagtataataagcgccacatgtcattgatggcaaatagttatttcaagtggcaaacagttaaaagcccccggtttcagagagagaacagttaaatgccccgggtttaagagagagaatagtgccacggaccaatcaggaatgcaacggcttccggattggtccttcccattcccattggtggtttcacttcaaaccaatggtttctttaatgtttccggcctggtggctttggaatcttcttccctggaatggggtggttggttgtggctaataaatcaaaagttccctttcaggcccattttcaattaattttggttcaaataagaagcaggaattcttggtttcctggggttattacctcctttggtttaaaatttttttttaggttccattccattattgttttggttgggaagggaacggttaaccggggttcactggagcagaggttggcctgggccaagggtggcccgcggggtacgtatacgaagtcatcaactactcctacaatgttcttcgtctttgcgtt

SEQ ID NO: 30874 - DNA, 1299 bp, Oryza sativa
gattataatactctctagctaccaaagccagccagccaagtactactccagctaggattattgttcttagatcgtactccgtatatgaaagatggtatcaatatgatctatgagctagttagtggttatcgacctaattaacgagtcctacatgtcttaattaactaactaacattgtgctctaaaacaatataaaatttaactatggcgtacttatgttctcgcaactgtttgtgtacaggattttcagttatgttaacgaccacggctaatgtattctttttcaacatacttttatttgagctgcccccaacagactggtgtctggtggccagatcgaataacgatcgatcgtacgaacgtaccgactttcactcgatcatcaattcatcactcgtgatgaatcttactcctacgaaataggggttgtcaaatctaactaaatcaagggactttttattcgtcatgcatatatgatcatatggcctacttttacctttgttggagcaatataagtcttagtattaggcctagcttatagtatatcatccgctattaaattttaaattttgaaaattaattttaaaaattttgtatcttagtttattttgtaatttttcacttaaccaatcgataaaattcaactagggaagaaacgaagaaccagtggtatgatggtggagtcgtgggtgtataattctacccaccatggtttaaatcatggtgctcacgaatattacgtacatgcatagactttaaacatgactttagtgagatcaaagatgtgctgttagtttccgtgtcttaaatcatgtgttagggatgcatttcaggtgatccggggtgagagatttgtttcactctagtgcagctccacttgtgagctaggccaaagcgaggcaggccgagcgaagagaggtaggagggaacgaactgtgctagggctaaaaagaaggaaggagcttttggcccaaaaccaaggaaggatattgattatttttttcaattatactgtaatatagcgatctcaatgtttcaattgattgctcagctcataatagccattgcacccctaaaaaaaatagctttacttattgcaacgcacggtttttttctattaaataaaatatatgatagttaagtatttcttggttttgttgaaaaaacttatataaggatgaatatgtaatgaagagagtatttaatataatcagccttattttttaaaaataagtactgctctcttgtttttaatataatcagcctgagtagtagcatagcatttcttcttctttttta

SEQ ID NO: 30875 - DNA, 1520 bp, Oryza sativa
cgtcgccggaggatacagctcgcctttctctctcccatgaagatctggcagcatagctgagagcctttgagaggaaaggagaaggcatattgagggtaataaatgtccatggcggctgtcacttcaactcctagctgtttcaggttttgatagcgcagcgaacggtttcagcctttcaggtgagggagactcaaaggcggacatggaagccgaatggctcagttctcttgcgtcgtgttgcgctgagagtggagatggaacgatagcaggtaggatgttctggggtacgtaggaacgtttggttgggttttctgcgtgagagacactacatgcaatctgatggaaattaaggggtgatgtggcaaagcgagatgaccaaaaaaatactattaattgcactaattggggatgaattgtattggtttataggatactatgctatgcaaaataagaaaaatactatatgacatgctgaacttcagccatttccccttaaattgataacatgttggtttcttttacaaactgttagtgttgttgtacaaaaggggacaaaaaaaaaataacggattgccatgtgtgcaatggtgtgcttgcttgaattttctgtttattcctcaaatggatgtaaaccatgcatcttgtgctgcagatggattgattgctttacgggctaaaagaaagggctcaccctgccaacaagacggcgattctcaggggctgctgacatagagataccaagccttccagaggtacaccataaataaaatgtgatgatgaaacatcttactagtagtgtagtacaagtaaattatgacgattactgcttgaatcgcacaaatcggtcgaccaacgttattaaagtttatgaacggagcactttgatgctataacctcctacagctgctgcatcggaactgtttttccagctgttgcacttactttcaatcacaaattgtctacacataatgctttcttctaagctggtggttcttaggctgggagtttctcaagtcaacatcaatgatgagcttttgccactagtctccatgctgtttctaacttccttaaattgtaccatctcaaaaacggttccgtgctaacaaatgttatctccgttagaccattgcagtcagtacatggtaattttgtgagccgcatgtccttgtaggatggcattcttgtttgattccccgcatctccccatcctgactccccgcatcttccccatcctgagttcctgacctagtgtatgaaaatccaagcaagtaaccaaacacaccttaatgtttctaacttcatatcaatttattttaacactgtagctgccaaaagttatttgattctgatacatatttaactgagctttctggttgtttatatattcagatattggtaccctatgcaaagtgcatgtccatttctgttccttttctgccattagacaattaaacatcattccatccattttatctggcacaattgcaaagaaacaaatagtgctgagcacttaatacatg

SEQ ID NO: 30876 - DNA, 1920 bp, Oryza sativa
agagtgggcaccgagggcagggagtatttgtagggtccgcatgcagtgggaccctctacctgtgatgtgatgagcgaagtgacgaagacgcaaagtgcaactcaacacgatttttgtagtcttctagggggtgtttggagagaggacttatgttttggagagtttatgtttttgagagtttagcctctctctcccaaacacccccttacttacacaaacatatatttttaagagatgtgtgaatattatgctcactttatcatgtaaaaaaataacttagtgctggatataacacattatattactatgaatttagacatatttctgtcaagattcgttgtactataatatatcacatctaattataaattctcgtctttttagagagtatggtcgagttgaatttcatgtcgtgctagccatgaccaggcaacgggcactatgactttgtgagtctgatttttgagaaatcaggaaaaaaaactcaaaattcttgcaaacaatagcaatgtttttttttctaattacatggataacgcacgacaacactaacactaagtacccacacaccggcaagtcccaaagaaacgcttaaatggattaacggacaaaagcctcgtggagatcaacatttaaaccgtgcgaagtttccctaaaaaaaaacgtgcgaagtaaagatatgcactcgtgatccacttcttgggtatatgattattacgatagaaacaaaataggtaaatcatcaattttaactttacaggcaaattatgaaagaatgtgattaaaagacgtacaccctccattctaaaatgaatcatatccatatcatatagccccatcaattttggcatatcggaggaaaaagtgaaacgacatatttgtaaatgaaaaataatttgtgaataaaacttttatatacgtgttctgaacgatctaaaagcaaatgttgaaaaataaactacgatgaaaaaaaccccaaaatcaactctaaatttaagattgaaaattcaaactttagctgataagcgtgagtgaaaagatgaggctaataatatccatattattgctaggatgcctcaaacggaacatatcctatatagattaaaccgggatttgtttttttttcatatgattaattttctgaaggaaagggatgtaatttgggcttgggctgaccaaattgatagcaggccagatcaaatcatccagtcaattcttgtattaactctaggcgatatcagtatcacaaaaaggttgatagcatgcgtagcatagtgcaaagacatttaggttgttaatccgtagtactaattactaagcttcaaaatccacgaggcgtcctttgcctgcttaatccttccctttcgtgatcgcaactcgcaagcaacaggtgcaagctgccaagcacaccgccacggtttgtttatgtttagtcatccgcgcggatctccaggcactaggcagcatcgacatgagccacacgaatcgtagtggaaatccacgatctcgctgcgaagcgacagggtgccctgattttgaccaacgactactttgagagcttaggtcttcgctgagctcgtgttcaccatccccatgcattgacctaggacaaattgatacttttctactcgcaactattccaatgcgtgtatggatcctgctgagtttactttttcactctaaaaattaatattagcaattactccattcgtcctaaaatataaggaattttaagaaatgtgacacgtcctagcactaagaatattatgggactgatgttagtggaagccttgtctaacgaaacaagatatcttgtatgtttagttcacgccaaaattgaaagtttagttgaaattagaacgatgtgatggaaaagttggaagtttgtgtgtgtagaaaagttttgatgtgatggaaaag

SEQ ID NO: 30877 - DNA, 683 bp, Oryza sativa
ctattatatattagtaaagtttattattttgtgctaaatagcttagtgatttacaagataagaatagattaattaaatattagtataaagttgtaaaatatagatttaaaaaatagttttcaaagaattcatatatagaaaaaattgcgaaaattacaccacctgaaagcttggggtccaaatgcatataattatccaacattatttttttcttataaaagaacgtgtaagatttctagtccagatgttggagcagagaatttcacacgaaacaactattttgacgtctaaaacatatcaatatcaatttagtgtataaacgtaacggaactctgtatgtatattttgttgtgaaagtagcgatcgatgtcaccgaggttgttagtacgcatgccattttgttggggttgcttgtagttggtgatgactatccacacaagatagtgtgttcatttttcgcataatggtcggtcgcatttccacagcttttgaagcattattcatctaatttccaacctttagcatgttatctctccaactctattagtactccaaccaaaactaacctcaccccaggttggaggaattattggctgggccatgcctgcctcccaactcaatggtggttcttgttcctccatcctctggattgtggggccatcaacttttgccctgatgcactc

SEQ ID NO: 30878 - DNA, 568 bp, Oryza sativa
aaaatatgaaaactcgacttgttgaaaattcataggaaacttaaaaatatgaaaactcaactttctgaaaattcattgataagcggtaccacctaagttgactacaactgtgtcgtgtttgttctcctgagctgattatatacaataatacaaatggtctgtctctagtatttctcaggaggtgtgccccagaatcagtttcattcatactccattcataagccatagtacaaagttcagacacgtacacacaaccagtcgttcatacattggagtacacggtacagacacagcatgcccgtgcacacacacactaccttcatctctaaacacacagacacaaccctctaataccctctaatctgagtaaactacagtagtgaataaatcatggtatacaaaggcacaacatactccagatatcacgtatgccgcatacacaaaaatcttggtcgccacgttgagacaagcgaaaacggataccttcacctcaatcagataataataagtgaaggcagcgagaacaaccgaaactagagacataccgacggcagcaaacatgaggata

SEQ ID NO: 30879 - DNA, 977 bp, Oryza sativa
aagcaacaaaaaaatggccgtctgctttttcttggacggcattcttatatgtaccaattcaccaaatctgctggttggtggattaacagcttgataattggtatattgattgtactactaccactaattgattgaattatgagaaaagttaatgaaatcttttctaattcttcagcaacaagagtattatctggagccatgtccattttgatcaaccaatcaatcaatcatttgtactactatgctcccccttttctgctgcaatgcttgcaggtgacctaacattttgcgacttctttaatcgcaaggaaatcttgtaaacagcgacacctgatgaaagttggtgatgttgatccacactatttcatcatagtactatttattcagttcctttcttggatggaaaaagagaaaaatggttgttgatctttaataaaaataaagataatctgcagagacaggtgacaggttaaagtcatggtcatcagatctttataggagatgatgatgtgattagattataattaatcctctcagtgattagttttttttttctcctgggccaagttgttttcaaccgacaattgtatctttacgcgattcgcagagatcaaagttaattgaaagtttgcttccagcttttcagctatgctcacacacaacaacaacttgcaaaatcaatcaatggaagagggagagctaacctaactcatcatggcaaagagataagatatagatagatagctgcataaaacagcagcaaacttattttgcttattgactttcctgtctaatgaaaaagcaatctgctttgcaaatgagcctgagcccagtgcttcatcattatgtcctatactttgcgctgcagattgatatattaagggggtgtttgggaactagggactaaactttagtccctctcgcaaaagcataagtccctaccctagggacttatgtttttgagagaggggctaaag

SEQ ID NO: 30880 - DNA, 1172 bp, Oryza sativa
ttgacaaatttatattcttaaaactattatttttgtaatggctaaaatataatgaatttgactttaaaactttacatgtaggtataatactattaaaagtatatgcattatttttttcttgagtctttttatgatattaattagttggtgtgtatagagtgtgcacgtagaacttgtatacatagggtatatatgctgccgctttggatttagctatagtttggaacaaactttgaacaatagaggtaattaactacattctagaatatactaggaagtatacatatgtatgcattgattggtggatccatatatgtccacaaaaagtgcaataattcgttcagtcgtttaatgtgtgcgcattccaccaatcattcgattcatcgatcgatcgatcggcccagagagaatgagacccaatgtaatgggtgtgtacatgcattcaagcttcgatcccgtacgttaatgcgcttcgatcgatcgatcattcattgttggcaacggaaagctaacaaacgccgagctggccgtcacgctgcatgccggccaccgttttgtaccatacgcttcttgtactatcatctacctatatacgtagctaattaacttcttatattgcacacacattttcactctccaattagtttatagggagtactatatatagtactagtacgtacgtgctgcaaataattttatgtgcattgcaacatgcaagtaaattattaactgcaaataataattaacagaagtagtagacgagaattgaagcgtacatgtatatgtgtagtacatatggtggcgtctgacttaggtagctttcaacttccaccatcatttgagaccaataattccctgactagctatccaattctcatcatcatcgatcgatcaacatttcaacaacaattaatctcaccaatcgatctccagctaatcccttgtaccactaactatacatgcattattaccggccaagttcttgtgccaattacacaatgcagctatgattatataagcaataatatattgtcagtaataatcaagcaaccgtccaagcaagttgcatgcgcaacgactgaagaacaaggcatgattagttggaggggatctgggatccaatgacgaaattaatcataagctaagttgagagaagctacagcaatgtatgc

SEQ ID NO: 30881 - DNA, 841 bp, Oryza sativa
gcatgctgcgcgatgaatttgaagacaagctagcgacagcgggatgtttgtatacacgatacaccagggatggaaggtcgtttgatcatgtatatatgtgtttgaggggtttcacgaggaacgagtgtcaattaaggaaagtgaatgttgtggtggtctattttaatttacatttgtttcattgatttattattgggctctaattggtggagcaaatccgatcaaatcactcgctttcagaagaaagacaatggagtaagagcattaacgaggaaacgtcaaaagtatatatcacggtggagattatggatatgtatgaatctcttatccctttttcctccaattgatggagacattagccactgaatcacaagccaattatttggtactcctacctgatgatactctttccttttctaataaccctgtgacaccttcttcattagtacttttgttctgaataaaattctctcaaatagtatcaacaactaaaccatttcataatcaagagcacatccacatatatatttatctcattttaaaatcctcgaaatggtgctaatctttcttaatgatcacattccaattaggacataaacaaatgtgcactagtactcatcaagtagctactaccatatgccttgaaatgtgtagggtcagctctagtggccgttcatcactggctagctatagcttgtgcatgtagtgattaataatttgctcataaaatttaaaaaaatagtagaaaagaaatcaccacttggcccgacaacaacatctaggggacttgaacgccaccctaagtggacatcctataaccattattcaaacaccccatctg

SEQ ID NO: 30882 - DNA, 1953 bp, Oryza sativa
  unsure (1)..(1953): unsure at all n locations
tatatattggggtgcaaaaacagttgcttaataattataaaagcataattattttgtagtactagcagtaactacaaactaacgaacgagatgatataactgatctgatcatacattcatatnnnnnnnnnnnnnnnnnnnnnnnnnnaccactactgcatcattgcggctgcacatgctttccggtctgggctagctagggcttgcataatgattaatgtgcatttgtgctgtgcatatatgtctgtatgattaaacttgataactactaataattacacctgtagtgctcgtgcaaatgagaaaaaaaataattgctgaaactatactccttgtaaagtttgcataaacaaatcaagatgggcatgcagtactgtctgcctgatcatcatgggtgctctctctgaagtctgaaatattcctagatctagctgaatgaggcagatgaactcaaattaaattaataattaagatggatggatggatcatgggtcggacagccaggttagctgggttaatcaattagcatgcggctctccccccaatgatttgctcatgtcatgggtgtggtttgcaaatctgcagtaaggaagcagccagcgagcgagcgaggcgacggttgatggatgggtggatgctggagaggagaggagaggagactgcgcgcacgggggctacgcgacgaatccgccatgggaaatgattggttttgatcggtggcgcgcgcgcgagcatgtggctcggccgccggatcgccggacatgccaggtgcgcgcggtcgcgggagccagagggatcttctctctcatcttttcctccctctctctctctctgtgttttttttattactcctcttcttcttctttcctctctggcggcggcggcggcgtcttctccggcgccggcctggtcgcccacagatttagttgggattcaaatgggcccattttatttctgcagcccaacacgaacgggattgcggcccatataccatgttgggctcgagcgggattttcaccaacgtacagcccatatgtatttgggctggaacgggataggagacgaggggaagagaagataggagaggaagaattaaaataccttattaagggtctgtttggtacagcttcaactcctaaatataactccaggagttgaatctggagtggagttgtggagctgcctaaaccgagatccacaattctagtacattttgtgagagagctccacccaactccactcctagtttcggtggagcgtttggctgagctctagctctaggagaggtggagctggagctgtgccaaacagaccttaagatttgccacttacacgtaggcactatatgtttttttatttattttgtttttgctaactagtatgccacgtcaacaaaatcagccatccatattattatgggatctaatttaacccagttttgcaggttgtgggttaagatttttggtattgtggttgagatgtacaaattaaaatcgacgaaaacataacgaacgtaaagtggacttattcgaacgggattaccagctacgtgtggcccgtataatttgggccgggaagggtttggcccacttatgcgtggcccattctagttgggtcgatatattgctcaaggcccatttaccccttcgtttccgttacggcttctcgtctcctctccccttttcacgccatggccgagcgatctcccggccgccggaatggacgcggcggcggcggcagctgcggcgggaggaggtggtaacgccgccgcgcggagcagccccgccgcgaaatcctccaccatctcctcttcccgcagcgctaatcttcttctcccctttcacgtcgttaccgaggcaccgagcgatcgacccggccgaaatggcggcgggaggaggaggtggtggtagcgccgccgcgcggccagcactcggtgagtgaccaaccaacccg

SEQ ID NO: 30883 - DNA, 662 bp, Oryza sativa
tgagctatccaaattgaacaagaggatgaaatgaaagaaaattttgggagggaaaagatgaaaaagacgatttcacagtgttagaattaaggtctatgccatggaatattacttctgaatatgtacgttgactgattctttcaaaatcaaatgcattaatatccataagaaactacaccaaaattaaacagttggttccagtagcataatttgaacatgatatatatgatatatagttaaatgctagctgataagcaattaatatatttaattgaatacccaaatatcgtttgcattataggtgagtcactagtttcataaccatgagtccatgacatgaatatcaagttagggcagttgtctagttgtgaatgtaaaggcaggttacatgatatcaattaatatgacagtggtgacaagtcagaatgataccagtggccagtggggtgtgctagacatgcacaacagatgctaaagtagttaaaagtaagaactgcttgttatattcgcaattatctaattcacatacatgtattaaattgcttcaagacttaaaaccaactccaagtaacaagcgatttggaagcaacaaaacaaaaagggctcaaatcagtcttcttgctcattcattgctcaggaaatctggaaggaaagaaacacaa

SEQ ID NO: 30884 - DNA, 1231 bp, Oryza sativa
cccaaaaatgcaggattcatgcctgttgcagctgtactatttcgatcagtttaattaagctggagtgattaacaatttcgtcagtattattgccatccaaattaacgcgacatccatggattggaaggtaaaccagtgttgttttgccaggggacatcagcaacctaccgtcccaggaattcagacttaacagttaattaattaaaccaaatttatatgcatgcatgcacgatcagacattgacctcttcctagctccatccgtgttttggatgatatgatccatccatgtttccatgcagtcttgtcagctaatcccggtccatcgatcgatctgtttcctgctccgagatcgatccttcgttgtttgcaggttttgctccttggaatctgcgtcactgctcgatcgtcagaggagagagatgcagctgatgagctactacagtaagtaggtcgtctgaattagtctgaaccattcgtgtgtttcttttcttttttttcttctctgtcagatcgatgaactggtcagcagtaagatccaatattcttgtagacgataccaatgcaaaacatagcctgcctcctcaaacagttcctggccagcagcgccgatcggcggtctgaatttatttgtcccaggagtaccttcacagctgcactttcagattttattaaattcactggtggtaatatatcccagtacatgctggaatatctgaaaaacaagtgcatatatatgctacgattcaaaggtttcacctgcatgcagtgctgtggatttaagatataaagaagtacaacatatgtacaaagtacaagaccgtcaaatctttctgatgaaattgaactgtttcatgtgaaattcctacatttcaaacaaatcaccacgattttaagccagtcgtttttcacttgttactaaactcttatgcatgcattcaaataattcaccgtggaacatgaacggttaggctcccttggattgtaaggaaaacatatgaaatttaaagcattttaattctataaaaaacatactacgaaaaccttaaaacaagaaatgttgaatcctaccatttccttaaaaatttctatggaatgaacattcccacgaagattttaaagaaaagttagcaagagcttaaaccacttggaaatttttttttaagtctatctcatttgaagatgtgttttttctctggcctagttaaacaatcattcccatataattttag

SEQ ID NO: 30885 - DNA, 2082 bp, Oryza sativa
atgggtctgtaactccaataggagctagcttcaactggagtaggagtttggagctgggagttggagtttggagccgtaccaaacggggccgaagatgcgttggcctgcaaggctgcagcggagaggcgcgcgagacagttcttgatggattggatcgataacaggggtcgtcgctggcgcgcagtgaggacgatgctgacgctccaaaaagatctgtcgtcgcccagtgccccttgttccatggccgctcaccccctcttcctccactgcttctcgccgcaccatccgccgccaccaccgtcgcctcgctccatggtcgccttgctccacattcgcccaccccgccctcctccaacgccggcacatggtgtggatgaaaaatgcggggagtatggcgcctgctcggagtgaagagggtggcgggctaggaggctggcggcaagcgagcggttgccccccgctgctctgcccgccgctgagctctcctatcgccgctcagcccgccaccggcctcccccgctgaagaagagcagagagaagggaaggagaaaaaaaaaaggtgcaattgacatgtgggctccatgtagttttttaattttattttttttctaattaggttgccacgtccgtgaaaccacccgtatatactgtcataggatcttgagtgtatggtttacgtgagtttagaggtatattttctaatgttgtggttaaaaatgttgtggttaaagtatcttaaaaaaaatctctgttgagggaccttcggtgaactttattccatcacaatatcacacgcgcagctgcaggcagatgaataagaaaagcgaagcagaaacataaaagagagtttgtatgactagcaaaactgcaaaagtgtcaatgtgttgtaatgaaaaaaataaattacgaaataaatcaaatccttcgataattgagatccacacaaataaagcgttgatatcctaattgatatttgcaaacaatactctaaattgaaatttagaaaccatatatgtcaaaacgacatccagagtatgatgtatgtgcaaaatgacatttgcaaattaatattatgtagcaagtttttcattaaactaccattgatattataacaaatgaatttgttaataaacacggtcatgtacttttgtttttttaatgaaaaactacagctaactaactcatgaatgaagagcaagcccgcaatttattttgacgattttttttataaagaacagcatctatgcaaaaataaagaaaacgataggtggtatcgacagaatatgctttgctttcttcaatgaaaaaattgggacggccatgtacaggccattgaggcaaatttgagacgggcctaaggggttgtttggatggtgactatactttaccacaactttggcaagctattttgaccaatttagcctagtgtttgcttgattgccacatctttatcatgccatactttttaattttgtgaccccacttgtcatagatacatatctttgccaacatttgcctaacttgtggccaagaatttcttagccacataaattgtggcatgccacaccttagctatagaactttggtaaactgaagcaagcatccaaacagcccctaaggcagacaacattgaggcgggcggcgatgggactctgacgcatactactccgacactgtactaaaattttgaacctaaaatagactagccaagatgtccatgcgttacaacgggggtatgtaaggaggacagttcattggttccactgcatgattgagtgtgtttaagttgttttttatcctatagtttttctttattataaagagatattttggaaatatttcctgagacactggtaggtaggaccagcatatcagcgagagggggagcgccaggtcagctatcaccgtgaattgtgttaattgagttcgctctctgatcagcttaatctttgtcaatggcgatgccaacgccatgacaattcttttcgttgatgtacgtggagggctgaggcgtcgaagcatatcaaggaaaggctcatgaataatacattaaggtcagtgaggttggtgaacaaaatgcta

SEQ ID NO: 30886 - DNA, 1377 bp, Oryza sativa
taataccctcataacatggtccgcgggtatgccccgtcgacaatcattattactaaaaatatctataaattactccaaaaacaaaatagaaaaatcaaatggcagaaataacgtaaatgattcaattaagcctcagaaatctttttcacattgtattttccactaatactaaaaattctaaggatttatttaataaactttgggttttatgaattttttacagttttaagaaaacaacacacccaacccaacaaaatcattcagaaatataaattagtatgctaccttgatccatttaaacattataataatatatttaaaattcattgaaaggtccttttgggaaaatatttttaatgaaaatgaaaataactcgtgtaaaaattaaacagttttctagtatcatgtacatgctactgtaatattatgtacagactataaattgattggcgggctaattttgtaatatgttataatagaaggatctatgtgcaaaatgcaccaccgttggaaccaacggccagattatgggtgggtccgtcggacgggacgggaaggggaaggggtgatcaggcggaaagctggatgatttgccaccgttggatcgtccgtatcccccccaaaacccggaaccctcaactttttgttcttttattttttattattatgagagtaaatttcacttaacttttgttaccattgtactctcttcgaattgataatacttgtctctttggacaaaaatacggtctcaaaaaaactttaatcattattttttattataatatatataaaagtgttaacaaatatatgattttattaaagtactttttttagaaattattagagtgcttttaagactaattatttcaaagagaaatattttaaaaatgattcataataaaaaattataaagtttaacctcaccattatctgaatccggaggaagtagcattttggataactctttaacaaatgtttctattatgaatccaataaatttacctttgtgatatttcggatcaccctcaactattttatacatctccatcaacttattatatatcagagcaacaataaaaatatagttgtgagacttcattaaagagtacaaaccgaaatcttatatatatatatatatatatatatatatatatatatatatatatatgtatgtatgtatgtatgtatgtatgtatgtatgtatgtatgtatgtatgtatgtatgtatgtatgtatgtatgtatgtatacacacacttaaaacgagagttggagtggtccaaaagtaagattgactacccggttgaaattaaaatgacgtaggttaaatggtggtctaaagtaaaatattgataataaaacacggggctgcagg

SEQ ID NO: 30887 - DNA, 1241 bp, Oryza sativa
tgcttatatacctgatgagtacccgaccatgcatgtggattaatatattatatgcttataccatgtctgattactagtttaatcgtccacccctatatcatgcctctgcaatggatatgctctgctcatgttcttatgccacctcctcctgccaaaattagcttgagcatattcatctactagcggtcattgtccaattcaagcttttatttatgggttccccttaccgttttcggcgtggttaccggacccccgcggtaaccgccaaaaaccacacaaatttcagtttcaaaaatttgaattcaaaacaaccgtgataccgcagttttgggcgcagtttggggcggttactgcggtatttgcgcggtaaccgtgagatgtttggccgaaagaagaacaaaatgaaaaaaatgcaaaaaaaaaatgaaggaaccctgcgccgctgtgcctcaagcagggagagagagagcgcgcgcgatagagagagatgagagtactatgagatattttctctacatatgggccttaatgggccacatgaccagtgaagcttaggcccatttcattatttctttttcctatttcctaattgacttttggtattaccctcgaatttgaatttatcttactctttttcaagaaatttcttcaccataatacactacaaatcaagcactacatccatggattttttttattttttcgatttttttaaaatttttgaatttgctcaaaatttggtaatccataccgccggtaaagggctactgaaccccattggtaagcccagtaaccggttaccggcggttttgcaaacctgattactactgctttcgcaatactggcaagatactagtagtgctattactttattacacattcaagtgatgttcaggcaatttcaacctattctgtggatggcttcaagtttatttttaacagccttgcctacctgacctgagtagtactatatactgacagatttttacagttaactgtcttcttaggcttataagcaatgtcattcgaggtacacaagtctgtgttttatgcaaaggatagcactcgtggggaatgctttgttattgatcagagaaaacttcatctggatcttgacgggaacccaaccaagctgcatgaagccacctatataatgggtccaagcaccataaagtgcttggtgaagaatggcactgcagagaaaccattaatgcttaaagattatgctattctcaagaaca

SEQ ID NO: 30888 - DNA, 773 bp, Oryza sativa
aataaaggggggaaaagagaaggaaaaaaaagaaaaaggaaaaaaaattaaataggtcccatttgtcagtcaaaataatgccacgttatatctgcgtggcatgccacattagcgccgcgtaggatcctaaaagggttatggcgatttgggacctagatgacacactataacaagttctgggatttggatatgcattttgagagtttatggacttagatgacacacccctacaagtttaaggaccgcatatacactttactctttacaatatgtgattaattaaaatacaaattttctaaaatatttggtatttttaagtaggtaggtatataattaaatcaatttacaagtaaaataagtgtgagaaataaaatgatatggttaaatttaattttattaaattcccatgattagttacgctctttgaattttattggaattttcagagcttaattgctaattttaataatacaaacatcatttaacaattatttaattagaaaaaggaatcaaaatcctcccttttagtttgggccgaatatggaaaagtttataattctcccttctctctattctatatgtctggtctgtttcctttctctgttgaagtccattttgtgtcctcctacaatcgggcctatgaaatgatgtcccagaaaaagtctaatttacgcccagtcgctacagtagcttcttcaagctccagccagtagcccggtctacacccgacgacacccgaatcccgcgtccgattcaactaaacacgtggagat

SEQ ID NO: 30889 - DNA, 1475 bp, Oryza sativa
ataagataagcggccacccatgtttaaaaaagtcaatggcgtcaaacattttgggatggagggagtatttttcaagataaatctattcatataatttttacattttcaaactcaacaacttgagagttattcttgatttatattcccaaggtttaacttaatcattctaaacgattttctttacgagtgagtacggagggagtatatagcaagtgtcagatatatatatatatgatgaatccaattaagcacttgtattggtaatacaaccgtaagaaacgagaagagacgtattttacggaaagactaaattcgcgtgcgttggcgcgccgcgttttaggcccacgcccgcatatgcgtttctggcccaccagctacagtcgattccaattccgtccgaccgccagccatctgccaagtgcgtgcggttactacaggattagaaaagatcattttataattaagtagttactaaactaagataacctttctttttatattggcgggagttttttttctctttctctactattataaaaattcacgatatttttgtcgatattttggtacgtcatccgtgtatgagtgggtttttaagttcgtctgcttttggaaatacatatctatatttgagtcggtttttaagttcgtttatttttggaaatatataaggagtcgtataagaaatctctttaaaaagactcgcatgctaacttgatatgatcggactcctaactgcaactcattgttttctagaaatatatatatccaagcgaactcccatagtgaattttatcttaactaaaccatataacaataataagattaaaataaacttcatccgttgcaacgcacgggcatttttgctagtttactaaaaaattgaaaatctatacatattttttcttaactttcaaataaaatctaaaacttcctaagaaattaaaattcattaaaaatgtaaaacttccaacttgagatttgaaaactttcaagtcaaatttgaaaactttcaactcgaaatttaaaaacttccaagtcaaatttgaaaacattcaactcgaaatttgaaaactttcaagtcaaatttgaaactttcaatctgaattttaaaactttcaatttgaatattggaaacttccaacccaaaatcaaagacttccaactcaaaaattaaaaacttccaactcataattcaaaaactttcaaccaaaatttaaaaactttcaacccaaaaattaaaacttttaatttgaatttttgaaatttcaacttgaatttcaaaactttcaatccgaatcttaaaacaaatgcacctaaatttttgaaaaatttcaactcaattatttatttatttattatttcattataaaggactacttaacgctaattgttactccttgttagcgctaacatttgctctacggcactaggctgtgcggttgccagcctgccacgcgtgtatgggccgaaaa

SEQ ID NO: 30890 - DNA, 1536 bp, Oryza sativa
ctttccaaagtgtatgaactttattgtatcaagatgtgcttacaaagtgcctccaaaaatactcccctttttctcttcttcttcatcttcttcttctccctcctcctataattccttgtttttgggtgaaccctagtgtatttatacctaaataaaaaaaactcccaatcacggagtaggagcagaactcttattctctccaaagccctcgtattccataccgatgacaatgtccaaattaaactctctccccccaaagcgaagtcctatccacatcccggacaggactctgcctgcgatcgatcgatcgagctgccgcatgggccagcttcggcaggcctgctgcgctcctgcccgactgggccctaggctctgggccgacaccacgtcctcgcgcaaggcccagctgagccgccgcatacagccgagccgactgcctcgctgcttgctactgatccgatccttgctgccacatgcacaccaccatacacatgtacagacatactctagcatatacacatgtactttagcattatgtactctatttcttttactcttcaatttttctcacgtacaccggtgtttgtatgcacaatttataaattccctatgcatagtctcggttgacaagattgatcctaataaggtcatattcttttctccaacattggatgaagattaagatttttgtggcacgcttttcaaactcctaaacggtgcgtttcatacaaaaattttatatatgaaagttgctctaaaatatcatattaatctattttttttaagtttataataattaaaactcaatcaatcatatattaatactacctcgttttacgtaaaagaaaattaattttcatcttcagaagaaaagaacaccacctaaatcgcctacacataatccatcgaagaaaacaaatgttctgtgagactgtgacctaatcacacgcacagctatatatatatatatatatatatatatatatatatatatatatatatatatatatattcaaaccgaatacaaacattccaaaaccataattacgaaaatgatttcacatatggttctccttgttggtctttaattagattcgtcatgttccatgaattaatttcctcctcctcttgagccggcgccgactttgcagtttgcacggcggttggaggacggctttcctgtgcggcatcttgcgagcgagcgggttcctcatcggcgcggtggcgggattttgattggtcgtctgcgcagtgcaccgcccggcatgcatgcgtgcttgtagtagtgttcctcctttctctccggcgggcggcggccaaccggtacgtacagtacataattattgacaaggaattacaatggtatactccatttacgaaagttattttaaactacgacacggtctccaaaacacaactttaacttcttgtttctataaaaatatttattgaaaagtgatataaaaatatttattgaaaagtgacatatgtatacgtttatgaaagtactccctccatcccaaaatgtttgacgcc

SEQ ID NO: 30891 - DNA, 1052 bp, Oryza sativa
tacgtttaatactcctaaatagtaagatttcggagggctatttaataggctgaagcatccaaacagggccgacgtcgcgaacttccacagactaacaggtcaaaaattagcagaacgtaaccctgcaatgaagctgcgaaacaaagaggacaagctgcacagaatgttgccctgcaaggaagtgtaaaatcacctgcaggaataattccgagttgattgtggtttcttgtgaactatgatttcttgtaaacttaacattgtgatttcttgtatgaagtactcctgtaaagttaacaacagtactcttgtaaagttaatacaactgtgaaattgtagtgcaataaaggaggctgatttttttttccaggtttctctcaggctgatttcttatgaatctgctgcatatgcagagcactgaacagtgaacacaagtggctactctgatctgaacatttactcgattaattctgattcttttaaatagtggtaaactggtaattgaaagaagtacaggtaggagtagtgcattgggactgtaaatctgtaatatgatgtttgctctgaggaatcaaaacattaatcatcaattttatctccagattgagtaacgcagttgcttgtggtttccaaaaaaaaatgatgtactccaattcaatccaattattcaggactcaaattcagaaaagtacattctgaaaaaatcagagtacaagcaatagcaagaaaagtacacctgatttttgctggtggtactgtggtagtactgaattcaatcataggtttacaatgcaatctgaattctgaattctgactgaaggagtagtagtgctaggatttctgaatttcgactgaactagatctaggagtgttccaagattaaattagttccatgtactccaagatttctaaattctgactaaattagtgctagaagttttttttttcttttttcagtgagaaaagattaaagtctgaatccttcccaaaaagagaatattgaagtctgaattctgaattctaccgttgctcagatgaaggccccgtttggcaca

SEQ ID NO: 30892 - DNA, 635 bp, Oryza sativa
aatttgtgtggaggtccaaaattggcaatcaacacccttgaatccaacaaagaatataatatccccctttcgccctctctcccttatcctcacgcccacttcctcttcccctcacccggtgcacccgccgcccgggcagcgcctcgatctgctcccctggctggtgccctggctagcgcccccggctggcgcctctcctcccctttctcggccgacacccctgggcggtgcctctcctccccactgccagccctcactccccacatcagcggcggcggaggaccccgaggcgagtctcggcgacggcgtctgtgtagtggcctcgcacgggcatgcggatcgagcctagcgcggctaggaagctctcagcagcgtggatctaggccggcctcactagcgggcgcggctgactaccccaaccggcggtagtcctcgcggagccaggcggagcagcggcagcgctgtttggagtgacaactcgccgaatctccctttctctctgagttcgccggagccaaatggatcttcaccaccgccgacgcttgccccattgagcctgtgagcttatccggcgaggacggcgtccggtcgccctcctccctgggcaacgcaacagtgtggagtatggggatgac

SEQ ID NO: 30893 - DNA, 606 bp, Oryza sativa
ggcattgttgctaagaagacaccaaaatataaccgtttagctctaagaaaatattgaagattaagaaagaccgcctctgtgatgatacagcatcaatgtattaatttcaacctgttaagattaataagcagaaaaatgtatatcatataattgcccaaaacggaatgcattgcaaactgttgttaaaaaatgaagtagagaaaacatgacaagcaagatggatctaaaaatgggcagcaaagctttagatccacagagggggatagcatgcaacaaaataaagtgtaattgttcctatctgcctgaagttagcagttgggtgagatataagctatatgctctcaatcatgaacaaacttactgcagacctgagttccactgactgacagatgaaaaatactccctaacagctagcaaccaattcaatgtggcagttaatatcacctagatataaatcccatcccacaaataaaaaagctcgatgaaacagtggcagaaatttttgacattcagaggacccattcggacaggggcaactgtctattaacaaatcacagactgaacaaaatcatagctgattgcagtagcatatatgcaacaaaagaa

SEQ ID NO: 30894 - DNA, 726 bp, Oryza sativa
ctcaaaatctcttatattatgggacggagggagtataaatttaaccatttatcttatttatttatttttataaatatcatttattttattgttactcgttttatcatcaaataaactataatcttaatttatacttttacatatttatactaaatttttaaataagacaaatgattgaactttattcagaataaaagtcaaatgacattatatatgttaggacgaatcacacgcacaaacattgctttagcccttgattgatttaagattcgattcgagggcacgtatcagttgttggtcgccctatgctcgatcggctactcgcagtctcgctctcgctctcatcaccatcaggcgtgccgcgttcatagcgactggaacaggcacgacaagacgagccggggaaaggggcttggtttctcaagtggcaaggaagcggcatataccaaactctgttaggaaactataagcgaacaaacgataaaaaacaatagatcaatcatagaagacacgagatttaacgtagaaaaccctttcaaagtagaagagaaaaaaaccacggacgccagccagcaaaatatcttcactatatctggggtgaagttgcaacgccgcacggcggtttacaagaggtatatatatggtaaaaccctaaaagggatgtcgatctcttaattaattgagaggttcctgcccttcctttctttacgctgcaatgacgcaagg

SEQ ID NO: 30895 - DNA, 708 bp, Oryza sativa
  unsure (1)..(708): unsure at all n locations
gtggccccattgatagactgctagctcggnaccctcttaaatttcccctcgtgatcgcgcacaagatgtagacaagatgctccgtattcatgacatgcaaaatagatgattatagtactttgaaatcgcaaaataaacatgcggacaacctttgttataccacccgtctcacggacaccggcagatcggattattaactactccttgattagctacagtactttggaaaaaaaaacgttgactgatcaaaatttatacggcgacacataaaagtataatacacatttatactaaatctttaattaagacgaatgatcaaacgttaaaaaaaaagttaacggtgtcatccaatttaaaaatgatgtagtactgtttagcattagctttatatttttttaggaaatactactagttccctgacctcctggctactgcatactgtacgtactgaccgagtctgcagcagcagcaatcaactgccatgaatagagatgtttttcatatggacaccgaaatgcacgttatttagcgaccagttcgtcgtgcccttcaatttcatgccatgcaggcgatgagttggcaaaacaccacattaatcaagctaaacaaacacaacacatatcctctgatctttttcagccggattctggatatgagtcgctggcaactgggccccactctgataacgcaaagtcgaaatcccaaaag

SEQ ID NO: 30896 - DNA, 737 bp, Oryza sativa
  unsure (1)..(737): unsure at all n locations
cgtgctttatttgaatccttctcgtaccccttcactgaaacttgagggactaaattagctattcaccctataaaaaacgaaaagttgtgcttaaagtactataaataataaagtaagtcacaaataaaataaatactaattttaaaaaaatttgaataagacgagtggttaaacgttgcaaataaaaacttaaaatcccttatattatgggatattatgggatggaaggagtaatccatatacgtagagattttttgagctggtagtgaaaagtggcaaaataaaaataaatcagtgaacccgaatggcaaatcatccaagtcctgactttgggaagatggcaattggcaaatggagtagtccaaaatcccacactcgtcaggcccgctagggtttcaggcttccgaatccgagcagctccattccccaaatcgcctcttgtctcgcgccctcccgccccgttgccggcgacgagcgctgcagggcacagggtgctcaggctgcagcttcgcctgtccccgccatctgccggacaccaagcccccgcccaagtcctagcctgccattcgnccgccgnnccgccagnttttggccttttggcccccccttgggtgaaacccctttttgggttgtaactgttaccggcgtccctgcaggatttgttgtttcgttgtatacctttagtttttggcgcaaattgantctgcagaatcgaccttacttgtcaatttcagggc

SEQ ID NO: 30897 - DNA, 829 bp, Oryza sativa
  unsure (1)..(829): unsure at all n locations
ctcccgcacattaggaacccncgttattctcctcttgctttaacaaattcacagccaataaaanaaagcaatggttgagctagtaggagctccgcttgatccggtaaatgagcgaaaaaaaaaattttttaattttccccaaaaattttcccttaatttccaatgtggtctaatgctcctaccctacctcgatcattgttctccttccgagaggctaagcggtggacttattaaacctgattggagccatgtttgaaaacacaacatagatttttctttttaaaaaaaaaaaagattttgatgccaatgagaaagggagatattagctttgaatctccctagccatctatacatagaatattctatgttatatggttttgaatagaatattctatgttatatggttttgaagtactaagttgaataaggatcaatatttaccaattcaagtactatgtacacttacgaaacaattcaaagcaacttactatcatagaggttctattttatagatatcgtgaagtatatttaataggaacacactgtctggcaccgtttgtaaaaaaaaaaatcctctatatctatccttgtgaatactggcacactgaaatttcagtttaagaatttatacactgataatccaaattacaaccacaagttgtggcgattttgtgggacccaagggaaaaaatttttttttttttgggggttttgttttcatcccaactaggtgttgaccatgggtcaacaatctcccatggtgcccgtggccgtggtgtacgcaacttgtccgtagncgcgaccccgacccgacccgaccagactgtga

SEQ ID NO: 30898 - DNA, 616 bp, Oryza sativa
aaggtttactcttttcttccttcttcaaatttcaattagtactagttggtcagatttgtgaagaaaaagatatcgtcagttgtttgccgaagctccggaagactgcaggatccgctagcgtagcaaaggaagcagtgaagccagctgtgaagcaggagtgaagatcttggaaaacccgtcgcagaacctaagccgccctatagggtaggttgttagtcgtgtgttccttgcttgtgtgtgtagtgcgtggtttgcatcggtgggttgtgatgtgaccatgctaggttgtttgtttaatcaacttgcagaataagcaaaacaaacaacacatcaataaaaagagttagttcctttaaggtcctgtccctagctctggtctattctttccttgtatgcttcctctctcaacccctaccttgtgacagatggataacactggtaacaaaggctatgggaatgatggatccgatgactcaagaacccaagccaatgggaatgagaaaagcatcaacgaaacctcaccagagctaatccaaattgtggttaaccaaaccaacatgttggcaaccgcctttcaactattacagaatcggaacaacccagcaggggcaaccaa

SEQ ID NO: 30899 - DNA, 658 bp, Oryza sativa
tgcagcccgtctaaatttgaccattcgtcttatttaaaaaattttaaaaaaaaattaaaaacacaagtcacgagtaaagtactattaaagctttatcatcttataacaataaaaatactaattataaaaaaaaattaaataagacgaacgattaaagttggacgcggaaactcatggctgcacttattttgggacagaggtagtaaacaaaaataaaaataaaaatatagcgtctctgctaagtgtcaattcctctacctcaaagcttttggttcccaacaactgatgtagctttcttggtgggtcttgttgtctactcatttcatgcttgataccatctggagacagtatttataccccaattattcttacaataaacacaatttagaatctttttaatggtgtatagtactcccttcgtttcacaatgtaagtcattctagcattttccacattcatattgatactaatgaatatatatatatatatatatatatatatatatatatatatatatatatatatatatatatatatatatataatatgactagcattttccacattcatattgatgctaatgaatatatatatatatatatatatatatatatatattatatatatatatatatatatatatatatatatatatata

SEQ ID NO: 30900 - DNA, 558 bp, Oryza sativa
cccccccccccccattcatctatatcactgataatcacaaataccgcccatacaaacaaggtcaaggatcatagagaggacttatcatcgcaacccgcagcggcttggtttacaccaatgtatcttgattattcgtgagaggctatggaagttttaggtggaaatatagatctcgcccatttgttggagatgcagttaggtcgttttcgttttggttagtactggtgatcggatgttggttcagatcgtcaagcgctgtggagttcgtgcgaagtatttggtcatcgcacttgttggttacatgcaggtgttggttgggattagggccttgttatagttccgccgtattgaagctcctccctccccgtcacgcccccactagccggcctccgctgcgcctccgctctcaccaatccacgcatctggggaagaaggggaggagatagagtaagagaaagggagatgatgaagtggaggaagtggggtccattatttttaatcttataatttgagtgacatgtgggtctgactattttgtttttattttttcactgttaa

SEQ ID NO: 30901 - DNA, 551 bp, Oryza sativa
atgccgatgatacgaagtgaagccttggtagaatttctggaaataaaactgctctaaaactgcaactgtctatgtacatgatgctgatgatatggagtgaagccttggtagaatttctgggaatgaaactgctctaaaactgcaactactagacacttcaaattattttttagaggagccagagaaaaactctcaaatcccgcgggaattgcactgccttcttcagaaaaccccacagtatcttacaaaattcacgtacttcctctatgaaatgtcacatccggtcatcacttatattaggacggaaggagtatgaattttggagaacccctatagaatttggttcaattttctatataattcaactaaatttcctccattcgaaagcagagcaaagttggaggaaagaattccaacaagaatcacgaactagccatacggcccagggcccacaacaaaagtgggccccatccataactgacatcccagaaatggagtaggcttcgtctcctccaccccaccccaacccaacccaacccaacccttctctc

SEQ ID NO: 30902 - DNA, 732 bp, Oryza sativa
atatcgaggtgcaactgggtggttacaaggggacatggtataacaattaacaaatgaatgatcaaatgcaacaaattaggtaggtctgccaatctgccttgcagacgggacaacagattaagtgtgatcctatcaatgcataatatttcgcaagcaaaataattaaatttcaaatataggctcaagatgttcaaaggtggcttgccttgctcgagatctggagcttgatcctcgaaatccttgcactgtttcatattgacacgcgaggtagatggcgacctgcccgccttgacttgtgtagtactctctgttttcctgggtataacaccttttgattttggttaaagtcaaactactttaagtttgactaagtttatagataaatatagtaatgtttataataccaaattagtttcattaaatcaatagttgaatatattttcataatatttttttggtgaaaaagttattatttttttctacaaacataatcaaacttaaagcagtttgactttgacaaaagtcaaaacgtcttataatctgaaacagaggtaacttcaacagcaggtgccatttctttgagtaatggaaaccaacttgaataagacggtgcaaaattctattatagagcaggagaaaaattacaagattacaaccctatgtcatgtcgaaccaagaaaaaaatagcggcaacctaacatgcaaatatagtatcagaaaatggcatcattg

SEQ ID NO: 30903 - DNA, 514 bp, Oryza sativa
ggcaggagtgtgattttatggagcatttgaaaaagaacagagaatgtcatctttagaacaattgcccattatacaagacgtatcggacaggaggaaaaattcaagaatcagtacttgcttgattactacgtactagcctatgtcaaaaaaagatctgcttgatatccataaaaaaatgttgtgtagtatggccttttacaacaaatcttataattatctaggtcaacattttctatctgggctagtattaacagaacagtacaacaaatgtggagtagctttatctgagaaaactccacatttgatggactgttcgtctgttaatacaaatatgaggcctagcgtcaaaagacgggcacaaatacaacattgtagcggttaatattttccagcgaaaatctaagcatagaaacaaccatatgacgattttactgaacatcaatctgcggcaccatggacgtgtgcaacaatcaggagttgagctcacacaagcagtgagttgcctacctacctt

SEQ ID NO: 30904 - DNA, 721 bp, Oryza sativa
cctgataggagcgattagtagcagagattttgttattatgcaacctatatttttatgcgtaatgtaggtcaattctagtgttgttttgccttacgctttccccactgtaataggcgggacaattatattgcacaaacatttaattgatgttataatggtgcacacattcataatagaaataggaatgtgtgattgccacaaagatcatgtaatttactgcttttttgatcggtcaaactatatggattgaccaacttccatcaatgctgctagtatttttatgatccgctctgcattcagttagccataaaatagctcccatgttgccataatgatccatacaagcatcggtcttattatcactgctttgtgaatatgtttgtacaagctttacaaagctgtagcgttattccagagcagttcattagcttatgttagctacacttttgctgaataaagaaaatagcacatgtttgctagttaatatgatagacataacaacaaagtattcttgcataccagaaattatttaaacatgcttggttgtaatagaaacattgtcactgaggtattcgaatggaagagttttaagtatgttgcaccacttctcgaacatgctcttggttcagatatcagaaattcataatatagatataaatatttttcaagaaacttggcaaaaaccattctttggatgctcttgttttccatggttgaatat

SEQ ID NO: 30905 - DNA, 582 bp, Oryza sativa
ttcctgcagccctattcataactcataagttggattttatctttctctattatttgaggatgttatttcgcgaagttgtatatttatgttatatatatgaattttcaactttttttaagattttctcatgataattggaataatgtttgaacaaagagattaaatttgtgtgcaacatgcgcacctatgcaactccatcaactggtgcaagctggctagcatacgagattagatcttaatcaccatcctgctcgtgcattaagtagtaacaactacactaagcactagtactaactgcactgtacctgtgcaccatgcaacctggctaaaaaaatgtcgttttgacatgagctaaatactaaaaatcaaagaagacaacgtaaatccaagcctgctactagccaacaagaaaacaagaaaacggtcgggtaatcatgtcgcggtggaccgtggacgaacaccagctgctagcttcaccttcacacggtggcttccggcgagtggccgacgccgacgagccggggcggggaggccggtagcgtgtataacggcgtctcgggctccggcttctactcgccctcg

SEQ ID NO: 30906 - DNA, 572 bp, Oryza sativa
actaaatatggcccaaaaaatcagatcagtatatcgtgataaattatctgaatattggagtacgtttcacaattatcattcagctttttagcttttacatctgcaaatgacagcaggaaggaagttatagtatatggcaaattaataatgtggcaaacaacgcgtaattggttgttaaatttgttcatgaatcataacgcattaattctcagtgtctctcaatacatattttcgttcattcagaaaacgcatgtcgatcgtcaggtgcacagattgctgatcattagagtcagtataggacaaattaaggatttgatatatcacaattgacagtaattaatttgcttgctgtgtgtttttatgaacttccttagctgatcatgttttcattccatcttcacctcgttttacagctgcgaacgaattcagaaagcattaattaagattcagacgctgcagaatgcaaatcaagcaacaataatgcatactaatatggattgcaaacactctggattacaactgagttatgatctacgtttttactcgtttcctgtttagtttctggtaatttc

SEQ ID NO: 30907 - DNA, 909 bp, Oryza sativa
  unsure (1)..(909): unsure at all n locations
tagcgacangctcgcaagnagcccancaagatttnttgtgacatttcttaaccactcatgacggtagcctagcggcaatctgaatggcagcctccgcgttaactctccattcatttctatttgtatcatgtatgtgcgtggcggggtcctcaaatatatatcttataaaaatcattaaataaatacaaatcatgaaatccgaacctaatactacttagaaatagatataggcacgaactataataccatcaaatccataggtgaattcgacctagactataaggctcaagcgctaagcctttgatccaaactccatgcaagttccatacaaaatttaaaatcatgcttgaatttacagagaactacaagataatatgataagtacccaaattaagttagaatcatggggttagaggcttagagctagcaatcgattatgtttggtttgaggggatgacaatctagcttttgagtgtgtttggttagtgggcaagagtagataggatggtccgacgagacaatattccacgaagatgttgcgccaaattgaccaaggatatccatcttttggaaattttaatcattagtaattgattagcaataattaatggcatttgtgattgagtagtaattaacttatcannaactaatgttnattagatataatcagtctattttattggtattaatatagagtatggctatattaataataattaacatgtgatggtgtcattcattcattctataatcaaaccaacaagaaatagatggtatatctataaaagtgttaaaaacgaatacctatcctatatgatagtttatttatccacttatcaaaacaatccactaagatatgaggcagacattttgtcatattagacaaatagatgaagaaatctcttttaa

SEQ ID NO: 30908 - DNA, 658 bp, Oryza sativa
aatctcatcccactgaggaaggtggagggggtgggtgaaaagtgtccagacctgtgatgacatcagacagcctctgagctactgcagagaccccctatacctatggaccacttgatttggtgacattttcaaaatatatccaaaatctgactatttctcaccacccccagcactgccatgtgccccaggccaccaccttctctccccacagggctccccgctgctgctgtggcccctcccaggctattctccacatggtagccaaagtgaacttctatgaacttctacaaacagatcatgcaactcctcccccagaaacccccaagccttctcttcccactctgtgaaatggccaaagcctttaccacatggatgaagtcctctaagacctgggcctcgccgacttcactgacctcaccttgcaccactcccattgcctggaagcccctcaaagacacagagcacactcccttccgtgggatttgcacttgaagttccctctgcctggaacttgcctgtcttcctcctttgcttccttcaggtctctgctcacatgtcatgctattatcaaggacgtccctgacaccctgtatgacagcactgtcctgcagaaccatctatgatatggaaatgcgtcataacctgagctttcaataca

SEQ ID NO: 30909 - DNA, 1425 bp, Oryza sativa
ccctctcaagggtcacacccacttcccccttcttaccaaggcccaaaacccacctcccaccttagtcaaaggcccctcccaccggtcaaacccgcctactaactccccccacaacccacctcttctcagctcttgtcccaggacggtgcagtaatacaacgaccactgtgtagtaacattgtgtcttacgtgcagtaacagcgttaaaatatagttgaaatatagtcatgacggatctacttttgataagctctttttttctagcatcatggtgcaaacggttttaaaaaaccttacatcacttgggatatattgtttttcaaagctcgacttttttgcaatttgtctcttcacaagtggtaatactatactattacttgttactatttgtctgttgtacgttactataatcacatcacgacgttactacactgcgttttactgtatttttttgcgtagtgttactgcattaaacacgtgataacgtgtatcttctgtgtagtaatacttttacttttgtgcagtaacaagtatatggttagcatctaagacttttaacctatatatttttgtttcaattcttgatttactgttgttcaccacaatattattgtcaaaagtgcagtaacgtcatatatatatatgcagtaacactatattggagggaggagatcggttttcttgaaaagagggaggaagaacagtttcttgaggaggggaatacatagatgcattttgaagtttaaacatccacatgcagtaacactatagaatcattgtgaaaacggttttaaaaaataatacataacttgtgacatattgcttttcaaatattggcattttgaactttaacactccatatgcagtaacatagtatgtaatttgcagtaacatacgtatatacatgcagtaacatggttttaccaaatgtataaaattgttcaaaacactcctacatcaatcagacctcgttcaaagccacctacagactttatctatagcccacctattcaatcttcatcttgtaaaaatgacatagtaaaactacaattattgtgcagtaacatagctacttgaaagtggtaacatgtacctattatgtagtaacacttctactttcatacaataataagtatatggttagcatgtgaggctttaacccatatatttttgttttgattcctggtctactacaattttactatgacattactaccagaagtgcagtaatgtcctatgtgttatacagtaacgtcacgtgttactgtatttttacaacaatgttactactagagcatagtaatatttatgagtttcgatagtgaaagatattagaattgataatcatattactttctcataaaattcttaaaacaaatagcattattagacgaattggttagatgattgtgctttgaactataa

SEQ ID NO: 30910 - DNA, 1503 bp, Oryza sativa
  unsure (1)..(1503): unsure at all n locations
gggagtgctcaatattaacaccaacttttggtatctacttgataggaagtagtagcatagagcatcctcagaaaaagagaggtttctataaacttttttttccttttaacttgaaatttcaaaaagagaaggctgggaagccttttatgttgtcttcttattgagcccgccaatatagatgttttgggcctgatcttcaacaatatagtcataagcccaactctattttccacacccaatagttccctcccaaaatatagttgttaatctatgtaactatatgtaagtacatgtgcatttcactatttatcaatctatttctttccataacccaagaaattactccctcaccgctaaggaacaattttgtttttgaacacaataaaatggtaatctgctcactaggtaaaagagataaaaatacggggatcgctagttggcgcgtctgccggcgcgtgtttctttgggataagggtanngttagaactanantccctttaaatttttaaaagcgctttcccccttttagataataaccgtttgagataatgacggtagtagataataagattttctttttcccgcgagatttttttaaataacaaattgaaaagaaaatctatatatgaagtcaaattttcaaaattttaaacccagattttaaaactttcaacttgaattttgaatttttaaagtcaaattttgaaaactttcaacttttcatctcaaatttgaaaaacttttaactcaactttgaaaatattcaacccagatttaaaaactttcaacttgagattcaaaaactttcaactcgagagttgaaaatttttaagttaagatttgaaaaattttcaagtcatgatttaaatacttttaacacaaactatttaaaaatacgtgtgctaaaaatgtttaaaaaataatcagaaaaaagagcaaaaacaaaagaaaaaaatcatgaaaaaagggaaaaaaaacgccgtgcgggggtgggaccgtgccgccagctagcgcgtgccaattagctttcttgtaaaaatacagtattattacgaagtccttctctacataatttaggccattgcttagtaaatacgattttgctatatatttatcgataaattttcttccaaaaatttgacagatgtaactacagtacaatcgtagtgtaattacactgtaatttgcatgtaattacattgtaactataatgtaactttcaaaaatctctctgtaacatgttatttcggtaaaatggaggtcgtgggaacaaatcttttcacatatgtgtgtgctgtgatttttttctttcctcacttattaaaaacccaaaaaaaaattttccctttttttgaatagatctaacgattcaaaattacgtgaaacttacatacaagttatactgtagttacatgcaaattacagtgtaattacatacaagttacagtgtaattacactacgattatactataattacatctatcaaatttttaggagaaaat

SEQ ID NO: 30911 - DNA, 675 bp, Oryza sativa
cccacacggcccgtacgcgcggtgctgccagcgctaatcgagattttttttcatagcgcacgtttaatgtaagtaactgtttaaggataatgataataattaatgaaagatttttttcttttttgagatttttttactaatagatagaaaatttttaagttacatttgaaaacttttgacttaagatttaaactttgaagtcaaattttgaaaactttcaactcatatttgaaaactttcaactccgatttaaaaacttacgactcaagatttgaaaacttttgactcagatttgaaaactttcgactcaggtttgaaactttcaactcaagatctaaaaactttcaactcaaattttaaaaattttcaactcaaaattgaaaacttttcatattaaaatcgaaaactttcaactcaaaattcaaaaactttttaactcatatttgaaaactttcaagttgatattttgaaaactttcaaatcgtattttcaaaattttcaagtcaatatttgaaaattttaactcaaaatttcaaaatcaattgtttttatttttttattgataaattactgtagcattttcgttaatcactagtcagacgttgttgttttctttcgagaaaaacgctaagcgctacttaaagcgaaggtccacgtgcacgcgacttaacgtcc

SEQ ID NO: 30912 - DNA, 1035 bp, Oryza sativa
attcaatctttctgtgaatggaagaaagaggagagtacgtttttgtccgctgtacaactgcccagctacagcaagacagcctacgatgtgcagtgagccagcgacgagcgtaccttcaaagggacatctggtcgtagccgttggtactggatctggtgtacttggtattatattggatggtacgtactagcttgattttgaatacttacattaatttttaagtaaatttcataaaacctaatttttttatggtcaaaattaaagaaaaattacatgtattatgaaatgtgacacctaatctaggtattatggttttaaaatttcacaaaaccccacctttatgcattttgagcgcgaatttacttaaaattttaaaacatagagtgcaaatgaaaattttaattattaatttcttgattaagatcgatagtttaattttttactacttccaaaattttgtttaagatatgttgaaatttatcaagatttcaaaaattgcggagttttatgaaacattcagaccataaaacctgtgatgtgccacacatcataatacctgtggttttccacaactttgacgacaaaatatggggttttctgaaatttactcataattttttacatgctgctaaaatgctagtaccaatttatctcattcttgcacaactttctttgggctatgctgtttctatatatttctaagtaagacaactcaaattagtagttggaatcttggaatacatggattgcttggagaaaatgactatatatattttattttcaaacactttgttatatttaaacataggagttaaactaatttcgtgtggtttgccagtcgaattaaactattattaatatgatttgtatcacatgtaattaatcgaatgaaagattggacctataccgtccaaagttcaccactttagagtagtatcattcgaagtacatcatttcacaataacaccaggggaaagatactactccgcctaaattaacaggtagtcattatccatggcaaaattgcccttcttt

SEQ ID NO: 30913 - DNA, 1124 bp, Oryza sativa
gttcagtgcactgaaccttgctatcctttccatcgtgctcatggtgcaacttgcctgatgtacttcatccaagttgcccaagtagctataggcctatagctgcagctcgatctccagcaaacaatgcaattaaggagcactgttatttttaagtaccccaaaaaaaacatacaatttttagggactagttcagtttcatcctcagaagttggttttttaggtaacagaggaatacgttatcactactgttgctatatttaaatatatttagttaactgatcaatcacaagaaagcttgagaattaagatggattattgtaaatatgcaagttcgatcaaggagtggttttttaatctctatctgagaaattgttttagaatataaatgatcaccctgcatgctaacttaaaggctgaaagtttagtttgctgactgagtgacgctctagatcgaaaatctgacccgcaatagttctgataaaaaaaaactatatgcacatatttatgagcaaatttgtcgaaaagatactacaatggttcttcacactttataactttattctgaacatgtcaagttaaatctagtggacaagtggacatgagagatgacattatgttgactttgaatagtaaaaaaaatgattctacctctgtattggactataattaaggttaccttctaatcagttcccagtgtataatcctagtataaaaaaaaccttttattagatgtaatactcccttttgctataggttagtggcgtaggacttaacaatcgacgtggccttacattgtgcttttccttaggacattgaataatttgagttatgcatgggtgaattattttattcattattacttgtcttttggaaatggggctggtagtaaacaaggtaaaataagcattaatgctatcttgatcgactagtgcaatataagttactttttttggggggttttgcaatattagttacttattactacatccatcccataataattgaattttagggaattagagatagattaacaacaaacataatttaccacaataaccctatttataactacattgcatgcacatattccatatgtatactttattaaaaggaaggttgaggca

SEQ ID NO: 30914 - DNA, 669 bp, Oryza sativa
ctactgcagaagatgtggacctgacactgggagcaggactactgagctgggaatttgtctatgttggtagccttaaggtatttttacttctgcagttaaatactaccaatatgatggcatgccaatccatgaacaaaaacattaacatgtaaatgattgaagcacctgtgtttggttgccctgcttgtttaattgtgcttctccctcagttttgtgcttgccctgggctacttgctgttcctaatgctactgcttttaggtactttactgctgctatattgctcatcttaaagatcacaaaagtaacaaaagcaagtactttttagttcttaacaatacagcactctgcatgtaaaatggcattggatttttcccgttcccctaatttttttgttcggaactgttgatgcatgcacttttcttccaattgctttcctgttctgacatagagaactggccttgcaagctgcggtgctggtttacaattcgttaatactacgttggacggttggagtaagaaactggtggttcacatcaatgtcaatgggggagaacactttatttgattttaggaatactttctttcctgtttttatttaagtgagtacaaatcaggcaacatgtatttattctgaaaacccaacaactaaacatatataaaacactatg

SEQ ID NO: 30915 - DNA, 615 bp, Oryza sativa
  unsure (1)..(615): unsure at all n locations
cgtggtttttctagtttttctagtgaataccgtattcctcgtttggtgcggtctgtaatacaaatagctttagaactttaattactacctcatagtgttttgtatatgtttagttgttggcttttcggactaacaattgatatgaaaccttacgatctattaggaacggccatttattatggctatgctgaacgacatggtatttgacaaaaaaaaaagttgggttgatgggatttggttgctatggcatgtcaacatttggagcggatggtcaaagaatgttttacatagagcataaatgtaacactccgggtatcttttacctataatgctacacactacggaacaaaaaccactaagttctaaattcattaaaattttgacagtctcccctgtaaatatggacatccacgacaggcagttacatattaaataattaataatatcattcccacagtacgatccatccttataatccacagaaagaaaccacaatagatattnctttggnnaaaanaaggggaaaaatttttttaaattataataccaaacgaggatatagtttaaatgtcattatagacctaagcaatatagtttgatagtgtgcagataaat

SEQ ID NO: 30916 - DNA, 812 bp, Oryza sativa
  unsure (1)..(812): unsure at all n locations
cacaagattttattcacataccaaacttattggtgtgtatatattagttattatgcaccctaggcttgtgcacacatatttcctttttaaaaaccaaaattattgatgagtcaatcaattgataatttatttttcaaaatatcaaataacaaatgcaagtaaatgtcacatcatgccaaacgtatatatgtgcactcaccgtacatactatgtgctgccctcggttacactcatttttaatttgtaatattaagggtacttgttttggtaacataaaaacatgagataacacatggaataagtgtccaattgcttggttttcataataagctgaataaaaatatacaaggtaacaaaaatatttgcctaaggaaaaaatggatttatcagcttttagcgaggctaaaaataggtataggtgattcagaaaagaattggcattgtgccacacaaaaacactatatttggattctaattggacaacattagtagtttcggctcaatttggagcacttaaaacgtaagagtttatagattatgtttgcacaacgccatatctcagacaaaagttaaatttgaagtttgtatgataaataatagtgatntnntaaaattaattnnaattnnannttntttnttnntttaaaattctaggatgggaacaaaataattcatcgaaagataatcttaaatctgaagtagtgccaaacaaaggccataatatacgtgggctaaaattagctagcgcgtcaaaggacgcgcctattttctagtgttgtactgaagaggatgcccaaattaatgagcatagg

SEQ ID NO: 30917 - DNA, 616 bp, Oryza sativa
tagcacgttttgaatatcaatgtagatattgaaatgagcttattcgccattagcaacaacctcagggtcgaaatctttcacctctcttagaagtgttgacatgttgtggcacacgtggaaaccatattggtctccgatctgtcgtgcgcatgcaaacttggtgtcatgataaagttcgttcttgccctccttgtgcctaccacccttttccacatatgggccccaagccatatttaaggccttggtgatttcactgaaatcataatctttggacttattggagttaaggtaggtaaccctactccacttaggtacgatgactaggagaatccaatgtcgcctgcgcagtggttatgtagcgttagtactaagaaccttaacttcaaaaacaatatacatgaagggtattgtcctcttactcttggttgtgtgtgcacatgatgtactccttgtcttcatgggcccataaacaccggttgacatagtcaaccacctcagtgaagctctgtcgtaaattaacctcattcaccatggatggatcaaggaacccaacctgattaccatggcgacgactctcgatccaacacaaccttaaaatatttacgtattagaacta

SEQ ID NO: 30918 - DNA, 1590 bp, Oryza sativa
attaataatgcgctaatgagtcactccgttttacgtgctggagggaaaagttcacaacagccactaccaacacacccttagtttgcacatcaatctgtcccggattaaaccagcttttgaccaattctgaatttattcagaaagatattgactgatttctagctttacgctgaactccacaaaccagttgttttctggcaaacaaaaaacagtgggggctagggacttttatgagttctgactggaaccaagtagaaaacatgaacttatatctgagcaatgtcctgttatgcaggccacaattccatttaatggataagaacctggttctgcacactgaatttgatattacagtgataatcagaacctcagaaggcattggacatttcaaatactgcctttagtattcaatatgcaaccaatattagttatttgcctatatttcagtgatgactgataagtgatcactcaactgtttttggtacagtgtaagaattgagcaacagtatgtgctattgttctaaataaagatcattgtggccttctgaaggcagtttacaaggtaagtctagcctctccgtatgttttgcgttttaaagaacaggttgataaaggggaatttatctattttagcaggcattatacaattattaagaccatttatagtagaaatctctccttctaaactcaaaaatatcatggaaattctagtatcaactatagcaactagacctagttaaatcttctccttttgctgctgccatggataaatgttgagattcttattctaggtacaggaaatatgtgttcaatgattgctttgtctactgcatgaacatgtaaacatttgtatgaaatttgtaaacagtgcccggggccaccgcgctgcagcgattgaggaggacaaaggaggacagcaggcggccggtgcttgtgtcaggtcgagtaaacctatacgcttgtggacttggccggggagcattgggctgcgccagctgatggacgcagtttgttacagcgtccacacctggatgctgtgaccagtagtgtccttactattttgctaaataataccactaatttactgattatttaattttaggattatagattattataaataaaaattttggctctatatctctatagttccatcaagggataagcatcctgtgtaggacaactgatgctagcagcgaaaaatgaatgcacaaaagttattcagatcaggagtaataattgctagagaatgtttaaacatatttgaaaacagaaaaaatgtgccagggcatcatgccatcaaaacataccaattcttctataaacatatgcattagctattatatgtcaaggaaaccacaagtgctcccagtaaaataagtattccctccatttcttttatttgacgttggttagttcaaaaacatcaaagaaaaacaaatgaagtaaaacaacagccgttttaggttacgcatggtatcattacaacacaggtgttagatatgtactaaaaataaacaaatctatacaaagacaaagaaagatgaatcgaactcggtatacaacatgtgtaaaataagtatctgcttt

SEQ ID NO: 30919 - DNA, 613 bp, Oryza sativa
cctcatatccattgccaaattttgctactgccttgagccatcaccggcttgattacctcccagctccagttctgttcaagatcttttggtagatggagcatctttcaaaatctcttaactcatttagattttctttcagatttgagaacggtaagagtatgaaaatatagaattcagaacataatttagaactcgaaagctaaaaacacagctattttagattttcactagttaattcctatcaactgtttcttagaattctaaactctattccatattccctccatcataaaataaaccaacatcgtgcgggatatgacacattcctagtcaagattcataatactaggatgtgtcatatccggtacgagattgatttattttaagatgaatgaaggagtggagtagaagtagcagtaccgtacagtacgaggcagtgttgtctgctgctacaactgcatgcagctagacaagcgacccggttcagatgggactaattttagtcctatcacatcggatgtttggacactaattataaatattaaatgtatattattaataaaacccaccttataaccctagactaattcgcgaaacaaatttattgagtcta

SEQ ID NO: 30920 - DNA, 1784 bp, Oryza sativa
cgtgttccggcggcgcatgacgtgttcatgggagaaatactactgccggtgatgacagagtggatgagagttccatggatacgtaggtatccatttgtgccgcctccgccgccggagtcgccggaggaggaggagacggtcgtacctcgtcggaggaggaggcggagagcaatgccaagggacgccggccatggccgtgcggcgccgggacatggcggcgacaagaagcagtggcgtggcgccggcgcggttcattcgccgtcttccgggttccgatggaaacaccggtgaccgcccgccggcgatgaactttgcttaatttcgccgttacagattttacttagtttatttattttctgtggatgtttttctttgtttgctatggacattttctgagtgtttttgagattatcatctgaaactaaaaatggttagtactaaccacaaatatgtacgaacaatcgagaagtagatatgaggttaaatacttaataattaattagaaatttaatcgtgaaaaattagagatctaataaactgaacatgtctttaaccaaccagaaggcccgtgaaagaacataggagtattgtttaagctagtgccgataagacttctctaatttatcaaatttgtagaaagacatcgcaacattctaaagcatactatcaaaaatatattcaatatattcaatgtttatatttaatgaaactaatttaatttaatgttatacgagttactatatttctccataaacttgcttatataagtttatcttagaaaaaatcaaaacgatttatgaagtatgtattataagtagattaaaaatcaatgtttaaaataatagactatgataaaacggttttaaaattaatattttggctatggccgataaggcagtgagctgtgagcagatgatcatgttggtctttttcttctctttttcgatgacttcaaccagatgtgtctaaccatgcatcgaaaagcttacgacgataaattcaagatgatgcagctcgcaatctgattcgatccattactatttttttcaaaaaaaatatttgacgaaacaacctaagcaatttgttcttacatggcattctccagattgctttgacattatggctgtcatattaaatctccataccggtcgaaacttagtggtcacacgtcaatcgactatatcttcctctgtctagttcgtgatgcctatctaatactacctatgttttttaatacttcaccgtcccaaaatataaatatttttaaccctgacacggtcatcgagatgctattttgaccaacaatatttataaaagtaagatgttttaaataaaaagagttgcatacatgatagtttgtttaataataaatctagtaaacttcaattttacatgattgattttttttattttttctgctattaatggtcaacgtaaacaatgtttgacttgtcattatgctaaaaatgcttatatttaagacggagggagtatatgatggcattgattttttaacaaacatttatcactcgtcttattcaaaatttttatgtaaatataaaaatatttaagtcatatttaaagaacatttgatgataaatcaagtcatgataaaataaataataattaaatatttttttaataaaataaatggttaaacgtatttttaaaaattaacgatgtcatatattaaaaagctgagggaataccttttttgggaaatcgatcgatggcgtgttgttctagagtgccgaggttttttagttattattgttgttggaggt

SEQ ID NO: 30921 - DNA, 634 bp, Oryza sativa
ggtatttcttaactttacaaataaaatccgcaagcgcacggaaaatactgatgtagcacttcagccaggagtattctcaggtattgatttccacagggaacgtgtgtgtcagctctttaccaggtttgtccaaggacacgaagctaatgataggcaaaggatagagaggattcaccggtgagaaacaatgtctacggaaagcttaacttaatcctaacgcgatacttcgggcactggccagcttgctgctcccagatatcgctctattacgtacccggacagggaggacttacacccacctctacacccaccttacacctactgtgggatacggagcaaacaccataaatcaactacttagacaccgcatctaagcaattaatagctactgtagtgtttataactcactaaagtaatctatattataatagactatagtgaacgatgatcccgcacgctaattaggaactaaccaagagataattctcacagagtaaattttaattacttataatgatattcaattaatgcagagtaattaacaagataaaaaaggtaagaagagaattaatttgcatcgacaacttcttctacattactctctctctattctaatatacaataaagtacacta

SEQ ID NO: 30922 - DNA, 3785 bp, Oryza sativa
ccgttggaggtgttctaatgtttgttgcctgtataaaaccttgaacgtgggagacggaatgtcctcttgcaagttgcaattttgtatgctgtacaaatatatttggttaagatcttgtttggttaatcccgaccacaagagaatcaagaggaatttgtatgggatttattcaatacctatttggttaatccatttaatcactcctttagtattaacctaacaagcctaacgcctaaggcctaagaagaaatacaatgctagccaggtaaaatatcatgctaaatcagtttgcccaaaaatcatgttattgcaataaacaatattctaccatttttttttgaagcgatgggtctgttcatatgatgcgactacacaatcatttacaaatatattgaaaaaatggatggcattttgcctaagaaggaaaagaagcaactgtttctacgagaaaaactacatatagaacataaacaatttactagtatgagatttattgttccaaaatgcaaacatgaatggaaaaaagcctggaattacttaagtgtgtgtttagtttggggatgaagtttgatggattaggttcgtcctatttctattttttttgggattggatgattccatctacatctacgtgcttgacataaaggttataatgatcctacttttttaagggttggaaggatgtggtccatacatcaatgagagagaaaattagttggattggtccatctgtgtttggttcacggtcatgcatggataggatatggccatccatattttgttggatatagcgatctaattttttgtttggtttgtatggatatggcgatccgatttcttgtttggtcggagggatatagcatggatggaaaaagccaaaagttagtgggacccatttgtcatatatatttttttatcaaaatataatcattcgagatcttgttttaaagatttaattgtaacaaatataatggtgtaatcaaatcataaattagataaacagtttaggagaaaaaaaatcatttggagcttacttaacagaaaatcaaaccaacaacagccaatcagaataggacacatcacccagaccaaaactggatggattcatctagccaaatcggcctgatgcactcatccagcatattgagggaatattccctattctgggccgcctcatccaccctgccctccaatcaaacactacaaaaaaccggacggccatctcctatccagtctcatccacccaaccaaacacaccctatctagagagaatatttcattctagagatcatgacttcttacctatcttcaagctaaacaccctgaaaagttctccccatctagacctattccattcctccaatcaaacacatgctaacattcactctgagtctagcttgggtgatgccattgctaactccatgatgccttatcataccatatgttcctatcatgataatagaaaaaatgattgaagagattcacctattgacattccgaacttcgtaaagcacatctagtactcctacttagggtttagggtatcactcagaaccacatattaaaggctagcaaaaaaaattaccacttatttctgaattgttttatttggttgtcttggagacaaaattttgggatagagttttggatatcttttaggttgagttttttttatttcactttcctaactccacctcccgaacgcagaattagtgatgctctgagaccaatgtgttaggttagtactaaagtggaaccaatcccttattttgaaactttagattactaaagttgctgagagcatcactagcagtaccctactccgtctccgatcctattttttttcaggatttttgatgaaaaaactgcttcaactgttccctacgcttcctctcaaaaatcagtactccattctacttcactctcgctctccaaaagttgggaatcgttctcgctcccaatttccgtcacttgagtgagaatgccatccgagaaaaggggtaagcggaagggcgttgacactagatgatatgatcttgataagttgcgggtaaagggaggcatacctttttatttttatattttagggagttaaatataagccatctattggaaggaagtatatacctatacaagttatccccacctactaatctcctgcactgtggttgctccacgtcatcaagttgatcacacccattcgatcataagagacatcttgaccatactctcacaatggccaattacagtactactaggggcagtagaataaaaaccacttcaaacaaaacgccaggcaaaaaaaaaaaaacaccaattctcaagagtggattttaaactctagagggaacatgtatatcactcgaataattatgaaaaaatttcaaaacaattaagaaattgtattaacatgtagtataccactccaaaagcatgcaagttataatttaacttttataagtaaaacacatataaaagagtagcaaattaactacaactagttaacatatattcacattaaatttatttttttcgttgcaacatataaaaaattaaatttaactttacatgtttatgaagttataattattttcataactaagtgtcatacaaataacgagatgacgtctcgagttcttcctgcagccaggttttgaaatttcggttcgaaatttccgaaattttgcccccccccccccccgaaatgctcacatctcgtccgaaattttcggttttttgcaatttttttgtgtatttggtcaaaattttatttaaaatcagcaaaatttcaaaaatttcgtaaaaaaaatccgaaatcggttctttcgcccacctgcagcagaaatcttgggctgtgtttagatacaaacaactttcagctttgaaaagaactaaacacagccttagtttggaaccctgcctgctgcaaaattataatatatgtttcgaaatttcaaacccagcctgttgtcgtcctgtactgtactcctgtgcattgtctggatgggcaactttttcatagcgaggcgagtcgtcgtgtgcgtgcgtgtgctggctcgtctcgtcttgttcggacatgacaagaacagaactgaccaaaaatggactggacgcatcagatgagggaggtccgagtatgcaggcggctgttatgcaaacagcctaacagcttaaacaaaatgctggaaacactgttgcttggcttggattttgctaaacatatgttatgattttgctacacacttcgtccttgttcattttgatttgttgtaatttgagaccgtaaggcgattaatcaggacgggaagaaaaaccactgaaccataaaagaccagactaaaaccagatcttgatgcaaccaggttcatcagatagattcatcattcatttataatttataaatttacccccattcttctacgggaaatttaactatttgccactcttgtgacatgtcaattaacgatttaccacaccttgtcaatgacatgtgggccctcatgtgtttatgacacgtgggctagtggcaaatcgttaagcaccactcgtaagagtggtaaatagttaaaagccccttcttctacagacagaagaagcactttcttcttgagctctcatacagcaaccaaatctagacaaaatcaaagaatccccaaatcctccccccaagttcctaaagccccaagcgaacgccatcttctcagaacccggccaccgccgcgccgaggagggcggcggcaacgagcacggcgccgctcgccacggtcctcccagcgttcccagtc

SEQ ID NO: 30923 - DNA, 530 bp, Oryza sativa
agtaccaacgtcagacctttactatgggataaacatgcttttgacatattccattggccaaaaaagaaaattgcccatcatcttttagtaattcacatctttctagttttgcacaagcctctgtttttgttaaattggagatgcccgaagaaatcagagtagtaaggtagctgcacaacattgttattgtcttctacatgaacaatatttacatgtctgatgcctcaactgaagtatatatatatatatatctatgatgctgcataatattgaaattattcattagtgattagtgtttattgagtgtaacagcagaatctgaagatcagtgtatgtcgaaaaaatatgactaactaatggtacaatgcagttactgtcacctatataaacgatatctactacatatcctaaatctctactgagtatggacgtctgatactttcagtacattgaaattgttcatcagagtttattctttattgaacatgaaaaatccacagttcagtacacgtagaagaaatatgacaagg

SEQ ID NO: 30924 - DNA, 553 bp, Oryza sativa
cacttacttcaacttgaatagaatattagacctaactaagaaattcaagtcgggcccttaattaacttgtatagatggaatcaactagatcccgggtagttacaggcttacagaagatcaaatccattctgaaaagattagaggaatgttattcttaaagatattttttattgaaaatgttggaggactacatttcatttcattaaggagaaagaaagaaagaaagttgatatatatatatatatataaaatagtcccccgcaaaaaaaaagatttataagatcacttaggggtttttaccctccatttcttattcctattaggaataactcactacaacaaagctaacaactcttaaagaaccagatttgtacataaactattttaccccttgttgaatggatgatactccatattagaaagacattgtgtaaagtagagtttgtttgctaataaagcgaagataaaagaattgatgctatgattgttatgtttatggtacctcacgtcactacctttcatgtgtagttggcatttaattttgttataaaaa

SEQ ID NO: 30925 - DNA, 3456 bp, Oryza sativa
tactttaataaaggaagcatccatcgaggtacaagcgagagaagaaggcaaacaatcccggctttctctagaactccgttagaagaatgccaacactccggcactccatcaaattcttggaggaactctgatattttggagcactccttctggagctttccctcactttctactaagccaacatactaaaaataaaactacaagtgtgttgtactatacttgagctgaaagttgtgtttgttgaagtatgtgaggtctcctcattttatagcttccaatgatggttagaatagcggttaacccctcacaactgtcattgggacttcatcagggctatccacgtgtaaggtggagatgaggtgggacaggatgggttcggccgacccctgggccccacatctctccaccaactttctccaatagcttacaggtgggcccctatggtggttaaggacggttggtcccacttttggtttcgactgacttttgggccctctgttgacggtcattatcgatcagtttcgactgtcaatattaccaaaatagagaactagtgatgcttgcaatgcataaatatgttagaataataatattccactagtattaggtctactaaccttttgcagagaataacaataaagtggaggagaatcgacatcaactcaaacgataaatcaattggacgatgtcgagaatcagacttatgcatgaatgggccaagaactcagaattgacacgatgaattgggcaaaaattcacaagtctacaaagtgaagcaaaagaggaggtcgtcagccgaagatgggctggtttgggccagcccatggttcggccaaaccagggggttcggccgaacccccatctccaccgtgatgccaaggttcggcatggacgtccaagattgcaccccaatgacggttggagggtacttcggacaatcccccttctacaaccgtcataaccacctctatataaaggcttcactctcttcacttcaacacacacctcaagcaagagctctctcatttctctcaagtttagtttagtagtatctagctggtggaataggaatagagtagaaatcaggagtccggaagtcttcggaagagttcgggtatggctctagtagctttcctttcctcttttgtaagctttgtacttttattagaatactcttctatatacatttatggtattgaaatactttccgagtatatgagtacctactttacattatgttcatattatactgaatatacggctagtttatctgggagatgatttggtgcgggtataatgtttgcttatgcaattaatctttgtcatgaagatgatattatagtagtatctggtagtttaggcgtggtgtctagatcacgggatatcattatttggggttatatgctgtggatgagaggtgggccgctgatggtgacagctcagtacgggtattcctccgcacatgtatatactaagttaattccctggggagggtattcctccgtatttagccccggttgtatggtcatgacgggctgtcgtaagaaactcggcagtcaggggtggtttctcgaagtaccaggagggcatcgaatagagggtattagctagtatatcggttaactagaatgtatgtatactatgtatattagaagtataggaatagattttctttctcttttcttcccacttagcttagataatatattatgacaatgagtagctaatgcttgtgtgtcactctacccttggattattttaacccctgcttagaatatgattatcacaagtaatatataaactattagtcaagttctctctacatgatcttcccacggaataaaataaatacgacacccttggaatactctcgggtgaaatgctacaatggtatatccgtgcgcttgtggatgaactctgtaaccataatatatcagaagtatttctgcgccattactgggaattatatttctagtcatgacgttaagaaataccgacaccctccaatccttgtactagcgtatgattggttaggggttcattttcatcgcatggcgggtgtattttctccttaaatgacctgcatacatatatttgtcaaaactagtagaagtggttagtagtaaattcgtaccactaagttttgataatatgtttgaaatcttttacccaggagttgatggttaaagtttgcacttaacaaccgtcaacataccctaataatcttattgtactactagcttcgactttaaatttttagagctacacatacctagctctaaaatttataggaggtcgaaatctgccaaaattaaacctaaattaaggaaaatttggatactaaatgattgcattttagataccccacttttgatgcaaaattttgtcgtgacacacgaatgcctaggagattggcttagctccagtggaggtgctaaatcttgatgaggttcgggcgtgccagttaatttgatcctgcaactaactggatggaaatatatcaatgatcaaggagctgatcatcaacttaggggctgaacatcaacttagggagacgatcaacttatgaagctgattttgataaggttttgatgaattgactataggttccatttatgtaaattaaagtgtatatcggttaactaatcgatacatctgatagctgaagtccacaataatgataactcatcggccagaactcctatgaacaccgcataaaaaatatcggcttactagaattaaacttattagcaacaatgtaataaatcggacctaaccaagaaagtataagatcaaagataataaggacaacctatttggctaatagatctacacaaacatgatggacatatcgatcaatctaaagctacaatatgattacagaaatagaaacttaggcagaatatcggacctaaccgagaaagtcctaactaagctgatatgattctaaacaacgatgcagttaaagatagaatcaatatatctgagaggcctcacttacttcaactggaatagaatattagacctaactaagaaattcaagtcgggcccttaattaacttgtatagatggaatcaactagatcccgggtagttacaggcttacagaagatcaaatccattctgaaaagattagaggaatgttattcttaaagatattttttattgaaaatgttggaggactacatttcatttcattaaggagaaagaaagaaagaaagttgatttctatatatatatataaaatagtcccccgcaaaaaaaaagatttataagatcacttaggggtttttaccctccatttcttattcctattaggaataactcactacaacaaagctaacaactcttaaagaaccagatttgtacatatactattttaccccttgttgaatggatgatactccatattagaaagacattgtgtaaagtagagtttgtttgctaataaagcgaa

SEQ ID NO: 30926 - DNA, 3977 bp, Oryza sativa
tcgcttgtaagaattcgcctagatatatatttttctaaaaaatcatgagatgcaatcaggattatgatcacctcaagttagcattctagtatttttaaaagatttcttatacgactccttctgcaacccaatcaccaaatgacaacaacttcaccaatgaacactaattcaatcaatagtggtgttttggaggtggaagatgaagataacaatgacttgcaaattaaaagtatcgttgtaaacttgtaaacttagagtgggatataagaaattactacttcctccgttttagaatgtaacactttctaatattgcccacattcatatagattttaatgaatctagacatatatgtctagattcattaaaatctatatgaatgtggacaatgctagaaagtcttacattatgaaacggatggattatatgatatttttcttcaagcacgtgacagtcaagaaaacacaaattagattaagaaagtgataagagctgagtagattttagtgaaaactctcttaaacaccctaccgaagcttgtattggaggggatggttctttgataaatgtttaattacgttatcgtattaagaaccctatattagttctttacattggagatggcctaaggttaacatggctcttaactcttgaacttttacggagcatgatgtttatatattacattaaaatgtactaatacttttattttggtctaaaatagaaacataatgtctctgctccaagattcgtatcgtcccatataactggagctgtagcaaacactcccaagattttggataatatagctaggctggagctacctctatgctcctgaaaattatgttacaagggtggaccaacattccagctccactccaccctcagagtatgagtcgtaccaaatgggccttgttggtatttctcatgatcacagataaatctgaggcgcacggaataccgttgtagcactttcccttaaagtattccaagggtatcgaacacaagtaacatgtgtgtattatctacgatcaagattcaatccaaggacaacaacctaggataaattggctagagagaattcctacgtcttttagttagttaattaagttaaaggtcaaactctatcgaatgctttagacaccggccctcccctagtctgtcaggttgagtccgaccttgagatctatgatgtacccaaacatggagggatagaaaggacggacagggctgtctccacccgccgcctacctcactctctgtggagcacacaacaaacgaaagtaatttctaatctaaacaccacgtctaagttattaattactactctagccttgcacaggaacttccttctttatccagagtccaagtacagttgcacactaagcgacaaactcgcattgataagaatatacctcacttaaataaactaattgttgatggtcgttaagtgcaaactttaaccgtcaaccactgcataaaagatatcagatatattatcaaaacttagtggtaggagtttactactaaccacttccatagtgggatggcaatttttcccatgcgtctgggtatccgcggatacccgacccgatgggcacgggcgagggtgtaatctgcccgagaaccgaagatgccgtgggcaacagctgggtttcatttcattttttacccatgggtaacccatgcttgacccgatacatgtttggtagagagtgaggggaagctccggaaggagtgccccggaatatcggagttcctccgagaaatttatagaggagtgttggagtgttgacattcttccaacggaattcctgagaaagtcgggattgtcggctttcttttctcgcttgtacctcggcggatgcttcctttatcaaagtatgtgttcgagtttctttatgttctttaattagtttatttaagtgagatactccctccgggctgataatacttgtcgttttagatgagggtgaggtcaaactttagaatctttgattatgaatcatttttttaaatatttatctttcaaatatggtgactacatgtatagattagtcttaaaaaaatactttaataaaatcatataggcaaaatttgctacaggacaccgaaagattgcggccattactgtgagacacctgaagatcgtgtatttgctcgtggacactgtaaaaaagtggtaataagctgctggacactcctcccattattttattatttctgattgaaatggagagagaaagagttgtgtaagtaccaaaatgcccctggacactgttcttcctctctctctctcttcttttcttttccctttcttcttcctcgcagcggagcagaggcgcgaagaagtagttttggaacagatcaaagcgaggacatgaaatttgactgtacatgtcacacacgcagcccaacaagtcgatgggctccgtgagatccttgctccacgactcacgcgctagcacgtgcagcctcgccaggaagatcgccaacgccgtcaccatggacggcaggtagcggtggaagtggaacccgtaggtcagcagtgtcccatcggcgaaccgatgcgccgcctccttcaccagcttctcttccttcccctcgccatagtacctcgtgaagtgctcaccaaaatgctggatgaggtcggcaaagcttggtcatcgacaatggctcgtagaatgtctcggtggcggcgcttcacctcagatgaatggcgatggctcgatttcttcaaaggactgccatgcatgcatgtctttcgtgttagagaggtccatgcaattggattgggactcactagagagggagaaatcaaagatggagctcggcggccggttgtagaagatgatgctgatctccaagatcattgcgccattggatggggtacttgggggtatatggagagaggtcaacatgaagctgatggcgtggtggtttggcttgcaacagtccactgcagccaaaacgacaacgatgtcaaggcggcgacgcgcagagtgcgctccaaggccggcgatgacacgtggcgttcccgtcgatccgctacacgagaggatggaatcaaaaggaaaatcttcggcatgataaggtgagtatggaacggtggtgaggcagagatggagatagttctacggtgatggcgggtgttgtcttcttcatggcctgcgacagatttgagggcgacgaagaggttgagggcatcctctctcggttcacggtggggcggcggcgggggcgcatcgccggggttcacctccaacggcgacgacgcacgacggcttggccacggcggagctcggtggcggcgcaatgagaaagagatgaatgaagaagaagaacagagaaagaaagattgacaagtgggcccatgggcaaacttgtctttaaccaaactttctctctccgtttccaccggaaataataaaataatgcggctggtgtccactagctaattactactttttacagtgtccacgagaaaatacacgattttcgagtgcctcacagcaaatgctgcaatctttcggtgtcctgtagcaaattttaccaatcatatatttgttaacacttttatacgtattataatggaaaataatggtcaaagttgttttttggagaccgtgtccttgtccaaaatgacaagtattatcaacccagagggagtatattctcatcggtgtgggttcgtcgcttagtgtgcaactgagtgctctagtactaggtctttggatagaggaggaagtttttgtgcaaggctagagtagtaatggcgaggtgtataggttagaaattaccttcatttgttgtgtgctccacgaaaagtgagataggcgttaggtggtgacagccctgtccatccttcgtatctctccatgttcgggtacatcatagagcttaacggtggacttgtcctagcagaccatgggaggaccggtgcctgaagcatttgatagattcttacctttatctta

SEQ ID NO: 30927 - DNA, 948 bp, Oryza sativa
acccaccaccctaaacctagagaaaattaggattatgccataaaaaaatggtttcattggaataccatcagttcaatgggcttcgataaaatatcacattcatcttgggtttgtttgctacagtacaatctcggacagaaataccactagacttttttctcagcttcttcctcctcacccccaccgtctgtaacatcctgaaaattcactattttctaatattgcatcatgctgattcttatgttcttaataaccttttaaacctaggaaaatatatttagagagacttccaaatattaacttgcgtagaatctctctctattatttaaaatctttcgtggtttgtattctaaaattgattttattaaaccaaggtatttgctttgatttgattctgcaccttaaaccttcttttgcaaaattcctttttctcaatttaattaaaaacccttttatgaattatggtccaagaaaccttcccatattgcccttgaacctaaaccgtcgtaattccgattccgttggaattaattgttaacctatcctttgatcttaaacctatactttgatgttcgatctaaatatccaaattcctccttctgatctagccgccaatttaattcatgtggcttgatttcctcttcgtcacaagaacagtattattacaaatattgtgaataattgctcttgtgctaagaaaatagattttatcctcatgcaaatctcctattagccacaaaatatttctttaaacccataccacccatttgtggggataaaatcctatttattccctctctttatttttcctaccacatttccagaaatacagagccatattatttatggttcctatttaagtgcattaaacaaactcccactccaaaatattgcactcaaacaaattagaacatctttactttgaaattcatctccgcacataaatct

SEQ ID NO: 30928 - DNA, 519 bp, Oryza sativa
ccataataattacatcttcttgactgcagtacatatgagttacaaatataattcaactgctattgtacgataattacatttgtcagatttttagggggattttctatcgaatgttagataggcggtctctatttctttttaaatctaaatgacaatgatagaccgttagaaatatatgcaatgccttcctctcatttgaaatatacacaatgcctttcttccaactgtaccaccacccctctcctcacctcctcttacctcccctttactccttatttttatagtagttgagataataattttaatttatcataataaatctcaaaaaagtaacttttaggttacccaaacaattattattgttcacgccgttatatttattacaattaaatttctttggttatctctattttaatttataaagaaaataaatattattttggataggaccctatgcatcatatttaagggaaaaaagaaccacaacatatattgtaatatcatctatcgctgtacaaa

SEQ ID NO: 30929 - DNA, 593 bp, Oryza sativa
tcgtatgatggatcaagaaactagttgcaaaaacggaatgagaaggaggagaggaacaagaggagtggtgaattggcgttcccgtcatctttattcttgttctccataaaaccctaggttgtggtgctccggatcatgcttggtatcgtctctttattgttcgagtcttttcatgtatttgctgtgacatgtttgcatgaaaggatgggattagctacacagtcgcacaacatgatctcacttagtcatgagtattgtaatatgctgataagattacttgtgtttagaaataatgggctaattaattactagagttgttgaccattggttaactacttttttcaagcctatccctacatgtcagtcaattgttgtatcataaacttaatctatatgttgatgcttctgcgatgtttttttttctaggtagttgttaccgaaatttgcttgttttggcacttatgtgtggttgtttagtggcatctagacttatgtggttttctggggtgttacactgataatcggccttgagatagccttgaatatgcggctagacacactctatatatgatgattcacaactgataatcaac

SEQ ID NO: 30930 - DNA, 528 bp, Oryza sativa
taaattaactattcacccatttttaaataaaggaatttttaaaataaaccaaaattcaagggtgctacagagagtgctaattaatttatgatgggagaatttaaaatcaagtgtgttaccgccagagaagaagaattattacatagctttgtcttctccttgtggcggaaaatgtattggagaaaagatcaaaatctagactaggaatgagttctagggtcgctaaccaaatgtcaaatctaaaatttaacccacgtgggctacgcatactcgtgtacagtcaagccatccatccaccgttgatgacctgcttaattatcacgtgctcttccgtcttaaaataagttgattttgacagttaaaaatttggaatttttaaggctcttacctacccactctataaaaaaaaccattccttcaatactccttgggatgcaaagaatagatttattttttacaatatagggagtgtgtattacacatgtgtaatctttttcaaaggaattgaatggtgtataaatgtagggt

SEQ ID NO: 30931 - DNA, 587 bp, Oryza sativa
attcccctttctttccccccaaacgacgccaacactgccgccccctccctcctttgtacggtcttgggtgttctctcctctccacgacatttccactttcatagatctgttgtgtcgtatgatgaatcaagaaactagttgcaaaaacggaatgagaaggaggagaggaacaagaggagtggtgaattggcgttcccgtcatctttattcttgttctccataaaaccctaggttgtggtgctccggatcatgcttggtatcgtctctttattgttcgagtcttttcatgtatttgctgtgacatgtttgcatgaaaggatgggattagctacacagtcgcacaacatgatctcacttagtcatgagtattgtaatatgctgataagattacttgtgtttagaaataatgggctaattaattactagagttgttgaccattggttaactacttttttcaagcctatccctacatgtcagtcaattgttgtatcataaacttaatctatatgttgatgcttctgcgatgtttttttttctaaggtagttgttaccgaaatttgcttgttttggcacttatgtgtggttg

SEQ ID NO: 30932 - DNA, 554 bp, Oryza sativa
  unsure (1)..(554): unsure at all n locations
tcctgcagcccataaaaatcttcataccaatgaatattgtctaattgagcgtgttttaagagagtgtctttttttttgacgaatcgacgagcgccaatttcattgaacagagcaaagcaagagagtgtatttatgggtgtgtgcaattcattttcatatgtaataaaattaagaaatctagcatataaaacaccagattcgagacaagcaaaatgttaaactctgtatggttatagcctaaacccatgaatgaaccaatgtcagcaatgattttattaagataaacagcattatatgcagggtagattttgttccctccaatcgacgtgccacagcaaagacacataatttggtggtcccagaaatcaaggggcacaataaccttattgaattgggttntnacaaatggcagattaatttgagtatacttattatgttgtacacgcacacacttaattagattgttgtcatctagtactagctacaacaactcgatcgatctcttacgaggtggatgagacatactgaagataaaaaaagaaaaatactactgt

SEQ ID NO: 30933 - DNA, 526 bp, Oryza sativa
cacgttgtattctttgaaagaaaatgtcgcaaactgtcgtagcaagctgataagattttcagcgaagctgtcatagcaaacggcggagccatgaatttttgtcatgtggggccgactattaatacttcacattttaatgggatcatttatgcaaatcttaatggatttacacatgaaaattttaagactctcaagggtgtttgtgaaatagttgtggggccagccgaccatatagctaataggttggctcaaacactagttataaggggcttgagttaccatgcttgcttcaaaactctatgtaaatcttttagaaattatataaaaaaaataaaatatataatttctaacgtgttaaatcagccctaggcccgcaaatattttggttctgccgctgactgatcgtagcattgttgtagttagtaggtggtgagagagacataagacctgtttgtggagattaagattttgatatacagctggtgagaatctagagaagctatgaaacccaacctagattttgact

SEQ ID NO: 30934 - DNA, 609 bp, Oryza sativa
tttatatatggggcaccaggtatatatacactattttaagcaaatatatgtatgcagatgattttgaaattataattttcactccactggttttactactagcagggctcgaagccgtgaagcgtaaccgaagcgagggtgggttaattttatggccggccgtcatgactcggcgtagttcgtgatttatccaacattttgtagataaacagatggaatgagaaaatatatgcatgcgtacatctatttcctatctctaaccatggaaagaaaataaacaccattttattttaattcttgttagagaaatatggctgaacatatgtcaaaactagcatatgtgcatgctaattagtatgctcaattaattttgtttatcactatgcctgtatcactactagcacggctcgaagccatgaagcatgaccgaagcaagtgcttgtttaatttatggtgaattatgcaatttgtatccgtgatttgtatccgctcgtagaggaccgaacctgagagcgagaatctcgcctaggcttgtatccactaacgggaccaaatcagagggtatggtatgatgacatgaaaagagtatgcatggaagtcactgctagg

SEQ ID NO: 30935 - DNA, 698 bp, Oryza sativa
ttctataattatatatatatcatctataagtccaattgaaatctaataaccgtgactaaatgtgtgcctagagaaaaaagtagcaaaaaaacatgttttggttttaccaatattttttttatatgggcatggagataggctaagccaccaaaatttggtcagatattgccattcaaattttgtccccaaaagtttggtaagtctattgcctacctttgccaaatagagagagcacacaaattattgcctacctttgccaaatagagagggcacacaaattgtggtcaccagccaaatggaggacaaaaaagcatgtgcattgccaaactttggtttgtcagcttagggcttaaaatcaaacagcccctaactcattgcatatgtatatactacttccggtatctacataaaaatcatccatacgcatcggcacattgccacaaaaatggaagattgttatctataagcaaagaatagtgctgagcacgcaattaccaccttttagagcattactgttttacgataagcttttcacgcattaactatttcacaaaattgtacaggcgcgaataatatcatgcagaaccaatccactaagccattaatagcaatcagaatatctgctacatttgcatccttcatatttggggcctagcaggtttcttcatgctaattggctaccaccagggctgcaggaa

SEQ ID NO: 30936 - DNA, 636 bp, Oryza sativa
cgccactagtaccatatggctgtgatgcaatcatgtaaataggagcctacttttcttgacaacactaatcaattgacctacttgtacaatagcatgcccctaagggcatgttgcatatgtaccctttttggagttcccatgtaggggtgaacaaaacgctcaaagctcgtggaccagttcagcttgaactcatgttctaaacaagccaagccaaactggctgtttagctcgttagcttaatcagccaataccaagccagccagtttgcaagctactcattaagcatgtttgttaaaagaccattctatttgtattacttaatgtcagaattacttcatatccttttatatttaataaatattttactaatatatgataacttggtgctactattttgctaatatatgataaattgtaaatattaaattgtacatgacatgtttgaacatttctagcttgctaacgagccagctcaagttagcaaaataagccgagccagtcttttagctcgttaaggttaatgagctgatccaagttggctccttatcataatgaacctgaccagccaagtctaacgagccaaacttgctcattatccatccctatttgcatggctttttaaggagaacatcaagt

SEQ ID NO: 30937 - DNA, 578 bp, Oryza sativa
aactgtgaaaaaagaagtgaaaactaactgccataagaaacggagaaattctatcagatcaattaattcagcgtggctttatacggagtattgacttcaatctgcaagaaagtgatgttctttagcagtatctgaacctgttcaagctaccaatacatgatctatcttcactgaagaaaaaaagacgaggacaaagcaacaaaaatgtgcgagtagtcgagtagatcatcacggattcaggcatggggcctctcattcgggatggtggccacaaggcttattattatcctgaattccttgatgctatgcattcaattattagcctgaggtgatgttgcaacctcctgcagttaacatctctaatttcgtacaaattgtgcggaatactaatggtgattagagatgttaattaacatctcaattcggtgcgatgcacgcaagtctggccatcttaatggcttaaatttaatccaggatttttctttcatctttgaagcattcaagctacaaaatggtatagtgtttctcctgttcgatcagagaatcgatcgaccaatttgtttcatgttaacatcaga

SEQ ID NO: 30938 - DNA, 889 bp, Oryza sativa
aacacgtcggttacaggcacatggatggatggatcgatcgagcagtagcctagacaattgcagccatgcttgcatgctacctggtcgatggatggatcgctttagctccctttagcctttacgatcagatggcgcccacgaattcaatgcgttcacaagccatctccttcgctcccgcgaataattgcgatcgccctcgtcgccgtgatttggacgccggcgagcgatcgatcgatcgagcgaacgacttatttccgcccattcacacctgcaaaacgcagcagcaaacgcgcgtgcgttgtactcgtttcaaaatagtttaagtactccctcccaaaaaaaagaagaagaagaagaagaagaagaagaaaacttctgactgtatattagatacgaagttggtttttttacaaagataatattaattaaggttaatttttcgtcgaacgctaaattaatattagatcaaatgatttatcttaagtcgttcttaaattttaaattacttagatttcctttcaaaatatccgattagatcgagaatgatgattggagtgatgagaatcatgggaaccaattttcttctttttgtcatgtcccccaataatggtattctagctggttgcagtgtgtatttaaactctcctttttctaacctattgacgtgtattgtttttgcgtgtttacgaaaaataatcatagggaaaaaatgtttctattacagtataaaatttaaaattttatcattttaaaatggatggggtactgtactgtgttgtggatggctgcgatcgttggatcgatgggtctcgctctcctctcccaacccaacaaatcggcctcttcaatgctcggctttcgcttcacggacaagttgccaatctacgct

SEQ ID NO: 30939 - DNA, 3680 bp, Oryza sativa
taattgagtcaaattcagctaactcatccaatttcatcttatttgggaatctcatatggaacactcctttctcctgcattctggccttccaagtctagttccacttgaaatgttgagtgaatccttcctccagagcctgctcagtaagatcacctccccacataattgtcacaatagccaaagggttaacatgttctttttgcactatacccttagcactctgaatcagcacacagcccagacctggagcagcacatcccactactttagctacaggtttcttctgattcttcctaaagcaatcctctgtcctatgagtctcttttgcacagatcatacagaacactgacaatttgcaacctctagacaaatgactgtaactcctgcatttagaacaaaaaatcctctgctgggaatgggattcaccaacctgatgcttggactcatctcgattttgttgctgatttggctttgcttccaatcctgaactgacagaatccatcttagcacttgattcctgtagatttggacctgcttccttccttccttcagtttttagtgtgtccttcccctgcttccccttctcctcagcagcttgcagcattttctcatgcttcgccttcccatcctctactcctcaattcagatctagaggtggcggatgtggaccttgcggctcctgtctcccaacctgcaaagggcggaaacgtccccttccccctgcatctcccctccagaatcgattaggcggcctgaaaggtggacgcggcctccatcctccgccttgatttgccattggagagccgcttcttaccaccttcgcgaaacttcagccgtcccctcgaacgctcgccgtccactcccgccgccgtccaccaacgcctacccttggtcactcctccacttctctcacctccccttgcgtctccaccctctccaatctcctccacccgccctggaaccctagctcctcaagactagctccccacaggtggtgtagaaacggagtcaggagagtcgactcaaaggtgttcgaccgatccccaaaattgccattgttggatctcgacacgtgttgcccctccacctctctctcccccactattggatcgggctgaaaaccatgggcttcctcccccccccatcaaaaactctttcgcgcgctgaggagcactctcccaactcccgaaggccatcccctccgccgcgaatcaccgccggcgatcgtcggagcgccgcgggtgactccctcgtcacctctcctaaggaaatcctagccattcggtcccaaacggtttccaaactcacaaggcaaattgtccaactaagcacgtacagcaagaaatataacgtgtactatgtactgctgtttaatgtacgagtataatactattattgatgcatatatacttcggtttttagtacgatctcctcgcgaaattacactgttgactaccttaatttgtccttagcttgctctggaattttttcaggctgaactgacccatcagggtctttagtggcacgcaccgtactttgtattagcagggtcctaaatggcggccaataatattgcatactccgtacttgaaacatgaatctcccatgatggcattggttatttcagtgattagttcataattgagatcgtaatggccttcgtgaaccaatgttcaatgttcaatcctggggcacggcgagctgacgtccaccacgacgtcatcctctttttaaacgctcaacctttgatcaaagtgagtttatctcacaccacacctctcagagcttatcaacaacggaacctgaacattttttttcctctatggagtagtgtaaaataataaatgcactctcacactgtgacacgtgttctgctcccgggccttaggtttttttcttagtgatccatcattacaattttctttttcacgtacggcaaaatttggaattatgcgtaactgacgtatataagcaacaaagagaaaaaaccaaaactagaacaacaggcactaagacgtgaccgtgcttgaccaggtgggaagccatttaagcgcatccccacgagttttaatttctgaagcgattcaatttgtccacgatcgagcagtagctgtacgggtacgtggttcgctgttcagattaatgttatttgcgctttaaaaaaagattaatgttatttttaaccatatcatttttcgataaagttattaaaaatatgtctatatttaatttattattaaactttgacaatattataaacttaccaaaaatttagtaaggtttattttggctgaaattggaacagcctctccgtattgattttttttttcttcaccccgttcacgtccagaagcacaaattttgacgtacagtcggcgtctaccccgtcgtcgcgtaccgagtttttctcccctctagttgacttcagttttcccctgtcaatcgccggcctgtcgattgatctgtgatcatgactcatgtgctgcggactactggtacaaggtaacttttgatttttattctggttctaattaattggatggttagaaaaaaaagagagagatacatcggactctttagaattattcttttgaaattgaatataaaaacacacatgttagggataaatcccattattagaacttgggttaatagactggaataatgttcttcttatcctgttttccttatcctgtttggttttcttttttttaagttggtttcttcaaacttttaacttttccatcacatcgaaactttcttaaacacataaacttccaatttttccatcacatcgtttcaatttcaactaaactttcaattttggcgtcaactaaacacacccttaatttagactacactcttctaaagtgctatattataataattggttgtagctctcttgagcaaaggccggtatgtttcatttcattatcttaaaaaaaataaaacttgggttaactaatgtaatacaaactaaaacgtcctcatgataataccactctcataaaaaaaggaataatgatgtaattttcggctacacatgaatagaaagagcgtcaagagacaataacctctcctcactctcctccctctacctgacattagcaagggactcttcacaaagaggagggtcctttgtcctatttgttccaacaacacccatctttgactattagttgaatatttaatttaattaattttgaaattctaaattaatatttagcaagttgtagtaaagtgggcgtagttcaactagttagatttcttatggtgtaaacagcacactcggtttcaagtcctagacttgaaacgagttctctcatttatggccaactattattttagtgataaacgacgtacccatcgacgtatgtgtgtttataggggaaagtgcgtgcacgtaatgatatataatatgtctttatcatattattgaggagttaatattgaaaatctcaacaataacaattctgtgcaacttacggattaacaactaataaagctaaccaatatattggaaatggtaatcaactctatcatttgctcttcagcttatcaggccctgtttaaatcctccaaaatttttgccattttgtagcactttttgccattttggatctaaacactagtagcaaaaattggcaatttggcatttggcatttgctagtccatagtag

SEQ ID NO: 30940 - DNA, 688 bp, Oryza sativa
tatcaccatcttctatgggatcatcaatgtagccaggataagtatatgcatacacatatcattaggatttgaacaaatgatctgcatctaccacaatcatctgtgtacaaatgctattgctgatcgcacctttgacttgcaagtaattgaccgatgacgccaacacagaaaaaaaagtgaggtacctaacgaatggaactatatccgctatgaaatttataataaccaaatatatatgccacaacacactgagatggataacatggcgaaagcatcacacatatgtaatcattacaggattgcagcaatgtgtgaacaatgccataaggacatgatttattaatgccctcactaccaaagaatggagaatacaaagcattggctacagtaattgaactcaattctaccgaatcaatagcaaagcgcttgatttcagtgcagcttgtgtgaagaataatgggggaaaactactactctgtagcttgataaatttaaaacccaaactgatgaatcaaccaggacagtctatgtgtgcacggaagttcactgtaccgaatgtacaactgaagaatagagcatacattatgaggaaaaaatcaacgtaaccacaaattggtgtcgaaagtgaaacatagatttaaaactcatccaatgaaggttaataggaacataccatgcaggtaaaaaa

SEQ ID NO: 30941 - DNA, 4109 bp, Oryza sativa
agaacagagaacagaatgacccgggttttttttcctgggtcggccaaagaaaggcagatcaaatttcattaagaatagtttggaatgaaacaaggtaaatccatgaaattaagtttcgatttgaaatgttcctgttaatgaattttatatcttccaaacaagctaggttttgaaaatgtctccatgtttgtataacaacacctcccctacatatctctaaacatggttttatggtggtttcaattagtagatatttctaggatccttagggcacaagaacaaccccggccaccacagaaccatctcagatgtgcctgctccagtgctcacccctctgtctcactcctaatactacataatggctacagctctgaaccacaaacccatcaacttgtggacagcaacagatcagaccaaaaccaaaaagattactcggtctccattatcacggccaattagagtaggatatcatctaccgacggatcaataattgagtagtctatgtactattatacagagcagataagagcacaagcatgcatagccagtggaatgatgaatctggtttgcaaggtgaaagtgcttcgcccagtacgtatacttaagtgctctccacgaagggaactctgctctgtaaagcaacagggcctgaccaaccagccatggatctgaggccgtcagcttgtcaattgccaggattaaattggctgcatgatgaactcccagcaagaggaagacaagtcatgtgattgatgtttcatgggcttaattacgtgagaatgtgacaattcacctactatttgacaacatccatttttccccctcctccaatctctagctaaggcccagctcaaatatgcagtttgtggctcggaggggtgaaacattagcccataattaattacgtattaactaaaaaaattatataaacacactgtttaaccgtttaataaaaatattaacagaaaatgagaaaattatcgttttgagttactcaaaagaactaagtctaattccccatgcgatagcaaacacatcgaacctttccaaccaaacctcgaatgccaaacccacaacaatccgtgcaattatagggagagatgaaaagagtgagaagcacttttgtgcccacatgaagcgaccagctttattggccagcattgacaaataatcacccgtgtgtggggggagataagatcgtctttactagtactttgattttctttcaccgtcgctgtgctaagaactaatcaggccagataaaaagttgatcgatgcagtttcagaaaaacacagcaaagaaaaaaaaagaaaaggctcgttttgtcaacttcttccagtgccaagcatctgcgtgtgacgctgtcagccaagcatgtggcaattgacaaaaatgacaaagtcgtgtactgaaaacctcgaaaaattttgggttttgtttggttggtgcctgatggaacttggaagccccatgtcaatcttggtggtgggcaacgaaatctggggtttatttggtaggtgttagttttttctttctttcttggcccgcaaattgacctgacacgtttgctaaaaccctttttgatggccaaatcactggttttaattggttttggtcccaaaagatcggcacctaactatatgtctctttctcattaaccgtgtcatatgggtttacaaaatttagtttggcctgtgttactatgtggttttttaataacttttttcgattgcacggaagatgcacgtgcacaaatatcctattacctaaattaattatgttgagttttatgacatactactactcaagtcttattgaataagccctgtaaccctacattcacatattttgtaccccatgtgttgggttgttcatgcatgaacaataagcactttccagcccctttgaaacacatgaataataaacacagaattttgatataaaagcatgaaaaagtggatacaaaacatagaaaaaacataagtatattgtttggatagaccgtagaaaaaaaatatagaattgaatgagggagagagagattcaaaggaaattttctaatagattggagctcttgttaacacctttttttcccctccaaaatctccgtgcattgaacccttcctaagaaattttacaagatttgagaagtttcgatactttgtttcaaacggctaaatagaaaaaaaaatccatataggattaaaatcctataaaacttcttcacaaatcctttgtttcaaaaaaggtccatcgaccattgatgtcagcatgcatatgcagccttgtgatggtgctatatatatatggacatgcgtgtattctttcaataatacaaagatctacttgtcaacacgtgaatacgatcggcaagtactgtacagtgaaccgcaagtactgctataccgttgtacaatagtattattactgtaattaaatttatcatacaaacggtttctatttatagtggacgctggcaaaacagttggtccaacgcagaattgtctaaaagtagcataaacgaaatcatcgtagttcaccacaacgacaaatgaagccttaattggttgaagggacagtaggtcaatttttaaaatgcaataattacggctacagaaatcatctttttttaaaaaaaaacaactacaaaaaatatctttgcacagagtcataacatattttcacataagagtgaacaaaccgcctctaacttaaaacctacaaaagtactcaaacattgacactcaatctattttgttattatgaaccacacgtgctctttcgtgacccgccattgacaaggttatataatgcttctcttttttctttccatctcttttaaagaaatgaaaagaaactcttgtgttatgttgtgaatagcaacataggcgaagttaggcgtaggatggttatggcttgaaccccataatttcacgtaaattatataaaaacactactcttctaaaaatagttattactaacattgagcttaaaagtgaagtttgatttagattttttttaaaaaaaaagcaaaacaagtcattactatataattaatagaattttaattattataaacttgaaatatggatttatttgatttagaaaactaaaaaggtatcgtttaacagtttaaaaacattcttatgataaacaaggaaatagcaacatccaaactctgtttaacagttttaaacttagctagcctaagaccctagtactagctcagtcataggcgtaagtttttcatggctttgcccctagccaccatatagagcgatatgaacatacttcctacgtctcataatactggatgaaatatttcatagtacaacaaatttagatactatgctactatattatgggacgaaaagagtatgatgcactattagcattgtggctttgtaaattattgaagtattgctatgatagccagtagccactatacgtgcacatgcatgatgcataccgtcctcccaccatattgggctcacaaagccagcttaacttagtactccgtacgtatcaccagtagtgctgacacctgcctctactccgaatttactgctactccgtactgtacttatatatgcaacgccatgccaatcaaaaaggtcgatcaacagagctaccaagacataaacacggtcgatgattacgaggatatagctcgaaacacaccgcaagatcaacgcccaattatcttagaggttgtttgggaactaggaactaaatttagttccttcagggacttatatttttgtgagagagactaaagtttagccccactttagtccctccaaccaaacaccaccttaggcacgactcgtccaccaccaccgtacttgcattgccaatactgccatgcgcgcacggggcacccgtacgtacgtgcgtgaagcccatgaacaaccaaacaaaccagcaccgaaccgcgcgataaaatccaacacaaacattcgtagtacatagtacttaccagaggaaaccttgccgctgccaacgtccacgcgacgctcgacgtactccgccgcggcgccgtttggcgcccgcgctctccgacgacgcacgcacgcaggcgcgcgcgggcttagagtcgcttgcgcta

SEQ ID NO: 30942 - DNA, 508 bp, Oryza sativa
ttgttggaatatactgacaactcctacgggagggaggacctaggtcgactattttagcccaaagctaatgcggaatggacaaaatggtactcaaatgctggaatcgaccggcatgccatgatattgtatccggaaacccgcttggcttctatgaaccacattgtgcttaagagacaattccgatcctccgggtatgagctctaaacatgaagaagcatagaggttttgtcaggaagcattcatccgctacccccaatctctatacccttacggcctacactacatacctaatataatagccatagaacataacacataccagcatatgacacagcaaagaaagctctccatagaagccgctgaagacgaatttacccacagatgcgcatgactagaatatgccacatcttatactatgccgataatatatggcactaagggagtgccttacaaccaaacgaggaacttggcctttaaaacatcaaactatacttgctaaaaaataaca

SEQ ID NO: 30943 - DNA, 1845 bp, Oryza sativa
cttcggcatcacgcagccagccgggcaggtggtgccgcctcgccggtggcgaagttgggggtcagaattcagatccccgcgcccttgacagtttccataccgaggcgtggcctctgcgcgcgcgcgaatctgagctagatcaccgcgcccttgtcgattttccatatttggcgtggacgggcgcgtgcgagatcgcgagatgcgaaaccgacgaacgagtctcgtctcgcggcggcgacccggcgcgccgcacgcgggggcaatcgactaagagagagaccaagagagttaatgccccataaattaagtctttgatccgagaaactaatcccgtgtcaactcttcaggggatgcgattaccgtgcaacccacgtgcaacatcacggttcacccccaattcaacctcgaagcaaccgccttagctacctgcttacacacttcggccagaaaaatcgatcgctacagctgaatttacgagaaacctcttgttaagattgaagtcgaaatttaggggctctttgaatcatagtaatagaaaaatggaggaatatgataaacgaaaaattatgatagaaatgtaggtagaaatcagagaagtgcaaaacatatgaaaacacatatattaccgtttgattggattgcaggagaaacacacgaattgaatgagattgatagactaagagaaaaaattcaagaggtgaactctggctaaatttcttctaaaatctatataaaattatctattccacataaatttcaaaagatatgatatgatttaatcttttgttttaaatgcttttataaaatttttttggtatgattgaaatcatccaaaatttttatatttttctccaaataaaaaaggccctcagaaagttctaaacgttgggtacagaactatacagtgcccgagacttttcgtctagggtccagagattatgcacatgtttctcaggcacacctgcatgcatttgattggtaaaccgcttctactcacaagtcacgtaaagagcaggtacaaaagagcagactacaagctagctataagcatattttgagaagataaaagagaagagagaagagtagcgggctatatatttgtagccaactacaacacacagagttcaagatgcacgtgtgtatgataggtggggccaagtctgaattgtgcattgtatgtttataggtaattattgtatgaattggctactaaattagctatagatgatttggagccagtagtcggctatattagtattaaacttgctctaaacagtttctactcctgctacaccataaacaactcacaagtcgcatctgcacagaaatttactccaactaattgacttgctcattgcatcccagttaggtcttcatcacacatgacacaggattcccatgacacatgcatggtggtttcgagatttctcattgtctgttatctgaaacctgaaggctgaaactctccacggccatggagaggaccggcgcccacggcggcaaacgcttgctgcctcgcctcctcttcctcgccgccctgtcggtcacgccgtggcttctcatcttctgcctccacttctccgtcttcgatggcgcaccgccggtcagctcgccagcggcgcgccagtcgctcgtcgccgtcgtgtccgagggcggcgaggactcgcagcgttttctcctcgagcaagaggagcagctcaggaggctcccgtccgcacgcgacgtcacgacgacgacggcggcggcggtggctggggacgcgcacgcctgcgaggggcggtacgtgtacatccacgacctgccgccgcggttcaacgacgacatcctccgcaactgccgcgagtg

SEQ ID NO: 30944 - DNA, 4003 bp, Oryza sativa
gaaaatgctcttggaattattgagagcttcgggagacatggcccatgtggttaagagaatgtgcgaaaaggggattgatcactcgtcattggagagagaattttgtcttgctggtttaaacaacgagaattgcaatcattgtaaacacagaacatggaagttttcattggagccgattccctattttcgttgtgtcaataacatggttgtttttgcagatataatacatagttctaaagtatgggcatgaaacggaattgctgttcaattgccgacggcctgaaaggagtacacattcattctagtatatttctactctaccgtgttccgtattggtacatactaattttcagtttgttctgatcaatgttcaagtatgacagcaagcagttttttccaccattttcatcttttagaacaaattaagctttaagaaattcagttaaactcaaccatcatatatgaaagaaagaagggataacacaagtggtggtcttaatagttcagtagtctgaacaaatggaattttactaagcggacacgcacggttaacgccaagattactttagttgaatactccctccgtccaaaaaaaggcaaaccatggattttcgtgttcaactttgactgtccgtcttatatgaaaattttttataattcgtattttcattgttgttagatgataaaacatgataaatattttatgcatgacttgtctttttaattttttttcataattttttcaaataaaacggacggtcaaatattgggcacggaaatcaggttttgtcttttttttttattttaggacgtagtgagtatgtgtaagtagattttagtgaaggcaggggtagagatgcaagcgtgtcctggtgttaaacaaatgattgaccaaaaattagtatgctattcttatcttgcaggttgaatggaacttttgtcagtgatcctggtggtggagctgtagcctgtagggactgtaagattctcttccaggtttgataaatagctcccaggagtaaaaagtgatatgagaatcttctaatcttctgactcaacagtatgcttagctactgcaggatctttggcggtagtgagaacttctacaggtaaggttctaatcatctcctgaatcaactattccagtgaacaataaaccgttagcacttagcagtaatcttgtgaaacaattataagctgtactttgtcaaagcttcatgtgtacattatatgtgtaaagtctaggaaaatatatcactacaacaacactagcaagcagcaaccgaatttgcagagtccaacgagttataaatcgttgtcattttcacctgctgtgttgtcagagtccgaaggttgtgtttagtttagcgcaaagtttagattttgattgaaattagagatgatgtgactaaaaagttgtgtgtgtataacaggttgatgtgatggaaaagaactgaagtttggatccaaactttagatctaaacacagccttcattatgaaggaaaattcatggagcaagtttttttgttactttattcatagagcaaactttgtattcggggtagagaagcgcgttcacagtatacaagttgcccagacccaaaccaattatctccatcacatggaagaacctcctgttcttttgatgattagattcttgagaacgccatgctttggtttcctgttttcatgaccaggttgtcaaatttggggatcttaaccaacaggggttcgcttcaaatatttttttcattgtacgcaataatattgacctgccatctagaaaaaatactgaatctgaccattaacagaatacgtacataatcttgtacttgtaaggtttatttttggatgttttgctctgaatatggaagcagcaatgcctctgacaagggattgggagtgagttactacttactactacagtaaacgttattctgttactactacaatagtttccaagaccaaagcaagtccaagaatttcaattagcattgccctagacatgtttctttttaaaaaaagatagtgtgatatctttcctttttgtgcttggaaagcatagctatgatggcgtgattgatgttacgctttggtggtatgaatatgaagctggcatgatctgaccttatgcttgctcagctatggcattattttacctgatcgtctgttctttttctcttgagggacatcaactaggttgcacacatcaattaggatcataacaagcagtaactggagtagagcagaagcagcactgtatatcttagggcaccaaactaagcaatttcagtttataatattccatttagtattacaccaaaggttttggaaccactatagtaacaactacacaacattgagcacaagccaaacagataagcaactgcaagaacaatatgcatcagcacggtataaactataaagatacacatttctcacacaattcaccttttgctctgtcaaatatgtttggttgtcatgtagcagtggcaaatactccatcctactagtaatacttttgctctgggggacatcaggttataaacaagcactgaaaagtacaaacagcaacaggacccttgtcctcccatcaaaaagtcagcccaactgacccaactgtttctacctttatgaagtgtactatcctgcaaaaactaatcctttctctgtaggtgaattacacaacaaacaacatgatcctaacaattactcgcccaactctgaaccttcccatgttagcaatggaaacaattattggacccacctggcaggcatacatgatacggagtataccaatggattctctgcaattgcagctttccgagtaaggtaaatccagtgtgtagtagttactgaagagttatgtagcagctcattcatatgacaatctgaagtccctgctgttttcagtcatacgacacagccgttttacctcttgtaattcagttatgtaagatgcatttgtgtgctctttgtttggctcaagcagacacaaaatatgatttatgaagaggagtgagaagatagaggcaacaaggaaagtgtaagccatactagccggtggccgaaattcaatcatgcaggagaagatgcagccaccaactgcaacaaatgcaggcacccttccgttccaagttccaactcggttgaactcggccttagcttagcttagcttcgctagcccacatgcacgcacacatggccttccatcttctctcgtattatctctcctctccgttttctaattgcgacttggcgagagacagcgtggggctaagatggggggccatgtgaagtgcctccgctttgcagcttctgaaaattctctccgtgccggcagattattgagccattattaatcgtgtggcattactcatcgatcactagtggtttttttccttcctgcttgaatcatagttcaaattgcactaatttcagctaataaaatatggtcatattccttgatatctataattgaacaagggaagtttccaaagggcatcaccgtttgttatattcctacatattcctcctctatggaaatgcaatgttagctagtgaaagtaacatgccaataagaaactatgacacgataaagcaggaaaatgtcatttataagtacttatcagttaattagtattccatattgttgtatgtttatattgtcattcggtcatatagagtacgagcaatagccagataaattaaaagtcgcgaggatgcgtcgtctcttaattaatctcttaatctatcccttcattagactgcagtatatatgctggccacatgcaagcgtgttgcttttgctgattgttgttcggcaatatggctagctccaacctccgacgtacaaacacctgtagttgggtgaacatgcttgtttagttagggcgctttggtgcataaattaaactgagtattgcttgtattaatgtacagtatcaggaggagagaatatatgtttggtatggtgaaaggctggatagttcagaaacagt

SEQ ID NO: 30945 - DNA, 644 bp, Oryza sativa
cagatcattactacaggtaatatagctcctatcagaaagatcaatactattttcctttagttaatgttcaatggtttgccctgttatagatttcattccactttattttctagtcaaaataatcagacagtatgcacacactgcagagaatggagaaaaggtcaacaattttccattattaaaaattgagaatcatggtttttgttctcctcgcgataatacgaaactaaattgtgtttcatggatggaagacaaacatttcgtggagttcaccaagcagtttcacagcaagactggaccctagctctcccagacagagtattcctcctgttggtgttgcaagctcgatcaatcttcaaattgtttattaaacgaagtctcttatttcctagttgtaaatgaagtgctgcacttagaactgttctaccacaactccaggtaatcaacttgtgaacagaaggaaacttggcatatggcagagtcagcctcgatttgttgttttgaatctccaggctaaaatcattgctgttcaagaggttttctacccattacgggatattgtcgatccagtcctgtttttcttcctgaagcctctggttcctatggcaatttcttcctcaaaattacaagtgaattaatctttg

SEQ ID NO: 30946 - DNA, 780 bp, Oryza sativa
gcaccacttctacacccctcaagcgctcaccatctcaaattttgaaggcacacatgagtacatgacaaaccacgatgaattcacacttgtaaattaaggtaggaattgcagcaggaatgggaggactctggaagaaaaacagcaccgtatgccctccatgccttggctggctaacgcttacatgtataggcaacgcgtttgagggtaggcgctaatacgatgtaataaccgtgatcagtgagtcttgtgttgccaagtttgaccgtgccctagtgagtgggaccgagggagtatatcctagcaccacttctacacccctcaagcactcactgtctcaatttctgaaggcacccatgacgacaaacaatgaattcacacttgtaaatttaaggtaggaattgcagtagaaatgggagaactctggatgaaaaacagtaccatatgccctccatatcttggttggctaactcttacaattatttgtcatgcgtttgagggtaggcgctaatacgatgtaataaccgtgatcagtaagtcttgtgttgccaagtttgaccatgccctagcgagtgggaccgagggagtatatcctagcaccacttctacacccctcaagcgctcactgtctcaatttctgaaggcacccatgacgacaaacaatgaattcacacttgtaaatttaaggtaggaattgcagtaaaatgggagaactctggatgaaaaacagtaccatatgccctccatatcttggttggctaactcttacaattatatgtcatg

SEQ ID NO: 30947 - DNA, 1014 bp, Oryza sativa
agcaaggcaaggcccggccaagtaggattcggtcatattttaaacgatgtaaattttagaatgaccatacaaaaattcattcatatattttacacttcatgttttctttaaaaaaatataaatttgaaagaaccatgtaaatatgagaatgacataaaagtgtactgagaatgaagatggggaataattactggtaccgatgtacgtgcaactaataacaaaagacaatcctaccattgtttatctattagcaaattatctttttaccctttctatctaaatgcctttatcaatacttaaatatcttttgtagggtacctttcactatagagtgttggatatttaccatttttttatgcaaacaccataaacttctgtaatcaatctcatcctatagccatctatggttaatagcgcatcttaaacataaataagacggagaactgtgctaatttccttttgttctaaactacaagagttgattggctgagataggagattgagtgaacagctttgtgagttattattacttatattgcgagatgttcatagtaattactatctctacgggactacggcacaattgttttggttgatgaaggcactatatatatttttttttatttttaggagacatattagatattataaactagagaagtaagtacgcgatgattttttttaccgtattttggttgctattcaactatcacctaacagtagtttgtgctcaacggtgtgctaaagttaaacatttcttactattttaaataaaattaatcatgatattttttttctcgccctaagtactatgctagttagcgtagtagagaaacatgaaggagaattataaaaaaaaaagatatgtgcggagaggtataatcatcattcactggttgagaaaccgtttgtagtcccggttgtccaaccgggactacgaatccggttccgagactaaagatagctatctttattcccgggtgaaataaccgggaataaagatcagggccgcag

SEQ ID NO: 30948 - DNA, 579 bp, Oryza sativa
tccgttttgcccacgagacgggtagttatctagaaatctgctccgctagccggtttagttatcaaaacccatctaggtttagctcattgctaaatcgaggtggttggtgactctaggatcactacaaggcttaagatgctgcgatcgtgcttgtcaacttgtcaaataaattgccaacacgactccgccggtcagaccggatattaccccggcggtaagaccgggtctcaagccgatccaaccgcacatcttgatgccggtcagaccaggccctgggctggtcagaccggcgcaattgttccaatacaggaaatagatctgatgactaatgctagttatttgtatcactttaaaacatttgatcctcctgtatctactgctacaagtagtccctaagttcccccacatgttcctaatgcttataatgatgtttctagggggtatcctcccgatactagacaaggccaatataatcatattgcgccacaaacacaacctattaggccaccgaatccaccgccaaatcaataagggcctaataacatggaggatataattagtgatattattaggaataga

SEQ ID NO: 30949 - DNA, 904 bp, Oryza sativa
ggaaaaatgaaggagggacaccatcggtcatgtcttttcacacatccataaattgtgaccatgtcttttcaccatgtgaccattgtacattagaaagagagagaggtcattctattttaatctattcccttgcagtattcacattaatccacatggaggcctactatttgctatcaggttagacataagtacgttgatttctttaattaatctagttgtttgtgtcaagttttatttgtccattcaccacccaaatatgatgttcacaaaaatgacatttcagaaatatcgttttgcaactgtgatgtccaaaaaatgctattgcaaaatgatatatcatttttagtagaataaaaaaaccacatgattgttacttttacagatatatgccatattctaaaatataattttgttataatcgacatagatatatatcaagatgaatgtccactcagctccccaaacatgatatttgcaaaaaaaaaaagatgacactttgcaaagtaatgtccaaaaaatgatatagctaattggtataccacttagcatttattaaaataaaaaaatcatatgaatgatattctaccgatttatgctatatcgcaaaaatctaattttgttataaactacataataaatagtgtctgggagacataatatcatgtgggccatcaactaaagtatccaaattttggtgacttaatgacggttggtcaattgtagtatgatactagtatccattgccaaatcaatttgagcagtaagtgcatatgtcttgctagccgaacaaccatgtgtatgctaattgtaattaagagaattgataacaactctcgacatgcaaaatcaattagaacagctaactagcagtgttaagtcactcaaatatacaaatatatttgta

SEQ ID NO: 30950 - DNA, 1454 bp, Oryza sativa
gatggataaaagagttgagggtaatccaaagggtcaatctacatgcaaaaggaaaacatttattaaatgatgatacaaaacaaaacactgcaataaaaagtggccaaaaatgaaatcaactctttcttttataaaagctttctatatagatttttttaaatatattatatatatatatatatatatatatatatatatatatatttcaagtttatagtgattaatatttaattaattatatgctaatatttgtctcgtattacatgttagaaaagctaaatcccaatttatcttttgaacgcaacctaaatcaattaaccaacgaaaccatcagttaatcagagcgtggaaaaaccatcattcacaaatgaataataggtgtaaacgtagccatcaaagaagaggataacaaattgtgctactcctgaatgcaaactggtttaatccggatagtgaaccgtacgtacattggggtccgaggggatgaaccgtacggctcaacatccggtgataatgttgcagccgtatcattcaggttatcaactcaactgtcaccggctagctaggttacaactcatgtgtatgtctgccagttttgccggccgccggttgtggcttgccaggcaggcaaacctgcggcacagctcagagcacatgttttgtttaggcgaaatcacatttcacatggcaacaaattgataagtatctagaaaattaattacagtgtttaagctgtggcagtgtagtaccccggacaaataatttattaggatcgggatactacctatgataatctttttccttgataacactaatagagaagtgctttttagtcccggtttgtaaccctctgtagtcccggttttcactaccaatccgggactaaagagcgctatctttcgtctcggttaaaatacccaagactaaagagttccggttggtgttaccaaccgggaccaaagagagggtagcggtagtgagatggtctcttttttttttcttttttattttctcccgaatcaagtgggatacatatcccaaatcaaaccccaaatacccaaatcaaaccccaaatcaaagtaacatcacaaatcttatacatcacagatccatacaaatgtaaaataaatcacaaaattatccatacaaaagtacatcacagtgaatcacaaataaaaaaaacaacgttgactgccgctgccgccggccgcttgcttgctcccgccgagcgcggccccatcggccgccgccgcacgggcgcttgccacgcggtcgcctcgctccgccgccgccgcacagccacggccccgccgcacggacgcagccccaccagccgctgacacgcggccggctcgctccatcgccgccgaccggccgcagtagagaggggaaggaggaggaggaggcggcgaggggaagggggaccagagaggggaagccggaaggggagggcc

SEQ ID NO: 30951 - DNA, 540 bp, Oryza sativa
tgggggatttgagaataatagacttgggatagatagcaagaaggggagagatatagaatatacatggtttagatactaaattgatttgacgattattagttgttgtttcaattcagtcttggtccccttatatttataggagtggcaacttgtttttagggtctttcccatatccaattatgctcataatcagttatgaaatctcgatctaaaacaaggaaacacgagaagtatctaaattagactcggactctatgctgaaggtctgatcgtctggatacatgcggtctgatcgcagtgcattgttcgatctgatcggtcacgtaatgacggttagactggtcttcgctgaaaagttctgatattgtttcattttggttaaagcttgctataacttgtctccagtgtaaaatttggttatcaacacaacacgtggttgtttgtttacttgaaaagtgtgatgatctaggagaaggatcggaggattccgcgagagataacactggtttctgtgcgagtggtttcagagaagaaagatga

SEQ ID NO: 30952 - DNA, 868 bp, Oryza sativa
acatccactatccttggcaatgggtggttgcttcatgtgaacatatatgtggactgtgggcctgtggcttgctagtgccaaattggttgttgaagaagggccgttgacccctagtcaatgacagtgaattgtactcccctgcctgtcctgcaggtgctataaattctgaacctcaagaactagaccaaagcaacaaagcgaggtgcagtttcagtgagggaggaaaaaaagagtgagaagaaagtcgagatcatgtccctttggaaggtgctcctgatggtaatcgcgctcatctgcgccctgcatactacttcaggtaaacgagttaataagttttttttactattgtaaatttataattaatgtctactaccttagttataaaataaatttagaatatcttaaattgatgtctaaaatataatttattctgagacggatatagtataatctctattattagagaatagagagaatagactgaggaatttaattgtataatttgatgcagggagacctcccgtcgtgggatatcctgctcctcgtcccaacggtagctcgggcacacgatgctacgaaggctgcaaccctccaggtagagatggcaacagggatccataacagagaccctctgctaccctccaggtagagatggcaacagagatccataaccagagactctataggtttttattttattaggagtcatatatgatctaattcttgtatctatggatttatcaacagaaaaaaaatccttacatgttggatagatgggtattagttctttagccactcgtaccccttacctatgggtaaaaaatacctatatgcttagcgtgatagtttacttactttgaacgttcat

SEQ ID NO: 30953 - DNA, 520 bp, Oryza sativa
tagggcgaattcgagctcggtaccctggaagaataagttcatgttaggtcccttcttttttacgttaagttttaaatcacatccctaaaccgcaaaatggggatgaacacatcctttattattcaaaattcagtcctaaaacagtattaaaggctattttgagtgacatagaacaataagcaaaaaaacaaaaaaaaacacatgagacctatatgtaagtgaaacatatccgatgcctaaaacagcccaaggagttaatctcataaggctcacatatttgtcttgctgcctggccttctaggcctgttccaagtgcagcggcgaccgggggtccaacccaacccgtgagcccaccagaccgatggataaaaacggtatgaaaatttcacgacgagcgacagaaaaaataatataataataataatttttaccacggttacccgttctaaataaagtataggttttttcctatttctatcaatgtggagtcaaagttgacacttaataattaaatctataa

SEQ ID NO: 30954 - DNA, 705 bp, Oryza sativa
ttatatatcatcgttttgattgattactgcactttttttttattgttgttgagctagtgatggtggtggtgtgaggtttgtggatgcgcagtaccaggcgcgacgtgcggtggaggcggtgacggacgccgccggcgccatccacattccattcaaaattttcactgttatacctctcaaccacctttctatcatcaaccataaattattttataaagtttatagtaatttgttcttaaccataaattattttataagggtattatagtcatttgttttaaactttaggatatgccaaacaaccttaaaaaatactccctccatccacaatagttatacatattacttttaacaccaagaccaaggagaaattaaatcacctcggatgttgtaaaatcaaggagtgaatacaagcatgcaaccaatgagtatttagatgactccttgggttctaataaaacatttaatttatctcttcatttaagtcttgaatgcataaagactacaaataggaacaacttatttgaaaaaaatcaaatgtgaaataggtgtaacttttgtggatggagggagtaaataatttgagacggagatattacacttgcatacggcccattggtgactcgaatttcttggcagtgacagcctagggccgtgggccgtatgcaagtgctagttgtaaccatcaatcagggaagtgtatta

SEQ ID NO: 30955 - DNA, 612 bp, Oryza sativa
tcatgtgtgtgcgatatatgggtctgacgcataactatgtaaattttgtacgtgtacctactagcgaacccaaaattcggtttgcttttatatttatttttattgcaatgtacgagcattatgctactaaaataaagctcttcattatctaaaagatttatatggtaaaccgatagtaaaatgttttccatgctatgaattcaaccatggcacatcctaattcttacttgcactgcagcagcacaacaacggtacgcaccttctgtacagtagacttggatatatgcatataattaactagatgatacctcgcactttgttgtgagatttatagatgagtatatattaaatattatcgaaatgatgaaagttaaaatgttaaaaaaataatatgaggaagatggtttgacacatacttgttgatgatgtgtcatgcttgtatggggatttaaaataggctataatagtaattactcgtgagtgaagatgtgacatgcttttatgggattttaaatgagctagaatagtaattgttagtgggtgatgatgtggtatgtttgcatgttgagctttggcttctaataattaataattggtagtggataccaacta

SEQ ID NO: 30956 - DNA, 555 bp, Oryza sativa
cgggtttttgttatacgcatgcagtggaacaagcaaaccttgcatggcttaacatgttttcttgttttgaaaacatgcacatgacatgatactgaatcaggttatgctacagaaggttttgattgttgggttcttgtttatctgtttgttggcattcatctcccagacatcacaggagaacttcgaaaattcagcataacattctgcttcaaattttggcaaattttacgattaactactaactacagactacagtaaccagcaaggctagagctgctgtatgctggagtgctggtatatcgccagagacatgttagacagggttcggagaattaaactccgaccacgcccacgcgatggcccacatgttacctagtagcaaggccacgtggcctcctctttttgtgggccgtccggtccatttagtgcggcccattttcagtgggagcttgacctttcatgcgtgcgtcagaaaatggaataagttcaatttttctcccttaactagtgacagaatgttatctgtatccttcaaacgcaataccggatatctcg

SEQ ID NO: 30957 - DNA, 586 bp, Oryza sativa
ccacatgtcagctgcacatatctctctcttctcttttcttctccctcccttctcttttctctcttctctcttctcttctttggtcagggaggccgggggccggcgagcggagcgacgatgggcgggcagcgggcggagcggcgctgggccacgggcgggcggtgggctctgcggccacgaccacggcagttcctacagcggcggcaaccatggcctcgacgggaggagagaaatgtggagaggggaggcggccggcggaagatgggggaggggagaggcggtcccttcctccagacgggccgacgctgtccgtcgtcgtgcacgacgccgcagccgcgtcgaaactccaccttcacaattttactcggataccatgataagagcagaagttaatttcacatggacattcggcacaactctggatacagacacctcaattaacaaacccaaatgtacacatttagaatccgataccaattaacccgatcaaagagcaaacatatgaactaaaaaacatcgattaaccaatcaaagactgaaaattcagattttctgacaccaattaaccaatcaacgaggttacctt

SEQ ID NO: 30958 - DNA, 614 bp, Oryza sativa
ggcatgtagctagctagggtttcaacaatgaaggccatccaagactatcttgctcgctccaactccaagtccaaggtccctcctcctctccgcccctacacattctgaattctcgcgcctccctgtattcattctagttcgatacagctagtagaaaattcatcagctttgctcaattgctcaataagattataagaaaatttatgtttctccttccttttagactaggcgtaatatacatatatgatcagtcccttaactcttgaaaccgggtaaaaacatgtacctccaacctgtttaacaggggttttacccaaactggagatgggacctgcttgatcatcgtttgtcgtgtgggcccaccatttatcctcaatgacaagtggacctcacctcctatgctgctcaaaaccatgtcaaacggggacaagatttatcctgttttgagagtgtgagctatgagttgtatctagtttttcaattaagggatgactagaaaaaatgcccgtgcgttgcaacgggaaaagactattttaatcttattattattatatgttttaagtcaggtgaaattcactgtagaaattcgcttgaatatatgtattttacaaaaa

SEQ ID NO: 30959 - DNA, 589 bp, Oryza sativa
aggcaccaacaccttggacctccattgtcctggaaatataataaatgcttgattttttgaatattccaaaacatgatgacatatactctccctgttctagattataagtcactttgattttgctcaaggttaaactgccccaagtttgattaagtttgtagaaaaaatagtaatactttcaaccaaacgtaaaaatatattatgaaaatatattcaattatagatttagtgaaactaatttggtgttgtaaatattattattatatttgtctctaaactaggacaaacttaaagtaatttgactttgaccaaaatcaaaacgacttataatctgaaactcaaacggatggagtactatggccctgtttgggggagcttctcccagctgcttctgctataagctgccctaaacagtccacagcttctgagaatttgtagttacagattctaaaaaatgaactaagaagccagaagctggagaagctgggtttcagagcttttccagattctcataagctggctaccaaacagctgcttctcaaaatttaaagctccctcaaacagggcctatatatatcaagtgaaaacc

SEQ ID NO: 30960 - DNA, 625 bp, Oryza sativa
acccggatgaactgaacttcatcaccctgatcaatccctcgtgtgcctggatctcctggcacatgtagacgccagtgaagtccatccacttcttgttctgctgatgaacttttgtcctgtacaatgtgcctgagttcaatcctcttggttggacatgtacatcatccatggaaagtactctatctgaaaccttcttcctcatgaagatttcccacaagctcttgaattcgtttctcttagggccgtgaccgaagcgaatgcgcagtagttttcgcattagtttagagaatccaggcacaatctcaggcgcatttggagtcaccatttcatcagatgatgttccagcctcctcaacaatctccgagaggacatcgtgctggccttgatcatgagatgttgtgcttctccttccactactgttataatccacatcccttgtgcagttatcagcactatcattagtattgtctgttgctgccaaaatactgtcagagaagcaagaacggaaggaagagcagatgctactgatcctctcctcgaaatcgtgaaatgagcagcaatccgttgttgcgatttctgccagccactgggggaaggccgtcccggtaggaccggggctgcagga

SEQ ID NO: 30961 - DNA, 577 bp, Oryza sativa
tcctgcagcccgctttacttagggcccgattgagatatattcattcgtgagggccgtttgcccgattgagatactctttacatcagtgacttctagcctgtgacggacgctgtgcccgattgagatggggcttaccgcccgattgagatgagggtatccgttctagtgttagaatcttatgcctctgcgtactagaataccacgtcaatcaaaacaaccatccatgctgccttaggattttatgtaaccaggtttttaatgttggggattcaacatttcatgtattgtggttgaaggatataatctaaacttgatgtaaaaataaaagacttaaagtgaagttattcccatgttacaaaatactccatccgtttcacaatgtaagtcattctagcattttccacattcatattgatgttaatgaatctagacatatatatttatctagatttattaacataaatatgaatgtgagaaaagctacagtgacttacatcgtgaaacggaggaagtaggaagcatctccactccctcactggaacagcctattgcactacgtactgattcactcaaccca

SEQ ID NO: 30962 - DNA, 693 bp, Oryza sativa
atattgatattttatattttaaattttattttataccagttcaaactatagaggttatgaacctttaaattgatgatttaattatgaatagagcaatagttagattagaaattagatgtacagctaaaaaattgcatgttttaatattattgattatttctcgctataaaaaggaggggtaaaggagagagtggagaactcaagctgagacaggagggggggggggaggggatgggtagtactgtgttgtgcacatctaatgatttaagtgaaaaccgatgatccactttttttgtcaaaatttttaatatcctttgcgtctaaattttaaggcgtaacacatggcagcttaagattttctctaatattatatctattggttaaaataatagatccacctattaagtggaaactgatggtcagatgtcttttcttataatttctaaggtcttacttttaattaagatgtaacacgtaagttacataccactgtaaatgtgctacagaggatgtacaatgatttgaggtgatgcaatacttattgtcactttttttataatgctctattttttttctatttggttaccatgcaaaggatatataggtgtgtgtgcttaaatggagtattttcatttttatggagtgaaatatgagtaatatgcatcttcaattatttatttaattataaaaaaa

SEQ ID NO: 30963 - DNA, 512 bp, Oryza sativa
caccggcgcgggaaggcagagaagacggccccgccaccgacatcccgactcgccgcctggctctcctggagacgcgcttcgacgacgggaatgtggaggagaggagggaaggagggcggcgacggcaggagctagggttttgctcccgagccgcccaccgctgccgcaggccgttgccgtcacccgacgctgccgcgagggacgggtgttgccgccggatccgggcgggggatggcctgacgagcccgtagcaggccgtcgtcgtccgcccgccgctgccgagggctgtcgccgtcacccgccgctgccccaccgcaccctgatgccgtcgtcaccgcctcctccacgccgcccgtcgcctggacgccgccactccttgaccatagggtacggccgccgccgctgttgaactgctgcatcgaccgcaaccatcgcctctcctcctcgcctccggtcgcgccgcagatccgtaaaaatggagagggtgggaaagtgggtgacgtttctaccat

SEQ ID NO: 30964 - DNA, 506 bp, Oryza sativa
tttcggacctttttcatcccaggtaagtggtcaaggcgcgcgattgtacgtccattacacgcactcggtaattccagatgcaaaattgatttaccgctagtttccaatttccaacgatgcaggtaagatccacagcaacgccatgaacacgcaagtcgacgtcgagaatgtggacgtggtcatcaagcctagaatggtacctggccatcagggttggcagactagcctctgcgactgcttccgagacggctgcgaatcatgtatgcaaagctacgactgactggatttttctggtttggtggtacaatgcaatgttttttccgtttcatggcttaatttctcgacctgttggcagtttgtttgagtgcttggttcccttggttgtcgatttcctgcatcggtgaaatcgtcgatcaaggcttcacaggtaggggtcatctcctctcccatagccccatccaaagtgctttgctttggaccggttaccgataaaacagaagagcgtt

SEQ ID NO: 30965 - DNA, 607 bp, Oryza sativa
aagggatccaaactaaaattcagagatatgtaagggattgagcaaaattcaggggtatagaagggattaggtgaactttcacattatgcccgttatgcccattttctaggttctgcattttcaagttctggaggagcagaacgtatccatgctggtattcaattacacaagcagaacttgatatggggaccaaaacgaaaatgttctgctcttgtttctgctggagccttttgctctaatagtagattgaatcgtttttgaaggaacagaaactattccgtcacatattcataattataggaacagggagattagcttctgttgcatgcgtatacatatttctgttatgcagattagctgctgccatattattagcctgttttttcgtttgccggctagtatatatcttctgtcggccaggagcagaaaatcaattccaaaaagagcagaacatcagttagttagttaggagcagaaaatcaatttgaaaagagcagaacatcaacaattgcatgtgctgcccgtttatatacaacatatcaccaaacagtgctcactttcaaacgaaattaataataaaaatattggtttgagagcagaacatatt

SEQ ID NO: 30966 - DNA, 616 bp, Oryza sativa
tttctaaggattaaataatgcttgtgctcatttttagttggttaaaattatttctagggctctgaaaattccactaaaaatcttgttagcatatttcgacatgtagaactcaagaaaaattccacatgccaatcccgattattatttgcattaatttattagggtttctctcttgcttttacaccgatatttcctctaggtaatttataaattcaattttggcttgggaaagaacttcagggtgtgacaccgagttccttacgacaatccgtcttgaccatccaaccggggctaaatatggaggagtaccctccccaggaaattaacttaggactatatacacacgcggaggaatacccgtactgagctgtcaccatcaacggcctacctcgcttccgtagcatataaccctaaataaagatatccagtaatctaaacaccacgcataaatcaccaaatactactctaatatcatcatcatgatatagagtcatcgtaaatatgattagtatgcccacaccattgcatctcccagataagctatcatcataatgaatataacatggatatataataaagttggtattcatactcggaaagtagttctataccaaag

SEQ ID NO: 30967 - DNA, 507 bp, Oryza sativa
cataggcatggctagataaaacagtgataacgcgggaatttaaataaagcgataatgcagtaatttaaatcaaaataactttataaactgggattcaatatgttcaaggatgatgtgacttgccttgctccctttcccaaacgtcggcttcaacttccacgaagagcggatcttccgaagctgcagcgtctacacgaccaacggaaaagaaaaggcttttactctaataaactccatataacaagcaggaacaaagcccaaaaatgggttcttgacttcttaaggaaaaattagagacttgaacggtccaattccgagttcaaatggccaagttatggtcatttgaagtttatatgctctttaaatgaatatttgcgaatttcttcatttaaattttaattttaaaagggtttattgcgtcagccgaggggagggggcgagcggaccgggtccaccccacgcggcagcctcacggtccacggtggaccgggtgcacccgggctcaca

SEQ ID NO: 30968 - DNA, 1297 bp, Oryza sativa
aaaaatatttgtaactgtaatcagcccgcttttactttcttatgaattatatcatttttaactggaataatgtgttaattttctgaacgttcaacgctgctcgcaagcatttccccaaagccccccttgccgatcaattacattttatatttgttgaaacttccacacaaatttcgtgagctataacatcgtaaaaagtttgaaaaggaagtctaatcaacctctttgttaagaggacattaccatgtaactctgcagcggaaaaaaaaaactagatatatccatgagctccattgcaggagggcaagcagataatgaagtacatgaggaatataccttaggagttatcatcaactcctcatataatggatccatgagctccattgcaggagggcaagcagataatgaagtacatgaggaatataccttaggagttatcatctgctcctcatataatggattttgacattttacttaggagtcgtattgtttgaccacttctcttatttaaaaaaatatggaaaaaaaataaaaagttgtgcttaaagtactctggataataaagtaagttataaataaaataaataataattttaaaaaattttaaataagacgagtgcttaaacagtgcaagtaatcttttatattagagacggagggagtactatcaataacgtgtgctaaaaaagaaaaggtagcggaagcatatactccaccaaataggctgctcgtattggcacctcatcaaatacaaaatacagagcataaaaccgggggaaaaatagtaagaccgtaacaaattccaagttctacagttattttaattttcaaaacttatactgtaattccaagttgcaggtcacaagctgagcaaaatattgtgaccgagttgctggaaggagtacgcgcctaccctagcagattctgatacctttgataggatataaaccggcttattagaaaaataaattgcgggcaaaacttttatacatgtgtacttagcgatttaaaaaccaataataaaaaataaactgcaataacaaactctaatataccaactctaaaattaaatatttaaattcaaaatttgatagctgcttataagctgaaagacaaacgatagaaacatgccgattcttttctccgcattagattggcttctccttcgacagagataactaaatatggatatgtaaaatgagaaaaaaataccacatacactaataaagttttaattattccaaacacaaaaatttgatttatccaatatgggtaccgagctcgaattcgccctata

SEQ ID NO: 30969 - DNA, 630 bp, Oryza sativa
aacatgtctgcaatgtttctgtatttatcatgataacaatgagcagcatgcataggttgcaaaataatccaaggcgatcagccatgacatgttgtaattaaaatctgacctgttagtgccatgtgttgaggattactgataattgaacttgcacatgtttgaattattctgtattaagcaagagatttaggagctgaagttattgtttgcaaagttggcatgtgttacatatctaaaacaatatttccagcaacaacgtgatcaaaccacataactgaattgtgtgttgtatttgcagcaaaactttaatttatcttagatgtaatgacaacaataaataaaacttatcttttaagtaccaacttgctgcatctacaatttatgaacgcatatttgtgcacttattttaactactcagttgtattgtggtagaaggtgatatgcttccgttttttttttcttaacttcaacacatggttgctgccatgtgtacactaactgcactacatgtattttcacttgctactgttatatactttgttataacaaatgtgtgcctatgtgtatttaattccagaatctactgttttgaacatgcttacatgtttacatgtgctgccatttctatat

SEQ ID NO: 30970 - DNA, 666 bp, Oryza sativa
aaatttaaaaattttaagaccaaattcaattattttggattttcctacctaaaatcctggggtcctttttatcctcttaagggagctttatttggttctattacccaagggtaggggggtttaaaaaatccatgtgattttcccttggaaatttcttggccaaaccattccctaccaaaaaacaattttcctattccgttaacattaaatttggggttaagtttcagccgtaaaatcttttaaatgtgtaatggcaaaccgaacttatggttaacctcatttagtccaaaccaccaaaattaaagtttaactactaatttttttttttttccttttcccctttttaaatctttaagacattttaaatggttaatatttttaatattttatttaaaataaactatgtttatttattaaaattggggtaaaaattgaacttcaaacctttccacagtttaaaagaaatatatatcccaagctgtttgttttcagtcgaattaaatcaccaaccgcattcatgcctaacctaaccacctggcaaaaccctgttctactctacgtggcccacgcacacccccgacgcgcaaaatcttcccccaaacccacgttcggactcattcttattcaagtggaaaacaaaaacggtttcatgccggttcaaccccc

SEQ ID NO: 30971 - DNA, 552 bp, Oryza sativa
gcagttcaagctcaagctcggtaacgtttctcaacacactgtaattaaccgtaactaaaatttttttaaaattggttttcccctttaaaaacgtgtaaatttccctttccttgtgtcatcaatgtattatatatgacgtgcagtcgtctgaggacgacgggatgggagggaggaggaagaagggaatcaaggagaagatcaaggagaagctccccggcggcaacaagggcggccagcagcagccgacggccactgcggcgaccggcggatatggtgccggcacgggacacaccgccgccgctggtacaaccaccgacgccggcgggacggcgtatacaccgacgacgcagccgacgcacgagaagaagggtatgatggagaagatcaaggagaagctccccggtggtggccatcactgagccctttttgaggttcagtttagctccagctttggagtggccgtacactgttcagaataaccaatactccgatgtatggatgaataaaaacgagtggttgcatgcttcaatgggtaccgagctcgaattcgcc

SEQ ID NO: 30972 - DNA, 527 bp, Oryza sativa
tatagggcgaattcgagctcggtacccgtgaatgcatgatgccagtggtggtgtcgacctcgagtacagtgttggcagcacgggagaatgatgccatcggattgttgattatctattccgtggagtaatcatttgcctcgctgtagaggtacggatttgtgtaattgtgcatcaaccaacacattggcactcaaggtagtatcgccctgttggtctccacaagtactggctaacgatcatcgtggtacgagatggagtcggccttctcatcattacaacaaactcttaggattaggtggttttagggaatgttaggacgtagcataacctacgagcgacggggtaacactccaggtaaacgtggccatattttatatgcacgatatgataggggttcaaaccaattctgatgagagtgcctcgattctattgggaatgcccccgaacatagcgggcatgaattggttcgtgagtcgcacatcattggatagcttcattgggcgtctctcccattactaccctcagtt

SEQ ID NO: 30973 - DNA, 1089 bp, Oryza sativa
tgtttaagcacacataaagttcggaaaatcatagtgtgatttcaagaagaactatgtgcataaaaccagtcttttatgtcctaacatgaagctagacagcagggtagctgcatccgccaattgcagatcaaaatgcatcaaaaataaattatatagaagggataaactggagttgcgatgaattatgtggcactacatgatccaacaaaattctaagcagaaagcataaaatattgaagggaattcttcaaaaaggcaaaaaaaaacaaggaacttatacctttttctccaaatcaagtgcttcagaagcaagacaggccaaaacagaatccacggacataattgtgtcacaatgatctttgcaactaaatggcaatcctcttgattggaagttgacggtgcctatcaacaaagatgattcagactttaggtgaatttacatatatgacttccgaggacaaagtgtgcagataaatgaacttaatgcattagaagctataaatgtataaatttccattaaaatcgtataaggtgggttgatggttccttagcgtgcagtcagcactactctacaaaacaaagagatcagtatgcttgtcacattttgacaaataacagattagcagtgaatttcctgcttgctaaccaaccaaccttcatttatctgaaattctgaactgataatcgtggagcacaacaaaacaaaccaaataaaggcaaaccgcattgccactgccacattttggaatcgctagatgaacaggtgaaagtacagaaacctgttgtcttcagaagtaagggtcttcacatatagagaaaagctgtgcattgaggagctgtgttcttggattagagctaacgaaccttttttgtctgccctcctgattgttggaccaacgcttctcctgctgctgttgttggtgagtggtgacaagaggcgtcagttccctccatgctttgtgactgcacacatcattttgacacaagcatcggatataaaaaaaacactaattcgtgcacaaaatcaccagagcaatcagaatcaacagctggtggtaatcgatgtagtgattatcaaggaatttggga

SEQ ID NO: 30974 - DNA, 700 bp, Oryza sativa
aattgatgcatgatgaatgtgatgaaaattgatggatgatgaatgtgatgtgagatgaattgatggctgaattgggatgaatttttgatgaatgttaattggtggtgaaaatttgggcggatgtagtttttttttgtgttgatagaggcatgtatgagtttgtgcagcctctgaattttttgtgcaccaactaaaatagatgtgcagccactgaattttatcgatgatagaggcatgtatgagtactgtcctttgttttcttgttgcaaatgtgatttaaattgtacaatcaaaattgatcttgtgctcaacatattaagaaaaggaattgttttgctgctgcactttttttccaaaatgaaatgcactttcttttgttcaggcctatgctgttgctagccattgctgatctgaaagcatgcatagtttctgcaatttatatatatatatatatatatatatatgtatatatatatgatgcattgcgatgactgttgggtgaatatttagatgcacaaatttgttagtttgactgaactcgagtaatttgttagtttgatactatggcgatcaaaatgtgttgtttgaaatattaattcaaatggaataatacatagattggccgcagattcaatgtatgatcctaggttatcaaactcatcacagaatacaaaatgcatggggaattttggtggattgg

SEQ ID NO: 30975 - DNA, 563 bp, Oryza sativa
tgggacacttgcgcatgggcattgtcacgaccggaattaacccaacgggcgttccttacgtgcgtgcattattccttgtcccaggaggcaaggtacaccaaaagttgacacttcagagtttaacaagtcgaagcgtaaatagttaatttattacatgggcggcgaaggcccagcatacacaaagacaaacgggaaacagcggaagactcgggcgacgaccacaggcgcttgacggcaggcacgagctagacaccaaagccttcctcatccaggggctcctcttctgggtttgggaaaaattgagcaagactgagtacaaccaccgtactcaacaagacacacccacaagtgcaggataaatgcaagggactacaagggggttataatataatgggttagagtttgcagcaaacaacattaaaagacatttagttgctcaaagctattttgtaaatacgatcctagagctatacattattattaaacaaggccatgaacccacacgaacctgccttaacccaaggcctacgatgattcagaccgaactggcaacccgaccctgg

SEQ ID NO: 30976 - DNA, 604 bp, Oryza sativa
agttaattaaaatacactgaatggtgggctgtgggtgcatggttttgctagtcgcacccatggcaattaaggaccggtttgctggaaaccctgggagacttaccgtgcttaccacaagcgggagtgggtaactgcttgatctgaagtatagctcgaccctttcctaggcaccggtggtgagggtgggcgtgatggagttgggttggacggggtatccggttgtccagctgccggattcaccgcggcgcacgaggggactgcccaactccggattcaccactgccttttgaggggtgggggtgaaaccttagcgtagtgtggatggttagggagggttatgcgaagggtcttttcacgatttccccctttgtagtatcatggtgatacttcggggcatggcgacgtgtcttgtgggtacagttgtacacctctggccagagtaaaactattcgaatagccgtgcccgcggttatgggcgatcaatcatattcaccgtgattagtctcacccctagtttagcttaatgaactggtgtagttcagattgttggttgggcctgttgcaacgtggtatagcgttggacagggattggttaatactgatt

SEQ ID NO: 30977 - DNA, 1455 bp, Oryza sativa
atgaagaaatgaccaaaataaaagttctatgtcttgatgagttctacaacttttatgttttatttactgcttcaaaatatcatttgaagttttgaaattcaaatttttaattgataaaacaaagtcacaagaaaaaatggccaaaataatagtagtaaaaacacaataacatgatagagcatgattttagaaacatttaggaaaaagaatcatccaatttggagttcttatgagtgagataaactagtttcaaatttttaaaatttattttcgcatacggctcattaacgtctgtatttttccatgcggtctcttaagtggtccgcatgcaaaaatgggctcattttggcatcttaaggagtagtatgcgaaaataccaatgcggcaagttgtggtccgtttgcaaaaatcatagggtcttgtacacaaaaatcgtttgtgtagtattgaggggtttttatatttcgattaatattcatcaccgtattcgcttcgcttcgtattcactccatatttgtattcgataatattcgatttcgttttcatatttgggtttccgattccgattttgattccgaaaaaattatgaaaacgaatataatagagctagtttccgaccgtattcgatccgttttcatccctatctaaaatatagtataggctgataaaataagatgggtcgtaactgtcgacgtttgatagtcacgactagggaatttgaatagtatgggatcgttggtaccagggtatatgcgagattgaggtaaaagagatgcagacagtgatttttatacaggttcgagccccttatctgataggtaatagccctacatcctgttggccgaagccggtgctgctctttattcatctggatcacacaaatacaataattgggataatctatctatccatcgtcgacttggcggctatataaccaactcgtagtcgatgacagggtaatcttcctcctcgaatctgtactcggcgagaacagagatggcgctagatacctcttgccggcccatgtaggtgccggatagggcatggctaggctaatctctgatgttgatatacaacggcgtattggcttgtattggcttgtggctttgtagattgtggtgggtgtgtcccctctcctcctagggggcttgtatttatacccacaggtgaccccttgtccaagtagaactagggagataaatatggatacgatctgagtagtgagtagtccttgtcgtttctatgtagaactcttcttctccttccttatccggaactccttctatatacgaggttttttttccgtataagacatggcatgtggtgggccttgccgagcttagtcgattactattgggtatccataaccctgacagtaaaaacttcttaacaatgcatgcaaaaatgtattcttgagtaattaaaggtctatatttaaagaatatgacaaaatta

SEQ ID NO: 30978 - DNA, 624 bp, Oryza sativa
ctgatgagaccacaacaacgtctttgaggaaccgcggattgacaaaacggccgaaatctacgcgacaaacaaagcacacaagcgtgggtggcggctaggcacggctcggctcggcacaaagccggccggccggccatggggagcggcggcgcacggccgatgcggcggcgcagccaaaggcggcggtgcacgcgggaaggggaagaaaaggaggggggagtcctcaccggcgacacagcggccggagcgggaggcgaaggcggtgacgacgacccgacgagcagagggggcggacaggcggcgacgacacctagaggaggggaggagagaagttagggcagagaggacaaccacggtagcttacatcgccggccgaaaaggggcaaaaatggtgggctcaccggcgaggcgagggaatcagagctccggcgtcgttcggcggcaagcaagtggtggccaaggtgcgggcggactcggtgagcgcgacggcggctctagcggcggtggcgcgcggccggagatgggcggtggcggcgaagctcgggtgtggcgtggggagagcggcggagtgcacgggcgaacgtggcgagagcggaaaaaggttgagggggctcgggggagcga

SEQ ID NO: 30979 - DNA, 638 bp, Oryza sativa
atgccaaaagggggagaatagcgtgttttatgttttgtgggttgggtctagtagtagtgaggttagtcacctcatatttaataggttaaggaggattgggctatatttggtatgggtatgggctattactctatattgtgtcattttgaagcactttttgccattttggatctaaacactagtagcaaaacttggcaatttggcatttggcatttgctagtacatagtagcaaattatgccaaaaagtgctttgggaccactccctctctctttctctctctcactttagtgctagaatgtgaagcatctaggcccccggtgttaattttggtaattaatgacaagcactaattgtggactaaccgttgtctttgagctatacattttaagttaggtccacgtcatatgcacgcatggatgattatcgatggattaaaattgacggcgcaaagcaaagggaaagaagacggtaaaactagcgctttaatttagaattgatcgaggtgtagggcgatcaaatttgctagtttaattttagtttcgccgtactattaagaggggtaatgacctagcaaagagatgattttaattgccacattaggtcattgcattttcatttgtgctcgctttttcatta

SEQ ID NO: 30980 - DNA, 597 bp, Oryza sativa
tcccaactacggggcccaccctagaaccggcatctttgtgggcaaaagaaatagatgccgatctcattcaaaaccggcactttcccaaccggcactgattacgttttctatagtagtgatagactccttattatctgtggacacatcatctgacacactgagaaaagtaattatacaccatgctaagtcagatactccaatccgaatagacaggtatcctctatatttattgagtcactgtaactacggttgaaaataatgtactgcttaacatattatatctgtgttaaaacacactgaattggttgaattctgaacatttcttgataatatgtacttcgcaacactggacatgcatgcatggggtaagatggagtttgcaaaacaaaaaatgctgctaaattttttaataaattaggcatgtgctatgcaggcaaaagttaatagaaagatatgctgcgcaaatatacagattgtgtctaaaatatgtttgctttaactatggtgtgcctttgagcgtgtcattatataccactagtccaccacaacatctcagcccttcatacccccacccaacacacactgagagagtttaat

SEQ ID NO: 30981 - DNA, 643 bp, Oryza sativa
tttttttgcgggaattcatatacttttctggtttgaagagtgtgatcatagtcgagccaagccattctctttttttctccttcggtaattaattaccctccattcaaaaaacttcatttctaccagtacaagtatttgtgggaccgaggtattagtatattggccgatgctaagttgctaactcaaacaaccatataaatttagtaggcgatgacacttgtcttagggtgtgtttagttcacgtcaaaattgaaagtttgattgaaattagaacgatgtgatgaaaaagttgaaagtttgtgtgtaggaaagttttgatgtgatgaaaaaaattgaaagtttgaaaaaaaattgggaactaaaccaagccttagacttcattgcaaaggaagcataggctgacaaatctcttccaatcctattgatatcaccatctatgttgacaaatctctttcttttctacatgatatatgagggtagaatggtcatttcattcaaaccgctgcatgcaaggatgacttgacatactcatgtggtatttttttgggtctaaggactatattaacccaaataattaatttggaggacttgcttggacgatatgaaatatcgagggctaaattaggcccgaagcgaaacttca

SEQ ID NO: 30982 - DNA, 626 bp, Oryza sativa
acgtacgccggactaatagagacgccacaatagacgtaccaatctgatgtacgaagccggcgacgagtcgccgccgccgccgccgccgccgtcgtcatggccgcacaccacgcaccactcaccggtcgatcgatcagctcgatcaacgaccaaactctcggatcgattgaggcttgcctactcggaagatttataagcgagagagccttgcagctcgctaatggcggatcgaccggtcgacgacggcgagtagctagcgatcgatcgatggatcgatggagtgatcgaccaacgagagcgtgacaagcagcggggtggaggaggtagaaatagggggggatcgacgatcgagtggggacatgtcagcatgtggggcttgctcacgtgggtgccgcctccccattcgcggagaggcggtggcgggggattttgccgggcccacccgccgcactcaccttacccagtcccctgcttttctatgtggcctgattttgatctcgctccctgacggtcagttcgcgaggtaattaattatgcacgctcgttaatttcaggccgtccgatgcatgtggatggtgacttgctagccagaagtacattggaattggaattcaccgtgatcaata

SEQ ID NO: 30983 - DNA, 649 bp, Oryza sativa
tcagcaaatagtaaaagtatgtttcagttcactgcaacattagatctatacatagtgaaacattatgagtgcactaggtaaaacattttttgtggaacaaattataaaacaaattctcttaatagagggttcccaaaatatgtgggtgatttgttgcaatggagtattttagttcactgcaacattagatctatacatagtgaaacattgtgagtgcactatatgaaacatttttggtggaacaaaaaataaaccaaattcccttaatagagggtttccaaaatatgtggatgatttgttgcaatggaatatatggtggagatacatggtggggccaggaggagacattgcgcgtgaggagggggaagcgcccgatccggctccccccgcgccggtcgcccggcgttgagcatttacgcaataaccatataatatctttgtttttaatatatgacaccgtgacttttttgacaaacgtttgaccatttgtcttattcaaacttttttgtgcaaatataaaataatttaagttaggctttagaatatttaacgataaatcaaatcataaaaaataaatgataattttatattttttaatacaataaatggtcaaacgtatcttaaaaagttaacgacatcggggtgcagg

SEQ ID NO: 30984 - DNA, 620 bp, Oryza sativa
agtctctttgggcagaggagtatgatttttttcttaaaaaaaatcatagctgccaaacaccaccttattacagagtcacttattaggtatacacgcatgcaccgctcagttattagtaatgaaacaaagcatatccagagaccaccttattacagagtcccaattcccttatggggagtcatccttaccaaaaaaaaaaaaagaaatatcgtggctgcatggaaaatagaaccttcatttcaggatttgcagcatcggcaggtttggcaatgttttttttctttttgaggtttggcaatgatttttagagtgaccatataagctgctactgacatcgtaacagttaaagcgaaatgtgccagcttcgaagccttgatagatttggctcggatggctgcagctatcctgcagaaacaaaaatacatgacaaaataaattagtcttggaaacgaaaacggtaaattcgaaaataaaaacagtataataatatcggaaaccaaaaacagaacaatatgaacgaaaatgcattggtatcgacaaaaatcaataacaaatatctaaaatcacacattttatttcgcataaccatataatataagaaaattaattcaaggatacac

SEQ ID NO: 30985 - DNA, 620 bp, Oryza sativa
tattatttcaacaatataatttttagaacataccgtaacatgtacgctagtatatgatgaaatgggataaatcttctttgcagtactgccctccgacttggtcaaacagtagtgtagtgtgtagaggatttgtttatgatggaaccatcttatactaaaaaaattaggatgagccttaaccaatctcacctcatctccaaatcacagccaattgatattgcctaaacgaagaaaacgattaaacccgataaccttacgagcgaaacattttgactttatcatatatatctatctacctattatattattaaaacaactttgaaaggagacaccacgttcgctgcgggaactataaattctcacattaatcagaaaaaagaaaaaatattaaccgttagatcctaataagtctagattttaatggttgagattcaatatgagtccgtacaaaagttctgaaaaattgcagtccgtttagctaaagcacaaggaaaaagttgcagtccttcaaccatcggtgcattacagctggactatgcatcacgatatggattgaagtatgtatggcatcaaacaacaccatgaatgagatcctatttgcaaacttacacaaatcaaaa

SEQ ID NO: 30986 - DNA, 566 bp, Oryza sativa
ccataaccaaggagtctttgttgccttgccaggggcagtatgcataatttttaaaagtccaattaaatgtcgggaccatgctcctttactgtccgcttattgcccctcccctctttattatcatagtagtctagtcaaccactatgaacctatacctttatgacctacccaccacacttactctttatcgacattgggattcttaaaattaaaatgaaaccttattattctcatggtctcaattttatagcttttaaaagtcataccaactgtcaccctctttaatcatttgccacgcttttacttacttgctcgacccgtcataatttctatgacatcatcctagatgcctttaaaaatcggatcttatactgtttacattgtggtgtctcgacggatgccatcttaataaggactaaaagagccgtgaaatgccgccaccctcctgtcggacctatccagtgtcgtctctactctgtatcggcatctggatgataaaaatcgaactagactattggagcgctctttttcactttctagaattcctatcaatcgatgcgacccta

SEQ ID NO: 30987 - DNA, 550 bp, Oryza sativa
ccatcagccaataaaacttagggcatatttgggagggggtggttctcgtttttgcattttttttccaaaatactcaaaacgatctaaggtgaaaaaggttataataaactagaagccaggagttatgtatcaaccaactatttattaaaatcttaactttcctaaacaagaccttaaattgttatctttcatcgtagaactgaaaacaatttaggattagaaaaaaaaaagatgagagagaaataaataggtcgaagtgatatattattatgatgattgggtatgaacggtttcaatcaggtttgacccccccccaaatatttgtatgaaggatgatcttgtttctatatatttttggtgggtctaaggataaagcaaactactggttgcatgagccttggcgcccgtgcattaccatcaattatttacgtagtactcaacaacttccttctctctcctccaccttagacttttctaccgtctataggttaatagatggctttggtaactttattggcacttgccctaactgaaaccaaatttagttttt

SEQ ID NO: 30988 - DNA, 1228 bp, Oryza sativa
acgatatggaattaatcagcttgaaattaaaatttactgtcatgaagtctctaattgcccaaagtgctggtcctctgccttcgttttgattccgactgatttctactggtagcaaagtgcaggttactacgctgcaatttttatagagctcccattggtttctacactgcaaaagacattcttaattacacatattttggaaattgctaccattatttacttaagctaaacacaacttaatgtgcaaagaagagcattcaatattcacagcataatagtgcgaagaatctagaaatccatcaccaaattttaccataaaggcatttcatcggatatctggtgtacctagcagagaggaagagaccaagccattcttgcgtcatggtattagctcaaggagagggaagtactcatttatgatgctagttaatccatgaggactgcctttatctcgaaaaaaacagggagagggaagttagctgagtttacactgataaacattggcatcatgttgacacacaaaataatagtaacacattaacatgcagaattgcagataagtctgatactgattcttgtctggagaggacagaagtgcatctgccaacaatagtgcccagaggactatggagcatgaacatcagcagacagcagctacgtcattggagtccagtaacatactctgagagaatgtttaagcacacataaagttcggaaaatcatagtgtgatttcaagaagaactatgtgcataaaaccagtcttttatgtcctaacatgaagctagacagcagggtagctgcatccgccaattgcagatcaaaatgcatcaaaaataaattatatagaagggataaactggagttgcgatgaattatgtggcactacatgatccaacaaaattctaagcagaaagcataaaatattgaagggaattcttcaaaaaggcaaaaaaaaacaaggaacttatacctttttctccaaatcaagtgcttcagaagcaagacaggccaaaacagaatccacggacataattgtgtcacaatgatctttgcaactaaatggcaatcctctcgattgcaagttgacggtgcctatcatcaaagatgattcagactttaggtgaatttacatatatgacttcctgaggtcatagtgtgcatataaatgaacttaatgcattagaagctataaaagtataaatttccattaaactcgtataaggtggg

SEQ ID NO: 30989 - DNA, 714 bp, Oryza sativa
  unsure (1)..(714): unsure at all n locations
tttaaattggcagagttcttatcaatcatgaaaattatctttatctgttgaacgcacaaatatttttgctagtccttaaaaaggtacaagggtatcatattttctattgcctttgtacttccagatactaagtatctcaaaaaaaatatatcttgatgtaccaaaatttgtttttagtgtattccaagtttccgcatcctaaagcaaaaccatacattatacatggaactccagaaccaccactaaagtatataaaaaaagtcgcatatatatatatatatatatatatatatatatatatgtgcaacctctttaaaccaccatgtatagagcaaaactgaaatttactaggggtcattgtacaaaagcactaacaggtgtcattgtggaacaaataataataacatgaaagaacattgcaagaggattcaccattattatgatatttccttcctcacagggaatatgggaggccatatcatcataaagggcatgattgaaaacaagatttcatccttttctgtcacctcgtaaaccttgtgaagttgcctactcttaacatccaagtagagtgcacattcatctgttttcaagaacacaaactcaggatcgtcccctacataatccatgtaaacaacacgactattcccgcccacacaatttatgtgcanattagcgcacatcgaccgcacacaatggtatcaaccagagtct

SEQ ID NO: 30990 - DNA, 675 bp, Oryza sativa
  unsure (1)..(675): unsure at all n locations
aagaaaaattgaaggggaaaaaaaagaacgcatctggcatactggatgctcaaaatcggtggaaggctgcacaacgtttgtactgcccaaattagcagcgagcagagccaatgaaaatctgtaaatcccccacagtaataaaggacatggaaatccccaaatcagctgcagcgagaggctctggcgccgtcctcgtcatcttcacactactcctcgagtagtccatctgcacatgaacagcttggtggataggcagatcggacggtcgtccacgggtgatgaacgaacagtgtaacaagtttactaatttgttgacaattagtaaaaatctattcgattttcaacttttttgggttcaaattttctgaaaacttaaaatttcaatctggcgattcttttaagactctgacatcttcatcctttctcaaagttaacaacaggcatgggattgcaacaattattaaaatagctttctttactgttcttcggaaaaaaaaagaaaatgaaaaaaaggtagtctggacgagaagagagcccaccattagttttattttattaagatagcagcgagagatgcattaagcattaatcatgaaagggtgagtagctaccagtacgtgttngtatgaaatactctcaattgggtggcacaagagataaacctgccgcatggag

SEQ ID NO: 30991 - DNA, 825 bp, Oryza sativa
caatcaactgaccaaaaatacgcttgaggactctaccctatccattcaatccctaaattttattactacttcagaaacaggcacatgatttatgcaatttgctacactgattgtttttgaaagatctaacctaacagaaattattaggacaagctatatgcgagatatattgatggaatgatgggtcataaaccggagaacttaattactgaactttggaagccatagtcaacgtgggcccatatttgaagtgactttaaaaaggagacaacagtgcattaccccagttaatttattttggaaaaaatacaaattaccccccgaactatcgcgcctgtccgaattacccccatgaaccacaaaaccggacattcttcacccccaactatgcaaaccggacgaattaccctcctcgaaccaattcagagcggtttcgaacaacgttgggtatatatagtactacgcttaggcttatttatattaaaaaccgtttgacccatcgtgaatacttttagtgccctcattatatttattcacctaaaaattaattgatccaatcatattcaacaagacgtaaaatgttaatgaaactgtttgatatataacacgaagtataccgagaagtttttataacagttcttcaaaaaagagtgaccaaacctcctaaaatcaacctattgaaattagaaaatgccttttcttccattaaaaatttaaaacatgccattgtgagggacttgggacgaacaaaccttacatttgttaaattccctttggaaccagtgtgtggaaatataacttgtcaaaaatgtttaattatatttt

SEQ ID NO: 30992 - DNA, 664 bp, Oryza sativa
tttccatttttcatatgaaatgtttatatttgtaagttgactatagcaaaataatttagtgcagtataataattcattttataagtcagaataactttacgggtagtaaatgatttcaaatgaaaaaaatgtcaacaacaaagttgtataacttatcaagatttacaacttttagtttggtcatttttcaatataacatttttttttgaatagtttgaatttgaatttaaaaatatgacaacttttttcagattatgtggggtgcgtcgacaatgctttttggatgtgacaattacatgttgcgcgtatagttaggggagtttcttctggccaaatgatgccactttaaaactgaattagttttttctgtttttagaaaaacatgtgatggatgttgaatctttttaaaaaaaaaatctctcgggttacaaatcgttgtcacaaccttaatagtgtcaccttttttgaaactttccttgttcttcccggcgtatttgttatgaatttacacaagcgccggaggatgttagtaaggaacaatattccctcccctttcgtcagaagtgaccacttaagtggtttgggaaggaacaaaagtaccaccgtttgtttaaacccccaccttgtaacatcttttttggagcaaccacccggtccttataat

SEQ ID NO: 30993 - DNA, 649 bp, Oryza sativa
ttttttggtgtgtggcaatgcatctaacttttttgttttcatcggtctggttgttttagcatattgtattactgtatcaattttcctttcatgtgcatatcagatatgaaccatattggtagtcttaggggctctttggttgcctggatctaccctggctcgcatgggagatgcagacgcgtccgcttgtttggttaactgcatgccctttggagcctggctgagttcatgcaaaagtaggttagccaggcccgaaagaaacggccgatttcttcttcgctcctcaacctggctcactcgatgcaaggtggatgcaccgcgggtgcaagcgttgcatcagtgcgtgcacgtgcgtgggaggggtctagcatccgctcaactcctccctatcattttcatcttcccatttctaattggtctcctcctcccctttctacccttggcgttgccgcaccaaattccctgcggtcaccgttcgtttggcgtcttctccggtgggggactgggagctgacctccagcttcctccgccgaccccaagggagaagctactggcgctattacaatccttggcatctccatcgcgtcgatgcgctgcctttctttttttgtggcacaactgccttttccacccgcaggccaccaaatcc

SEQ ID NO: 30994 - DNA, 663 bp, Oryza sativa
tctcgaaccagaatttctaagctgaatgtgcattaaattcctgtctaggaccagccagggtacacaaacgacaatgttgacatacagacccacgtcttacaaaaatataaaagattacaaatgcagcgggaaagattaaagcgagctaaaccgggaagcttgacttcagcagcgggcgactccactccacaggcaaaccttgacggcagcaacgaagccaacctctctgagacggctccactgagaagaacttcaactctggtgtgggggaaaagagagcaagactgagtactacccactgtactcaacaagtcataccggaagaggaggtatgatgcaggatataaccaaaggaagctagggattcttttgcataaagcaggcatttcaaagcagtagttgaaagcagtaaaacagctgtagtaattaatcaatattaaccaatcactgtccaacgctacaccacgttgcaacaggcccaaccaaccacctgaactacactagttcattaagctaaactaggggtgggactaatcacggtgaatctggttgatcgcccataaccgcgggcacggctattcgaatagttttactctggccagaggtgtacaactgtacccacaagatacgattccagggtaccgagctcgaattcgccctata

SEQ ID NO: 30995 - DNA, 557 bp, Oryza sativa
cgaattcgagctcggtacccagcctgattcgagacgcatgatctgtgacgaacggattttcatcacatgagagtcacaggtttcaaaacatgacataactctttgttattatgacataaataaaatgtcacctatcataagatctcttgtagtgcctgacgactatccccactgttcaacatgccatgtggacagtcatagtgctggaatatgttggtggcacacattgataccagcaaaatctttcgtggtaaaatgtgatttgcagtatatgtattgcaagattcctatttggcacagctgcaccacaggtgcatgtttagagcccatctagcccatcggggtggggggcagaggagtatgatccctcttcttattccttcgttcgctgctttccttctctcttcaatgtttccaatcgacagcatcagtagagctgctcgtcgttgcccttcaatctgcgcttgtgtcaggccatgatccttgtccacgttcccagccgcgcttcatccctgggtcaactcctttggccatatcgtacccccattgatgaggga

SEQ ID NO: 30996 - DNA, 573 bp, Oryza sativa
ccaatatataaagcccaactagtcaagttataataacccaaggtatcaaggaataaagtagtcaagaacaaaagggctataacaaacaataggttaattccacccaatgacattcgaaaataaatgcaatagttgaatagaaacaatagctttaaacgggatcaacatgctcaaagggttgtttgggatctgtgtgacttgccttgctggccttagaattcttcaaattcttctcctgcgaaaacggactctccggaaacgtcggaatctaagcagaaaagagcaaaatcaccaaaacagcacataaacaagcatgaacagtacatgtggatatttttaacagtagatctcaattttagaaaaatttagagacttgaaccaactaaatccgagctaagatgaattagttatgaatttttgaagattaaatcggattaaaacacttatatggattttaattgaattatgacgcaataatgaattatttttgaaaaggaaaaagggatttattgcgtcagcggctagggttttcggtggaccgggcgcacggcgacggttcacggaaacgaacgg

SEQ ID NO: 30997 - DNA, 606 bp, Oryza sativa
cccctactatactctactcaccgtgaatagtcattttttggggatggttttcctttgcagaactgagttataatgctttttttttaccacaactgatatatgcaatgtttactggtagtttgtccatatgaatcttgtgctgcaaaaggcagcatagtttattttcaagttctttgtagttttgtttgttaattgtagcttaggttgatataaatagcttaatgtttgaagttatgctttatatttttcaaagtaaattattgtgtgatgtccattgctctagtgaatttagggtttctcttgaagaattttgttggctgctccaactgctcccaataatgccactaaaagaacagttgcatttttacaagccacctgctagtactgacatggtattggatgtgacatttcctagtacaacaaatctgtcaggagcttatccagatttgttgtattagggaatgtctcgtccaatactaggttggttttttgtgggacggagggaactaccttgtcttgtatagatgacctgattttgttgactgacctcatcaactccactaaagaacaacagttgcattctgttcaagctacctgctagtactg

SEQ ID NO: 30998 - DNA, 695 bp, Oryza sativa
tagctatagaggttcgtttgcatagagcgagcatttataaacagtagttgaaagcagtaaaacagttgtaataataaatcaatattaaccacccactgtccaacgctaccccacgttgcaacaggcccaaccatccacctaggctattcaattccattagactagacttggctgagaataatcacggtgaatctggttgaccgcccataaccgcgggcacggctattcgaatagttttactctgatcagaggtgtacaactgtacccacaagacacagccccacgatacgtttccgtgcgccgacatgccaccacgacataccggatagagaccgtgacaggacccttcgcataaccccctctaaccaagcacaccacacctcaggtttcacccccactcctcgcaaggcagcgggcagtcccctctcgtgcctagatgaatccggaagccgcataggccgtcgcagggcccatccaaactccatcacgctcacccttgcctgatgcgtcaactagaggaaaggtacactacaagcccagccgttgcccacgctggcttgtggtaagtatgataagttcttccagggcatcccgcgaaccggtccttaaatgccatgggcgcgaccatcaaaaccatgcacccacagcgcacaatttagttaattttaattcaccaacccggagcgggggtatta

SEQ ID NO: 30999 - DNA, 550 bp, Oryza sativa
tgaggacgacgggatgggagggaggaggaagaagggaatcaaggagaagatcaaggagaagctccccggcggcaacaagggcggccagcagcagccgacggccactgcggcgaccggcggatatggtgccggcacgggacacaccgccgccgctggtacaaccaccgacgccggcgggacggcgtatacaccgacgacgcagccgacgcacgagaagaagggtatgatggagaagatcaaggagaagctccccggtggtggccatcactgagccctttttgaggttcagtttagctccagctttggagtggccgtacactgttcagaataaccaatactccgatgtatggatgaataaaaacgagtggttgcatgcttcaatgtgttgctaatattaatatcggtcatagcttcttgtatttctgaagtttgtacttgcctgtcttttaaaatgtttccttgtatttatgaagtttgtacctgcctgccttttaaaatgtttccataatgttgctagtaatgttgttatccagtatctcctccgtccttg

SEQ ID NO: 31000 - DNA, 805 bp, Oryza sativa
tgccatccaacagcttttcaaatagcacgaaaatcagtatccatacctattttttttcagcagctccggatcatatgcccgcgtgtgagcaaacacccggtctttcagcatggagtaggcttgcctttcccagtcaccgacaaggtcgaggtcggcgtcgttcaagagatgtggaatgtcggcatcctccattgaggcatcggtggatgagcgagtgctagactcgtcatgatgacttgatcgagagccggctcccatattgaactagcgggacaatcgtctcttcattctgcacaaatgaataagaatggactaactcgggcgggggttagaatagcgagatatttacccaccggttagcttcactaaggaaacttgtgaatgcaactaatggcttaaatttgaggtaaacttgcaaagcgtgaatgaattttgagagcaaagttcggagaggagatgaaaatgagttgaaatgggatggattttcctcaactggccagttggcttaaataggctgcccacaacggtcataaccgaccgttgggacccactagttgttgcctcaaagaaagaggcacccgaccgttgccctggccggttcaaccgaacccctggtgggcccaactggccccactttcgaccgttggaacccaatggccagtatggtcgtggcatagcaaatttttgttgaaaattattttgttttgctctgaaaaaatcatttgaagtaatttcctcaaaactcaaatctaaatgtagttttttggaaactcaaacatgcattgataaagaatccaaattgata

SEQ ID NO: 31001 - DNA, 753 bp, Oryza sativa
agtcgagctcggtacccattcctatacaacatcgtagaatctatagtctcactttctttgattacatacttattcaacacaatgatgattctatttaactgaatccataacctttggtccgactggcattccttaaaacaactttgaatctcgtatatctttgacaaactggaatacatgaataaattgattgcttggttccacatcttatcctctgtctaattattattgcacctgccggagccatatttttttttctcatgaaaacacgaaccatttaactctcttgaactattatagatcatttgcaatatagacattggctggcctttcattcatttggataatagtaacgtagttaactcgtccttttagttataatctgaccaagatgtaatagagaatattgttgtgactgacatcttgcatcaattattattacacttcaaacatgctccagttctcatggcatttactgtagacatccagggtagaatcatatgtgcaaccatctactgcgaatatccatcttacttgattgactattaatgctagaacttcaactatcgacctttagaaattgtctcacattgaatagaccgtcgtgaacacattttccatatatctctctctagaactgttgattcttaacggcaattagcatagtctctccaaaaatgtcttgactcaaaacaattaactcataccaatccccaacatgaaaggggtgcattcctcttcattaacaatctt

SEQ ID NO: 31002 - DNA, 838 bp, Oryza sativa
tatgaccgttgtgggcagcctatttaagccaactggccagttgaggaaaatccatcccatttcaactcattttcatctcctctccgaactttgctctcaaaattcattcacgctttgcaagtttacctcaaatttaagccattagttgcattcacaagtttccttagtgaagctaaccggtgggtaaatatctcgctattctaacccccgcccgagttagtccattcttattcatttgtgcagaatgaagagacgattgtcccgctagttcaatatgggagccggctctcgatcaagtcatcatgacgagtctagcactcgctcatccaccgatgcctcaatggaggatgccgacattccacatctcttgaacgacgccgacctcgaccttgtcggtgactgggaaaggcaagcctactccatgctgaaagaccgggtgtttgctcacacgcgggcatatgatccggagctgctgaaaaaaaataggtatggatactgattttcgtgctatttgaaaagctgttggatggcagagatttgctgtagtagatgagcctggttctcgtttgcttactttgcaattcctgtgcaccttgaaagaaatagaagatggaattttcttttgcttttttccataaagaatacacacttacatggaaaggattaagtacacttctttgttttcacgattcctgtaaaatcaatcttaagaatggaatttctgggttcgagaaaaacagattttgggaagacatttctggtgctccaatttgcaagaaacctaggacgaatgacatccataatcctacacttaggcttatgcacaaatggattgcta

SEQ ID NO: 31003 - DNA, 5027 bp, Oryza sativa
ccattcccctataaaccatagaagaatctcgtgtaggtggaccatacagggagacatgcaacatggcaagaatggaacgcgaaggttcaacatcctcaacacccgtgcagatgtatgtggccggttgggagccatctggggatgcgcccagatggacccaagctccaggccattgcattggaggctcgggctgggaaagtgccagtgagagccgacggcgggcgtatcatgacatacaatggggtgggttgaacactcaatcccccggatcaagcagtatgcctccatctcccgctgaatggcgctcaagttcctctcgttggaacttgggtgaatcaccaggagaatggatacccttgatatgcaaatgggagagatcaaatacaacctcgaggaacacatagcacagacgcaagaatagcagcaaaatactaatgctcagttcaccaacatcaacaacctgatgcagcaacagcacgatgatcttcaagcttgggggagacgtctctcgccccactgaggtaacttgtatcattacatatttccctttccatatgcatgtttatttttccaattgcatcctataaactaaaaacatcataaaattttgaaaatagaaaaataccgaaatgataagttagattttattatcctaggtaagacaacttagttctctttgttgaaataacgaatagttgctctgttttttatctctcatatatgggttcatggttaagtactctctcaaaaattgaataagagtagccaacaattatccgggaacctgagggaagtgagctgcacttgctaatctgagtttaagttgctgtgagatatgagatagtaataagttgctataatcctagtctgagtttgacttgacttacggatgttttattttcaaaaatgataaactttggaagttcctcacttgatataaattcctaccaaagccaaaaatattcatattgattatgccatatacattttggttatttgcaatttcattgaactttgtcaagtccttgtgacttgtgttgatactttccatgctctataatcaagatcaaacatccacatatatgcacatgctaaacttctgcactggaacctagcagatgtccattccatctccataccaccatcaaaataaattctccatgcttatatgtgctttcttctcctagaaaagaaaatcatttatgaaaaaaaagagagaaaaggagggaaagtcatggttataaaaataataaagttatgctctatcaattttgaacatgatgttgaaaaaaaaagaaaataatgtgtagccaaaccctctccttatttataaaggaaggattttggagaaggaagtaagcacaaaggagaagcacaaagtcatggttataaggaagtatgtttagttatctattttagtctaagtttttgacttagtaataaatgtgaatgcaagtatgccatgtttgattgctaccaagctccatatatcaaccgtagaataggaataaaaaaggcaaattgctgaggaatttatattcatatacttggagagatcgagtgaatcatttgaggaacttggatttcttttgcaaaatcatttgaaaaactttcggaataattgttgaatgtagattgggtaattagtgctctaattgatgttctgtttctcaaccgctctttacaaagaaaggcagtgtcttgtgggaatcaggggtaaggataagccaccgtgccaaatttattaatttgagagagagagtacacataccttgcacctgtacatttgagatatacagcatggtagcaactcctgatcaacaatcaagtttttttttgtgagtccttcactcgggacgagcaaaggttcaagcttagggggttttgttgacggttgttagcgatcagtttcgcccgtcaatattacctttaaataaaagagaactagttatgcttgcaatgcatatttgtgtttaaataataaatattcaactagtactaggattattaaccccttgcagagaatgagcacaaaatggaggagaatcgacaacaaaacaggcgatcgatcaatcaggacaatgtcaagaattagacttatcaatgaatgggccaagaactcagaaatgacaggaccaattgggccaaaattcacaagtctgcaaaatatatcaagagacaaggccgctagccgaaggtgggctggattgggccagcccatggttcgaccaaaccctcgctggtaccattggatgcaggttttgtttttggacggcgtggatcactacccaatgacggttggagggcaattccgaccattccaacttcacaaccatcattggcagcctttttaaggagctcctctcatcacttcttccacacacctcaagcaagaagcttcatacatctctcaagcttagtatagtctctagagtatagtggaatagaaatagaatagaatctttagtccttggagtcttcggaagaattcaggtatggctctagtagcttttccttcttttgtaagaattgtactttatttagaatattcttctttatactactttggtattgtactactttccgagtatatgagtaccaactttattatatatccaagttatattcattatgatgctagcttatctaggagatgcaatgatgtgggtataatgatcgtatttacgatgactctatatcatgactctatatctaaaagtatattaataggatttttctattttcctttccactttgcttagataattatgaatgagagtataaatgcttctgcttagtgtcactctaccctttgaaatatattaaccccttcctagactttggttattacaagtaatattaaattattagtatggttttctctattataatcttcccacgagattaaacaaatatgatacccttggaatactctcagttgaaatgctacaatggtatatctgtgcgcttgttggtgaataaccataatatgccagaagtatttctgcgccattgctaggaattatatttctagtaatgtcgttaagaaatagtaacacttgcccgctgtgttgggctgctaagggggtggtgatatgccccttgccggcctaggtcctaggcggtcgcacaaccagcctaggcccagggccagccctgatgatggattttcttttgtgggtacaattgtataccttgaccagagtaaaactattcaaatagtcatgcacgcagctatgggtaatcgaccagcttcaccacgattagtcctactctattgcttaacttgacatagtgaacttgtgtagttcaggtggtatggttgggcctattcaacatggtatagcattgtttagaggatatttaatcttgccttaattaattagtagttttattgttttcaactataaatgtttacaaccgcctttatgcaaccgccttgtctccccttgcatgtatgcatcgttggtgtggcttgctgagtatggtggttgtactcagtcttgctatattccccattttcagaagtgtagtgcttatgtgttgaagatgaatgtagaggacgaaggcttatacctcagttgtgtttttgcctgtggggtggagctgaagtcccgctaggatcgcccgaatttttgttgttattgctttcttttcggtttgaggactaaatgcgtcctttgtaagcatttacaggttatttacgtttggatctatatattaatttgtcattttgtgtaccttggcttaattatggacagggatttatacacaaaatagtctagaaattggccaaatttcatagcataacatcgttgcaaccttcaatgaggggtaaaatgagagaagggagccggttggtatttcttaacgacattactagaaatataattcccagcaatggtgcataaatactctgggtatattatggctacagagttcatccgcaagggcacggatattccattgtagcatttcatccgagagtattccaaggttatcatatttgtttaatcccatggaaaaattatagtagagagaaccgtactaataatttatatattacttgtaataattataatctaagcatgtgttaatgtaattcatagggtaggaagacacacaagcataaaactactcattctcatattattctaagctaagtggaaagtaaatagaaaagaatctattcctatacttcttctagtatacgtattatacgtacatcctagttataatattaactagctaatatcctcttttcgatgtcctcctggtacttcgagaagccacccctgactgtcgagttccatacgacagcccatcatgaccatacaaccggggctaaatacggaggagtaccgtccccaggaaattaacttaggaatatatacacgagcgaaggaatacccatactgagctgtcaccatcagcggcccacctctcttccgcagcatatatccctaaataatgatacccagtaatctagacaccacgccaaaactactatatactactctaatatcatcgtcatgacatagagtaaatgcataagcaaacattatacccgtacctatccatctcccagataagctagcagtttaatcaatataacttggatataaagtaaagttggtattctaaataaaattggaaagaattacaacaccagaattgtataaagaagaatattctaaataaagtacaagtcttacaaaagaagataggagagctgctagagccctacccgaactcttccgaagactttcggactccgatttctattatattcctactccactagcttgagaatactaaactaagcttgagagaatatgagagagttttgcttgaggtgtgtgttgaaatggaggatgagagggctttatatagcttgagaatgacaggtatgaaggttggaaagattggtaatgccctccaccatcactggggagccatctcagccgtccatccaagcctcgaatcaaatggccgtgagaaaggttcggccgaacccgagccagggg

SEQ ID NO: 31004 - DNA, 1406 bp, Oryza sativa
tagtggaatattattattctaacacaaatatgtattgcaagtataactagttctcctttattttggtagcattgatgatcgaaatcgatcgctaacgaccgtcaatagagcccgagggagattttcatagtgattggaagatgagatcaagatcgagctgtgcaggaatggctggccacggagagaggcgacgtgggcaaagaatataggcacggttcgtctccggatttcgggggaaagtggaggagaaggtggaggacgtgaaggggaccgcgcccatgaagttttagcgtgagaaaggggacgggcacgcaggattttgctggatgtgggtgccgcggcggctatggcagtgtctagccaggggaggaagaatgccctgacaagtgggcatacccgtcggcagcataggagagaggagggacgtgaagcagactttgtggtagggagagaaggcaagctgtgctgggcgggagcaagttggctggcagaggaggagaagggatggaggagtggagatgggctggaagtaggagaaaaagacgggccggaaatagcccaaggaagcgatggagagtttaatttgtcgttcaatttaaatttaattaatttcttaaatgaacattgtgatattaaaattatttcttgagctctgaaaattcacaggaaatttcaaatagtactttagggcatgcagaatattaaaaaaaatatttctagctaaaattttgaatgaaaattttattttccacattattttcacttttaattagctttaacttttaatataaattgtagaaatttattatttaatgatttttagtcctgaaagaaaattgaggcgtgacatgttttccatgcaattaaaaatctatcatgtgtacatgtggtatctctgactgtgtattccttgtaatcaaaaaaatatcaaagaacataacgaaggatcaatattaagtgcacatcatctattatggatggattagttcaaaggtgccaaaaggtagagcaacaaaattaaaccgcacgtacatgcagattagtcagaaatttatgaaaataccttcatgatttaattacagatatggtggccgagagtggatatttctgggtgcaaacgaatttgtggattcatggatcaaagccttgagcccttgaccaacacctgtacgtgcacaatttttatggccaaagagcaacattggttgtgcgtctatgtatggttatgatattaatctacggtcacgatattgtaatgcatctattcaatggccagatttttttttgttaacatttgagctcgtagaatgtatccaagtagtataggtctagatagacagacagacagatagatagaaagatgtaagatagatagatagatagaaaggtgtaagatagatagatag

SEQ ID NO: 31005 - DNA, 3572 bp, Oryza sativa
ggtgtaagatagatagatagatagatacattgattgatggatggattgatttagcatttttgaaaccaaataaaatgtaatttaatagaaagaaagaaagaaagaaagaaagaaagaaagaaagatagatagatagatagatagatactccctctgttccagaatataacaagttttagggttggacacagttattaagaaagtaggtagaagtgggtgatggagggttgtgattggatgagtagtggaagtaggtgggaaaagtgaatggtggagggctgtgattggttgggaagagaatgttggtagagaagttgttatattttaggacaaatccttaaggctaaaaattgttatattttggaatggagggagtagatagatagatagatagatagatagattgattgatttatggatttatggacggattgatttagcatatttgataccaaataaaatgtaatttattattcgagaatagaacaatcaggatgaaaattttcaaaaccgatggatagaagtgatattaatcaattgtacacattatgatatgacaacaaaaatattgaagcagtaattcactatcataaaacaaacaattaatcataacaatttggaaaacctatgtttagaagtggctttaatataagataacttaaggataaggataaaacataccagaaaatcctcagcttacaaaagtaattaagtcaacattaatttcttccatatataacacctatctttggtctatatatatgaaccatggatcctgaagttcacactcatcaacattcaactcaatagtcacaataagacacaaaacaaaacatagtagctcactcttcacaatatgaagcacgcccaccttggactcatgttgttctgcttggttcttctagttttctttgctatccctgcacaaatacgaggcaattatttttttttgaatttgtatgttttttcatcattttctttgcactggcaagataataaacatatgactccttatgtctctaggtcaaagcacaagcagggccccggtgggagttagcattggagaacttaaacttagtgtttgcttttcggcccctccatcgtggtcttgctgttcaaaggacaacctgtgctatccatcacttgaggcatgcctggaaaagtgcaagtacgatgaataggcacgcagccgactcagaggctaagtgctcgatgtgtgattgaattggacacaatatttactaataatcatatatccggtatatttgggaataacatatgtatatgttccaacagatatgcattttctaaatccatattgaagcatatgagatgcgtggtgcttatgtttaggagttgttttcataatcaacaaaatataattccatattttcaatgctagaataaatattgggccaaaagaaaaccaagaatttcatttcataaatttcgttatcgcacataaggacccaataaattgagtctatgaaaaagagttgagcatgctagtgggcgtagttgctatagcgacactagacgtgcatggttgcgcttcccatgcaggttttggttttgcttcacgtggcatctttagcctcccgttcaaagatctctacatatcagaactttcagttttcctgaaacttccatctccaaaatcacaaaactttctcttcaaacatatgaaaacattcatctgaaaatcacattactttccaaccgtatctaaaacttttatctaacaaatcataacaactttcaattcaactataaaactgtcatctcgaaattgcacaaactaatgattcaaattaaaaacttctaggcaaacttcataaaattttcaattgaaaaatccaaaaattttcatgctgtactcaaaatccctcttcctcctcaacgatcgtcatccttgtaataacgaccgcaattatgaccaagttgttcattcctgctattgccgctcctgcacggtgtgtggcagcagtggcgagggtggtgtctccatgtggcggctagcaactacaatgctgcccctggtggctagagttgaggagctatggcatgggtggtgcagcacaatatattaggcgaacttctccaatctgttgatatgtagatatggcacaaaatgttgaaggaacaacttcaacatgctagtagataatgccgtaagggcaattgtgaaagatctcgaatccacagacagcaagagcttagtccaaagctccaagaagatttaatccaagttgtgaaataggaacatccagttgtattggtaagttggtaaacggaagtaagctacaaacttgagggcatcgcctcaatttataggcttcaaaaccccatgtacaactcataaacaactatatgataactagatgacaacctatttgataagtaggatgttactcaaaacaatccatctattactcaatgacaccaagaacacaactcaaaggacatatatcttctagttctagcagtataaggacatatgcaatgacatcgtaattattgttaagccttcatgaagcatgtactatagatgcaaaactcaaattgccttcttgttcttagtcaaaaatcatattttgctcgtaacacttatactttttgaattggtcgtctaatgtccctcatcaatgggggtacgatatggccaaaggagttgacccagggatgaagcgcggctgggaacgtggacaaggatcatggcctgacacaagcgcagattgaagggcaacgacgagcagctctactgatgctgtcgattggaaacattgaagagagaaggaaagcagcgaacgaaggaataagaagagggatcatactcctctgccccccaccccgatgggctagatgggctctaaacatgcacctgtggtgcagctgtgccaaataggaatcttgcaatacatatactgcaaatcacattttaccacgaaagattttgctggtatcaatgtgtgccaccaacatattccagcactatgactgtccacatggcatgttgaacagtggggatagtcgtcaggcactacaagagatcttatgataggtgacattttatttatgtcataataacaaagagttatgtcatgttttgaaacctgtgactctcatgtgatgaaaatccgttcgtcacagatcatgcgtctcgaatcaggctctacgacgaaacatacttttttgtcattaatctagtgatgattcttctctcgtcattaactctgcattatcttgcaaaaaaaacacaaaatctcttgtgcctaccaaggtccatgtagtatgcaacatgtttatgggcctcagcccaattgcaagcccaattagattttgggcctaacctatataaaaagaagtattttattcactattttcatcccaattatattttatccaattttttttgtgtgaaataacaaatggttgaaccccatttcaaaagcccatataggcccaagcttatacaagcccagataacatccaatagcataaatccaatatacaatatggcacaagcccaacatcccatataactcaagctcaatgatatacgcacaaattca

SEQ ID NO: 31006 - DNA, 693 bp, Oryza sativa
cgagtaagtttgcttggcccctccaaacggatttgcaaatgcaaccttcccgtgattgcaatcaacagaggatgtcgcagtttttgcgcaggtcattttatcacttgaataagggcatattttgctgttaaagtaccttgcagcctgcatgagaaggttcagagatcagaacatgaattcggtataatattatatatatatatatatatatatatatatatatatatattataccgaattcaaatgttcaatataaacttgtagaagagaaaatattgttggtccctagtccaatgtaaaactctgataataaaagatatcctagtgtagaattcacaagaagaaatattattttcccataaatgtatacgaggtattgtttgacatgccactgttccatataaaacatactccctccatccgtgattgcagtggcgaaactaggatttgaatactgtcacgccctgaagttcttctccctagcaaaaatttaattaataaattgtcgcaagaaattatttgtttaaaggcaagagagaatttttcttggaatcggcatgtggaatttttcttggattctacatgtcaaaatatgctaacaggaattttagtggaattttcagagccttggaaataattttagtggaatcccaagaagttggaggatatacctatagtacaagagtatcctga

SEQ ID NO: 31007 - DNA, 652 bp, Oryza sativa
ggtgttggttaattaaaattaactaaatggtgagctatgggtgcatggttttgatggtcgtgcccatggcatttaaggaccggttcgcgggatgccctggaagaacttatcgtacttaccacaagccagcgtgggcaacgactgggcttgtagtgtagctttcctctagttgacgcatctaggcaagggtgggcgtgatggagtttggatgggccttgcgacggcctatgtggcttccggattcacctaggcacgagaggggactgcccgctgccttgcgaggggtgggggtgaaacctgtggtgtggtgtgcttggttagagggggttatgcgaagggtcctgtcacggtctctatccggtatgtcgtggtggcatgtcggtgcacagaaacgtgtcgtggggctgtgtcttgtgggtacatgtcacgcccggaatttctatccaaaattccaaacgcttacatgtgtgtaaaccctcgttcaggaatcagccgaggcacacaataacaaagataatagagtaccattattactctaattaattaacgaattaaatgtcattacaaaagtagataggtcctttccatccattaagatttaaacagcggaaaattagaataaccggggcagaggacttcacttcacaggcaa

SEQ ID NO: 31008 - DNA, 552 bp, Oryza sativa
agcctgcgcagacacaaccctgctccctacccccttcgaccggatctaggtgggagggggcaaccacgctggggtggatgtagccacagccaccaccttccagtcgctcccgttcatctagatctggaagggaggggagggaacccgcgccgggtaaatgggaggggaggggaaaggtgggaggaaaaagagacttaggctgtgtgaaatttgcatgggtaggtggtgatttttatgaggtataaatttttgcaggcgaaccttttacaattaccctacaaaaatacccttatttttacagacggacctctagatccacctgcgaaagctaatttttgcaggtgacactagatttatagtatctttagctattttttataaacggtgattttatagtctgccagaaaaaaaaatcataacgttgggaaaaataatttttctagtagtggtaactagtgggtgcaatcagtcagacaatcaaatattttgaggaagctagttgtcagttaggtgtgtggttacagttttcagataataaaagcttttattgaa

SEQ ID NO: 31009 - DNA, 671 bp, Oryza sativa
tacaccccctcctctgctcctcctccccattctgtaaaattgaaatgatgaattgatgcatgatgaatgtgatgtgagatgaattgatgcatgatgaatgtgatgaaaattgatggatgatgaatgtgatgtgagatgaattgatggctgaattgggatgaatttttgatgaatgttaattggtggtgaaaatttgggcggatgtagtttttttttgtgttgatagaggcatgtatgagtttgtgcagcctctgaattttttgtgcaccaactaaaatagatgtgcagccactgaattttatcgatgatagaggcatgtatgagtactgtcctttgttttcttgttgcaaatgtgatttaaattgtacaatcaaaattgatcttgtgctcaacatattaagaaaaggaattgttttgctgctgcactttttttccaaaatgaaatgcactttcttttgttcaggcctatgctgttgctagccattgctgatctgaaagcatgcatagtttctgcaatttatatatatatatatatatatatatatgtatatatatatatatatgtatatatatatatatatgtatatatatatatatatgtatatatatatatatatgtatatatatatatatatgtatatatatatatatatgtatatatatatatatat

SEQ ID NO: 31010 - DNA, 583 bp, Oryza sativa
gccggaatgttttattctattattaaaaaaaaaatgaagatgcttgtcctctgttttctctgttactcgctgttggccctgttgcccttcagagattttgcaacttgcacggttgttttgttctcctgtatttatccatttccttcattgaaaattcggcagtgtgtagtaggaattttttttccatcactttgtctttttttaccattcaaaagtttattggttgggtacctacgacagagacagggacgtaacccattttttttctttataaaagagcctatagggtgaagttttatctcaaatattgtggattccgcccccattccttttagcttgtttatcatatcattgttgcgatttatttactccatatttctaaaagtatgatttctcaaaaaaaaattcttatatggtgttagcagatcacttgttgttacgagctatctattaattttattttttattaaagtacttaattatcctgatagatatctgtgatactaattccgggaataatttgttccaagcatttgaactactcataccatttaattattcagatgaattcgatgttctatgg

SEQ ID NO: 31011 - DNA, 669 bp, Oryza sativa
catgttgttcttgaccaacccacggcgcaccatctgggggaagtcgatacgggccgcgtcgtacgcctccaccatgcgcgccaggtgcatgatggtagcgtcatcctccgagctagcatcttggaaggtggcgtagtcgcgggctcctccgcgacgagggtggtagcggtagggcgagtgctgcaactcgtccgggtagcgctggtgaagagtgccgatggcgaggagtgcggcgttctggcaagcggcggagaaggaatctccacccgcggtgactgccaacgaagtcctctcgggtgagccagtgaggatcactgcagtgacctcctaggcagcgtggggctctgcatcgtcaccttcctgctccaggagctgcttgccctggtagtccactccatgcggataccccaagacaacgcacatgccccgcagctccaaaacgaaaccagtcaggtccagaccacgacggttgatgctgccggccatctacaaacaaaaacaaaagagaaaagcaacattttaaaggtcagattttgacgataaatgaagcagcaggacagagagagactagaggattttcacaaataagaaaggatttttattttgaaaatattgctaaggcttgggatctaaggcttcgtctagggtcaagctggctctgataccaac

SEQ ID NO: 31012 - DNA, 1726 bp, Oryza sativa
tctgacccgggaggtcggtacattaccaaatgagctgttgaaaacatctcttaaagtcaaatcgagacgcaagtctcttttcggcccaatcttagaaagaaataaatcacttagtgatttcaaaatgatttcaaacaaaagatttgcaaaacaaccttgcctctcttccaagcttgcattaaacacctaagttcccgtgacttcggagtacgaaagtactcacccttgctctatataaatatatatatatagttcctccaccctgaagggaagataaagtgaagtgaagatttgggtttcgtcctggttcccagccgtcgcctgtggtgttgggtgttagaccgttggttccgctgctgctgctgctgttggtgtttcctcgtccgcgtcgtcggttgtattctcgggctgtctaagctgcaacctatgttaaggtaaataagtcctccatttattttaaggattgctatgattcatatttgtcaccgtgggtgccagcactatgtcctgggactggtactgagatcgcagtttcgtaggaagtggtttgcgccgttttccctacgacacgctcctgtcaggtgccgttgtacggcggtatcagattggggtgtgacaatttaactagtatgtattaatgtaaagtcaactaaccattgtaggggtgggttttttttttctgatgtggaatacatgagagccccctactggaccctacctacatgacctaatcattccaccacacctagcaagaggatggtgcatacttacaactgaaaaaaaaaggcgtggtgacactaatgtttgatctgattaattatttgaaatgctaccattttaagcattttcatacaaagaagaccatatgtgcacattttcattcaaacgaaaaacatatgtacattgcccatttttcacccacaaaaacaatgttgcatggaacatttgattgtggcaacaatgttgtattgatttttttttttgcattttcaatgaaatacatctggtcatttccatgaaaaaaattcaaataatattgtaaacacattcccattaaaacatacatttccaaatatgcacatttaatttccatgaaacatgtgcaactccattgtacaaaaacatatacatgttgaaaaaataacaactgcacactaccattcaaaagaacacttagcatcactctttattgccccccttatgttttctttttcagaataacatctgcattttacatccgtatgttgcctattttgtttcaattttattataactatttaaacggcatgtgagaaatgatatagttcgccattgcaggcttaaaatcatttgtccaaacatcatatacaatatatgataatgagaaaaaaaagtctctgctacatcaatttttttatttaaaagaggcagttggtgttggtgacgatgagtttgccatcatacactctcatcaccaactaaaatacaggggccaataaagattgagacatacataccatccattcctgaagttacgaaggagaggtagtaatgcatatatacattaattatttccatgcagattaaatgttgatagaaaaatcaaagatttttataggataaattatgatgacacgagtcatatacgctaaatttgatatgcacttagagaaaagagaaattttacggtccttgagaggtagtactgtgcaaatttccattccttactggaggtactaagagataa

SEQ ID NO: 31013 - DNA, 1305 bp, Oryza sativa
tgaaaggggtcaaatttagaggtagtctaaatttgagaagattgatgaatgaattggaataaatgtgtgagggaacgccagtagaattgagagacctagctaataaatcaaaatttggagagagtgcaaaattaagaagattaggaaatagttagaataaatgcgtcagggatttctaataggattggttgtcctaactgatgtggttggttttgactatataaatactactagaaaaagatagcaattacgtacctaagatacttatgtggagaaatagaatgggttttagaatttctactttttcatctagagtttagttggtgagatgacatatcactactacaaaacgccggttcttaataaaaacaaaactgacacccaaatattgtcagtcgcatgtaccgtttttcttttataaaaatcgacacatataataaccttataggtgccgattttttaaataaaacgacaccctaaactgttgagccgagtcgatcgaccgagtcctttcgtccttatcctctcctcaccttctcctcccctcccacgactctctctctctctctcaaacttaaactcgccagtggaggtggcagtgtgcgtgctctcgcgaatcctaggtgagcgactcctagcggctcccacgcggaacgcgggcatgtaacgctccgctttttgcgtgacgttaaaaactaattcggcaaaatcctattcgcgaaaattttcgttctttgtgtgagagtctaagttgtgccaaggatctcaatttaatcctgttgttccctctcattgaaatcaaaatcctccacctcgaaaattcctcttccgattcgagtctccgaaatcaaattccgagagtcaatcccttcccttgaatcctctccaaataattgttcccattcccgaaagtatcaaactcccactttgtttccttactcgtctccttgaacccttgtgtacaagtatcaaatttagattcaaatccccttttttgaatcccgttggcgactccctctcatccaaatcccaattcttgaagtcaatctctcccttccttgaactcgttgccaaatctttctcccgatttcgagagaatcgatcctcatccaaatcatttccttgactccaccctatgttcccgagaacaaatacccaagtattccttttgaatcttttccatgacttctcctgagtttcccttgatacatccctaaaccctcgagcccgaatatcaaatttgaattggaatccaaaccctaaatctcaaacaattctatccaaatcagaattctctgtgaaagt

SEQ ID NO: 31014 - DNA, 1083 bp, Oryza sativa
cacatacggaagtatatcgtatggatgatggtataccatactcgtatgtttcgtcagtcataggataagaggtatgttttatccgtaaccatgatagattcggtatcacaacagcatgctggacggcaaaaaagctcatcattcaaaccttgcagtagcacgaggcataaggtaatagatgataatactggatcaaaatttctgcttattacttgagctacgaacatgctttctaaactgctaaacgatataattttttaaagaaactttttatatattttttctttaagcaatgactttatatttcaaatttataatgattaatacttaattaaatacacgttaattgctcgtcttattttccttgctaactagccaagcacaacagccatatcaaacgcagccgtcatcgatgacgaacaacggaacagccgaacaagcaagcgtcactgatcagatattacagtagttgtgccacgtgtgtagcacagaccaggcaagtaacgaggaacaagagacagaccagcaccatataagactatctctaacaataatacccttaacaggagacccattggacggtatgtgtcacctgtggcaaaagggtcacgcacctatttcttgccttctccaacagcgaacgcaaaaggaaaccctgcaacacggacagtttccttcgtgggcccgcgatgaaatttttacgcgggaaacggagggtgtcgtgcgagatataccgggcgcggggcgcgggactgcggtgttggctcgatggcgggattgttttgccgccccggctgcatgtgagaagggagtctcagtggcagcgaggtagccgccggcgagcgaccgttcggacaaggccgaacgttggcgcagcagagtcaatcagaacacaggtaatatgatttctagcatttgcttgttcgatgtcacattcccttttaatttgtggctaattccgttcgaacatttgcttgttcggacaaggccggctgcatgtttgcttgttcgatgtcacattccctttcaaaagaatgcaaagcggcagaaaaaccaaaagcccactgatctgtccaaaagatt

SEQ ID NO: 31015 - DNA, 696 bp, Oryza sativa
agattggggtgtgacagggcaccatgggcagcattcacgtcgcacaccgtgcatgaggtgggagggaggcagtgaggggcggaaaggaggcggaaaagggaaaggggaagcagatgctacagttggtgggggtgctgctgcatggtccgtcaacaagatcaggtacctcgccgtgtacaacaagtagagcacaacccctccccctgggcccgctcaccagggcgacgtgacgatgccgtctcgagctcgataaccaccagatctcgttgtgttccctttccctttcccaatcgttgccgcccatcccttcgatgacgatgagtttttttgttggatttgttatttagtcatgacttagaatgtacaacaggtcttatttttttaatttgtgattcagcttgtacataagttttttttgttcgatttttttttggggttacggggagcaactcaatgcatcggttggaatcgagccgatgcatgcattgagaatttgagactttttttgccacatgtgtgcctcaaaggtgtttgctgtggaaccacaccaattatccaaggtcattagtcctgcctgagtggtactagataggaaatcccagcatctatgggcttgttcggctcccatactacagtagttgtgttgctgcctatgtcgtagtgataatagctgcaatattgtagcagttggctgtg

SEQ ID NO: 31016 - DNA, 593 bp, Oryza sativa
gaagtctgaagatccctttttggtttcgtgtgtgtggtccaccttcgaatctcggggtcgagattcttgtaagggggggtggatctgtaacgctccgcttttcgtgagtcgttaaaaactaactccgcaaaatcctaattgcgaaaattttcgttctttgcgtgagagtctaagttgtgccaaggatcccaatttaatcccgttgttccctctcatcgaaatcaaaatcctccccctcatccaaattccccttacaattcgagtctccgaaatcaaattctgaaattcaaatccttcctttgaatcctcgccaaatacttctacgaatccagaatttttcaaatcccgcctcgaatcctttccttgactccaccctatgttcccgagaacaaatacccaagtattccttttgaatcttttccatgacttctccttgagtttcccctgatacatccctaaaccctcgagtttgaatatcaaatttgaattcgaatccaaaccctaaatctccaattctatccaaatcagttttctctgtaaaagtctactttacctccctgagttttttttggatggaccgattctcctccccc

SEQ ID NO: 31017 - DNA, 762 bp, Oryza sativa
gcactttattcagggggttagaatatacaccaacagaccaaatttggtttgctgcacaccgggatacagctgccttgtttgaggcttagagcctatttatgaggcccaattcaagacgagaacttgggggccaatggccttaattttcatgaaattgatttaactagcaattttggagaataaccccaaaaaagattgcgctccctagagattgaaaaactattcgcaggatctgctattgataatgcattaatatctctttcttgatgtgttaatagcctttaattaggcaaaactccaaatccctttttttaaggacacggtgaccattgtgaaactcgtaacgctaagaaatcatctagatactatcacatatcagctcaccacatctagcttcgcccatttcgagctgtgtccacttcagatacatggacatggttatttgaatctaccctacgggatcatctctagatgatcaccctagtaaagtattactactctttgatcagtgcttgctgaaaacctagaaacatgcccatctcgaactaacgagtgctacagaagagcaaaaaatcgtatcactacaactcctgagtcctcccaagccaaaaccgtaaggctatggatatatgcactgcaggacacaccggcctaaaaaactatataaaaaagttcatctatcagttgtgtctcctagcatgaatggacaaaacagcagctttgattgctattttatgctatagcaacgacatttgttatgat

SEQ ID NO: 31018 - DNA, 681 bp, Oryza sativa
attttatcaagcgaagtcattcgtcttacaaattctataacaaattaacaattagctatagtttctttgaaactaagaccggtatatatttcattataaagaaaagtacaaacacaaatgcatgaaaagtattaataaagagctaaaagaaggtgacatgtgactcagattgtgggcctggctaaccaaagtaccttgcagcaatgcaactaattactccagtagttagctttcatgtcgtcatgagttcgtcgggacaacatatcagaaattcgacttattacgggcctccacttatttgccttctcgggcctctcggcctcttgggctaccactgtgggttaattctgcagataatgggaaatatgaaagaagcactggttgggggtttaacaagtaaggttattgattctttaaataggatcgaaggtacacatgccaacaccgaattcaacaaccggggctatcagttcacgatcgacgtgatcgagtacattcctaacctaacattggattttcttttccattgggaggattacaaatatagattttagcgtagattcaaaaacagatccgcactcaaaatccttatctaaaattttcgaaacaaatatatccgcttttggcttgcgcattgcaaccacatctagcagcacgccgcaggcgcgagcttttcctctt

SEQ ID NO: 31019 - DNA, 550 bp, Oryza sativa
caccactatgaacaagtacgctgcattcaaaacaagttgttaagactagtgtaagggtccaaagcacttgtcgataacaacagaaactccaatgtatgctcagccaggacaagctaaactgagaaatgcttcctatacacaatccaaaaacttcacaagtaaagggtgtagaagaaattgtctaagttctctgcctgaaaatagcatgtgacatgactgaccactgacatttgtaacagctatgtaacacaaattgcgtgtcaatgcacaaacaagacatacaagggaccatatcagtatatacacactggccacaacttcaaactggaacgagtgagaccaaagtaattactaaagaaaacaaggtggtcattcctaacattggttgcagagtttaagcgcagcaggctggctgtgggccataggatacaggagaaaaacagcagtgcagctgaagcctcagctagctgatgcatgcactgcaacagtcttgaacacatgtctttgatagtcttttttttttcctaataatatgttggtgtaaaaatat

SEQ ID NO: 31020 - DNA, 515 bp, Oryza sativa
aattgatggtcgggtggtgacagaacaatcatcaccggtagctactcccttttataaggagtatagatagactagcaaacatacaacaagggaaaaaaatcataaggttaaaagagtaaagataaagtcacacaatttgctattgaaaacagggatagaaatgcaaatgccatgtttcttgggtcggtttagtcctaaaatttcatttgtgcaaactcgtccctctcaatgttgatttgcaccaagccaactcaatgtgaatctagcgtaaatagtaaaatccccgattaaagttcaaattgatatctcacatgggtaaatgtataatttgtacttcctctgtcggtgacatggggccgggggtatcgtgactagagacttgggtagccgcggtcacccacgtggcctgaccccctcgggggggtcgggcccgagggtgacgtggccacccctccctctgtctccccgaggggtcgggccgctcccgtttcggccccgagggctggggcgccccc

SEQ ID NO: 31021 - DNA, 562 bp, Oryza sativa
atccatgatgtcatcgatgaatgcagactgagattattcagaaacgaatagattctgctgttttgggaattaagttgactaggttccattttactacctcaggttctaaacaaatgataatgttgttgattttcttttacagatgtttcaccatttatcttattaaaaaccttacataattattatttattttattataacttgctttaccattaagtgtactttactcattacttacattttcacatatttgtgcataagttttcaataagactaaccgtcaaacatatgtcaaaaagtaaacgacatcatatattaaaatttagaggaagtgtcatttatgtggattccccaaagttattaatatatagttggccacataatcaaaagatgaaattgtcaataggtttggatcatttatactgtgatgcaatactacaatagagatgactgtaaactgtaaaggaacaatcggttgattcacttttccccaaattctcccatccgtgtggtatggtttagccgaattgggctgtttaaaatgcatttgcatggggtacct

SEQ ID NO: 31022 - DNA, 656 bp, Oryza sativa
aatgttagatacctgttatcggttgtatctgtttgatgatttaaataagctctcctggtcaggttgggaccagattcatggttcagtcttgtacaggtacatataaatgagtcatgctaatttcctttttaactgtatctgggaaaccaaacttccttaaaaaataatggttttgtcatggtttctacccaagagtagtgtatcgactagagataatttgaaaaaataggctagcagaatcccggcacttgtgtcttctgtggttctgaagacagagtatggatcattcattctccaggtgccctgtatatgttggaagatatcccctccatcctaaaaaaaatccaatcctatctacaaatttggacatatatgtttctagattcgtagctaagatttggtttttttctgggacagagtagtagcttgcaatgctttcgatttttgctcactttctaaagtgtggtaaacttgtcaggatcctctttctccaaaacaacataaaaaaacctaagttatcgttggctttacaccaatttgctttggtcaatcggaacaaagaaacggttatttttttcgtcctaactttttttagggagattaatctgatcatcaggttgtatctcccctctgcacgtaatatttttgtcatgcta

SEQ ID NO: 31023 - DNA, 1971 bp, Oryza sativa
acgaagcgagagagcattgcgtttttccttgggcccacctatttatagggctattgtgggctcacccgtgtatatgggccgagaaaatcggtccaatggacggacggcccatgcttgctatggcgaattgtcgatcaacgttatgccagctttaccacatacgtgatgatgatgcggttaaattacaactgatctgcgcagttattcttgctgcagcaaaaggtgagtagtttccatatgcctcaattttcaggagaaaaggcctcgactggagaataaaaggttgcatatttacttggctagcatatagtataggcttaaaaaataaaaaatgagttaatatgatatcccataataattgtatttctaatatttgattttgttccaaaataattgtcacaatagaatactaaggatagcattaatcacctctcatccaaatttatctctattttaccctcaacaaccctccactcttaatataaaccattgctacgggtattatagttttttttttcaaaccttaatatatgataacaacgtaaaactacaattaatttagaacagaggtagtatttcaaagcaactttcgtataaatttgttttaaaaaagaaaaccctatgtaacactgcctcaaaactttttcggactgtggtttataattttaatcatgggtttgctactgtaagcctgtaacgctgatattgtcaatgctcaatcaaccaaactaacctattaatcgcattcgcgcgactctaattactctttctatttaaatgtcattacatgttatttatgtttaatactccctccatctacatgttatttatagtaattagcttgatgtgaaagttgaattgaacttaaatgtttgtggagtgatatatcatatgttaatacatcttcataatttttttcataactatttaagtgacgtgcaaataacgaagggacatcccctcgaggattaaaatctactcccaggatactagcaagtgtaggaaaaaattttagaaatatacgcattttctgtagaatttgcaagaaaatactgaacgcgtgaagatttgcaaaaatataccgccgtcgcggtttcattgagcgagaccacggtctcacaagatcgaggcgcgagaacgagagcggtatcgctcgttcggtctgcgaggacggagcgcacacgatggcctaggcggtcatataatatcgctttgctaattagggagagcgcacggtgtcgcactctaagggtgagtttgaggagaagaagattaagaagattaggaagatacgcaaaacgaggtgagccattagcgcatgattaattgagtattaattatttaaaattttaaaaatagattaatataattttttaaagcaactttctaatagaatttttttaaaaaaatgcaccgttgagtagtttgggaagcatgcgcgcggaatacgatgggctttctcacccaatcccccaggaacgaacgcaccctaaaagtgcgagagcaagtcggtgggtcccggaactgctgcgatgcgcgatctcgcacgagaggaaagcgagagcgctggtctcacgcaagagagatgcgagagccctggggccggcgactgcaacccaagcagtctcacgctacaggaacacgagagcggtaattagtgattaattaccataattagtgattatttaatgattattaatgatcaattagttgctaatcaaggtgattaacacattaatcactggccctgtggcagccatgccgtgcggtctcgcacattgtttgtgcgacaccgtaggctctagcaccgatacgtcacattgccttcggtctcacaaaaccaacgtgcgagactgcgggcccccatgcgcaacatcgcactcccactttgcgataccacagctgcctgatctcccagcaaaaaaattccgtggggcccactccacaaccgcctttgcgataccacggctg

SEQ ID NO: 31024 - DNA, 659 bp, Oryza sativa
gacaaattaagcagtaacaatcgctaactcctgctcagtatagggcaacaacaatgtatatagcaaaagtagtccatatagatgggacccacacatatagactataactattgttatcttcacaatgtatatggatagcaactagtattaggaggagagaggaaatagagataaataacatattttatcctctatgggcagcccatatgcttatgggtggcttttgctattttcttgctatgtactagttccacaatgttgttaggtggttgaatagaatattttattgcttatggactggttttatactacattgtggatggccaatgtcatgtaccttatagcaaaatcagttggagagagtagctatatttatggcgctatatttttttttcactaaaaaataatcggtatatatttatattgtaagttcttaaattacatatacaatttcattgtatttacaatgtaactctaaatattacatatgtaagtcctaaaattacatatgtaaatcctaaaattacatactaattacatatgtaagtgacgtgcaagtgggttttactacgtaagtggtgtgtaagtatgatgtgtataaattcgtatgaatatataaataactgtctacctagctagctttaattagctagccagct

SEQ ID NO: 31025 - DNA, 602 bp, Oryza sativa
ccgtccttgtatagatgaacagggttttacatttcgggaagcaagataatttcagcggccatcaaaattccgaaatttcggatactttgaacggttttttttaaaaaaaattaacatatttttactgaatttgaacaaattatgaccaaattcataaatatttgaaaaaaaatctagaaaattcgctcgaaatatttgcttgccggtggggaggggggaggggggatttcggcaatttccaaaatttccatccctgtagatgattggaattggattaccgatccacattccagggctcccatcagttgccattttacctaaaatggcttatttggcttattagaaaattaaaattaatttataagtaaaacttttgtagatttgttcgtagcgacttaaaagccaaaattaacaaaaattacgttaaaagcatttcaaaatcaacttcaaaattaagttcaaaaattcaaattttggcttattctttggctgtttaggccaaacgatggggctgcaggtcatgtacgctgggctataaacccaaattcgactactattaatttcggatttttctttacatgttctttttcatcgatcttttg

SEQ ID NO: 31026 - DNA, 646 bp, Oryza sativa
acttaatctgcatctttatcttcaggagaaaagaacaccaaaagaagtgtgtgtgtatatatatatagagagaggctctattatacacccttctcttagaataactattctacacccccctcccaccttccatccgtccccacctccctcccgcgctccctctccctctccctctcgcgcctccccccaatctctccttttcttcttttttttcttctctccctccttctatcttttttagaaaaaataaatttgcgtaaaaaacttaatctgcatctttatcttcaggagaaaagaacaccaaaagaagtgtgtgtgtatatatatagagagagagagaggctctattatacactcttctcttagaataactattctacacccccctcccaccttccatacggccccacctacctcccgcgctccctatccctctcgcgcctccacccaatctctccttgtattcttttttgcttatctccctccttatatcttttttagaaaaaaaaaaagacaattggtggaatcaagacttgatcccatgatcttctggttgatggtgagcacttctaaccaaatcaccatatgatgatttgtgaacaaatcagttatgtacctataacaatcataccttgttactatgatt

SEQ ID NO: 31027 - DNA, 655 bp, Oryza sativa
caaagatttaagggtaaacaataatcaaggcatggcataatcacaagtaggatgttcatcattgcatgcaattttatttgtaaacaaaacaatttcgcaattaggatcagcatgttcgaggaatagtgatgacttgccttgctcagtctagtccttattcttgatataattcttgatcaaccttcacctcctggaagttgctgacgttgcctcacgactaaccgatacataaattctataatacgcaagaaaaaccaatattcaaataacaaccaaatatgcacaacaaaatatactattcatgtctgctaatggattccaatctcgctaggggctaaggtttcttaatctttctattgtcaacgtggcctattcaggagctagccaatgtagtataaatgagatacgtatctggctaatatgtggtgtagtctagctaatggctatggaaggattatggctacacatgcatctatctaaataaaatggtcgtatactagaggttctgttgtcggatggatttaggatcaatcaaataatgaatcatttgtattattatttaattgatggaggctttactttaattatgaacatatttcacttgtcgcaataaattataaaaggttaataattatccatgctttctatgttagag

SEQ ID NO: 31028 - DNA, 611 bp, Oryza sativa
atgatgcaaaagttttaaagagtttgaaattttagtgattttttttattttagggaattttcagggtgttacaattactcagcaattctcaatatatttttttcgacaatcaagttaggagtaaaaaagaaaaaaaagaaccaacagggtttatcaacttatcatgaaacaaacaaatgaaatccacgcttttatgggaaacatattgaaaagtttatgttaaatattataaaaattatagatagatttgttaaaatattgtgcaaatatgtgaggggtgatgattggatatgcttttatggaagtaaatatgtaattatggctagtcagtgacgatgtggcatggttacatgcatgttgagctttacacttagtggggtatagtatagatacctcacgagtcacgaggtaggcacgaggtaggcagctattctggatcaaggtctgcaatttcgttttgcatattttagagttttttttaaaaaaaatttgaacaaatcaaactaaaatttgactaaactcacaaaatattgaaaaaaattgaaaattttgggcgaaatagtgtcttgcacaggagagggggcatagcctcatagggcgtccaaaattgc

SEQ ID NO: 31029 - DNA, 1454 bp, Oryza sativa
tttaatcatcattaggattttattttgtcggttgctgattgtattgtttcttaatagttatatattgtgttgacaattttattgatgcctggtatttatatgagaatatttaaatcaccatagtccatagaaattagggtgacataatgtgcaacgaatacaaattgactgttttttactcctactgtcaacttttatctttacgaattgtatcagtgtcatgctgttgtgctgtagccatgtctaaacataatctgacatggaaaagtgagtctacctttgtaaataatggactaacgtacttgtccgtttctaatacgtgtgtccgtttcttatatgtcaaacttattacaagtttccaaaacttttcaagtactattaaatcttaaccgtttaaatctagatcaaacacaatctaatggttaatattttttgttttccttcgattaacgtgagaatttctagcctcaacagtgaatgtggtgcctcctttcaagttgtcttaataatataatagatagataaatagattcctgttcagtagaagtattaagaaattctctgttttcttttcatggcatatctacaactatcccaattaatcgagaataatgacttgtttttgtcaaaaataaatcaggaataatgactttattgttactcataatatagctatattagttagcggctggcttttgtgtattctcatagatatactgccaacatatttgcgtaaataatttataatcctacaataatacaatcaaacgattactatgatagcagttggacacaaagctctattccctgcgctttgctgcagaaattactgtagacccccgattttgaaaatcggaaatcttctgtgtttatccgtaccaatccctggatcagtagttggtacacacatacatagttggatcacaacatatcacgaatgaatttaggctaaaagagttaaacacttacattagggccaggtaggccaacaactatcagagaacaatagcggaagacaaaataatataagggcccggttaacatgccacaggcagtcgactggggaacgagacctagaacaagaccgcactccgatcatcttgtgggatacgcaagcgtaccgacaagggcttctcttcaacactctcctaaaagatatataagtaacaagggtgagtaccaaccgtactcagcaaccacaacaacaatgcatatgatagagggtattcaaggaatggtttcaggttcttttgcataaagctaatttttacaattcttttcacaagcctaaaacctagcatagactgatcaaattttagtaccagtgttcactttaaacaacgacagttctgtccaccatccattgtgatcccaaggatagcttcccgccattgaatcgtcatggttttctgaggatgtccaccttccctcctctcgggatgtggctccatcag

SEQ ID NO: 31030 - DNA, 761 bp, Oryza sativa
caaaggcggtggcgggaatcggcgacggggagagaggaagcagagagagcgagagagagagagggcggcgctctctctcggctcgggcacgacgctcgtgctctgcacgtgcgaaggggagggggatcaggctgagaggagggatgggccgagggaaaggaattcagcccacaaaacagagggaggaaaaaatagacttttatagggaatttgagttggagagatttggggcttgggtttaaatttcaaatttgagattcgatctcgggggtttagggaggaatcaagggagactcaaggaaaggattcgagatgggaatttgatatttttcggaaatggggacaggtatttggcggggattcaaagggaggcgattgaatttcggagtttgatagccggaattggaatcttgaggtggacgatttgatggcgacgagagggaacaacgggaaattgaattgagatccagggcacgacttagactcgcacacaaagaacgaaattttcgcaattaggattttgccgaattagtttttaacgtctcacgagaagcggagcgttacagcgcacgtgcttaattaaatcaccctagagctaccacatgatgctaagctacccgagtaaattttattcaattgcttgcattagatttatccttcatgtttcattgaactttctttatatagcaaaacacagtgtaagaacatctaagctctcatcagcatttctatttgtggaatcttcaaaaattattttatca

SEQ ID NO: 31031 - DNA, 611 bp, Oryza sativa
aaaattggtaaaaaaaaactacgaagggagtaattaatcggaggaattagctgttgggttctgagtccagggtgtgttgtggcttgtgatagaagctgcatgcagtgatgctgtgcctaggttgttttgcattgtctgcttcttcccactcactcatcagagttcacttttcgatcgaaaagtttggtaataacgtagtacgctgcttgcgtggtttcgcacattgtaaagctaaagtcgttggaggtggctttcttcgtccttgagtactataaaagcagagtaccgtatttggctttcttgataaatattttctatgtcccaaaacaaactcaatcctagatttgaatgtgagtatacccagggttatactttcggtttagccgatttgatctggcgtcaccgaaatttcggaaatttccaaaatttgaacaaaatttagttgaatttgaacaaatattatcaaaattcatgaaaaattgaaaaattttggcccaaaaaatatcatatcgaagggatccaaaatgaccgaaatttccaaccctgagtatacccaatcctaggtttaatttgaacatacactgtaaccggattcaaagtcaggattgagt

SEQ ID NO: 31032 - DNA, 2220 bp, Oryza sativa
taagtgatgaagagatcgaaacatcttctttctaacgtggaacacggatggagtatatatatttttaaaagtgtgagaaaagctatgttatatgaaagaataccgacgcgaggaagatcgatttgcataaatgcccacatagattgaatgttagctctaaatggtttcatatgcattcaagttgtaaaacaaattcaactcggtaatactcatgtctggaccgttttgatgtagtactactcatgagctctgttgggatataacatttggtctttgcttcaagaagctataagaaactgcaaccgattattacatcatcaacgtacaacggcaattaacaatttacaatccattatgtaaattatctttattcttgcctgtgtagttgtagaaaaagaattactccgtaaaacatttagtcgagtgatgcgtgagtagatcacggttgactatttatttattttttgttgtgtaaaatactatgcaagtgtcacataagccaaaactagtcgagctttggtgaattaaatttaaaaatatactgttcatttggtttttttaaaaaatattcgggatgcaattgttttgacagaaatataccatcggtcccgcagaaacattgcacaaaaattaggtggcgatgacgtcaagaacggtcttgcgcgaggatggcgcgacactgcgctgcgagaccgcagtctcgctccttgcttgtggacggcgaatgttttgcccactgagctgtttgtttaactaggaaggaagcccgcgcagttgcgcgggcaatttattttttatttattaaagaactactgaaaaaaagtcatatatcatcataactaaccatagattacctcatatccttaccgtaaaagaaggaagtatttgtaccgtgaaatattcaaaggtgggtgtgcacacgtttatatgctcgcttaggattgccttttacattattagttaaaacaatattttcaagaaaattggcgagggtgtcatgaagcagcgctatggcagtgtggcttcttcgtcaacctcgtaaagagtggtcgctacatacatgtataatttgaggaacaccttagggtacgaagaaagaaacagaaaactaccagatgggatgaaccatatatgcactcttcttttttgtttttggcatctcttgtgtatgtacgtgcatagagagggattagctggttttaggagcgagggcttacctgaataaatctaattgaatggttgaaaataatggattcaccggtttaagtgcaaatcgatagctagatattttgttttttcttacaatttttttttacattttctccaatttattagagcatcacatggcatcttccaagtattagagcctaatttgaatacaactcgaaattgcacatatttttacaacttaaagcatatttaattaataaagggtttaaattattattttggttttccatctaatctaaatgagaagaaaaaagaaaaaataaggatgtgagacccggtgtgtgtacgttcatagtacgatacataggtacatattttttcttaaggaggaatacctgcgtacgtactgtacgtacgtaggtacgtacttttcttaaggaggaatacctaggtagctatgtgcatgtatattggctggtagtggcagtatgacgtgagcctttttacaaataaatttaattattaatttttaagatagatctaatggttgaacataatgggtccaccagaataaatgaaaatcgatggtcggatgttttattttttcttacaatttctatgatttattggagcgccacgtggcggtctaggaacgcttatagggtaatatgtggtggattagaagcgtttgtaggaagtttatcctcttgattactttttctctttatgaaaatatttgcaacaataattttggaatagttcgtaggaagattatcctcttgattatttttctctcttttctcttcatgaaaatatttgcaataacaatttttgaataaccacaaccttctaaattaaatatttgtaacaatattttttagatcgtcataacttttaactttaaatcgcacgttcactctttatctatttggaccattgtgttatttatgataaaaatcataattagaatttatgacatatgttgtctacttcgctcgtaaaatgtatattcttctaagttctattcattcaatcatatataaaaatata

SEQ ID NO: 31033 - DNA, 775 bp, Oryza sativa
tacccttatagaacaggaacacatttattaataatctagcgaatgtagaactaatgcgatgttcagcagttcagctaaccatgaatcttccctgaaagaaagttgaactactattaccaagaattatttctagagaatttcgtgacgcttccttgttccaaacagaagcccccctctgacggcaacaaactgttttgcaccgtcatactacgagttcatgaaaacaatgttatataacgttagactctagttccatctatcatatataaattttgattattgacacatagagtgaaggaaagtaggaaagaaagtaacaatttgcaggtctagtggaaatatgagctaacatcaaagtggagatgcaattaactagcatgaaaaacataaaactattctgacatttccttagtaagcattctatacaaatttgcaggttcattagtggggaaaaaaataccttaattgataacagaacagataaaaacggaaactatcgctgcatctccacatacatataactatctcataataaaacctactccctccgtcccatcaaaaaccaacctagtactaaatttgacatatcctaatattacgaatctaaacatatatagaatatatcacatctaatactaaattcgttttttttttacggagggagtaagccagtcagggagaatattgcgaaaacaggatagctaccttaagacaacatcagtcaagaaaccacatgaaccaccattgaaataagacactgagtaccactcaacta

SEQ ID NO: 31034 - DNA, 544 bp, Oryza sativa
cgttacaacgcacggatacttttactagttaaattaaaaggacgcagtcccctcctcggctctccttctcgttcctctcgactgctcagcaccgatgatgccgcatcagctcctctttcccttctcgttgacggcggtggcctcggataccgcgaatccgccgccagaggtcgcggtagggactgatcaggaggtgtggattaggtactggggaggtcggagacgacagatccagtgtcgagggaatcggagataatgccagtatggtcagcggcgtccatttgcggggacaaccatggagacaattattcactgtatattagagttagagttgttggaatattctttttagaatttttatttgtttcaccaaaaaacttttgcagtcgggcagcataacatgcctgcctatgaaaatcctttttcacatgcagttgttttgtccatctaggaaaatctcagattttcacatacacctatgctcaggcgattgctccacgtgcctacaaaaattcaattttttataagaaagaacccaaaaatt

SEQ ID NO: 31035 - DNA, 954 bp, Oryza sativa
atagggtcaaaattgaagtaggtcgttatgattcaagctcttttgtgctaggtatatccgtatatgatgttcgtaattccataaaatttatatgagttactccctccgtcccatgaaaggatttcgactttttacttacactatttgaccattcattttatttaaaaaatttgtgcaaatataaaaaataaaaagttgtgcttaaagtaatttggaaataaagtaagtaaaaaaataaaaaaaatttcaaatttttttaataagacgaatgatcaaacagtgtaaacaaaaaatcaaaatctcttatattagggacggaaccggctcctgtgacatagagaattctacgtcagagggatgttggacttccgatcgccgtcgcttgcgcatccaatggctcctgtccgcgtgtgatgatagccttctcgttcggcccataagcccattcgtcgccatcagattgctctagcatcgtctgccggagccgcgatagcgtgacggtgagcttgggcacacagctgagcaactggacgcagccctcccatgcgctgtccttgatgggctccgtcttggccaacaggtcccctgacgacgcggacgatgagcacctgcggttcggcagcgccgagagaagcgccaggtgtaagtgtcgcccgatgaacacgatgatgtgttagagtttgtgtcgaatatgtgtacgtatcggttacagtttagaacttggagttgtaataggtattaggattagagtatgagtcggactctatcctaggatctctcataaatagaggggcgtgcctgttgtaaccgcatggtgacttagcatagcgagagggagcggctgccgggtctaccggccgtgagtcgttgtaattctgatacgctgtatatggtggatcggggaggagcccccataatcagtgccccggagatgtaggctacggctgaactccg

SEQ ID NO: 31036 - DNA, 2366 bp, Oryza sativa
ttgtgtctacacaaaattaaaagaaacaatttttcattggaaaaatactttcatcacgtaccttctctctttttattccttgaaggtcaccaagcatgctatgcaaaataaacccatttctatacttttatatgctcatatttttttaacaaatactacgaatatattgaaaaaaaaaacaagtagaagcggatagatctttttttaagtagaagccgatagatcttaataaatcaataaagctcttaactgagacatattaaacttataaagcacaaacaaaagataatggtaatattgtttcaccaaatttacttaatgcgatggacctattattttataccatcttaagaactcaaaaccatttatctatgttaaaaaacaaactcccttcacccaacccaaccatatggatcctctccactgctattatatgtgcatgtactctctccgattcaacttcttcctcttcctttctctaactaacaacttgtaaacataaaaacaatcaataacgagaaagctgaaaaatcataattattaatcctttagtttgtttgaactattgatttatttataatcaaataaataatttaagatccatattaatcatattttttactttataaaaaattaaaatatatcatttgaacatagacccctgtcctttgtatgccaaccaaataataacaacattaatgaaacaacataaataaataaaatgacagcatgcatcccgtgcatcataggaactagaaaacatagattctttatctttcgtatacttaggattattattgttgtaatttactttttggtttggatagttttcgcaactattatatctatttacacaaatcactctaaatcctttgcagcgctcttaactcaccacgtgtcaagtactaaaaattagaacaaaaaaaattccaagggaaaaaaacatttgacaatgggttttcacttaagtcagtggattcattattttcaaccattaggtcttcctttagaaaaaatcttaagccgctatgtgtcacgtcttcaaaattagaaaaatcttagaaactataagaaaaaagcaaaacatatgatcattggttttagttaaattatttagaaaaataaagtccccaatgcatcgcccttcccagaacatgcattcacacaacactgaacgcccccttcccccttggctcacactctccactctccactactccccccttctaatttaagctatcaaactaaaacacaaactattaataataattgcaaagatcgtattcttaagctataaatctaatttttaatttaattgttgctcttttaaataatcaaaccaaaaatacatgatccataatgtctgtatttttaacctaaaatgtctgtattcataagtagaaaaatgtcaatagggattgaattaaatcaattggacaaaatataaaaaatttgtaaaacaaatagttattacttttcaaaaactggataaccattgtacaatgttcgattgccataaccatctttaagtgcttagatgttaatggccttccatccatcctacaccatggcattacgagtttctcaatgtattattgcatatacaagacacattaaggtagcagtgcgtagaagtacgtagttgtggttaaaaagttatgcattgctactattaactttaaatttaggactcatattggctagatattttttttagaaaacgctatagatcacatatataatagggaagcgaggtatacaatatgtatatctcctatgtatttattgacacgttctttccagaaaatgaagaattattgacaattgcttgtagtaatgaattaaatattatatagttcaaatcttacaaaaatattgtaaaaattatctaagcaatgtagatggagaaaatttatgaagaaattaaacttttcaagcgtgacaggtgtcatccggtagatattccaccttacaagttagtcaagcgtatcctattttacgtgcccgcgcgaatgcgcgggctaccttcctagttaatttaatagccaattcatacaattgcctattatctggtcccacatgtcatgcacacatgtatattggagtccgtgctgaagctagctacaaatctatagtccgcagctcttctcttcctctttttatctccttaaaatatgtttgtagctgatttataccctgtacttgcttttagagcaagtttaatagtattccaattcatttatagccaatctaatagccaattcataccatagttgcttactatactactaatatatggtctcacctgtcatacacacattgcgttttggagtccgcgctgcagctggctacagatctgtagcccg

SEQ ID NO: 31037 - DNA, 663 bp, Oryza sativa
tacccatgaattgaagtgggcccgcccctgaatgggaacgcgtcatcactcatcaccccctccctttttcttcttctctcccttcctcgtctctctcccatgggggtcgcataaaaggtaggcaatctcgaatagtctaatcccaaaccgaagaaccataaaaaaatcatctgtaagtccgaccgagcgacgacctgcgtccccgcacgcgtgatgtgttcgtcacatacgccgcccaaagggaaaaaaaattagagatcaaatcaaaatcctaatcacgtacagcggacaaatcccaaaatcaaatatcgattaaaaacccaattgtggcaaataacatccagagtcatcaaataacacaaaaaaaaaccaaaccaaaattaagaagtttaatgtatagtgatccagacattttttttctggttggtataaaaaaaggtatatatataggacatttagatggatgtagagaatttattccaagtgagaccgctcattagagcaagtttaatagtgtagccaactatgggctgcaaatcattcataatctattatatactaaaagtccattaaacttcttacaaatgctcctaaactgccacgtggcgctcctacaaacgctcctaaaccgacacgtggcaatttcaatctaaccgtcggttt

SEQ ID NO: 31038 - DNA, 662 bp, Oryza sativa
tctctaattgacaataaataccgagtacttggagaagtgcgtatgtgccaatgaaactaaacaaaacaatttgaacatgatatgtactgaagtgggatcatgaggaagttaatcattacttttgattcgtattatgtttggtagcaggagtaaatgttgatgggcgatatatatatattcaaaaaacagtgattgtttccaccacacctctttagaaagattcttgttagaattttaaaattttgaccaaatattgtcataaatatcaaatatttatgattgaaggtaatattaatagaaactgctcagcgggctaggtaaccagtaatgaaataatcacttaatgaatgtcaagctaagttaccaacatgatgccttgggtatatgtgttttcaattcaaataggaaaggataagaaaaatccaaagttgagaaaggacgcatttggaattcagatgcaatgaatataaattttggattttacactctatataatatacctgtgaatttgcggccctagattaaagtaatctgccaaatttgccatctgcagaaatcagccatattcattcaaatgacaagaaggatcatgtatatccatgagaacattcaacgaaggtctggattctttagcatgcaaatcttggttttctttagggaaa

SEQ ID NO: 31039 - DNA, 617 bp, Oryza sativa
taaaaaatactttaatgagatcatatatttgttaacacttttatacgaattataatagaaaataatagtcaaagttattttttttggagaccgtgcccttatccaaaacgacgttatcaacctgagggagtagcatcggggcgtcactcatcaccatccgcgagcactttgactaatcagaatatcagttcccgctggaatttcttctctacgaagttccttaccttcgtctcccgagatattcactttcttataatgttttaccactcattttatttaaaatatttatataaatataataaaaggaaaagttacgtttaaaataagtaagttgcaaataaaataaataataattttaaaattttttaataagataaatggtcaaatagtgcaattaaaatgtccctataaagagggagggagtactacctaccaatgctagcaactcggatcggcttgaacagatcaacacaagtgactaatgcaaccaagtagcacctctatttaacacaaattttgacaatttaaccctttggaaaaactaattttataaatgaaccgccgctaaaacttactttaaaaataattttttttccacgccaaatcatctagcgctg

SEQ ID NO: 31040 - DNA, 697 bp, Oryza sativa
tctatgttgaacctttccgctggcccgtgaactgggaagtagataggcctactagactgtttcaccttaggtatgtattttagcccgacccatctctctgtttcacttactaattccagttcactgaggcattgcgtttgcatagcatagcatcagggagaacctgtatagtagaaaaaaaattgtcactgtagtatagattcacggcgatttgcaatttgatttgcattttatataaacataactgtgtttttatgcttacagttattatagtatgcttgttggggtatattggtaaataatcgcataaaaaactaaacttttaattctaagtcataagatccattgttttacccacgcatgaaataaacaaacaagtatatctttttttctctaatggagggacgaacagtatgtactagttacacatgttaatatagtggttacaaaaatgtttgacagataaaaataatcactcattcataaggcacgtacgtagatggtccgaagtcccaacttaacctctaattgtttttttcccagaggaaaacctttcctaattctattaccagaaatgacgtttataacaaagtcaacatatcccaacttacctttcaaaaaaaaaaatttatcccaactcatgatagttacatttaaagtgggcgagccccagacatattctgagctcacacaaaca

SEQ ID NO: 31041 - DNA, 549 bp, Oryza sativa
taggcttccaggcatgcagcgaggaaacccttcccataatcaggaaagaggtcccttatttgagtaatcttggactcagtgatggcagtatcctcattcttatgttgtagttcaccaccataggaagagacaggcaaatcaggcacactattccaagatgtcagagtagatccacacaagcgtgcaatgaactggaactgctcatcatccatgtgtatccatcctgtttacgattggaggaacatattgaatacatcaaccaaaggttttggcatcaatataaaactatgacacaatcaataaacttgagataacaagaaaatacagcatatatgtcaacagaataatgctgacagtttagcaaactctttcagtcttcacaacaaaatctagccaaaacagaaaaagtgatgtcttatgaacacaactcataagtgccagaatgatcaaacgcgagcagaaataaaatcaaatgtagggtaatacgggaatattatgggtgaactttatgagaacaaaacaacagaagctagagcatctttttctttt

SEQ ID NO: 31042 - DNA, 618 bp, Oryza sativa
ctaccggtgctttccccttgacaagctaatttctgaaacaatgagataagggtttcgggatctcgtgaaatttggtcatatgattcaggaaaaaaaaagttgtttcccacaagaaactttaacatgaattttgatttttgagttctacagtccaaaagctattcgcatgtaaattttctataggaacttgttggagaatatgtgacacaacccagccttagcaaaagttggtacgtgattccattttaatcacgcctaaagtacttgtacataaagtttgataataagaataatcactaccttggaacccttatatcctcttaatgagatttttaaaaatcacacctacgtcgaaattatttgattaataccaatataatggttcattgcaaattaaacaatcgatttacctattaactattaagggttaaatcgatggacaagattcacgcatttattcttaagctttgtctctttgtcatataaacgtgtattaaagagtgtgtatttgtggacatgtgggcaccatgatatgcacatatatggtgtttgttccgattgaccaaataggtaaaaaacttttatgtatgtagtttgcatgaccttggtcatgtatat

SEQ ID NO: 31043 - DNA, 609 bp, Oryza sativa
acgtggcgctaaggtagcattaaaaataaaacttatatgggctgtatttgtcattcacacaaaaagtaattataggacccacatgtcatccctatgaccctatcaacccttctttctcctccctctctcccttgagatttaaaacttccagctcgagatttgaaattttccatgtctaaatttgaaaaatttaaagttaaaatttaaaaattactagtaaaccaaccactagtaaaaataggaagctaatctaaactaattatatttttttcttttatccgtacggcaggaacaacatacggcgaaaaaaaagaaaaaaaaaaagaaacagcggcgttaaaaaaaagagagaagcgcaaaagcgcgcgtgcatgggtcttggtcttgtgggccagcgtgtgcgccggcagcgcgcggattagcctttccgcatcgcttcagccttcagaccgtcgaattcgatgtacaatcggacacaatcaacccttactacgttttaatcagaaaagaaatgatcttactgacatcgctttagtcgctttactagctagctaatcactttggagtttcagtgatagtgttcaaaaagcgcttgtactggcagctaca

SEQ ID NO: 31044 - DNA, 654 bp, Oryza sativa
cctaaggctgagttcttttcccagactttccaaactcacctcccttattttccgcacgcacgctttttaaacgattaaacggtgtgttttctgcaaaaattttatgtgtgaaagttgttttaaaaaaaataatattaatctattttttaaaaaatattaataaatacttaattaatcataaaaaatgtgtcgctctgttttacgtgcgcagaaggtgagttcccaacctcacctcctgaagacaacccaagtttggtttaacaaattgaactacaatttagcacgtgcatttatgttacatgataaggcttgacttttgctcctacccgctcaattagctgccatcatgataaatgatcacttctcttttgaaaagatcgatgataatatctagtatatgcaacggtaataaacattaacaatgaaattatgtggcttgagatctaagctataacagtattgttctgtgcatgcaaaatcatgatcctagctgctgagcatctcaaacaccaagagaatatactggatatattctacaaaacattatgcatgtttttcatttctcaaatctgcaccttaattataggacaggcatataaattaatttaatgtccactcatgggacgattcgaacattatcgagactggacgtga

SEQ ID NO: 31045 - DNA, 1022 bp, Oryza sativa
  unsure (1)..(1022): unsure at all n locations
gacagtgttgttcctgaaaccgaatttgggccttgggctttgtaatagactaggcctatctcggaaatgtctccctccacctccacgaattaacactaaaccctagatctattttcctctttaaatgtctatgtacaccctctagaacaattgggttttgtttagttgaattttgccaagtgtcattcaccttgtctctaatcctcgctcgattagtcggtgactatagattcagagcccccaatagatggtgtgttgatttgccaggttgattagatctaccacttcaatcggaactattcatttgtacttaattacctattcgcattatttagattgcatcttatcttgttcttgcagtgttctctcgtttgcattgcagggatcatcaaccgcatgtcacggttggtacgacatcatttgtgctgtagcgattacacgacgtcctgggcttgttccggtaggtagccacatcgtaaacgtcgcactctatctaagcgagagttatcatctcaccagaagatcgagccacaagagagagtgtcatcatgtttaggtcctctttgaaataaacaaaaacatagtaattccaaaggatctataccctatgggaaataatcctatgaagccctttgaaatgatggatgatttctattaatttttctgaaattcctatggaatagagtattctataggaattatagagaaaaaaataagcatgggtcttacctcatgttttcttcttctcgtgtttacgtagggatggcaatttcccacatggggccggggacccgcaggggacctgcccctacgggggcgggggcgggggcgggtgtggattttaacccgcggggagtcaggtccggggccccggtcatgagcggnggcggngacgggtgaggacatccacccgcgggtccccggaggatgtatattggactatgaaatagtagcatattacgagcccaaaagacccatcaagtctaaccctaattcctcatctattcccttccctaacctta

SEQ ID NO: 31046 - DNA, 1162 bp, Oryza sativa
cgcacatgcctttgacacctcagcgaaattgtcacgatctttggacaagcatatagcagagcagcagtctagcagacaaaataattgagcattagtttaatttgtcttgtcataaaaaactggagctattgtcgcatatacccgtctttgtctacgtgtggttcgcctttcatcggcactatatgatgatatgaatagggggtgttattagtggactaattgtttattgatatttcattaaattggtgggccagttcctacttaattaatcgattgtgctgttcagatgctgtagcctgtagccctgtagccaatatccagtccagtggccgtatatgtatccaggccaggacccaactagcctccaacgtaggatggaaatgattttgcagagatgagagggggcgagatggaggagtgcggggttaaacaacaaaaagctgtttcggataatatattaaatgaaaaaacttgaattatagctaagactattgtggccgtacaaattacctctctcaataaaaaaaccaaatatcctttaccctcaactttttatatcggacaaattaccacctgacaaactccggagcggttttaatcgtacgtgacgacacgtgctgtctaaccaacaacaaaaaaaaaaggtaggactcacatgtcgtgaccgagagaagtgatggaactgacaataggccctcactattttttttattttcttatgatgactgggctgctacgtatgcgccacgtatgaccaaaaccgctccggagtcggacatgggagtaattcatctggtataaaaagttgagggtgaaaaacgtctggttttttaattgacgagggtagttcgtattgccacaataggtggggggaggtaatttggactttttcctatattaaaaaatctattttcagcctaaattttttttcatgttttgatgaggacatcacttcgtcggatacacacataattcacacgttctaatgataattccaagtccaagtccagttcagccttaagagacatcactgacttcaaacggacctagcgtcttcatgccaactctgatttgggtgatcttggactcatggaaagattatctcgccacctttcaaatacatttggtctcatatccaaattcattccgagtcaacaggaat

SEQ ID NO: 31047 - DNA, 1557 bp, Oryza sativa
catgctaacagagacaatagcatctagacatatgtttaacaccagagtgaggagaacatacccgcagaacgctctggattcagaggttgtggtgttgatgttgtcgttcccgattgagccgttgccgttccctccattgctattcctgtcgcagttgtcgttgacgtcgttttcgatactgatcgacatgatccggaggttgatgtagaggaagcatatatgacttgatgccgaggaagtagtgctgatgtgaagcagaggaagaagtagagcagtcgcgcgaagaacacgctcccaaaaattttatcgcccacctaaccgtgcatgtactctggtggacggaattctggaggtctactcgtcccaaatacccgtatgcgcaagtactcagaactaggaaacaaccataggagcacataagcagaggaggtgtctacacaagaagaaccaaaaactgaggtagatagaaccgagagagagctctctatctacctagaggtggaagataacgcaagagaaacattactacgttaatctcgattgattgcactataggcctcgtctgttaccggagtaatgaatcatgccggttatgcttttactcataaaaacaaaacggctgaaaacgagcagcccgtccgaacccgccgctttgacgccctggctggcttggcttggctcgagcgcacgcgtgtgacattcccaccaccatctcaaccgctcagtaggtattctctagtagtctatttaagttaagatcatttttcattggtttttaatgtggtattaatctcttaacattaattgtgagcccttgaaattacaagaattaatttgggcctatcccatttaattctaatagataagacggagatacataaataaagaaaaaacaatttatatgtaaaacattttatatgtgtattatcagtttaaaagtcaaggctaaaaactataatatggtgaaaataattcaaaaatcctattgtagaattgtgttttatattaaatatttagttgtgtccgataagtaaggcttagattggatgtgcaaaaattatatgcgtagatttatcttgaatagtacttttatggtgctataaattatatgtagattttaaatagtttgtaataataatatgtggtgaaagttttattttaaataccatggaatgtttattctttcatgaacggatggagcaactggctagataatatttttatataagtatcaaaaaaggagttgaaaaatgtgtggtaaggctcatgctcgtaacttggctagataactgttccaagtgtttgatactttgattgctcctagtattaatctaatacactcctcaccacctgcaaaatacagtcaaaacgctagtgatgatctcctaatggcccgattagtcgtcacaggtcaaccatttggtaccttattatgtaacaagcatagtggcccgcgcagattgcgcggctagcatcattatattttctctcatataatagcatatatgttttctcattatattattcaaatatattaaaatgacaacataattttaa

SEQ ID NO: 31048 - DNA, 1029 bp, Oryza sativa
tttcctatccctacccatgtcctacagtctacagatagactcttttggccaccgtattcttattggtaagtgacttaccgctagttgtttccaagatatcgtgtggctgtatttgacatgagagaaaagagaagattgagaaaatatgcaaaataaggtgactcattagcgtatgattaaatgggtatatattaactattttaaatttaaaaaataggttaatatgatttttaagcaactttcctatataattttcttttttgcaaaacacaccatttagtacttcgggaagcatgtgtgcggagaataagagaaatcttttctcaatcaccagctaccgaacacagagtgctgtctcattccttcttacgctataatatcctcttgaactatttaatgtacgttgatcagacatcgtcttatgtgcaagctagttattctcgcaagttattctcttagacttttttttgttccttttattaattttctatttttgagactccactcaatcctaatttcttatcctgtggactcatcattttctttttatgagttctccgaatctgattcatcatatattagctttttttccaccatttttttctcctctttcaattttgatgactgcaaggaatgtaaacgagagcttgtcgggggcgtgtgatctcagcatcgacatcagcatggtagagacccctcgcgggcaataaccggtcggccgacggtttgaccatggtcgagaaaactgaggagaaccgtatgaaaccgtcacggcacacgacacggtcgcgcggaccattgaacggtaggagacgagacccgtagcaagtgggtgtgcaaccgtgctgtgcctatccaacgcgaccccatgccgattcgtctctccaagttcctctctccgaaagcgaccgcgatctgttgaggaggaggaggatcacgggattttcaccggcctcacgggagatttgccgtgttgaacgtacggcagctgtggaatatcaatcggtcgaagagaagatacgcggtagt

SEQ ID NO: 31049 - DNA, 809 bp, Oryza sativa
cccatggtacaacaacttggcaggtgtgtgcgatatagtgaaaaacttgagaattgaacgtccgagtacaacaacttgacaagtaggtgcattctagtaaaaaaaacatgaaaaatactgataatttagtattttggtgcatcaacttggctaagcatatgctaggtgggttttgttcacgatgtcaatatgccattatagtattcctacggatattacctatagtattgaatttaatctttaagaattatactacacttacaatttacatctaattacctttaatttttttttgttttcttcaccttctcaaatatcaaccgaaatataataatttctacatctagttttattgactttcagttattaattattaggatacaaatataaatatgcttatacaaatccacgctagtatattttcaaaataaatacttaaaaaatgaaattatataaaaaaaatgctccaaataattaagttgtcacataaatttttaatttagtgtatgaaaattgtgcctatcttgcaagttgttgtatttatacgatcactcttatactaaattacacattcttaccaagttgttctattataacgctcatttctgaagttattgtaccaaattgcactcacctaccaagttgttgcaccgtgggtgcaatttactcaattattatattcctacttgaactcttataattatttttatatttctaaaacttattttatgtgttatttaaaactttaattaatctcgttatgtgttctacattgtcccatatttcaatagtctttattttttattaca

SEQ ID NO: 31050 - DNA, 678 bp, Oryza sativa
aggcttatcgtatggttctcatcactgtcccaacatctttagtttcagtccccgttttcttttttcaactcatctgttggattatacttcctccgtttcatattactacataagactttctagcattgcccacattcatatagatgttaatgctagaaagccttataacctgaaagaagtagtaatttataactggattatttgtttcacacttctaaaaatgctcttaataaactttcttttactgcattgttgacaccacttattctaagttatttgttagttttataatatataatatgtagtttatctttacaaacgagtggatcatccatcaacttttacctgcatagtatatatttaaaacactacctaaagttcagagtgctcctaatctttctttgttttgtttttgttttgccgaatttatcaatatcaagagaaaattaagtacatacaggacaacataatagttgtgagaaaaacatggatggaccaccaaagaccaaaaagtgctccttacatttgccattatttgtgtccaactttcattgtttcgggaatatatccaacttttatgtagagaaaaaaactaaattcattttgtatccacttattcgtttcatccatagatgatagaactaacataatactctccctccagtcttttaccgacag

SEQ ID NO: 31051 - DNA, 1039 bp, Oryza sativa
gtacatgtttatttttaggcgtgcttactggtcgttgaccagttcatcttaccatttgaagtgtactgatttatatttccattatacagtttgagaaaaatctcagcactcctggattctattaaccattcatataatccttgttggtgatatgatcgttgtcaattaccttttattcattggtaattcatttactttccatagtcttttttaggtagtgaagtttagatatatacaatgatgaccaccaggcaacaaaattgtttttttttttctgaataagagaaattggggggtttctttgttgcagttgctgcgagtggataaccgtattaattagttattgttagcatttactaatatcaacttatgatgaagctgaaactttaaggtttttagcatactttatgtgctgttattaattgctgtgagtagatagaaatagtaaagtaaacaagaagatagcctactaatcaggaaatagctcattcctgcagtaaatgatcacatataaacagaagaaaagaaaaagttatttaagctctcttgactagcctgaccagtgtttcttaattgggttagaccagcccaattgtctttgcataggatgggaacatgttttcacaaaaataagctgcttaatagttataaaagtgataggctgatgcaatttgggctggctgggctaagcctcttttgggcttgctccacagagcctgatcattcccaggttgtcagactacattttttggcgttgattgtttatatatgcatggtatttagtctttacagagtttacagcatttattttattctaaagtggaataaacatcttgctgtttttttgatgtattaagaactaacctaatctataccaaattctgatgatggatcttaaaatcagttttacgtatacatattttttccagcataccgtccctgatgggggtttgccaattttatctgctttgttagtactcaaaccttttcagatctgtagaactgcttgctctgttcatgaacaagatgaagtgacacg

SEQ ID NO: 31052 - DNA, 1289 bp, Oryza sativa
ttcctgcgcccctgacacgcatcagacacgattaattaatcaaagtcgttctcatcatgctgcttaactaatcaagcacacatggagttgtactgtggatttgcattaaaaaaaaataataattacaacagaatttacactgactcggatcactgtctggttgcctccggcccaggcaatttaactacacttttttgggcgatctttcccagtttctgttgctgcctgcctcgatcgatcaatcgcattcgcgacgataatctcgtcctacctggactaatcaagtccgtttcctcccgtaaaactcggagaaccaatcgcagcaaaaacttgctccggtttcgtactgtcaagaccgtgtcaagatctcgatcgagttaactcaaaataattcaagcccggattaattactgtatactacgctgtggtagatctgccctggtatctgggtaagctgtgtgtgtccttctaatgctaggtccatttatgcgtctgcaagatgatgatcaggtccaaattaactaactaaccaggataatgggtgattttacttggtcgtggaggttgtaatcaagttattccggctagtcaactgttgacttgccatggccccctccttgatgcagacgtcttgacattttttttttcaaccgctagctggatattcaacgggtttgttgcgtagtagtaatacagtagtactacactactactccactgtctaatgtacaccacggcactagcctttctgcaatttttttggtactcttttaatccttttttattagaatcaattgaaaaaatggtggactaaagttcggttttccattgaatacatgcatggtatcttcacgagaaattttattttatttttatatacttctcttgttgaaatgatttgcaacttgtgtcagggagtggtgctcccccctgctctataaactaggagcagcaaaactattgacaagcaacgctgggggtattttattacagcagaaatcaaacagaattgatttaagtattgttctccctcaactaacaaaacgaaagaaagaaaacactttttttttaaaaaaagccggcggccgctaactgtgtgcctgtgtgcggcgcccaccgttgcgtctcaacatctttgtgtgcaagcttccgtcagtttctacggtgattaaggccgagtttaatttcaaactatttctccaaactttcaattttttctctacacacataaatttttaactctgtcacatcgtttcaattttaattgacgtgaactaaacataacctaa

SEQ ID NO: 31053 - DNA, 657 bp, Oryza sativa
ggctgcttctcatgatataaagttctataatgaattactccatttgatttctttagttcaggcaggaagtactactgaactaggatgattcagagtttcagacaaacaacagaataacagaaaaggtatacctcaagacacatacaacctggcattggatattatagcactgaaacattgagcctattgtagttttgtagttgttaattaggtaattggtgatcagttgcttgcatgagaacagtatttatgttctgctctgcatattcagtgatgacaaaaaaaaaggttaatggaatattcagtgatgacaatgattatgccctcctgacaatggaacattcagtgtgccagtttcatgcaaatgggttcttaataaagccacagttcttgctttatgcaattaaccctcaaaaactcagaaaaatgaggctttcaggtcgttttcagagatgagcagaaacagggcatccaaaaacacataaataaggtatcaaccataaaagatacatcgcaactaactgaaaactattccctccctttattttttgtctagaaagtatgtaccaagtaccaaaacatacctatggaacacttttaatatgtccaaaacgtccagtttgccagaattttcttagtgaaaagacagcgacaacg

SEQ ID NO: 31054 - DNA, 591 bp, Oryza sativa
tactgctctgtttcctgcgttcccgggaaatactgctctggtaatctgtttccagcgtaaattaaaacaaacggccaatgataatcgtttttaattttttggccgagtcatcacagactcacagtatgtcaacaactgatgtcagtacacccgttctttgttattatgacacatcactgtcatgaaaaccacctgataggttaacaatcagaaccaagcagtttctgattctgagacccattcttcagaatctggaaattctaccgatatctatctgcctgactatctctatctcgatctcgtccaggattgttcttgcgaactaatggttgtacgcaaattcgtctccctactgcagtctcagtccaagtttcctctttgatgattcttcgaacttatcgcgtagattgggactcgcgcatttagccgaggaaacacgcttagcagcaagactcgatcagctccgatcctcacgttgaagcgatgaaaaaaaatcacctcgaattcgatccaggcggcgagacgtgaccaaatcacgtacaagtcgtcgtcgaacagacctggttgtttaaactactaattctaaactgc

SEQ ID NO: 31055 - DNA, 561 bp, Oryza sativa
tctaaagaatataaagtggtctaagaataattatcatccacaccactaaaatccatcacctcctccattaattcaccacacaaatgttgaagtagagaattatcatccacctgatcatccaatatctcgctatcaacatttgaagtatgtacctgattaacagaagaactaacatattcacttaacatcttttcctctatactctttaaatcatttataacatcatctaatatgtctacaacgtttgctgcaaaaattcccttaacgctgataatcaaacgctacattacagacactaacagcgacgttcttagcttgtcaaaactctcaactacgagtaatattaattgcagtggcatctctggttgggattgtgaagtcaaaaaaaaataaaacaaaacgataagagaaaaaaaaacttctcctgagaaaaaaaaatccagagaattataggtgcctcactgcctctcctttttatctgctgtggattggataattggacatggagacaaaacccaaacacccccctaaataactaagaaactcacacgggctgcagga

SEQ ID NO: 31056 - DNA, 527 bp, Oryza sativa
ttcatggcagtggaggagttcgtcgacagattggaggagctcatccaaggctattggttcggtggcaaaggtccttgtcagggttacggataaggcataccctctatcctacgacttatggaaaataccgataaggtataccttcacgtgtacggttggtttccgtatacgttgttaggaattcgcctcaaattacggaaaaatatctctacgagttaagaaattgccgaaatcctactcggttataagcgaggtggaggggatcgatggcaatggtgactgcaagcaatgtgaaggggctcgacgaaggtggcgacaaaaccagaggttcagatggtatctgagttataatatacttgttggtactaggcgaggcctatgtggtaccgtacttggcacttatggatattaggtgataccggttaggtaccaaatttgatacctatgagtatcaggtgataccagggaggtattaagatatgatatatacgtgagagtatactatttggataggattccgtgctata

SEQ ID NO: 31057 - DNA, 543 bp, Oryza sativa
  unsure (1)..(543): unsure at all n locations
tctaaatattgcaaataggggattaaacacaaaggaatagttacgattgaagtggtagatctaatcgacccggcaaatcaacacaccaattattaggggctctaaatttatagtcgccgactaatcaagcgaggacaagagacaagtgaatgacacttggcaaaattcaattaaacaaaactcaattgttctagagggtgtacatagacatttatagaagaaaatagatcaaaggtttagtgctaattcgtggaggtgggcctagtgtattacaaggtccaagtaccaagttnnnnnnnnnnnnnnnnnnnnnnntgttttgacaatttccgtttactcggaatgaatttgtatatgaaaccggatgcgtttgaaaggtgacgagataagctttccatcaagtctaacatcacccgaatcggagttggcatgaagacactacgtccatttgaagtcaatgctgtctccggaggtcgaactggattccaaaactcattggagatgtatattgtagatcctccattcatccgatgtattctttgg

SEQ ID NO: 31058 - DNA, 631 bp, Oryza sativa
tcatttttctgccgtttatataattctggacctgcataaattgaagtcctttcaacattatactccctccgttttaaaatattgcacaccgttaattttttaatacgtgtttgaccattcatcttatttaaaaaatttaagcaattatttattcttttcatatcatttaattcattgttaaatatactttcatgtacacatatagttttacatatttcataattttttttaatataagacgaacagtcaaacatatattaaaaagtcaacagtgtcaaatattttgaaacagagggagtatattgctaattttttattgagaaatacaatacaaacacagactcacccatataaacacatacacatatcctacctgggacccctataagcaccttcgaaaaactgagccgccagtatatcttggttccaccacgaggaaactaaccagttgagttacgttcacttcgcaactatattgctattgatattgaaaaaaatacattatttcatttgtttacattataaatcgttttgaattttttagagttaaacttcaaaaagtttaaccaaatttatagaaaaatatagtaatatttataacactaaattgattccattaaatctaacatat

SEQ ID NO: 31059 - DNA, 635 bp, Oryza sativa
acaggcgccctttaggtatctggaacacctaacattaaccatatcctatttagcgtcaatccagttgctccaatattaaatcatcacctaaagaagtctccatctgagttgagacccttgatctcttatttatttatttactccttgcagggccagtttacaatacgtacattttcagaaagcagctccaaacaggatcttgcattggatttagcttcagcaggatgatatactgcaaaaaaaaaaaggaaaaaagaaaaaagggttaaatacctactcttgtttgagaaggattttaatgacagaaggattgcaatgacaagatcaggatcacactgtaaatggtgaaagaagagcaacagcaacagggcttcacatcatattcttattcaccaaatctctctttggattccagtcacatttgcccacccactaagggtgaccggtaaaaaatgaggtgtcctttctccatcttaaattcggtccgtggtatgaacccaagattttcctccccctctatcctggtttctgcgacaactcagaattggattgttcgtcgtgtaagatttttgatcacgtatttttgttttcgcagtgttgttatcatctgtctagtcaatgaatggtgctgggat

SEQ ID NO: 31060 - DNA, 1119 bp, Oryza sativa
agggtgtttggttgggtttatacgtggctggagatgatcatccccccttggttttgcgatgaacgaacgaatggatgcgtggctaatttgccgtgtcggcggcgactcggcgtttcggcgaaaacgtgcgcccagtggaacatgggtgtgttttcacgccaaaattgaaagtttgattgaaattggaacgatgcgacgaaaaagttagaagtttgtgtgtgtaggaaagttttgatgtgatgtaaaagttgaaagtttgatgaaaaattttagaactaaactcggcccatgtttgaaatcatgggtgtgttgttcacgctaaaattggatgtttggttaaaattggaacgatgtgacgaaaaaattgaaagtttatgtgtgcagaaaagttttgatgtgatagaaaagttggaagtttgaaaaaaaatgtttggaactgaactcggccaatttcttactctaaaaccttactccctttatcccataaaaaattatcagaacacatcctaatactataaatctggacatacctatgtttagatttattgtattagaatatgtcacatgcagttttagattcgtttttttagacggaaagagtaggcattattactaggttcgaaggatttctcgattcttttgaaacaaacactatttatgtacttgattcatagaattcagaggaaagtttttcatagaaatactaagccaatcctccaaaactccttcgaaatgcactgattccatatgaatgaaaaatctgcttcattctcttttattcagctcgttggaggaaaaattcatgtgttccaatcttttatattgtgcgtatgttcctatattatttatgtattttttcttttctgtgatttggaaatcatgtgaaccgaagaggcccttaaaacctaataccattacgtagtaccaggtgccactcatttagtattagattactatattatgagattggagaagtattgttgtgtactcggaacatgtttgaaaccatttcttttttctaaaactagttattttgtttgaatattgttgctacagatacgatttacttgtataactcatatataactaaagatatgtgatcatagaccaatcaaaata

SEQ ID NO: 31061 - DNA, 876 bp, Oryza sativa
ttgggggaggagtggagatgaaatctgaaatggttggaattgatggcgactagacttttttttttttttgaacttgatggcgacttgacttgtcaacgcgagttccttctctcttttttttttcttttctccaccatttgttgggccgtgggctatgagcccgttatgggatccgttctagcccatgggctttttagagtagagccttcgcttatgagttgagagttgagacacgagttcgtttgccgggatggggcttcaactactcttctcttttcagttttcttctttgcatttgcaaaaattgcatcaggttcagaaatgattctatttaacacccaaatttgtcacatagtatgaaatatagcgaagtttgtcagattataaaaaaaacatgggcctattgtatagggtcggtccaatcggtggtatgaggccaatctgaccgtcggtataggggtggtcggatgtgccattcagaccgggtggagaaagccttgtggaggctatggccagttcagtttaaatcaatcaacaaccaacaacgcaattatccaatcgaatcgttctttcaatttcacatgtaccttcgtcctaggtttaatcctaatttatccattttgtcggtttgctctataagccatccttcatcgtgggagtgcaaattcttgtatttttttccccaaaccttttgttcctcccataagatgggtgtttatcctaatctatctaaatcggccctgttaaccatatttgatctctaaactcatcttgatcacgagcttcttaaggtcaaggtggttggcgacttaagtcaacaccacgaggctttagatgatttgtcgtggtgactgaaaaaagcgtcaacagattcca

SEQ ID NO: 31062 - DNA, 635 bp, Oryza sativa
aaagaagtaggaacataataagaattaagacttcttcatggataaatgtgaggattatttacataagaactgtcctgcccacctccagatacacttccttttgtgtgtgcatacttcgttttttctagtacatacaatcaggatccagattttactaaaaaataaattaatatatgtaagactagcaaaaatttgatgcgaaccactctgctcaattaccttgagttctggagcctctactacttgcgctattgcatcacatggaagttctttttgcaatgacttcatcttgccaccacaaatctagcacaaaatcataaccacattgtgaaattttttttgaaacagaaaaacagaaagaaatagtaaaaccctaccatatcttttccagcatttggttcctgcagctttggaacattagaactaggagccgaaggaacagtagcatcctcatgcaatttatcacagatctctgcgacctcaaaagatccagggttcaatctggcagaccttctccgtcgagtttttctgaccacatgtgcccaagagttttgaacaagcttaaatcagataatgatgcaacaatgaacgcattctgttataagcattaagcattgattaccttggatcatcat

SEQ ID NO: 31063 - DNA, 893 bp, Oryza sativa
aacaaatctgaagtatgtggttggcacatgtaccttttttttacacagaatcaatatgggttgtggttgagcttgcttatatcttgagcagctgagaattctacagttgtgaattatggtaaacatatcttatttgacttgtaccatgagtccagtgaacctgtaaccaatatgtttgtttttaacttcatatgttcataatttaaattttccagtgattttaaaggttatgtccaaaatttaaatgttccactgatttaaaggttagtggacttttagtgctacagtcttacaaacttttggattgaaaaggatacatgtttctattgttaacttaagcttgctgctagcacatcttaattcaacattcctacgtaatttgtcaccctttctcagatcctccgtatgtttcaactaaatagaacatatgtactccatctgcctcaaattacaagtacctatgctattttctaaaaaagagattaaggttggggcgtgagatggttgttattcgttgatatgagaaaataggtacaagtagttgtattttgagacaaatttgaatcttagaggtacctatattttgagacggagtgaggagtaagttattactacatatacaactgaagaattttcttcctattggtaagagctatgtttcatatggcttctctcagcatttcatttccattggctcaccagtactagcatgtggcacatttgcactgcacgggtgatgaattgcggacttgtgaggagtccagctcctccaagaaaaatgtggtgatggattgcggacttgtgaagagtccagctcctgtaaggaaaatgggttgatggttatgtaagatgccttggatcttatgatagtatattaacgtataagcgttgac

SEQ ID NO: 31064 - DNA, 681 bp, Oryza sativa
ccatttgatgagccttagttggtgcgcatttggaagacctggtttttttctcctgattatgttgcacgaacagaacgatttcagaattcagaactagaaataatgcagctaaacatggtgaatcatttgcttaagaatttgactgcataccaatatctttgctctattttgttgattgttagaagtcttactcatcttctgcaatagtagacgatgagaaaagcatgttatatgtaacaaacagaggttcatacagtcaagctttagaattacctcgagttcagaaccctttactttgagcacggctattgtgcatgcaagttcatgttgcaataacttgatctgcatgtcatatccacagattaatccccaaatcagaaatcatactgcatttgaaaattcaaacaacaaagaaccagaggcagcttactctatcttttccttgatttatttcctgcaaggaagaagaaaacatagacatatcaaacagtctgtaactaccacaaaacaatcagcaatgaagtaagacaaacacttctcatttgccattatgcatagctataactcaaactatgtgctcaacctacaggcctggtgaaccagcattgcacaagtataaacaaacattgacacaagaatggtgaggtagggagctaatggataagtagacaaaccgcaaac

SEQ ID NO: 31065 - DNA, 665 bp, Oryza sativa
tatcttcttttttttctcatgctgattagctgtggatttgtgttcttactttgtgcaagtaataagtagactacccttggattctcaacgaggttgcttcacaatcatcatatgcataccaagatttaattaagaactgccacttgttatacccgcagtttccgcttaagttccgctgtgtatttgttcttattcggatgataaactttgcttgttgatgtggtaatcgccaaattgcttaaattagtttgtgtacgcaaccgggtaggcggattgctggcgtctaatctaatatttcaacttgcaaattgaggtgcatcttgctttaatccaagtcctcttgctgaacaatttgctcagtatgatcgatcccagtagtagaggtgattatccccacctgatgttttgggtacgtttcagatgggttggggcgatataggttctcattgcgtatttgcaaacgataaataatttgtaattaaaacttctaaataatttgtaattaaaaatttatatacgtcgtcttagttttagcgatctaaaaatagaaaataaatttagataaaaaaaaccttaaaatcaactttaaccataaacttaaaatcaacttttaacctaaaatttaaattttggctgctaatcataaacggaaagttggtgctgat

SEQ ID NO: 31066 - DNA, 622 bp, Oryza sativa
agacagcttattaaacggatcgccagttcgccgctgctaactgtcactggtcactactacccgcatcctttaattttgattgattccatcaacttaattatatatcgtcgtttcctctcgcatctcctggtctctctctaccatgcacatgtcgcctgcctatgctacagtattatgtctcgatcaaactctctgtaatagtgtacttcctccgtttaacaatgtaagttgttatagtatttctcacatttatatatttagattcattaatattaatataaatgtgaaaaatgttagaatgacttacgttatgaaacgaaatgagtacgtcgtacgccgtggtgttacgaaaattagacacgcggaattacgaaagttactatggaacgacgactaattttcttcttaatcgtggtaggcatggatgattaatcaactcatatatactagatgacgatacggaaacgtatacgatattagtatatttgttaacgaagttaaatccaagcttatatgtctccgattataaacacttctccacagtccacgtagcgtcttaccgctacaagcctatggtctcgtaaccattctcttgctacgtgtttaccctatattatcgtcg

SEQ ID NO: 31067 - DNA, 746 bp, Oryza sativa
ttcctgcagcccatattttatcacagtaaaaaacaattaacttagacgatggattaaatgaactcatgaattttgaatataaatttagaatttatatgttagtacatgaaagaaaaagggagtagctatatttatggcatcatatttttcaccaaaaaatagtcagcatgtatttacatggtaagttcttaaattacatatgtaattttagtgtatttacggtgtaagttctaaaattgcacacgtaagttccaaaattacatatgtaagtagagtgtaagtaggatgtaatttcattttaaatcaatgaatataaacataaacatactacaagtctatgagacgtaaattaattcattatattaactaaattaagtaggtggtcccacagctaatgaccgtacatattgatcagatgaggtgtacgtgcacaaacacgaactcactgaaatctagtggccaaaaatattcgactgtgatgagcaacaaaatgtgacgccataaatttaggaaatccgaagaaaaaaaataaatatatgtatatagcagtatagttttgtgaaacaatatgaccataataactgtggttaagtgtaacacgtagaaactcctattgttttgtgcaacttgaacaaaaatatgtgtttttcttaaaaaaatactaaaaaaaagggaaaagcaaattcattttttgcttggttatgctactactatatatcccaggcagagctgcttaataatcactg

SEQ ID NO: 31068 - DNA, 691 bp, Oryza sativa
  unsure (1)..(691): unsure at all n locations
attgagaatcgtggttcgatcgtccgggtcaccggtcagaccggcggaccgctgaaccgagaggtcggccgggtcacccgccggtccggttttttatactatggttctgagttctaaaagctcctttggttgtctcgtacccatccacacatgctactgacgctacaagacttattatagtggagtacatcccatgccaagggaaaacaaaacccatactgacaccactcctacatctcacacactgccactagagctgtcactacccccacccccacgctgtagaacagtaatggtttcactcaggtagcggacgcggtggtacaggcgatgggtgaggcgctccagaaacataacttcattctcactagagcgaacaatagtcagcagttctgcacagagcttctcagcctccaccaccctaccacgcaagcgcgccacctgatggcgcagatgctgcacctgagggtaattgacatcccttatctcaatttggcgctctgctgctaaggcgtgtatagccatgagtgaagcagtttgctcagcttcagctactgtggtcttagctgcctcataataaaggtagggaacacgatcagcccgaccaaagttaacctgcacccctacaacatgcagtccagtggaactatatatatgcctnccagtaatagtcagtggaccaaagtcaaag

SEQ ID NO: 31069 - DNA, 675 bp, Oryza sativa
cacattaaaaatatccacatgtactgttcatgcttgtttatgtgctgttttggtgattttattcttttctgcttagattccgtcgtttccggagagtccgttttcgccggagaagagtttgaagaattccaaggccagcaaggcaagtcacacagatcccaaacaaccctttgagcatgttgatcctatttaaagctattgtttctattcaactattgcatttattttcgaatgtcattgggtggaattaacctattcattgttatagccccttttgttcttgtttaccttattccttgataccttgggttataataatttgactagttgagctttatatattggttcaactagatattagatataattgcttagccctgcttagaaacattagtacacttttgggataactaatgattcattattatttcatgatggcttaatgatagttcacgatggtcaatcgtgattagttaattaattaatgtgccaactaaaacctgataatggtgggttgtgggcacatggttttgatggtcgtgctcatgacaattaaggaccggttcacgagtttcggttgtgaaacatttatcgtgccaaccacaagccagcatgggcaacggctttatcttttgtatagcatggttcattgcggggcaccagactgagaagtgg

SEQ ID NO: 31070 - DNA, 1265 bp, Oryza sativa
cttggtgcgagaaggctggtttagcgatgtctgccctgctaaaccaaaggaagggtcttctttggcatatacccatggacaattcagggcatagtgtccttgttctctacaatcatgacaaatggggacatcctcttctggcattggaagctcattgacctagggggcaaatgctcgatcaaacacatactgattttggtcttgacttcgaaccaatggtagctgtgaactaagcagcatgcttggaatggaccaagggtctgcccttgttaactctcttgaggccagtggtggattgagttgaaaacttgagttactagaggcatacccgctgacattctttcctttttctctattaaacatctattacagggattgaggtgagagaggaaacaagccaggaaagaatagaccagaactagagacaggtccttaaaggaactaactcttcttgttgatgtgttgtttgcttcacttattctgcaagttgattaagcaaacaacttagcatggttacatcacaacccaccgatgcaaaccacgcgctacacacacaagcaaggaaacacatgacaaacgaaacactagagggtggcttaggttctgcgacgggttctccaagatcttcactgcttcttccactttgctaacaaacacaacagccttctggagcttcggcagacaactgacgatttcttcttcttcgctaagttgaccatctagtactagttgaaatccgaagaaggaagaagggagtaaaccttttgcaaatagcattaggggaaggagaaaaaaaaggaactttcgcatagttttatttataaaatatgcccttaggttttatccacttggcttatcctacagtcaacctggctctgataccagcttgtcgcgaccgagaaaaatattaatcccgaacgctagtgtattaatccccgtcccaggaaaagccggggtacaccacacaaacatgatacaaaaggcacatctttattatatcgataatatttacattattacaaaggcacttaaggcctgacaatcaaaaataaacagtagcggactagcgggcctacggctccatcttcacaggctctcaactggggtataagccaggactccacctaagacttcttctccaaagcttctcttactgaagggggggaaagattgagcaagaatgagtacaaccacagtactcagcaagccacaccggcagatgcatgattaatgcaagggggtacaaggggtaataatatagtggt

SEQ ID NO: 31071 - DNA, 732 bp, Oryza sativa
  unsure (1)..(732): unsure at all n locations
agagttanccatcgataccgatctcgtatatggcgaatcactgctcggatcccgaggatcctcttgagctccaccgcgtggcatgctcgcgagcatgttatcgctggagtgatgatagaggctgaacaagtaatgactctttccacttctgtgcttattacggaatgggggtcaaaaactaataaaatgtttacgacactcttatttgcttcggatgcgaccactgctactaaggcctagctaggggtgcttactcggctctggttgagagcatcatctgcatgtttatacaacattggcgcgtttcttatagttcttgacaagccggcatcctgatgctaccaccatccaaattcttaaatgtgtctttactaagagaacgaggtggcacgcctaatgacttacctgtgatgagtagtcctggtgtgcgaaatgttctaatgctttagctgcgtgaaataatagactgctaccacttgaccggttgctattacttgcatcattattaggctgggagcgctgatctgctcatactagaagtctgatatttggtctggtaccgcgcatctgcattattctcgaagctgatgctaaactggtaccacggtgccgctcagatcaaccgtgtgcttatttgtgtgggacccttgctccgccttattagaatggtcattctttgaccatggaccaacttccgccctctgtaataaaattatcatgttgacgggccac

SEQ ID NO: 31072 - DNA, 748 bp, Oryza sativa
tgctattctaacccccatcgagttagtctgttcttgctccattgtgcagaatgaggaggcgattgtctcatctgttcaaggggtccggctcttcatcaagtcatcatgacgagtctagtactcgttcatcagctgatatctcgatggagacgccgaagctccgcgatgactcatgaatggcaccgacctcggccttgttggtgatcgggaaagacaagcctactacatgccgagcgaccgggagtatgctcacacacgagaatactctccggagctgctgaaaaagataggtatagatgttgaatttcgtgctatttggaaagttgttggttggcagagatttgttgtggtagatgagcctggttctcgtttgcttactttgcaatttctgtgcactttgaaagaaatagaagatgtaatttcctttcgctttttccataaggagtatacacttacatggaaagggttaagcacacattttggttttcacgattcctgtaaaatcgatcttcagaaaggaatttttgggttcgagaaaaataggttttgggaagatatttttggtggtttaatttgcaagaaacctaggacgaatgatatccataatgctacacttagggtcatgcattaatggattgctatgactttggtttctagaggtgatcttagacccattaagggggatgaattggaccatgatgtttgccatggttagaaagataaaaattgctcctgtgaaataaacaca

SEQ ID NO: 31073 - DNA, 604 bp, Oryza sativa
aacttgctttccagcctctcttctatcttccttctgacgcctttcgatcttcttcactttcttggcagtcttagcacatattcagaaaattgcctgaagagccttcttgatgggagaagaactcgaggaactcggtggggcactagtagaaggaccagctgaagtacaaggaacagatcgagggaccactggggagaagaagaaggtggagcatgagggcgaaaaggattatggcgcccatctttgatgtagaacaccccagtgattgtctcaatcatcttctaatgaaaggagcatagatgcaactccgcttaggctcaagaatggtgttggcgatctcataccaaatcaacttcatcacactaaaaggaggtgattgtagcgcatgtgactgagaagatgagcatgcttggatggcaaagcagtagcatctccaacctttggaagcaaagaccaacaaaaatggagtacaacacctttttgttattggatgcaatccatgagtagatcccatgcaagtcctaagtgcatcctttgcatacatgaacttggttttgatcatggggaggggtgcttcactatgaatgttgggcctattgagatc

SEQ ID NO: 31074 - DNA, 537 bp, Oryza sativa
ccagcgcaaagccggcggtaacgaccagcaccgccgccaccagtggcgccagcgcgcgcagtgtgcgctgcgcagaacgcagtgcgacccacagcagcaacgcaatcgccacgaaccccgccaatgcgaggcgaatgtcctcacgcacgtagttgacgtagaggcggtcggcttccgccttcaggtcgacgaataatgcgccgggcaggttggcgtgctcgacagcagtgcgaatggctgcggcattcaagctgggtgggtttgcggtctgggtgcttgctttgtcgattgacggtgcgcgcagcggcagcatggcgctccactggccgtcgcgctccgtgagcagggcatcaacagccagtgccatcgatgtgccttgcaggtctgcgcggcgcagcagcggttgtgcgcgcgcggcgtccacgtcgccgatgaacggagtgaagagctctggcttcaagcgaatggactgatcttcaacggcggcgcgcatgcgctcggtcagtacatcggcggggggggtaccgagctcgaatt

SEQ ID NO: 31075 - DNA, 509 bp, Oryza sativa
cactcattctataacagcaacagcagcagcaaattcattctataacaatcatcaaaatcaggcaatcaggggcagcaggggcagcaattcatcaaaaaaaaaaaagaacaagtgtatataacaatcattctataacaggagttcattctataacatagggttatataacagcagcagcagcagcaattcatccagtgcatcaaaattcattcaaaatcatataatacaaagaagctaattcatctagtcctgcattcatccgaatcatacacatggatccaaaatcatccatcactgactcaaatcaatccattcatcaggaggaggaggggtggcggcgtacctggtcagggagaactggccgaggagaagaggtctgagaggcgatggcggcgctggtcgccggtcgtcctggatcccggcgttgtggatcccggtgttgtggatcccgatcgtcctggatcccggcgttgtggatcccggcgtcgtggcggccgacgtccgatgtc

SEQ ID NO: 31076 - DNA, 1665 bp, Oryza sativa
  unsure (1)..(1665): unsure at all n locations
tggcccctttgttgacctatcagttggnacagnacctcatcagcctttttctaagaagccaattgcttttagaaaggtatgttctgtacgtaaagacttccaaaataccgcgtgatagttttgtcacctccagtgattatgaatatatatataatggtcttgcacatgttcctggaattgcaatggaaataaagtagtttaggccctggtttagttcgcaagagtttttccaaaaatatcgtatcaattctttgacatatgcatagagcattaaatatagattaaaaaattaattacacagctaggaggaaactcacaagataaatcttttgagcctaattaggctgtgttcgggagcactccctagcacgcaaaacggagcaacgtttaacgcgtgattaaataagtattagctatttcctttttaaaaaatggatcaatatgattttttaagcaatttttgtatagaaactttttacaaaaaacacaccgtttagtagtttgaaaagcgtgcgcgcggaaaacgagaaaatagggttgggaacttcctctaccgaacaaagcattagtccataattagctataagtgctacagtacctcacatgtgctaatggcggattaaataggctcaaaagattcgtctcgcggttttcaggcgagttataaaaatagttttttcatccgtataaaaaaaacccttccgatatccgatcaaacatataatttttcttttcgcgaactaaacttaccctgatcgtgtgtctctgagcgtgtttgtttatgccgcatgttgctttcagaaatgtattagtcaaagtcaagagccaagacttttgcatcgtgtccttcatccctctacacggtgtcacctgcttgatggcaactctccgtgtcattgtttttatattgacatgcttgcaaagtcttctctttcgacaccgcgtggcaagatatatagcactgcgtggattgaataaataacagtaaatccattagtcctatatgccatatatatataagaaatgttttactcactccattttattttataagtttttactagtcacactttctaaattgatcaaatttacagataaatttattagcaacgtctataacactaaattattctaatcatattaacattaaatatatttaaataatatatatgtttactttatgttgaaaatattacgaatgttctaatttgccaacatcatataagtacaattcaacgtttggtagtttaataatccaacacacgtagcaagagcttgtggcgctacatactgaaaattttatagaaaattcgtcactgctcactgaaattgactagctctcattctgttataaatagagggccaactgtaagagcagaggcaaaggctagaaggcatagctctagacacacttaggccctgtttggcacagcttcagcttcagctccacccctactagagctggagctcagtcaaacagtttcagctccaccaaaactgggagtggagttgggtggagctctcttacaaaatgtactagagttgtggagcttggtttaggcaggtacacaactccacttcaaattaacctcctagaggttattaaggaagcggagttatcccaaaccaggcccttatatttagacttctgcggagttagcagcc

SEQ ID NO: 31077 - DNA, 1384 bp, Oryza sativa
ccggtccggctagtcgaggctagctggcaggtcgaggaggagttgacgcacaaagccgccgtccatccccaggccccgaagctcgtcgcgggcatcagagagaagaaccctaaccctaactagggttagggttatggcgatgcagcgaagaattgctcaaggtagcgaggacatgtcccaaggtagttcctttcgtgctcccgggcgccaactctctcgttttcttcttggtcccagtggacttcctcttgtgaagtgcccaagatgtgggaatgcagtagtggagtgcaaatcctggaggcaaggtggtcgagtgtttttcaaatgcgagaagaatgaacaatatgtaagtgaactctcttagtttgatttcagatgagatggttggaatttcagaatgcatagttaattttatttggtattgttgttttcataggttccagatgcttgcacgtttttcaagtggtatgatagttaccaaagaatggtggaaggaatggaattagatttcaatgaagaagttgcaaccccagttgcaatagcagcagcaggtgaggctgacaaggttgatgaagggaagatggataaactaactaagtggatgcaacttcttgtgttgatcaacatagggcaaggcatattagttctgatgggagtgtttgttttgcttatgaaatgatggatgtaataggaacgcagtgaagcaaacttgatgtgtttgttttgattttggtaataggaacgcagtgaagcaaactggaccggtttaatatatgtcaagtctttatggctatttgagaatgtggaaaaaatatgtggggttgcattgttatataatttgtgcagtgttttggctgtgtgttcaaaatatgggttactgcctatatagttaattcagtgtgtggcaaatgtgaatcaaacagcacaatgtcaggcaggcagtattttggcagcacaagcagcacaatcaggcagtatatagccagtggtacattcatgcagtaaatgatgcattgtaacaattccaggcattaaaacaattccaggctgtgtaaatgggcacaatgacataatatctccaacaacatagtcactgcaaatgcataggctgtcacatattgtcagataagtcttaaccaaaagccaagctaagctattacagattgtcattgcaaatgcataggctgctgttacatattagcagtggagacataagcagataagctgctaccaaaaggtaccaaacagtattagtactgaatacatagtgaagctgctaccaaaatacatccaaatgcccacatattacagaccaactaattcagttctttggtgtaagctttttccttggagatcttcttggtggttctggaaccattgtggg

SEQ ID NO: 31078 - DNA, 948 bp, Oryza sativa
caggcgggagcccgctgcctccccactagctcccctggcgccggatctagcggaggggagctcgccgcctcccctcctgccggatctggcggaggggagggtgtggccgccgccgccgccgccacctcagccagccagccgccggtcatgggaggggagcccaccgcctccccactgcctccccgccgccgccgcctctgccagccagccaccagccatgggaggggtgcccgccgccgccgccgccgccacctctgccagcctgcgcccggccatgggaggggagcgacgcgagagagagggagggagagcgatgcgagagagagagaggggagggagagtcggagagagaaacacgagaagggatgtgatcgatgtgtagataaggaccgtgtggtgtggacgactagataaggacgttcggtgggtgtggaccgtgtggtgctgctgagtcgctgatggctcggctcgtcggctcggcttaagctataggtgccggttaaaaaaccggcacctataatatatatgtgccggttttttcgctagaaccgacacctatagtgtttaaaggtgtcggttctatatttttccatcacagggaggtgggaaattgtctattggtgctggttttaaaccgacatctatgagccgatccctacgagggattttgctaagttaacaaaaagtaggaagatctggagaatagtttcctattggggtgtgggtgtgtgtgtgggtggggtggtgttccgcaattttggacccttctgagaaatagcaaaaatcttgaatgaaatggatgaacgtgatgacaaattgaatttaagtggcctcaaaacgaaaaactgaattgtacatgagaattatattaccattcaaaaactctttacacaagtacctggaaatggaatctcagacttggatacatgaagcttatgtcacttcttt

SEQ ID NO: 31079 - DNA, 751 bp, Oryza sativa
catacattaaaatacggagagagtatatgattctgaatattgcaaaacaggacatgaagtatttagggatactactgtactcgaggaagaactaaaagttgatgaaaactaagttgtcattactgaggagtcaaaaaaaaaaaaactaacacttctctctttttcgttaaacaaaagctccagatatgataaatgacagtgtatgaagtcttttactctattttttcagacaaaaactcattctggcaaatgagtctattgtctgaaacaacctaaactcagattctctcttctgtgtttcctttttgagatacttcattttcttggtatatgcttagaatcaaggacagaatcctcaaattacaaaactattcccttttcctgtgacacgattttgcagtccacacgaacaggcccatctggatattggccgtttacaggccgtgtccttgaagaggccgtgctggcgcggcccggcccgttttggcacgaagcaatgaagcacgatgggccgtacggcccaagtcacttctgacagcagctggctatatatacaaaggtagccggaaacgcgtcttcccttttccgtttgagcggtcgagtcgcaaattccccatccaaaacaccactctcctcctccagtccagtaagcccctcttctcctcccttcccccaattccatccactgctctcaaatctcaatactactactgttctatcgaatcgattcgaaatccacaccgctactacg

SEQ ID NO: 31080 - DNA, 669 bp, Oryza sativa
gcagttaaatgtacttttggatgaaatatggttttaaccgattaaatttaatttgatttcttttagttgtctgcctcgaccgattaatttgagatatcaacttgagtgttaacatgttaccaaattacagaggataagtttgtgctaatcactgtccacataaatttttctatgattttatcttgcacaaaatattttagagaattaggatgacctttgtttgtatatgtgttcccacttcataattgcatctaatattattatagggattacattaaacttcttttagactgagaagatgatatttgagtttaatattaagtccacatgttatcacccaagattaactataagtttgtttagagaaataattcttttagattatgctcatgggacctattatggaatgcaagaccaaaactccaaatgcacaaagaactcgagcctaggcatgcattatgtacatgtatgcttggtgacatttctagtctaatgttgggaatgaaaagattttattctgttctcaaattataatcatgcaatggtttaagttggtcatcacctaaattaaaacggaaattttttgctctcaaaattggagaagttaacctctaactattttgacaagaaattttaagttctaaaatttcaggtacgttataggcaatt

SEQ ID NO: 31081 - DNA, 787 bp, Oryza sativa
ccagagccgataaggccttgtcagatccttcagagacgaaagaccatgtaagacctggtcgtgtaagagttctcgccgtgcgtattaaccaagccgtgtaatcggaaattgacttttccaacctcacggctgggggctaggatcagagctatttcaaccaagacaggccaggagtccaagagccttgtcacccgaggacatccctccgacgacaaggctgggggctaggaagagtgtacaactcaaacggctaactaaggtcgttaactgagaacacgctcttacaaacaacacccagagtaagaaacatttgttaaagatatatttctttattcacaaaatattccttacagttagcacataaatattatgtcaaattacgtcttttcccaagatatcttgttacagggtacaaattctaccaagaaggccaacgaaaatcttctcggccagcggcgacattgatctcgcgagatggtcaatctctgccggatttctccgagaacggccaaaaccctcacgaagaaattcgagatccaggcgcgggcggtgatctcgcacacaggccaacacatgccccccggcatatcgactcgctcgacgacactcttgcttcagggcctcgtcgatccgctgaccaatgccgtcgagttgagcgcaggctccattgagccacgagatgtaccggccgccgactcttcaggatcaccgcgggctacccgaagatctcggcacaccctcgccatcgaggtgcagcaattcttcagataagaggagaaccacacct

SEQ ID NO: 31082 - DNA, 646 bp, Oryza sativa
aaaggaaggaggagaagaagagagcggccagtgaaggggaaagaagacttgggcctagcccaagggagggagggaagaagatttaattcgttttctttttatataaatgagtttaatgaactttgtgactttaaaattattttttgagctccaaaaattcatggaaattattttttgagctccaaaaattcatggaaaaatccggagggtattttagggcacaaagaatattacaaaatatcctcagccaatgatttttaaggaaaaattttaattctcccattatttcacttaattaaattgctttaactttaatttaatttctagaaaatgcattattaatgatttttaatcccgaacgaaaatcgggacgttacaccacgcaagccaggacacgactacacagttaccggtcgctagtttggttaaagcaacgaccactctatctcacatatgaatcctctttagctaaaaaaaacaatagtgcacatttttctaaacctctttgataacttttatcttttaaactgtatattattttaaaaatatatttgcaccattgtactccactcaaaatatatgacaaaacgagaccaacggttaatatattcaaacattttattaatttgcaagtaatttatattta

SEQ ID NO: 31083 - DNA, 587 bp, Oryza sativa
ttttgaatgaggaaagcacagggaatgttctttttacttgtcctttggctcattttgcttggaatgtaattgccatggtgttgaatttatttttggaatgtaactgtccctatctatctttctgggatggtatgagagctatcaaaacaaaaatgaaatctcaagtggggatggtagtgtttgctgggatgttgtggggtctatggataacaaggaatgagtgggtgtttgaaaacaaactaatcaaaactcctttgcatgttgtctgtcatgtctttgtccctgatgcaaagatggaggctgctactaaaagaaaaaactgcgctgatttccatgagaaagcatgctcattctggatggtttgccggcgcgcggttgacaatctgccagaagactttgggtagcttatgagagtttgggatggtttagttcccaaacaaaatttttcacatagtcacatcgaatatttgaacacatacataaagtattaaatgtaaaaaaaaatacaattacacagttcaccaggaaattgcgatatgaatctttaaagcctaattgcgtcattatttgataatgtggtgctaaag

SEQ ID NO: 31084 - DNA, 549 bp, Oryza sativa
taagcgaacataacaaatccatatatgagttgcagtattatttttttaacagaaatatgaatgaaggatcattttatttgataaatattattatgaataactaatgttatattaatattggcatgttcaatatatcctgtaactaatcttttttatttatacttagcagggacttgaagttaaataaggatgtttgaattggccgagatgagtaagttggtaaagaaaataaataagggatggttatgattactttaaaccacttagtttatattgctccaatggtttaccaacaatattgtcgctttctacaatatgccactggatttatcaattgtttctacaatatatgaacatttaaaaaaaaatcaaaatacccttgtagacaagcatccaaaggttgacaattgatttatctcattatacgtttaaaaaattatgaaatttttggtgtagtttccttacacaacatagaattttctctttatgtttcaaaatttcttgcatgtattttttgaaaagtctttttattggggcattagagagaaa

SEQ ID NO: 31085 - DNA, 1106 bp, Oryza sativa
attgtatatcgtgtcctttatctagataattgcataatcggtgaaggagtggattaggtgctaacatttctctgatcaaggcaagttttctcctcccatcctttgaacacattgaatcccatgatttgaggaatgaaaatatttgtttgcaaagttgcatgtgaacttagactatatcggtatttgaaactgggttaaggtagttatgacctatttgctgcataccccaccttgaataattgatcctcttgctgtttgaacacctagaaatggttagagtacactctttgtgctcaaatgggtttatatatgctctatgtgtaactacttgcttagccatgcttagaaatatgcaaatgctcattccatctataattaaaatgtgaattttgatacatgaacccttgctggaataaaatgaatatgatgggtatttgtgaactaaaatgtgtaaaatgtgattttatacttgggcggcaagtggtgtgcatatggtgttagttgcataccaatagggggagtgtttgcccaaatccataaggaccgaacttgtgtcacccatttaaagttatccgtacatccacatgtgctagtatgggatggcctaagctgattaatctatttaggactagccttgcattctggtaggccggtgtgtatgagttagtcgataattctgaggaattagttgatgattcagaggaacttcctatttgccccgatgtggtagtttaggtgactaagtctgtccaatacaacagtattgtgccacgtggtgggttcccgtcgtgtccgccaccacggcgttaagtttaaggcgtgggcccgccacttaacggttctaggtatattccaagtatgcctaggatggaggaacacgtatcgtgctggtgcaaggctaggctctaagtagtgtaaaggcttcgttatgacctctagatcacattcaacatgaagagtgtggtggagtcttgcaaactcaaaacaaactagagagttcatatcatgtgggtaaagctgtacaaactctgcagagttctttaaactaatcgattacccgtgctcacggtcatgagcgctttggtgatgtgtcatgagtatagact

SEQ ID NO: 31086 - DNA, 1086 bp, Oryza sativa
aaggtcgttttgggacgtgacaccgggggccggtctgaccgaggcttcaccgccggtctgaccggtggtcgatctgaccgaggctgttcagccggtccgaccggtcgccgatctgaccgcgggacccactgcggtctgaccggtttcctcgagggaaaaccagatttttgccactttgattttgcaaaagcaatctctctctcctttttctgtttatgagctaatctgaaacaaaaatcaacaatatgtccatctttaccacaaaaagaacaagtatatttttcacgttgtttagacacattgttagcattagaagatttagcaacacaagcagcaacaggaggttttgcatgcacaacattggattttgaagaagatgcattcatggtagacatgataccagcagatttaaacacaattttattagtatcatgtttaatcaaaatctcaccacttctagcaccaacacctaacacaacaggaggatgtctagaattatgagcataaggatcaaaacctaaaccaaggttatgtgtgctaaccttagattgatccaaaatcatgttgaggttctttttaccatcacaaaatctttgcaaagaatttttccaaataagaaacctatttttccaaattagcacaattttcacaatctaccatgacacctttgcttctacgacatttggggcaagaaaaccacttcattgtttttcacaacatcttttatgtactcaacacgacctaaagcatcttttagtttcatcttattcaaattacatgctgagcaatccaaaacatcatgaggttgtttcaactttttagcagaaatcatgttaaacatcaaactagcatgaaaagcaatttgatatttttgcaacaactttttagttaaaatcaactcatccaatgtgcgtgtacgcaaggcaaaactcaagcaagagaagatctatttttcaaatcatgtgcagcattaatatctctaatttttgaaatctcattcattaaaacctcacaatttgagcaatcatcatcattacgaataagagattttaatctagcaacttcagatttaacagattcaatgat

SEQ ID NO: 31087 - DNA, 660 bp, Oryza sativa
aatccatataaaggttttaatccgatttaatctttaaaaattcataactaattcatctaggctcggtttaatgtggttcaagttgcaaaaattatataaaataaagatctacatattaaaattgtccataaattgaattaaatttattgaattctttttaaatgggctttaattagatttaatcttgtaaaattcataataaattcatttgaagtcagaatgaggccgttcaagtctcataattcatctcaaattatgatctacatgtttgtttactttttatgtattgtttatttggtttttattagtctttttcttcgttttgcgtgtaagcttgtcgtttccgtcgttgcaaaggttcgtgagtgcgccgtaagtattcaagaagattaattgaagaccgattattgcaaggcaagtcacactgatcctaaacacaatcctttgaacatgttgatcctatatttaaattctctatttatttcaactgtgcatttattttcgaatgtcattgggtggaattaacctattctttgttatggcccttttgttcttgattactttattccttgataccttgggttattataattggactagttgagctttatatatattggttcaactagatattagatataattgcttagccatgcttag

SEQ ID NO: 31088 - DNA, 1544 bp, Oryza sativa
caactatggtgcaccttggaaggaatttcttcttttacgttttgtcattcctggtggaggccattctgtactggttatgatcatcttacggacttcatcttcggttcgcattggtgcttttcttttctgctgaagacagttccttgcatagtgcccttgttcatcacacataaaaccaatgatacttgcttcttttgagtcaacatgtgacatggcatgaagggccttctgggatgttggcggtgcgctgactttgggtgtgagtgcttggattgcctccaactgcgcctgaggttgcatcttgactcggttcagaattggcatccgatgctgctgtagtatctctataagcaatttgttctggttaatcaagtgttggaccactgccacacaattggtgtctggtgctttattcactcgggagcttgaggtacccatttcctgacttctgacctaattgcctttctcattatccgccatctgttgcaggttttggagagggagagaggaaaaacaaaggggagagacagatcagaaactaaggataggaccttaacagagcaacactttttctgttgtgatgtatgttaggcttattctgccagttgattacgccaacaacctagcatggttacatcacaccccactgatgcaaaccacgcgctaccccccagagcaagggaacacccgactaacgaaaccctagaagtggcttaagttttgcgacgggtttttcaagattttcactcctggttcacatttgggttcaatgcttcccttggtttggtaacagatccaacagtcttgcggagcttcggcagacaattgacgacatcttctttttcgcaaagctgaccacctagtactagttgaaattcgaaggaggaagaagggagtaaaccttttgcaaatagcattaggcaaaggagaaaaaaaaggaactttcgcaaatagttttatttataaaatatgtccttaggttttatccacttggcttaacctacagtcaaccaggctctgataccagcttgtcgcgcccggaaaaatacctttttccagaacgctagtgtattaatccccgtcccaggaaaagccggggtacaccacacaaacatgatataaaagacacatctttattatatcgctaatatttacattattacaaaggcacttcaggcctgacaatcaaaaataaatagcagcggactagcgggcctacggctccatcttcacaggcgctcaactgaggtataagctaggactccacaaaagacttctcccaagcttctcttactgaagggggaaagatagagcaagaatgagtacaaccacagtactcagcaagtcacaccggtagatgcatgattaatgcaagagggtacaaggggtaataataatagggttgggtcttgcagtaaagagcgtttaaaaaccacttagttgctcaaagctattttgtaaacatgatcctagagctacacaatattattaatcaagcccgtggaccctcacgaacctgccttaacccaaggcatacgatgatt

SEQ ID NO: 31089 - DNA, 539 bp, Oryza sativa
gggcgaattcgagctcggtacccctatcccataatataagagattttggattgatgtgacacatcctagtagttcagattcattatattatgatgtgtcacatccacctaaaatctcttatattatgggacagagagagtatttctttcgagccataatttgctaatggaactggcaaatgatcaaagaaacatgaaatattttgtattttttattaatcatgtctcattcacattaaagtttttattatccagaactactgattaccattgttgaaccaaaataaccatcattttattgatgtatttccaggatccagctgcatcatgattttagtttctacatggcacgttagggaatgtataccagactacactttgttgtgtggaagttagtctactgattcaataccactgtccactggctcaccctgtgcaaggttgtttctgctatggatggattgtcctattcggacaaggcacccttcgcttgttgattttttataatattcatagagataattagctttgaaatttcat

SEQ ID NO: 31090 - DNA, 1456 bp, Oryza sativa
cagagtgtgggtaaagtgtacatccactgcagtgtgagtaaaccaaatctattcgaatagccgtgcttgcggttattgagcatcgggacatgtattacacttggctagactttaaattcttaacttgtgtgggatgggttattgcatgatgaatttttatggtggacgtcctcagaaaaccatgacgactcaatggcgggaagctatccttgggatcacaatggatggtggacagaaccgtcgttgtttaaatacaaacactggtactaaaatttgatcagtcaatgctaggtcttaggcttgtgaaaagaattacaaaatttgctttgcgcaaaagaaccatagccatcctttgaaatacccctatcatatgcattgttgatgtggtggcttgctgagtacggttggtactcacccttgcaaatataaacttaatcagaggcgggacttgaagcttcggaggatccctatgcctattaccaggagggtgatgaagacgatggcgctcagtaggacttagtacggtcgttgcctgtggcattggcgtgccgctgtcttatttccgctgctttatctatttctgcttttgggatgtattccggaccgcccggtccgatgatttaagataatgcctgcgggcttatgttgtaataattcgcactagactctcgtgtatgtgcatttggtatttcagctatgaactcgtgtgtaccagactacttgatccagggaaatggtactgtttacacgattgattcctgttataaaaatgggggtccacatcactggagttggagctgttgcaacgcgggctataggaatgcttcgggatgcatggatgacaattcgctgaggagcaagcttctgattgtggggagttgcgtggactgacgtgctggtagctatgtttctcggttttgggcacttgtcagtgaaatgacacatttcttgacaattgaagcaacagatatctttccggactcagtattttcttttctcattttgattcctctgtcctggcactggagttaggctgaaactgtaatcttggcgaggattggtgttgccttgatgcttctctccattagaacgggcatgttggttggccatcttcttcgtcagcagaaaactgagttgacaatcttttggtacatgatcagttccttcacacaagaaacaagtgatcctgctcatggggcactcgccgggtggatggtcttccttacaatgaaagcaggtagtggcacatgagctggcaacatgacgatttctccacaatgagagcatgccttatgttccattttattctggttgaacccttggggagacttctcatttcatcatctgaggagacttgatctgaatcttcactatcagacactctacctccattagctaaaagatgctctgtcaactatggtgcacctcggaaggaatttcttctctgacgttttgt

SEQ ID NO: 31091 - DNA, 1205 bp, Oryza sativa
ctcgggagcatgttacatgcgtcatcctttaagggtgtccaaggcatattttttggcctaggcctaatatgtctacagcccatattttcaggtgtggcctgtcatgttcttttagggacttaggcattttttgcttaggccaaagtgcgtgtgatcaagtgcccaataccttaaaatccttttataccgcagttactcaactttttaggagttggtacaatgcatcttaaaaggtgtcaaacagtaaagctttatatagctgccctgctgatttttttatatagtcaaggtgttgtttgggattatcaagcaattgattggatacaatatcattgctttttgccacataagtgtgcacttttattgaccaatattatggtttaggctgattatatattatggtcattttttaggcggttggtaaatcctttatgagtttacttactcggatgttataccacatatgccatatatttccaggtgtggtgaaaccatgtgtcttttagggacttaagcacatctgttaaagcagtgtgcgcatggcgtatgcccaatactttggaaatttcattattcacagcattcaagcttctttatagttgttttgctatgtgaattttcagagatgttgtcaaccttaggttgtacgcatcatatttttcaagcagtcggtatatcacttggatcgtattatttggggattcacaccgcatatgctatatattagtatcaagtcacttggttgactataattatcaaaaaccattcggttaattggataatttattccttgactatatgtttagtttgttcagctaatcacatagtcgggggctacacctattaggtgcatctatttgatgcacctgactttacttttttcagccctccacagtcttctgatttggaaaaagtactcgggagatcatggcgaagatgattgaagcactcggctttggagtaatctagttcgagagaagattttcttttcgactgtgaaggtctcaggggctactatggagattatgggtaccccatacccacacggcatggttatccgactagtcataggggatagcttatatctatggaatatgtaacagattatgacttgggtattacggttccttttatattatggagcggcctaaaatcctgatttgataatattggaaaatagaattaggaaaccgatatcgtattgg

SEQ ID NO: 31092 - DNA, 1028 bp, Oryza sativa
attgcatacatttggtcaaggtttcaaaggagatgttattacataaaataataggggaatttacaagattgtggctaactagtccagcagaggctatagaaggatttaaacactaatgttttattatagacttaaaccatttatctaatctatacttgagaactaagttagaatgagactaacttatatgattgaactcccagcttcggtaagaacatcaattggactctgaaaaaggggttgaagcaagggtgagtacaacgtactcagcaaactattatattcaataatgaatgcatgaaatggtaatatctgagtagatctaggtttactggcagaaagcaaagaatatagaggaagaaagcctagaatgttttaaatgcaacagtatttaataaagtttggaattaagtttctaaccaaataccatatgagtcccaatgctcaaatctgtgagcacggctattcgaatagattcatttatactttactgtagtaaatgtacgctttacccgcaatccatgacatgctaatattcatcagcttagtcatggcaaagcttttcagttactaacattagtggtacctgttccatgaactgtagtcatcatacgctctaaacgtaacgttatcagcagcgaaaggagttctggcgttcccgaggtttttggagagaactagttgagagacccccgtcatctcaacaaggttttcacaatacacacagtttgtgatatcacaatttatctcaaatatttacctgcgcctcggtaaatattacaatcgccctgctcggcgtaagtttgcctcctgcacgaggacttaagaagaacccaatacagaggtaccacctttgctagataacttaatcagctaggtctatgcccatacgagaattgcggtcgtactcgtatgttcttcacatgtacttggcaattttatgtcggttggaacagtactagccacccggaaatcaaccatttcttccgtattgttccaatctaagtttattatattttatgcaatat

SEQ ID NO: 31093 - DNA, 528 bp, Oryza sativa
ttctaaaattcataactcccaaatggaataaaataaaatagggaattatttcacctaaattcattttagatcagtaccaacccactgtgcacaaatcatgcattttagagcattttggattttcagctcttcggtgtttaattgtatatcgtgtcctttatctagataattgcataatcggtgaaggagtggattaggtgctaacatttctctgatcaaggcaagttttctcctcccatcctttgaacacattgaatcccatgatttgaggaatgaaaatatttgtttgcaaagttgcatgtgaacttagactatatcggtatttgaaactgggttaaggtagttatgacctatttgctgcataccccaccttgaataattgatcctcttgctgtttgaacacctagaaatggttagagtacactctttgtgctcaaatgggtttatatatgctctatgtgtaactacttgcttagccatgcttagaaatatgcaaatgctcattccatctataattaaaatgtgaat

SEQ ID NO: 31094 - DNA, 713 bp, Oryza sativa
ctataggcgaattcgagctcggtacccatgctttagactatgatatcccgcttactaagaataccatgattgacaacttgccacaaactgtctcatattagctttcctggtctccggtgctagatatttcctctattcaatgcgagggtcgataattttgcctttgaattatgtttccaagggaaccaacttatcccacttgacatgctttgacgtcttcccaaatgactttactgctgaacttattattgtctgatcgttatcctgccaaatctgaagcttcgttgttggatgtgattttaatctgacctctgtagattttccttgaacatatcacttgtttcataactgggaatggctctcatgaacaagcaactcagattcactttctttacattcggtttactttccagtattctcttcgtgttgtcatcatttagcattcaacgtattcctttacaccttcagccttgatgtgttctttcccgatggatcgattgctaagaaagtgcgttgaacgacacttctaacggtatgttgctacggatcttacaaataatatgcagtctaaaacatataagttatcaaagattttgtaccaaaaataaaatgtattagtgtaatggtattaacctcatagcatgcatgccaatcgacatgacatgtagcaaatagcatatggcctttttttcttgcaagtgggcttggttttc

SEQ ID NO: 31095 - DNA, 501 bp, Oryza sativa
ataattaaaactcaattaatcacaagttattaccacattgttttacgtaaaacacttaatcttcatttttatcttcatcttcatcttcaggagactcaaacagagcctaagtcttactagaacgatcttggagaactttagttaacctcaataggacttaaaatgaattttctatgagttcctaaaaatttgatttcttaaagaaccacttatacaaaaatagatactagagcttataaaaatatttactagtacaaagttgtagatctagttatgctctacaattttaatatagaatgtcttcatccaagatcatttgaaatactcaaaagttcattttcaaaaataggtctgaagagtttgtaacgaatatttagacatctaaatgtactatttaaaatggaaagaaaactttcaatgtagatttcatgaagagctaccattttataggcggttttttaagaatttgcccattaaaaaatagggtttcaaaaaagggtt

SEQ ID NO: 31096 - DNA, 617 bp, Oryza sativa
attaacttttaatcgctgtttgacttcctggtgtttggttgtttttcacatgctggttgagatcaagacgtgttcattatcatcgtcatccactcctgcctaaccgttaccgagagcttttccccttcctcccacgcggatggccctgccattagttgggcagaggaaagcccgggcatcaggagcaaacacacgcatgtgctgattcagttgacatgccaccgactagaaccttgcatggacgaccaacgtgcacacaggagcatgcaggccatgcatggagggagcaaataaattaacttgcttacttgctctcataaccaactacatatatgcattaatttctctgctaatcagattgatttgtttacatacatgtgttatcggagctgtcgtattgcgttgtggtatcggacttttctgagttaagaccacgcgcgaagcctccgactgggatttgatccagactcgggtccgcgatctgtacacacgcatggcaggaggatggatccaatgacatgcacgcatccaggaagaccaataatcttgccgagttcaacaatttaatctccgacttcgctgggtttttttcccttacgacttattgtttttttcat

SEQ ID NO: 31097 - DNA, 1014 bp, Oryza sativa
gggtgtgtcttgttaagaacgggggttgtactcagtattgctcaatttttcccaaacccagaagagaagttcctgaagaatgaaggttttggtgtctagctcgtgcctgccgtcaagcgcctgtggtcgtcgccatagtcttccgctgtttctcgtttgtctctgtgtgtgctgggcattcgctgcccatgtaataaattaagtatgtacgcttccgcttgttaaactctgaaatgtatcaacttttggtgtaccttgcatcctgggacaaggattaatgcacgcacgtaaggaacgcccgttgggttatttctggtcgtaacacctgctcccggccacgcttacgtgaccgcctccgggcgcgcggtgtgaccgccgggtggggcccggccgtcagccgcccgtgccctcgggtgcagctgacgcgtggggcccacggcgccggtcggtgtgagcccgggtgtgtccggtccaccgtggaccgtgaggctgccgcgtgggccccactcccatggacccggtccgcgcgccatctcccctggttaacgcaataaatcctttttaaattaaaatttaaatgaagaaattcgcaaatattcacttaaagagcatataaacttcaaatggccataacttggccatttgaactcggaattggaccgttcaagtctctaattttttctttagaagtcaagaacccatttttgtgctttgttcctgcttgttatatggagtttattagagtaaaagcctttttcctttttgttggtcgtgtagacgctgcagcttcagaagatccgctcttcgtggaggttgaagccgacgtttgggaaagcgagcaaggtaagtcacatcatccttgaacatattgaatcccagtttataaaattattttgatttaaattaatgcattatcgctttatttaaattcctgcgttatcactgttttatttagccatgcctatttacctttgttatgaccttattattattgctattgttattattaccttg

SEQ ID NO: 31098 - DNA, 683 bp, Oryza sativa
ctatagggcgaattcgagctcggtaccccggttatgggcaagcctagcaatgtacccaagttagtgttttaaattcttaaagcctgcttaacaactaaaatgtggaatggttggcgtgggttggcttgggacgagctgggacccagggtcgggttgccagttcggtctgaatcatcgtaggccttgggttaaggcaggttcgtgtgggtccatggccttgattaataatattgtatagctctaggatcgtgtttacaaagtagctttgagcaacaaagtgacttttaatgctgtttactgcaaaccctaatcccctatattataactcccttgtactcctttgcatttattctgcactcgtgggtgtgtcttgttgagtacggtggttgtactcagtcttgctcaatttttcccaaacccagaagaggtgttcctggatgatgaaggctttggtgtctagctcgtgcctggcatcaagcgcatgtggtcgtcgccctagtctttcgctgtttctcgtttggcttcatgtgtgctgggccttcgcctgccatgtaataaattaactatttacgctttcgcttgtaaactctgaaatgatcaacttttggtgtaccttgcttctgggacaaggattaatacacgcatgtaagggaacgcccgttgggttaatttcggtcgtgaca

SEQ ID NO: 31099 - DNA, 706 bp, Oryza sativa
atggttggcctgggttggcttgggacgagctgggacccagggtcgggttgccagtttggtctgaatcatcgtaggccttgggttaaggcaggttcgtgtgggttcacggccttgataaataatattgtatagttctagaatcgtgtttacaaaatagctttgggcaactaaatatctttaaatgctgtttactgcaaccctaaccctttatattataactcctttgtactcccttgcatttattctgcacttgtgggtgtgtcttgttgagtacggtggtggtactcagtcttgctcaatttttcccaaacctagaagaggagttcctggaggatgaaggctttggtgtctagctcgtgcatgccatcaagtgcctgtggtcgtcgccctagtcttccgctgtttctcgtttgtctttgcgtgtgctgggccttcgctgcccatgtaataaattaactatttacgcttccgcttgttaaactctgaattgtatcaacttttggtgtaccttgcctcctgggacaaggattaatgcacgcacgtaaggaacgcccgttgggttatttccggtcgtgacactgggattcaatatgctcaaagatgatgtgacttgccttgctcgctttcccaaacgtcggcttcaacttccacgaagagcggatcttccgaagctatagcgtctacacgaccaacggaaaagaaaagg

SEQ ID NO: 31100 - DNA, 994 bp, Oryza sativa
ctaattaaccgtaactctgtttcaggtggttcaagttgctaaatttttctaaaatcaagatctacatgttaaaaatattcacatgtactgtttatgcttgtttttttgtactgttttattgatttttattctttcgctttagtttccgacgttccggaggagagcgtttccgttgaggaaggttccgaagcgtttgcggaagcccaaggcaaatcacacagatcccaaacaaccctttgagcatgttaaacccgtttaaagctattattttatttcaactatgcattattttttaatgtcatcgggtggtgaacctttccccattaattaatggccgaagatgatcttattttcctatgggttataatttgattagcatgaaccttatatattggattggttcagctaaatgctatatgtaagtttgcttagctatgcttagaaacattagctaactaaaggggttaattataaactatattatattatattattattatggttatatttaatggtcgctcacgatggttaatcgtgtgatgttaattaattgataattaaaatctggataaggtgggttgtgagcatatggttttgatggttgtgctcatgacaattaaggaccggttcgcgagctactgttgtgaaacatttaccgtgccaaccacaagccagcgtgggcaacggctttatcttttgtatagcatgattcattatagtgcgccagactgtgaagcggcgagaagtccatgggggttgctggggagtccatgccttgtttataagggggtgattatgatccaggaaaggtgcgctgtaatggcttatgttgtgcaaggggtattgtcacaactcctttccgaggtaccgtggtggtattgaggcacatggtgacatgatgtggggttgtgtcttgtgggtacagtggtacacgtctggccagagtaaaactattcgaatagcagagcccgcggttatgggcgggttgagcaat

SEQ ID NO: 31101 - DNA, 593 bp, Oryza sativa
aatgattagttttagataagctaacctttagaaattcatgtagaacccaatttagcttcaatttgaataaacttaagttctgtaggatcactaaaacatgtatttccaagttatgaaataagattatatacttgctgtgtagtaaaagtctctaaatattcatataaggatttactaacatagagtagcctttaatttgtaaaacttgtagaaaatttatttttagtccaaatgaaatgaagtttctatagaaccagcaaatagttatcttgaacatagtaaaataaaatttggcaccttttgtagagaacatagatcaaaaccttaacttagtgaaataagaatttaaacacatagtgttgtttaagtaatacataaacatgtataagaataaaaacatgaatgaccagtgaagccatagttccattcccatccactaaaattagaagaacttagctcatataacaatttctaggttaatataatatatttctagtttagattagagcatctctagtttataaaatatgaaccatactagtaaagaccataaacatgtgaactaaaaatgttttagataaccaaattattcc

SEQ ID NO: 31102 - DNA, 562 bp, Oryza sativa
  unsure (1)..(562): unsure at all n locations
tgaaacttctctgttcttcactctgctctgaatttctcctctcagttccttgtcactgttgctgtgttgtgccgtgccggacgcgtgcagtctgcgcgcaaggtgttcgatcagggaaatcttcgccaacacnnnnnnnnnnnnnnnnnnnncaatcctagcaattagcaaactctattgcccctcctccttactatgtgtggatgagtgaagaagaagcagaggccatgcatggtttatataggcgccagcatgcatagcatcatgtagatcgataaaggctacctgggagtgagctgagatcagctaattatattacatcatgattagaaatttgcgccgaatttgcaggttcaaaattaatgccgtaagtttgattttatcaggcagtaccgatcgattaagagtagtgcactgtgaacgtgcacactgcatgcagtgttcacccttgatgctcttgcttccaattggtggtgttaaacaagcaaaagttatgctttaatcgagtagtactcctacagtacacagtgctactagtccgttttattaaaaaggaggatag

SEQ ID NO: 31103 - DNA, 538 bp, Oryza sativa
acttcgccggcacctgcacgacgactacaccaagccgtgctcctaccactcgacgctcgtcgtcccaaatcaccgccgccaagaggtcccaatccgatctccttttgccttggtgatttgttcgattgcaaagcaatcccatggaactcctttgctgacttcatgaggccaattgcatccgatttcttcaaatcagagtccgcatcgccgcctcttctcgtgttcgacttggcttcgtcttctacaattgtgccgcacgcgctgtgaccggactccgagtccgcatccgctactgcgccgcgaaccccatcagaaaagataccgcgtaatcaccgctcaaaccgagcctgctaccaatgacgccgctttggtctacgccgccggcttgaccacaacgcgaggatcgctcacaccgccgcggccctgaccatctccaagcttcatgtacgcctccacgacttcctacaccgccaccaaacacttcgggtcaattccattgacagcgaatgccgccgatcaataaccagtgcctgccaca

SEQ ID NO: 31104 - DNA, 528 bp, Oryza sativa
atagacagagagcttttctcctcgtcttcccttccgactccggcagggcagacgccgcgcctgcaccggcaaggcaaaacccccccccatccctgcatgcaaaccagcataaatatgtgtcatttttctattagtatctgcatccaaaaatatactgcctctgtttttgttttcctatacatgacgtgattgattttttaagatatatttgactattcatctcattaaaaaattatataattatcattctgtattttttgtgacttgatttatcgtcaaatgttttttaagcatgaattaaatatttttatatttacatacaaattttaaataagaataatggtcaaacgcttatcaaaaagttaatggttcatatattaaaaactggaggtaataatataatactcttaatttatagtatagcatgaaacgtattctaatatccaaaaattgatatacaacttatttagattcgtaataataagttatacttcctccgtttcataatgtaagtcattttagcatttc

SEQ ID NO: 31105 - DNA, 970 bp, Oryza sativa
aagtgaaaggtgaggcaaacgcgcggttatataggcatcgatgaatacaaacacagcttgcttgcattattgatccatcaatcgatggatcgaccagctagctatgagcaaaaagggccaatttggcgccgaatttgcagatgggcgaattaaggccgtccaaactgaatgatttgatcacgtacgtccaatcctctctgcagcccagctacgagaaaataatgatctatccatcggttggtatacgtaggatccacgcaccgctttatttatgcatgcatgtgaaatcttaacagcaataagtacaataatcgcactgcgtcttaattaacttcttgtaaactgagtctgagagatgattaattgatcaggagtactacaatgagccgtacatcgtatctgcagtatatactttgcaaatgcattggattgttattggattggatcctttgaatatatgatcgcttaacacatgcaaatttaaaggtaatttattgtctgcatgtatatatgcacttagtacatatgtgcagcacaaagtactgacagataaagattttgaacatttgagattaattgacaaagcaggaaacataattaaggggtttttggcagaaggagacatggaaaaaaaaaagaggacagagaaaattcttctttgattgtgcggtcgatcagaatctagattacaacttatatatattgattgggtatacgaagtatgagattgtaaaaaaacaatatgtaattacttattacagatccaatagaaattaacattcatagatgagaaatgcccgtaggcttatattccctcatcagctaattgattttaaaaaataacttctatacttttgaggcctatggccatttctcatctatgaatgttaatttttgttggttctgttataaatatttagagatgaatatcactataattggcaaatataagcattgtaccattgtgcat

SEQ ID NO: 31106 - DNA, 702 bp, Oryza sativa
tacaacacatttaatttgtttcggctcataatatggtctggttgtcatattttagtaaaaaagaaaaggaaacccatatgcacaatggtacaatgcttatatttgccaattatagtgatattcatctctaaatatttataacagaaccaacaaaaattaacattcatagatgagaaatggccataggcctcaaaagtatagaagttattttttaaaatcaattagctgatgagggaatataagcctacgggcatttctcatctatgaatgttaatttctattggatctgtaataagtaattacatattgtttttttacaatctcatacttcgtatacccaatcaatatatataagttgtaatctagattctgatcgaccgcacaatcaaagaagaattttctctgtcctcttttttttttccatgtctccttctgccaaaaaccccttaattatgtttcctgctttgtcaattaatctcaaatgttcaaaatctttatctgtcagtactttgtgctgcacatatgtactaagtgcatatatacatgcagacaataaattacctttaaatttgcatgtgttaagcgatcatatattcaaaggatccaatccaataacaatccaatgcatttgcaaagtatatactgcagatacgatgtacggctcattgtagtactcctgatcaattaatcatctctcagact

SEQ ID NO: 31107 - DNA, 1700 bp, Oryza sativa
ttcatattgatgttgatgaatttagatagatatatatgtgtagattcattaatatcaatatggatacgggaaatgctagaatgatttgcgttgtgaaacggagggagtatttcgtattgtggattgagatattttagaatgcagggagtacaatcttgcgacgaccgaatgtgtgccagcttgttaataattgcgtgattaaactagtaaacatataatccggtcaggggtcgcgcatctgctagcttgtctgtgcatgatgcttaattgccgtttgctttagttcgatcgtctccacatcgtgctgagagagaattatatcaatccaaagaaaattaagagattgtttaattatatgcatgttgttgtttgttgttgggtgttgttttgctgtcttaatctgattgcacgtgaaagcccaaacggtcggtttaggtggatattccattcccttacttttatattattccaagtcgtaattatttatagggttcgatccggcttttcttctttgttgtttcatgttactcgcttaaaaaagacatccgtgccataagtaagctttaagatacaacatgactataaatagtggatcgagtggacgagggagatgtcggcccttgacaaccaactttttctagctagctaccttttttagtaacttaatattttattttaaaaaaatggtaaaagtttaacctcgtatatattgatagagattaacttccgaggcatcaagacaacacctatgttggtatttgatacggtcacagataaattcgcaagcataagaatattgttgtagcatttcaccttagagtattataggtttatttaatcacaaggaatgtgtgtgtatattatttaagaacataatccaatcaagaacaacatctaatgctaaacttatgttagataggattcttatggtttaattaattagacttaagttaaaggtaaaaccttatcgattacttcgggcaccgattctcctctggtctacgaagctgagacggccctgtagctctatggtgtacccggacgtggaaagatacaaaaggcgcatatggctgtcaccgtctgctgtctacctcaatttccgtggagcacacaacaaatgaagataaccgctaacctagacatcacgtctaagttattgattactactctagcttcgcgcaggaacttccttctttatccagagtcctagtactggagtacttaatataaatactaagcgatgaactcgcaacggtgagaatatatctcactcaagtaagtaatttaaataccaaaaggaaatctcaaacacttactttattaaagaagcattcgctgagctacaagagaggaagagagtaccgatagcttcggaattcctccaggccttcccctcactctctacctattttctccacactactaagggatgcctaaagtatgagaagtgacttgtactccactttgttgtgtattgtgaaatggcttgagctcctccttttttgggccatataacggttggaattacggttgtggaggtcggtgcatccacaaccatcattgggaggtgatcttgcccgttcacgtggaaggtggagatgaggtggggctatggtggttcggccaaacccctggttcagcagacctgtgggccccaactctctccaccaccttcttcaggagctaacatgtgggcctct

SEQ ID NO: 31108 - DNA, 519 bp, Oryza sativa
tcaattatgatgcaggagcttgttggcttggtaatcttacggtggctatgatgggaaggatgcatgagacgtacagataaaagaagtttttgcatggtgtgcagggctacggactaatctacaggcgacagagcggcactagtgcattagcactcggattagtgcatgtcgcgggcgtggtgggcagacgtggtggtgcaaggtgctaagatcaggagtgggccaagagaagaggctgatggtgcggatagatgttggagcgagatgaacacggagactggtaggagggactccgaacccgagtccatgatttttgccagccgagtcagtgtctgtgatggatgccgaggccgtggaaaagcaacaacacctagacattagcacttcggggagcccttcgatcaattgtggccaagctatcagtgcaaaaggtgcagctcgggtgtaggtgtgtgacaacaagcgtgcgtgaagaacgtcccgggcaacagcgggtgaaaatcgtttggcagtacagaa

SEQ ID NO: 31109 - DNA, 518 bp, Oryza sativa
aaaacgtactagccttaattaattagacaatgtcgtctcaaatgaaaccacagttcaaattaaagaatgaccaatcttcatacagtgataataatcaaggctcaaagcccactcggcctttagaaaagagaaaactccttttttgcaatttaaagaacttccaaataaacttttgtgaggcaaggaagtttatattaagaatcatatcaaaaatgtttcctttgattattgctagatcataaagtttaggaaatcacaacattagtatgtcccgaccttgcacattccataaagcgtcccaacaacaaaaaaaaccccaccaattcaaccatcatccagcaaatcattgtttaaaaacattctggaattttaaatgtatgtaaactacaacgagcaaagagtttccttaaaacattccaacaataaaaacccaccagttcaaccatcatccaggaaatcattgtttaaaatattctcacattttaaatgtatgtaagctcaaacgagcaaaggatttc

SEQ ID NO: 31110 - DNA, 2160 bp, Oryza sativa
ggggagagactgaggcggccgggcgaggcagggcgccagctcggttgattttttagtcccggttggtgtaaacaaccgggactaaagataccaaccggaactaaaaaagaattggggtctaactcggtccgataactttttgaaccgggactaaaaatgatctttagtcccggttggtgttaccaaccggggctaaagatcaaaaagtttttaaccaggactaaaaataatctttagtcccggttcctattcgaatcgggactattgtggattttgggcgaccgagcaaagatgatttctccaccagtgtgtttgcattcaaaattaataaaagtatgagactaaattcagtgcacccggaattttggccttcctgaaattcaaaaccctagtgacatataatagtactacaaagcaatgactcgcttcacaaagagcttacaaattcatgggatcaaatctcttaaatgcaagagagaagtgaatactcaataatactgaatgtaacatccatattatcgatcaaataacaagcgcgacggtaggggataaatcagatgatactacagttgcctactgatttaattgcactaatttgatttaattgcattacttaccactaataataaattagtggagtagtagatattgcaaagctctaagggaattttgcacaatatagaaaatcaaacaactaacaaaggttaacccacgacaatgtctaaaagggaagaaaacaaacttgcatgataatatattgtagaacctgtgtctctcatcaatggcggcaaaccatagaattttctcttaattaattatatatgtacaatgttgaacaaaataatattgaaggtccattaactaacttgttagagtttcataattctagacaaagtatggtgttgcatgctatttttttaaaaaaataatccaatttcagggatgataatagtctttaacacggcaaattgcaacattaattgtaggcaaattcctgagaaaaggcacatcatattcaagagttgtcaatgcatatatctcttaaatgagggaaatttttagataagagaaaaatgaaatatatgtcatcttcggtctctatacaaacacacccactaaaagttcaggaaagaaaatgtgtgtcagctagctagtagatatagacggttatgatcgagtgcatgaaatgatttcttaattaattaatataatttcaatttccctttgaaataaaccctctgattaatttccagcttcttcaggattacactcattatattgtataataagttcttctcccattcggaaaattgcattcaagcaggttggccaaatatatattctgcagaatataaaaggagtaggccggctcggcgtacaaacaaattgtatcagtcaccccggccgttgttgtaacatttgcatggaaagccccaaaagagaacagcaaaaggggaaacactgtgccaaaaccaagggaaggaatgtcccccaggccaagctgcaagagctactagcatgcatgaacataattatattattatatattcggattaattgcacactcccccaactcggtcactcactgccacctggggcccacaccaccatagtctcccttatgggcccactgccatagtctccaaaggctctctggtcactggtctcctctccatctgtgcaaagtgcctttggagtttggagtgctcacatacattcataggacattgttcttgctacattctctctctctctgatattctctctgtgagatattctcatgtgcagagaggatgcagctgctagctgtgatggatagctagggaggcagtgcaaactcgggagaacggaaagaaagataaacaaggtgatcgaggtagctagcaagctagagagagaggatatatagaatgcattgcgatgctcaaaagccataacacgctcgccacaaaacgcaatgatgcggttctctgctctccatgctccctctgatggtgtagattaatgtatataaacctctaatctttatttatctagttaaatcctttcttgatcaatgcatgcatagtgtaaagcccaatgcatgtatgggacatgcagatcaaatgtcgaatgtttaaattgatcttcatatatatcttatcaagattttagctgtaa

SEQ ID NO: 31111 - DNA, 1264 bp, Oryza sativa
aatgcctctctctctaacctaatgatgctctctttgctgcagctgctggcttgggcaaagcttgctcgctttgctacctgctgcatgccctgcctccttgctctccgatcacccaaccgctccatgcacaaacctgcaaaacacctctctctctagatgtgtccctgtgtactggaccagccatgttgcttgcaagcaatgctgctgctgacaaattgggatcacaaggaaaagaattagtatattctagctagctagctgctgcatcagatattcagagatggtgagtgaatggtatcaatgccctttcagtgtcttgcatggtgtgctgcctgcagaaaaggatagcttgttgctagcagggcacacaattgtaaaggtatgcaacaacaaggtgctgcacatcatgccatttccctggcatgtggatgctgctaattgcctgacaagaattgggccaaacagcttttagctttcaagggagagagatcggtcgatcgatgagcgtgtcaacaaacgcactcgatcgatcatcagatggtccaattgacagatatatgttcaggcaacggtggacatgctgtgtgtgtcgatcgatcgtacgtccttcagatcgaaatgcatgaataattccttattcctgtcctaatttcagatgagagatgctgcaggtaacgttaactatgcaagctactagctacctgcaaatctgcaacttgctgccttcagaaaagttcagcgaataagccactacaaagttcagagatcaagcagctgacggtgtgagcacaatgcctgacgtaggatcaagctggctacgcatgtctagctcattgcttgatactactcaaaattaaactagctctacacatcagattctgagcagttacaaaaaagttcaaatctgaattattacttcaagaactatagctagtatgttgaactatatatactgttggtggcaagcatcatcaggtcgatcttgatgaggattttgcacccaaaagacaggtaggaaagaacaatgagagcaggcatgatgctacttaagccccccatatctcctgagagtcatgtgaaatcagaccaagatctcccaaaggtataaagtacaaacatacacacgctctctctatatactatatagtatatttatgtctgcagttagctcttcatgcatgtgaatgtgcaatacttgattcctctctggcgtgtactatatagcctattatacttgacaaaccctgacaaattaaacaaatac

SEQ ID NO: 31112 - DNA, 617 bp, Oryza sativa
ttgtattaatctacatttatgaagattgattttacatttaagaaaaaaatgatctataccatcaaaatttaccttcagatttataacactaaaagtttgtggtacattttaataccaccaaaattttacttccatctccccgcccaattttccttttcttttggtgcgatgttcaatactttgtctccaatcacttcaaggtgatggatttgtaccagtatagggaaatgggcatggctagcgaggaataatgcatgctttctccagtcacttgttttgatcatacgaatgatgataccttatcactaagtcatacagatcactatgatagtttgtcttagggtgatcttgcagagcaccttgtgtcttcacatagtgattctgcatatcacagcttttgtacgatcactatatttatctgaatagtgatcatcaacgacttgtcccagtattataatttacattgttaatcaatacttcctccgtcccaaaatatagctacctagcacaggatgggacattatctagtactatgaatctggagagcctgtccagattcatagtactaggtaatgtcccattctatactaggtagctacattttggatcggaggaag

SEQ ID NO: 31113 - DNA, 648 bp, Oryza sativa
actgatcgccctgagtgattaaggtcgatcgctcgcccagtagcattcgtggccacggacgattgaaacaccaagcaaccaatcgtcaaaatcaatttattaatccaaaccctctatattctacatatatctccctccttcttgctacctatctcaaattttattatcctcaaatcctcaattgcttggcatctgtcgtttccacggtattagaagatgccctagcttgcctgccgagcttaggataaaccaacgttcgttcaccctggcaggtgggtgttcgttgggcgcaagttgcacataacgtgctaagatgtggtgttgtgattctacgtcaacatgaacaatcttaaaaatacataaagagattacattacgtagaacacataccgcattacatatgcgaataaatagagacaacgacacacaggagcactctgaaacgcgcattatttttcacctgaaaggcaatgcttatgcactgactccaagtctccaacacatatatcgaccgatcgatctcacacacagtcacactcctctcacatctcacaacttttatttattcttcacgaacaagctgacctgcgtgtgccgccgctggcgcggcgtcgagcgcgcgtcccgccgcgccgccagggggctgca

SEQ ID NO: 31114 - DNA, 647 bp, Oryza sativa
aaatttttttgctgggctcaaaacccatcttaaatagaaatattcaaacattttgataggactaataaaatgaatatatctaaaatttcaaacagaatctaacaaaaaaaaatggacatttcatagtaaacacatctattgtttcgacacaaaattttattattaattaaaaactacacggtttaaagtaattttagttcagaatttatatgttgcaagggtaattagaagaaaaatcataaccatcattcaaagtacattaagtaagttcaattttagtttaggataaagtaaaagaatatttttgatagaaagccacccacacatggacatccgtaataaagtttcatgcatattaaataagatgcccgcgcatatgcgcgggctacctttctagttttgtaaaaaaatatcgtaacagtttgcattacatttgagaaagaaaatacacatatcattcccttgagggatcgattaatggctagaactcatcttccttcggcagacacgcatggattgcgtaaaaaaaacttcaaaaccatttgctaggagtagatccatacatgtgggtgatagtactgaggaccttgtggcgttgtgcgtctgccagctcattgatttaggctagggagatgtgaacaccacaa

SEQ ID NO: 31115 - DNA, 537 bp, Oryza sativa
tcattgggctgtcagccattgattgatatgcgaatcggttccaatttgtgtgaggctcaagccacaccaattcactaatatgtagataaatgctactaatttagcaagccatgttgggcttatgatcatctaccttctacaaccattattttccttttttttctcttcaaccattgtacctaggtatgtgatctgtaatcagatgttaatcgttaagtatcagttgttagagctagggacttcatgttgtctccacgtagctagtagtactagattatgcttgtgtatttgaatttgctggtgcattcatcatgcatgtatatatataagctctggaattccttgtagttaactggatgttaagctgagaatgtataagctctagattatcagtttaccactccatgcgtgatgaaacgtgctactgcttactctgttcccaaatataaataacttgaaattgtttaccaaagatcaaggtttgaaaagaaaatgataaagtgtatcttattaaggccgagtttagttacaaacttt

SEQ ID NO: 31116 - DNA, 645 bp, Oryza sativa
attttgtacaagggagaaatcgaacttgaggggtctaattaaccaaccgagctactccctccgtttaatatacgtatatacatatacacgtatatacacatatacgtatatacacgtatatgtatatatacgtatatacacacacacacacatatatatatatatatatatatatatatatatatatatatatatatatatatatatatatatatgtgtgtgtgtgtatatacgtatatatacatatatatatatatatatatatatatatatatgtatgtatatgcgtgtgtggacaatgctaaaaagttttataatatgaaacggatgaagcccctatagttttctagcattgtgtagtatacgaatgcacaattatatccataaaaatgatattagatattcgtcgcgacaaaaataaagacataatatcggtttaccatttatcacgatatatctaaattccacttgatcccttttatggataaaatgtggataacaattactaccagcagtatatcctactatagggcactggacaccaaaataccctcacccaatagttacaaacgcatattttgccgttagttaattattatccgggaaaaaagattagtagtaatccaaaatttcccaaccccaacc

SEQ ID NO: 31117 - DNA, 555 bp, Oryza sativa
ttttagattagacaatttatcggagtgatattgtcatatagaacttgtttttaacagagaatagcatttgcagaattgaaaacacagttgctggagtagttgctacggtgctcacggattctttttccccatatatgtgcacgccgtttgtgattctcgttgcactgcgcatgtgtgggtgatataatttctgaaagaaatttaaaacaaaaggaaattaaacgccaccgctctgactattcttaggccttgtcttccacgtggtgtcggccagcaaaattctgaagagcttaatttggaaatgacatcaccatcatgatggtcgcaattaggacacgtttgtttacgcgaataaacggaccaattattaggaattaattagcccatccattaatgtaagtttattccagcattatggagcgtacgtgcactaccaagatacttctttcgttatagtaattcatattgtaagtatgtcgttttgagccaaactttattagaaaaatttagccacatattacaattaaatataattttaataatttatttgatttg

SEQ ID NO: 31118 - DNA, 578 bp, Oryza sativa
gctataacatcatgatctaaatataattagcatactatgacaccgataagcacgttctgacaccaacaaatcgattttctggatccgccactgcttcagcctatacgttttccttgaacatttgatcagctcctccaccactgggctctcgtttccacatgtgcttgaccagccgaaaggcgagactgtctttggcagtttcagcgttgcaaaaacacaaatgtttcagtttcagaaacgaacccaatcgatcccccctactactgcagttgctcacacacccacaccccgactgcacacgtcgcctcgcctcgtctgcgtctgcgtctgcgtctgcgtctccgtctccaacccaggcggcgtaggggaaggagaaggaaggagagatcgcgcggcgcgctggctgtcgctgtcgccgtcgcgcaggctcgtccacctcgcgaaatcgtgagctcgcgcgccgctccgggcatgcagggcgccacgccgggcgatgccgcttgagaggaggtgggaggccgccgggacctggtgattgtgaggcgggccaacgttgccgcatgcctgacctgcccgct

SEQ ID NO: 31119 - DNA, 515 bp, Oryza sativa
gctaacaatcaacaaaggcgcgaaacaaactccttaacaacaaaaaccatatacacaagacaacacatgtaaagcacatataccccgagttgagctggctcttctcgacgtggagacacgaggtcactcgtcataacatgacattgtaaatgctctaagtaatatcctatatatatctactatcttaaaagcatagtagtcctcttctcagtccaattccgcataaaaaaagcgctaaaagaaagagagaacccactctcataaatttctatttatcttaaaagcacagttatcctcctcctcttcccactccaattccgtgtaaaaaaaagctaaaaggctagagataaaatcaatcaggatttaagtcctgatttctataaatattacacccatatagttaggctttcaagaggaatttaagtcctggtttccattttttaaatcatgtgttaggggacgcgtttgtggatgtgtgagtatggatggtgttgggtatctaattgtgtgtgctc

SEQ ID NO: 31120 - DNA, 930 bp, Oryza sativa
agctgtcttttaacaaattcatgtgttaaaagaatggtttctgcgagtgacaactgctttcataagtattattttagagaagatatatattccctccgtcccattttaagtatagttatggtttttcgcgaccaactttgcccgtctgtcttatttgaaaattttttgaacttatatttgcacttaaaatgggacataatgagtagattggagtaggttgcttacaaacttgcaatgtttcttggacagtaagtgaactcaaatcataattctctaccatcaatcatcaactcatcacctaacttcaaacctttttcccctaaaatcgatgtgattccgtggcatgcaaagttgcgaacgcatcattgctttgtttacctgcagcagtagaacatagagtaggagactccgttgttgcttcccgggaaatataatccgttgcggggccgccctcgtcctctatcccgccttgcctgccgtcctctgcacccgctggccgctgcttcgcctcgcctagaaagagagaagaggagaaagagggagggtgatgacgtggatcaccctgacatgtgggctccacgtaggtctcacgctagctcagccgtcacatcggataaaatcggatgcaatactgctctatgaccgattgtgacgagtcttaattaggcatgcaaaattggttatatagcatcgaaagttcacatttttggttttgtagcaccgaaagttaccggttcactttaatagcatccaaagttcactctgttcccatttttagcacttccgtcaatttttccgtccgtcttgatcgttattgatctagccacacacatgatatgacatttctacccctcattgacatgcattatacttgtacttgtgaggggtagaaacgtcatatcgtgtgtgtggctggatcaagacggacag

SEQ ID NO: 31121 - DNA, 577 bp, Oryza sativa
tccttcaaagaaattccagtctcagtcctgcagtgtaaaagagagatgatttggctacagcaacaatgtttgaggcacttcttttgcaaaatattctgagatcaaccagtcgttttcgcccaaaaagcatctccaacatttcagacaaatatttgaaatgaatggacatcagtgagtatgctctaatgtcatttcaaggggaatttaaacatagattcagaatcattacagattttgagaagagaattactttgttatctctccctcagtgaaaaaggattgtgacacatcacctgaaagtagagtttatttcttcaggatgctgctcactttggacctggcttttggacctcactttgccagggcaaatctctcatgtgtcattcttcccctctcttcctcctcctagagttactcaaagatgaaaaaaaatttccccacatacatctttcttatatgtgacctgaatcatcttccaatacgaatgtacttgatggagaacagtggcagccttaaggatcagatacagatagcaatgcctccttcctactaaaacttttcttttcttttctcactg

SEQ ID NO: 31122 - DNA, 634 bp, Oryza sativa
gttctgataatagtgcatgcgcgtgtgcacgcatgcatgtctagcttcatggacacatgttagttttattaaggcaatccacatccaggttgtaaatgtagccgatagatttactgaatttagtttgccattaacttgttggtactttagtgtttgcttggcaaatactttctttttgctgcggcttataagctactcctccatcccaaaatatagcatcttccagcgttcaaaatttgtcccaaaatataacaacttctccacctactccctcctttcaactaatcacaattgttcgccatttaagttctcgacctacttcctcatctcaaccaatcaaaaccatcccccatttagttccacctactttcttaatagctgtgcgatcctctaaaacttcttatattttgggatggagggagtagctaggcaacaaaaaataattttagggcaagccttttatactcctactctcagcgttccaaaagcgaaagctaaaaattagaaaacactgaaaaataccccaaatcaactcaaaaattaagttctaaaattcaaatttgtctgtggcttataagccaacgagcagccaaagaagcattttgtcctgtttttgaagccacaaatgggcatt

SEQ ID NO: 31123 - DNA, 590 bp, Oryza sativa
ttcttaggataagttttttaaaaggtttatttataaaataggttttcaaaagggacctaaaagtaaaaaaaatccagacgccgcgatgggttgggttgggtacttgggttcgggtgactcaagtagaactggggtttaatccgcatcaccaaacacccctccacttcgtctctctctctcgcccaagtccacacttcgtctctctctcccaagtccaaggcctcgattccgtcgtgagagctcaccatggcgaaggcggcggcggcggcggcgaagaaggtgctcaagatggctgcgggctccgaggtttattatctctccccgtctcggtctctctcacttattttgttcctcctcttgtgtttgtgaagctgatcacgaccgccgcccccgtctcggtctcttctcacttattctgttcctcctcttgtgtttgtgaaggtgatcgcgacagccgggaagaggaggggttccgaggtgcacgcgtggcgccggatctcgcgttgcatgtctcgatccgtcttccccatctcggtttctctcactttacgagtttctcttgtttgtgcagctgttctgcccttctccgc

SEQ ID NO: 31124 - DNA, 593 bp, Oryza sativa
  unsure (1)..(593): unsure at all n locations
cgcagtcggatctgatttttgaagactaatgaccgnctacaaaaatataaattggggtgatgttcgctgtccgcctacgaaaatctattttcgcacgcggaccacttaagcggcgcctacgaaaatgattttcgcaggcgcaccttatatggtccgcctgtgaaaatgaggagcaatattaatagactaggctggagtagtttttttctaagtctcattctctccctcacttatcctctccctcacctctttcccttagatccctctacctcactcttctctcctctcctctctagcggtgcggagggaacggtggcccaccggggacggcgactgcatgcggcggcgcggcggggacggcaaggcccggccggcggcggcggttccctccgcccctccctcccaaatatggccggagaaaggaggggggaggccgccgggggtaacggcggcaacaacggcttgggccgttgttgccgccgtgacaacccccccggggcggccggcggcggcgggttcccttggccccttccttccaaaatttgcccgaagaaggaagggggaagcccgttgccgggaccaacggcttgaac

SEQ ID NO: 31125 - DNA, 569 bp, Oryza sativa
  unsure (1)..(569): unsure at all n locations
ggcatcggacgcctttggtgtaggccccaccggctggattggcgagagcgagcagaagccaaaaggcagtggaagaactaggatctgcaacgcgccgccggaagtcaatgcaagtggagcaccattcaagcaatgaagaaaaaacctggaagtgacatgtattttgtaattttttagttgttacgtctgatcctttgcccgtgtctttctgtctttcatcaaaatgctagggtgctggttggtttttctatagtttaaccagattagttcattagcctttgctaaaagtgatgcgatttatcgctcacactgagtaggctgttggtaagaatattacaaactgagtcacaggcttccatagcagcagtgctaaattagggatattcagatggtttactgcattctgacaaaaattattatgcaaagcatctgctgctcatgcagctggnnnnnnnnnnnnnnnnnnnncaaaggcttacgactgggtataccaaaatctagaatgtgatggatcaatgtgtaaacaagattgtggtttgtctgtctggttcctttcaaaaatgaaaact

SEQ ID NO: 31126 - DNA, 755 bp, Oryza sativa
aagctactcccaggcggctggtgaatgcacctgacataattcattttaaccgtttgaaaaaattacttctgtagtgtaagtgtttatcctcagtaatacgatacaacaatgtggatgcttgattttctccaagtatacacgggattagtaatgatcgatcagttgatcacccttaccttaccttaaatggtaacctgccgtttggacaaataaatggacggggacaaatcgatcggttcttaattagcgagattaattgttagcgacagaccgatcagttgcttgcttcgctgccgagaatctgtcacgcatgcagacgcgtgctgctgttggagggagcggccagaggaattgatggctgcccctgtcgtttgccgcctgttggctacctgttcccaaattagttgtccaaccaccatttaaatttcacttatctccctaaagtactgcttgtcttactcactccgtctaattttatagagaaaatctataaaatactattgacaagcattctaattccagaaatatcatcgacaaagacaacttcctaaaaataccattgcacgaacctctttctcccaaaaatactatcacaccataagtattgttaactcatctccattaagttatatgaaaagacaatcttaccctaggcatccatttgcacacacatcatcattctatattatttgctcacacaatattattttgcattcatgcatattttttctgtccacaactagggctgcaggaat

SEQ ID NO: 31127 - DNA, 659 bp, Oryza sativa
cactacccatgcccgctttgcccgtttatccgcgaaatctaacttacatgtaggctaggagcaaaatccactagaatacataagccacgttctttcttttctacggtttcccttttatttcccttattatttctctcctcttactctatcgctgccagaggagagacacgacaccgaggcggagaatatttgatgttttaagttcgattcgaacttagtagcttgtagactttttgttccactgcttttgttgtggcgggtaaacgggcacgtccgtgggcataaggcgcccgcgggcaatgggcatgggcaaccatccttacccgtcatgtagtaatgggtatacccacgggcacaaataatctcacaggcatgggtatggataggcacttcccgtgcccgtcgcgcccgattgccatccctaaccgtggagaatggcaagactagttgttggctcttgtagcaatcagagccaactcgcagaggactcagcgcgggtgacggtgaactcactgtggaggtagcatgggcggcttcaagctcacagtggaggccgcacgaccgatgacaagctccatgaccttacaccactagcctccgctagctccgtcgccacgcatcacctcttgtaccttggtgtcgcgctcctccactagctc

SEQ ID NO: 31128 - DNA, 515 bp, Oryza sativa
ttttaaaattttttaggttataaaatgaattaaaattaaataataattctatttttaaataagacggcaaacagtgataaaaaagtttaaatcttttatattagggaacggaaaaagtactaagtcaaatagcccatcactagcttttagctgatgtgctgtactagtactactgtttacgtcagcgtgttgaataaacagcggagctcccaaacacatcttttgttcggattagtagttaatcctgctacgaattactgctccatccgttcaaaaacaaataatttatcacacatatcaatacaaaactagcaaactagaatacatatattttatcaaatcggaatacaactatttcataatttatctacttccagtatagttattcattgcttttacaaactccggtccaatgattatttacaataaacttacctagaataaatgatagaagttagaaataaaatttattgctccatccgtctcataaaaaaataacatagtactgaatgtga

SEQ ID NO: 31129 - DNA, 1290 bp, Oryza sativa
gtctccgcgacgccgcgctttccggcgcccacgacgccgcgaccgctatcttccatctccatgagcggcaacctccctggctccctgtccctggccgacaggcccagccccgccccgccttcgccgcggaaacgaagcagagcagcccacgcggaggagagagacgccgccgcggcggcgacggcaacggcgacggcgacgaaatggaggcggcggagcgggtggcctcgcgatgagcacgtgcgcgtgacagcgtgtagacctcggctcggctcggcttcgctgcgctatatgggccggaaaggtgcagaagcccatgtgaggcccgttatatatgggccggaacaaactggattggagtaataagtctacttttgctccctcctgtgtaggtaaatcttattcaaatccttcaaccataatatcaaatattttgaccccccactattaaaaacagtgcaatttgatttcctcgatggttctttgagagtggcttttgctgacatggctcgttgacttggtccaaataacccagttagtgggttgggtccacatgtcagtgtctcctcttattccaagattggcagtaactcggcccatttatttatgggctggaaagggatcacggcgaacgtgcaggccattttaataggaaaaagtgcaccggaggtccctcaacttgtcagtgagataaaaaacgtcctcaaaccgtaaaaccaggtatgtgggggtcccttaactatgcaaaaccggtcacccgagatccttcggcggttttgatcccggttttggtctacgtggcagctgagtcagcatgggacccacgtgggccccacgtgtcagcctgtccaggtcagctactcttttctctcccttctctctctcacttctctcctctcgggcaagccggggcgggtaggtgttggtagaaacacacatgatcgatatctctctctcacttgacaaaaacttgaagatgaacagtaagctaaagagcaatgaacacagaaagttttgtggtgcttaaatcttgccgcaccgttttcacgttttcttcttccttttattgaagggaaaatgcacactacggcctaacaaattgaccggattactcgctctaccatccggattacgagcgctatcccactcgtcagatcgtgcagcgagagactcgcatactaccgcctcgacgtgaactcgcacgcctcaggtctacagacgcgctcaactctgactagagcgagcccagaaaaacagggaataaaaaacaaacacataacgtgcatgaaa

SEQ ID NO: 31130 - DNA, 698 bp, Oryza sativa
tgctatattctagtacggatggagtatcattatcctgatctggtgatcgacaatactccatttccaaatgtagtactttatcatcaaagactattcgtttttaaattttgaccatttgtcatttttgccaaaaaaaatgtaaatatttaaaaagacttagtattattgaagtgggataccccataaacattagcattaagctttattcatcgtaatttgaaaaaatattagtggtgaaagttgaaacggtggcggccaacggtgctaagtattattcggggaacttaagttaagcaacagtttcaacaataatatataccacttgtttggacgattcaagaagagacataagatgatacatgcatgcaagctctcacaaattcaagatgcattgagacggtgagacgtgagacctgaggcgtacacgcgcgcgcggagctcctaacgattgtccggtgaagaaattaactatcttctgccattccgtattttccgttgcttctcgttgcacgcacgcgtcacacgagcacggctacctagcctgccacgaccgtacattggcacatggattacgtgccgcttcatccactggcctccagacctccacgtcgtctcgctcgatcgatctcctctcttcaccgctctccttgaaccttctttcttccatgatgagtacgagtacggcgcccagtgtgaaa

SEQ ID NO: 31131 - DNA, 561 bp, Oryza sativa
ttttttgaggaaggatttgaaattgaatgaaagtttgcttttcaggtgaccttactttaaaaaaggttagactttaaggtgaattttgtttgattacctgcattactacatttgcatgaaatgcaatcacttaaagtatgattggggtatttaaatatggtgcccaagtagggagactaggatttattctggtttgcttttgttaaaaatatttgattattaataataggggaaatgttgagtgcaatgaaaaaagaaaaggcatgggaaatatatttagaaattatattgtctttattcttcaaaccttttgaagccaaaacataatttgggcacaaaatcccttattcctctttttccccagctaattttacaagttgttttttttttgttttgttaaatttttgtttggagtgttatgaagttgtagtttgataacaaatttgaaaaagacagatgttttgttaggtaccagcacatcgctcacatcacagttgagtcagaactcagaaacatacaccttaatcacaagttggtaagaaagaaaccaaaaaagaagaa

SEQ ID NO: 31132 - DNA, 702 bp, Oryza sativa
gcagatgatatttttttttcattggaagatgagcaggaagatatcaatcaacaccatgtatgttatctctaatgttttttttaaaaaaactttttgggaatatcagcattgtgtgactctttctagaaaacccctttctctttcttgatctgttgagtgatatgctattctatgcaacaatgccagctaccatgtatgaagtaagattcaagttgtacgttacagttggatttcacgcactatctctttccagttgagcaccattgtcgcagttttgtcttttatgtattatgtactattgtataatcattgttatgtgaagcatccttttaggtattgctagtgttctctttctagatcggggacttgttcaccgtctgaaaacttcacacatacagctgttagggtttacggtatacttttaatgataaccacatgattagttcctttttaagagatgtgttgactgttgacctcaattttgtgttaattgtcattctgtagtctgcttaaagaccagcatatgctactcattggtccaaaaataaatctaacttctttggaccgttcacataggtgataggtcaagctatgtaactgctggccatgccatgcatcattggataatctttctagttcactgtattaaatgtgcactaattatgtatagcattcagctgcagttggtgcatactaactaat

SEQ ID NO: 31133 - DNA, 677 bp, Oryza sativa
tttcagtgtagggtcacctgaaatgcaaacttgcatgcagtttcaaatccttcctcaaaaaaaatgatcatgtttcacttcttgcattctgcaggggaaccggcaagtcaggaagatctcccggccgagcgtatcggcacgcatccccaggcatggaaggttcccattcaaggaaggcaggcatatctgtggagcaaaaagatggttgcattgcaaggaggaacaaaacaagaacaacattatgatggggtctggctgtggatgttggtgtaactagggggagggggcctatatcttctgtaaacactgctatttaaaacagttttaaacataaaaactttaactttttgcaaacaaaagctaatctaatggtggggaaagtttttttgtaaaaaaagcaatgagtattaaacttccctctcacaacaaaacaagcatcaaaaattcttggcaaaaggatgtgggcaagaactcccttcttttttggcactaataactttagacatctaactagaactttggttcttttctttttttttttttttagcccaaacattcattcttttcccttgtcactgtgtatcacttacaacatcatatcataaatttgccccagagaaaaaacatgtcaagaaaggacccaccttttttttaagctctggctcttaccttctgat

SEQ ID NO: 31134 - DNA, 619 bp, Oryza sativa
tgattatgcaattcctggtttattcattttttagataataattcctggtttattcatagctggaataggctagtgattatgcaattcctggtttattcataaaggttggtaactgaagatgatatacccgtttattcaaatgccccagttgtatcctatcaatgggagactgttgcatgcaactttattgaatttgaattagcagcagtaagttttgagtgaaccattaccatatgtatttctttattatgcaatctatgattgaagttcttgaatagttatagttcttctgttctccattgactcacacattataaggcacagtgttgattaggtcatacaaatgagaatttctttggatatccttagttacccgtggtacatggtattaccatgccatctctgtaaatatatccagcagactgtaaaatatatccaacctccatacctctgtaccataactaaacagtactccctcggtttcatattattaagccgttgacttttttcttagtcaaagttctttaaatttgacccagtttatagaaaaaaatagcaacatttacgacacaattaatttctattaaatttaaacattgaatataatttaatacaatgt

SEQ ID NO: 31135 - DNA, 603 bp, Oryza sativa
tatcgaatgcccatcacggtcaccatctcgctccccacaaaattgagagaccgaccatggccagatgagagaagaccaatgttgtctacgaacgagtcaagatgacaagaaaacaagaaacgtactagtagcacacagttgtcccgttcgattctccaacgaggaggaatatcaagtgcgcaccaaaagtagacaaataattagcacataattaattaaattttaattatcaaaaaaaatttaaaataaatttatttaatttctatagcaatttttattgtaaaaaatttttgcatgaaaatcgtgctaaccaaatgcaaggaaaaatctgtatcactggcgttttttacggagctcaaaggcgaacttgcaggagacaaatgctgtctactacgaaccagtcaagatgacaaggaacaagtggcgcaaactgtcattgtttcacaaccatgggaaaaagggataatctgggttgctactctgtattagtattactggcattttgacagtagtactagctcaaaaggtgaatttgcagatggatcttgcggtttggaaacagaatcgctgtagcttttgcttctattctttggggtaccgagc

SEQ ID NO: 31136 - DNA, 1001 bp, Oryza sativa
gttctccgccggtgatcggaatccttcccctgccgcggcggcggcgaagaatcataaactgccttagagtcgcaaacttgcacgcggaagagattcgaggaggcggcgaggaatcataaactgccttagagtcgcaaacttgcacggcggagagattcgaggaggaggaaacggaggcgtatcccggcggggatgaggaggccgcccatcagcgcgcggcgaagcagccatcgacgccggcggaaggagaagcatatgacagtaacaaatcgggctgggcctacttttgccagaaagttcaatagtacgctgttcccctaaatgggccgcaacgaaaattccgaaattggtgtgcaagtcagaatatagcctgcgcccatttggaagtctgaatcatataccaatggaaaaaagtctacagttcctatctgaactgctacctcaaaccgaatgagatttgatatataccaatagtagcatgtattgccatagctatttttctctttatattcaattaatatggtattttctatcctcacattctaacatgatgtcttattctcaagttatatttctgaattcataaaatatgtattcaaaattgaaataatcaaatgcactttattatttattcattcatgtgccaaatatacatgggcaaatatcgtatcagagtataatatcaagcgagaagcaaggctatttactggaataaacatgtatccatatagggtctgtttggtacagctccaactcctaaatttagctctaggagttaggtctggagtggagttatggagctacctaaacccagctccacaactaaagttcattttgtgagagagctccacctagctccactcccattttttatgtagctgaaactgtttgtctgagctccagctctataaggggtggagcagaagctatgccaaataggtccgcactatgtacgtacatgtaatctaggacagctatcagtgcaaagagcacataatata

SEQ ID NO: 31137 - DNA, 745 bp, Oryza sativa
tttagggaaactccagttcgctgtaccaaagacggaatgcgtgattaattaagtttattcttttttaaaaaatagatcaatataattttttaaagcaacttgtatataaaagttataaaaaatatactatttaatagcttgaaaagtgtgtacgtgatgagttggaagctctaacacacgaaaacaaccgaagttccctcaattcttttttcttgacttgatttttcttactccagttgggagcaagcacaaactcgaacaaaacaatgcaaaatacggtcagccacccaggtcagtgaacattccttcctcttcacatgcatcttggattagtgataatttagtgatagttttttaattagttttattctaaaccgcagcatcaggtgttgctaggtcaacagagcgcccccacccgcacggaatcccgcccacatcgaaatagcggtcacggccgccacgcgccacttttctccacgtgtgctcccgtccacacgtcatccttcgtgcacgcggtccatgcaccagccaccattcccttcgcctcgaaggaagcgtagcgcatacaccgcgttcacgcgaccctacccacgtggccccccacaattcctccactaaatattttattatactcttttcgaatcgcaattaaactaaccgaaaatttgagtgaatttttaacgaaaccgtcattaataaactaacacgtccttccccttcgctgtgtgttgggttcggttcgctt

SEQ ID NO: 31138 - DNA, 934 bp, Oryza sativa
ggggggatagatcgatccgaccgtacgtcttgctttgagatccgtgctgacgagtgacgaccgtgcaccacaaccgccggcaaggccaggacgacccaggtgttggagggctttcctttccaggctgggggctctttaaatgtgaccaagcagagattattattgattgtttgtttagttgcctgtctcatcttatatttaatcgatgctggaagcttagcttggcgtcgaccgtcgagtttgtactgtcagtttcatttttttaaaagaacttttgtcagtttgtcgtgggttatgttcaagagattggaagggtgtgtaatagaagttgatcgtgtgtcctttttgagaacttctctttgatggtaacatgttaagcgtttgaagaaattctagtagcgtttgaagcagaccattcgttaagggcttgttcactttgttaccattttcaatcttatcattttttttgtaaagttaaaaaaattgctacatttagtttgttgctaaattttagtaagtacatatgaaatcttgctaaaatttgataatcttaccaaattttgataaccttaccaaaatttgacaatgccaaaacttggtaaggttgaaaatgatagcaaagtgaacaagcgctaaattattatcatagattgactacttaattatataaatgaattaaacattttagaaacaaacttaacaaatactacctttaaacaaatgagcctaagtaattcaatgaaagaaatgtttttgttaaagaagccacattttcagaggcgtgtggagcaaataattcacatcaacaatacgattaaaaagagagaaaaaaaatagatgctggagggataaactcttcagcatatgtgagaaactgagaaaccatgagttggtgtgctcaggcgagcatggagcgaagaacagtcgttttttc

SEQ ID NO: 31139 - DNA, 698 bp, Oryza sativa
tgtaaaaacacaagtcatggtattagggatgtatagttctattggtaaaacacaagtcaaggtattaggtgttccagtgttcaccgaggtgctaacttgatggcagactggctgcctttggttattattaagtggtgtctaggtgctacttttttcactttaaacatggtgatttgttcaaattattatttcttgccactaaaaattggtcataaattaatatcagtttttactgagaggtgtttacaatcatttctgaaaaagttcttgaacttttaaaaggaatggaacaaactttaatattgatgcataattattgataatttatagagtggtgttccacatcagatattaaaatttttaacttttgtaccatctacactaaatttatatatatcttaacaatcttatattaatttcttgctaacctgaatgttgctaaatttaaggctctaaaaaaaattaacttgatattttaatttactaaacataaaccgcaattttcttacaaaacattttattaaattatactacaattctatatttctgaaataacaatatatcttagctttttaacttttggcatatacaagcccaaaatttcatggcagcaagaacaccagtaacgagaaaaatgtggcttcaaaacataaaaataaaactgattattctttgcataataattagcactcatcctt

SEQ ID NO: 31140 - DNA, 684 bp, Oryza sativa
atgctgggagcttagcttggcgtcgaccgtttagtttgtactgtcagtttcatttttttaaaagaacttttgtcagtttgtcgtgggttatgttcaagagattggaagggtgtgtaatagaagttgatcgtgtgtcctttttgagaacttctcttttatggtcacatgttaagcgtttgaagaaattctattagcgtttgaagcataccattccttaagggcttgttcactttgttaccattttcaatcttatcattttttttgtaaagttaaaaaaattgctacatttactttgttgctaaattttagtaagtacatatgaaatcttgctaaaatttgataatcttaccaaattttgattaccttaccaaaatttgacaatgccaaaacttggtaaggttgaaaatgatatcaaagtgaacaaccgctaaattattatcatagattgactacttaattatataaatgaattaaacattttataaacaaacttaacaaatactacctttaaacaaatgagcctaaataattcaatgaaagaaatgtttttgttaaagaaaccacattttcagaggcgtgtggagcaaatattcacatcaaccatctatttaaaagagagaaacacaatagatgctggagggataaactcttcagcatttgtgagaaactgagaaaccattagtt

SEQ ID NO: 31141 - DNA, 579 bp, Oryza sativa
ttggctaagcctttactcaataggaagggaggttgtggggattttgccactgcacctttactccaataggtacaatctgacatacgctatatcagttttgtttggctccatatttaccaacatagggttttccatagaaagctcattctatgctttctggatatactacttgtcgcgaaggatctcggccatgtcataggacatcacctcgtctaacttgtaattttagctgatgtaactattcatccaactttgtggcctcggttttcaattcgaggttcttgatacaagaacgtgcctgatcataaagaaaagtcccattgcaattgtacaaatatctcaattttaaataccaagagttatttactttccagaaatacattaccaaaatcctccaatttcacatatacaaaaaggtgtgtgccaattccatactggagtactcctatatttttaagacacatactaaaggtgtgtttagattccaaaaaaaaatttggtcaaaaaagtcgcatcaaatatttggacatatgcatggagcattaaacatgggaaaaaaaatcaaatgcacaatttgca

SEQ ID NO: 31142 - DNA, 538 bp, Oryza sativa
attcttaccaacagcctactcagtgtgagcgataaatcgcatcacttttagcaaaggctaatgaactaatctggttaaactatagaaaaaccaaccagcaccctagcattttgatgaaagacagaaagacacgggcaaaggatcagacgtaacaactaaaaaattacaaaatacatgtcacttccaggttttttcttcattgcttgaatggtgctccacttgcattgacttccggcggcgcgttgcagatcctagttcttccactgccttttggcttctgctcgctctcgccaatccagccgctgcggcctacaccaaaggcgttcgatgcccgtggtcaggaggaacgaggaggggaacacggctcgtgctcgccttagccaacccagccgtcgccgccgtcaccgacggcgctcgtggccagggcccaggagggaggccgcgacggcggtagcaggcgagagaagtggccgcatcagttgttgaacggaggggattatgggctaagccaatggcgccaaggagaggcaatcccgac

SEQ ID NO: 31143 - DNA, 513 bp, Oryza sativa
actatagggcgaattcgagctcggtacccatgcgaccaagtaagtagatctgacagcattggagccttaagcaaacatttaattgcttcttgtgaggagactgttacagaacaagattgttgaatatcattcattagcccatcaacggtatcatggttacctggaacaataccagaccaccgtttctccaacaaagacatagaaaacatgatattatttatttctatgtttttcctttgtctctcaatagaatcaagaagtccttctccagatttatcttgcacaatatcaaagctaatagttggaaattgccttttgagaagcttagagaaactatcctccgaaaactcaccatcttcaagccaattacccccagcttggcagagtaaaacctcaatctgttgctgcagtacagaaacttccactgaagaatgtgttaactttccgactttcaagaaactgctcaacttagggggtaaatgttgctcatgtttccccaagaactcgaggaaa

SEQ ID NO: 31144 - DNA, 620 bp, Oryza sativa
cagataggaactgtagacttttttccattggtatatgattcagacttccaaatgggcgcaggctatattctgacttgcacaccaatttcggaattttcgttgcggcccatttaggggaacagcgtactattgaactttctggcaaaagtaggcccagcccgatttgttactgtcatatgcttctccttccgccggcgtcgatggctgcttcgccgcgcgctgatgggcggcctcctcatccccgccgggatacgcctccgtttcctcctcctcgaatctctccgccgtgcaagtttgcgactctaaggcagtttatgattcctcgccgcctcctcgaatctctccgccgtgcaagtttgcgactctaaggcagtttatgattctcgccgccgcccgcggcaggggaaggattccgatcaccggcggagaaccaagcatggcgccgccgcggccgcgtcatggtggaggaagatgggaagatgcgtgaagggttgggtgcaaaattagccgtggctgccgtgctgtcgtcaaattcatttggtaaattcttctctaaatttgtgagaatttgatgtctttaagtgattttttccgatatttgctgcatgtataggacaatt

SEQ ID NO: 31145 - DNA, 507 bp, Oryza sativa
cgggactaatgatcatccatttccgttgcactttttaaccgggacaacaaatgatctttagtctcggttcctatttgaacccggggctattgtggttttcggacccccgagcagagcaaagatcatttctccaatagtgtacatttaatccaaaatatataaaatatatagtaactcttaatcataaagttaaatatatattcaaattcatatataaagacagtactactccgtctcataaaaaacctaatcctagctacgaatctggatacatgcgtgtccagattcattcgtagagttggtctttttttttttttgacggagagggtacgttttttgggtggttggtacccgtccttatctgtgccaatgcattttagataaataccattggctatgaacatggctctattatgtaactgttatagttgtagttgaacacgttattgccactgatctaaatctaggttcgtacatcctttccaacgtgaagacttcaaagtctgc

SEQ ID NO: 31146 - DNA, 641 bp, Oryza sativa
gtactgtgcggggggccgctgcaaaaggcggcgaggaccctgtttttttgcaggcggccccattgccgcccttacggagggcggtttggtactgtgctggttgccgccagctttaagagcagcccccaggtgtttagttcggtgcatttagaaaatttagtaaatcatcacttctaaaattgtgaaacaagaaaaaacattattagaattgaattgtacgttgtttcggcggtttggagcccaacaaggggtgtttttacaccgaaatatttaattgttactgtaaaaactacataaatcattgtttcaaagtcaaaggaggaatagtttcaaactacataaatctaactattttgcaattaaaattttaagaaataggtattttacataaacctgatttttagcacttaaaattaggtaaagtatcgttttgaaacgaacaaagtacgtgcattttgacaaaattttaataatttaatttttcatataaattggagggctatgagggggtttgttacctataaattgtaagttacgcataattctcgtgtatgttgaaccatgcacacaattgaaggtggaagttataaaaatataagcaggtacatataaattataaggatacaatgatgagctactgt

SEQ ID NO: 31147 - DNA, 677 bp, Oryza sativa
tgcaagtagctcatcaaaaaaggaaacatgggacataacaggcaatcgaagatgcagacttcttcaattgagtagatttgtgttatctttttcatcagaaagtaactgcatttctatcttattatgctttgtgaaatatgtttaaatttgtcatacattcatgtgttattctcatactaaaccaattttgtcatgcatttattttttttaattctcttaacccaataatttcatagacctttgaattagctatcaactatggtatagtacgtggaccattgatggatattacatttcaggtagctgatgtaacgcatgctctacaacagcctgctggaaaaaaggtatatttaccaattgcaatgcacttctgctggtttaggcaagattcctagtttaatggccgactttggtgctactcaaatcctatattgaccaacaaaggaatcaacattatggggatgtccatattttaacaactatctatagcttatatctgatgtaaatttgcatgcaactcgtgttcatagttttttgaacaccatgttaccgtcccttcctcaaatatctatgtatttgtgcaagtagacggttgtcaaattgtgcatatttggttctcttttgtaagcttgatggtggaggtgttgcaagtgggggcttacgagaactaataccat

SEQ ID NO: 31148 - DNA, 1414 bp, Oryza sativa
ctgtacaggtgaattgtttggataagctacgagaaatacatgagaattggatgagaggtcgattgaaataacattttccaagatattagaccccatgcatgctaactttttttgaaaaaaaacatgtattaatctaatccactccaaaagaatttcacaggattttgaagtcatcaatcatttgttgaaagggcaaaaaaatagaaaaaaaatcctatagaattgttccttataacaaatcctttgatgaaaagggagccaagcgtataaagaacgtagagagtgttcttccttcgatattaattacaaggaagagtatacatggcatccctccaatgttcttatgatattaattatttcataggagttttaaatgattttccttgtgtcattcctttatgaaagggccatgcagaaataattttctatagatttcgattcttcaaagtttctttcactttttctttggactggttccaaaggagtgcttactactataaaatacatgaaacacaaaatttccatccggttgaccgacgtaaacggaagttttgtgacgccagaaacaaatggcctctcactatcattgtttgattctgatgactcccttatcattgtctgactctcactgaaaagaacatgataagtgatgatgcgctctcctgtggcccgatcttctggtgaggggataactatcgctttgatcaagtacgacgtttgcgatgtggctaccaaccagaacaagtccaaaacgccgtgcaatcgctacaccacaaacgatgtcgtgccaactgtgacacgcggttgatgatccctgtaaagcaaacaagagaacattgcaagaacaagataaaatgcaatctaaatattgcgaataggtaattaagcacaaagaaatagttgtgattgaagtggtagatctaatcgacctggcaaatcaacgcacaaactattgagggatctgaatttatagtcaccgactaatcgagcgaggactatagacaagttgaatagcacttggcaaacttatacctaaacaaatcccaattgttctagtgggtgtacatagacatttatagagaaaaatagatttagggttaagtgctaattcgtggaggtggagggagacacttctgagatgagtctagtctattacaaggcccaagttcgatttcagcaatatcatgtcttgttttgatgatttccattgactcaagatgaatttggatatgagaccagatgcgtttgaaaggtaatgagataaactatccatcaagtccaagatcacccgaatcagagttggcatgaaaacgctaaatctgtttaaagtcaatgctgtctccggagaccgaactggattccaaaactcattgtactttaatatcttgtagatcctccattcatctgatgcatt

SEQ ID NO: 31149 - DNA, 542 bp, Oryza sativa
tactacaacactttacctcagagtattctaagggtatcgaatcacagaaaacatgcgtgaataatctaagaatagacttcaaccaagaacaacaacgaattgtaggcttatgctagagaggattcccatggattaattaactaaacttaagttaaggtaaaactctatcgattgctttgagcactgactctcccctggtctgccaagctgagttcagtctatagctctatgatgtacccgaacgtgaagggacacaaaagacggacatggctatcaccatgtgttgcctacctcattttctgtggagcacacaacaaacaaagctaactgctaatctagacaccactacgcctaacttattgaatactactctagcttcgcgtaggaactttttctttatccaaattctaggtccagagtacttaatactccctctgtcccaaattataagccctttttttacacggtcttaaataatatactttgaccagtattttattctattttatgatctcaacaaatatgaaattagcatcacatga

SEQ ID NO: 31150 - DNA, 603 bp, Oryza sativa
catctttgtcgatttgcgccgtaaatcgtccaccgcccctacaagagtgcgacatctctttgtaggtttgtcctgaaaaccttccgttttgcccacgagacgggtagttatctagaatcggctccgttagccagtttagttatcaaaacctatcttggtttagcttttgctagattgagatggttggtgactctagtatcaacgcaaggcgtttacgtgctgcgatcgtgcttgtcaacttgtcacaaaaagttgccaagatgatttttggcgactccactagggaaatctgctcaacgtcatctcaacttcgatatcgccatgacaaagcctccatcaaccaaggcggaggtggaaccggtcaatgtgataccagtcgcattggaggagcttgatgagggagcacgcaaagctttagatgaacatctcaaggcatatactcaagatctactaatgaaggcgtgcgctaggacccgccaaggtgtgattttcaagccgggatcattgcctaaacatactttcgacatggtaagtgctgaagaggtatcacaatctatccaacaacaaattgcgcataccatagattcatctatggttacttta

SEQ ID NO: 31151 - DNA, 1170 bp, Oryza sativa
actgttaatttgcaattcattagaaaatgcttccacggattgtgtacatttgttccaagcaagtgtcaggacccaaaggacttgccagtgtggattggtctttttgttgtgctgattatggaatccaaatctcgtgaaatccataggcgtcattgccatgcaatccttgaggtgatcacaccggagttgggtagagactatgtcaatagttttatcaagaactggagttcaattagtgctcaagtgatggggtccttgacgaatttaacacaccatccacatgactgtggcattgatgtattggttacattggatgatctgattcaggtattttattaccttcatgttgatgcttggaatggaggattgtttgagcatgacagtctcgcaccccctgcgagagagatgaaatggtctccagttgaccccggcgtgggtgatgcaaacataagattacctcaggagccagcattacatggacgtggacacaagcgtatttctgtgccatcggcaaatatgtgttcaaagagagcatgtagtctcttaggagatgggcttgtagaacccccttcagcacaagatttttttgttcgatatgtgcaagtgggagatcaagtaagatctccgttttctctcatcattcgacaggcatgcatgcatcatggatggtgtattgaaatgataggtgtttttctatcgctcattttgcagatgcagaaacaagaatgtgatcacttggtttctcatctagtctcatttggcatcacgtgtaaagaacgccatacgaacacctgcaccaacttccctagtaaagtttggccagcttgaagacattcgacgtgagaacaatgaacaagcgaacagggaagaggcagaggattaagggaaaagagaaaaaaagggagagggggggggggggggtcaggaaggagcagtagcagggttgttgatccttatgctcagaagcttctcaccgaattggcagcatcaggcactaattctcaagggttactttggtggatgggctcatcaaacataaggtcaaagtatgcgttgttgaaaattctgcattgcagactgagtctaatcacagcttatcattctctatgcttttgtgggatgttctggggttcaggctaccttgaagttgcgaatctgctatgcgacatt

SEQ ID NO: 31152 - DNA, 554 bp, Oryza sativa
  unsure (1)..(554): unsure at all n locations
gaacggatgccgttccccttcctgcgggagactgagctgtctaaggttgaaaaacgaacatttccactgtctctataaggatgaagctatgaacacaaatacctatcttaaacaatgaaacttaaaaaataacctgtcttggattgaacaatgatgctatgaacacaacatagaaaccaacctatcttgaactgaacgatgtagctatgagcacaaaatagaagaaaaaaaaagagagagaaattgctttcgttgagagtcgaactcaagacctcccgcttactaaacgnnnnnnnnnnnnnnnnnnnnnnnnnnagctctttgttgcttgtctttcgtagctcaaaatctctgagtttctttcgagtttatttacttctcttgattgtatagacgtcaattgcttaatgtgtgctacgcacaagcatcttggttgctcatttgcttcagagctcaattgcttcatgcttgtcaacaacaggttgaagcttgaggcatgaagcagttgagttctatcccatttccataagagaatgatagagaagatgcttatg

SEQ ID NO: 31153 - DNA, 528 bp, Oryza sativa
tcttagacttgtttagcgatgttggtttaagaattctgaaaaatgacaaagacaaaattttatttggtaagaagtctaagttatgcctttttggtaatatagagtattaaatttcggaatcgataagtaactagtatctatttactattttttcctgatataataattttgaaattataaattaataactatttataagctatctaacatggaccttagtttaatgtgtcctgtgataactttggtcttgcctatatgcatgactagatttattcactactctcctatccgaaaagctaatacatcttaaaatttagaattaatggagagtctttgttttgtgtgggcgattattaattagcttgtgttaatttccttcagcttaatttggtggtgtttttttttaaaaaaaacttgtatatgtgcgctagtttgcataaatttgtgtaataattggttgtatctcgttgagtaaaggtggggattctattccattatctaaataatttatttgatattaacatacct

SEQ ID NO: 31154 - DNA, 662 bp, Oryza sativa
agtagtccatcatataattaggttttgcaactataaaacatgtgcaagcgctagcttggaaaagacaggaaggctgcgctgttgacatgcggaccccacatgtcaacctaagggaccacagtagaccgagtacacagagacggcccacgggtcgacggaagcggaccccgtgtgccaaccgaggcgagtggccgacaaacggactccactagacaccacgcgggctgcacacgtggaaaccacgcggctaccgagcgggcacacaaacacggtcaccacacgcacccacgaacgattaccgacaccggtacacgggcaccggggtcgacaaccgcacaacgggcacgggcgacaccgaaaggacgaggacggggcagcgaaaggagagagatccttaccaccacgcgatgaggcgtgggaacgacaacaacgaacgggcgcggtggagacagctcggggacgacggaggcgaacggcgagggaacgacttcggcggcgatccttggacgaaggcgagacgcggctggcacaaggcttgatgacgcggagccgaggacgaagacgacgacggggctgctgcacacttgacgaaacgcgggcggcgaacgcgatcggcttgacggagggacgaaccctcgacgaggaggaaggaggaagacgac

SEQ ID NO: 31155 - DNA, 600 bp, Oryza sativa
  unsure (1)..(600): unsure at all n locations
actaacagatgtacagtagttcatcaacccgcaccaaagcatctcctagataagctagccgtgtattcagtataacaagaacataatataaagtaggtactcatatactcggaaagtatttcaataccataaatgtatttagaagagtattctaataaaagtacaaggcttacaaaagagaagagaaagctgctagagtcatacccgaactcttccgaagacctnnttcggactcctgatttctactctattcctattccactagctagatactactaaactaagcttgagagaaatgagagagctattgcttgaggtgtgtgttgaagtgaagagagtgagctccttatatagaggtagttatgacggttgtggaaggggaattgtcctaagtgccatccaactgtcattgggatgcaatcctggacgtccacgccaaaacctggatccaacggcgcaaggattggttcngccgaaccaccangttgggccgaacctggggctggcccaatctagcccaatttcggctggtggcctcctctattgctccactttgcagacttgtgaattttgtcccaattcatcctgtcaattctgagt

SEQ ID NO: 31156 - DNA, 602 bp, Oryza sativa
actatcagatgtacagtagtctatcacctgtagtggaacagatttctaatttccctttatcgcaagctaaaaatttagattgtgttgatattgataattcttgtaatgagaaagagttgtgcaatgcttcacttatatacatgccacaacttgtgaaagaacatgttacttctatttctaaatatttggtttccactcaaaataaatgtgtctttgctattgctgaagaccaagaagagctgaaattattgttttctttatgtactttaggttatatcgtatttgatgtcctttcttggaacaattatcatgtcattggtaaatataataatagaggagattatatggtgcatcgtgtgtatatatgttcagatatgagtactcttttaaatatgtgaaaatgtgagaaattaaatggatcatacaacattgatgctattgggataaattcacctaaccttgttttgaagatcgacaacaatattcaagaaggggagtgttgtgcaccattagattcaatggtcaagtctcgctatcattttaggacttgttcattaagtgaggtgagttggttttccctttatataaattggatttatgag

SEQ ID NO: 31157 - DNA, 585 bp, Oryza sativa
aatgactaacacatggacagtagtctatcagaccgtatcgatgtataaaaatacctatattttgggacagagggagtagcaatttaggaaatgcgcagacaaaaccaataagtagaagatgggaacttgtatatccaaacacaacctgggatgtcaaataatcaaagcacagtttgtattgtaaaaaataaaaatcaaatcttagtaccatgtaagtatcagcgtaatggatataattttcttcatatcatgtcaggttaaaaaaagttgtcaagtcttaatgtgcaaaaatggccgagtaaattggacgaggaaccgaatattcatgaacgaaaatgggtttactttttcagcagtgactaccaggtgttcagttaaagagtaaaatacaccagcgatccttaaacttgttatgagatttcacttagttccacgaacttgcaaagcatacatcacgacccctaaatttggtttattgtatcattccgatctaaatccccgtttgaccgtggtcttatctacgtgacacgccacgtagacgatgatatggatttttttttctcccttctgtttttttcccgtgct

SEQ ID NO: 31158 - DNA, 605 bp, Oryza sativa
tgggctatccccacaaccaaggttcgtttacatcgtattttttaaaaataaaagactgaaaagcctcactgcaattcatagcggatggcccaacagaagtatatgaaaatagccaatctgagctatactattttactactaaaacccttacgttttcataattatgctcaagttcttacacttgtattccatatagcaccttaacatttttcaaatttattaactatagttagatactttatttgataccccatagattgataggtaattacgtttgaatctctcaaaggtaattgtgtaaatcatcatgtggttactctcgtaggatcacaactactattcatcctccttggaacattgaaaaattggattacgccaaatagggaatcaacccatacaccaaaaaatatggattatatgtcgaggacgacaagggttacgccaagcagggaatcaacccatacactaccagttgctgtctacgctatcaagatgatagtttacgctgcaaaaggtcaaattccaaggcttatacgcctacgcggccatctcaaggtgccctatatggtacacgcccacgtgtggatctcgggtgtaaacacatc

SEQ ID NO: 31159 - DNA, 661 bp, Oryza sativa
tgtcttttggactatttgctgtaaactttgataggtttgacgaactgtacttccatgtgaccgatgaccatgcctggcttggtttaataaaaaaaacaaatttaagcctgaaactcgagtggtgtaaaaacattgtcattacgattcttgccgtttcaccaaacgttactaccatcggcatatattattacaaatggttatctgacggtcttaggtgcttaaacatgggagtaaacataaaaaaagtagccaaacttgtttattttatttaccgaaaacttgaaatcaatctctggaagaaaatccaaataataatataatgcatttttggatacattaatataactagaaaggagctcgtccatcatgcgtacgtattgataaaagcgaggtattaaccagagaatattgttcatgatttcttcataaatggcctttgtcagcattaattaattgtttaataatattttatcccattagctttatgttatatcatatatatatatatatataggtaatatctataagcaattatttataatcttctttgtcatttgaaaagaaagtagatttattttctttagaaatagatttattttctttagaaaaaatgtcaccgaaagtaatttaagtgtaaaataaaaaaaaggggttttaaatg

SEQ ID NO: 31160 - DNA, 531 bp, Oryza sativa
ccccttaggagcacacataaaccaaccatgtaaaaagtaaactcaaatggatgaaatatgtgacaggtagaattttctaaagttctacagaaaagcttctcgcctcgaaaacacaatcttgcaagtggaatttggagattctaatttcgcttaatctggtaaggcgggtgagaatcgaatgtgactttttctatacatatccatatatatatatatatatatataatttgcttaattccgagtccatatgagaaaattatgtctgtttgaaggaaggacactcgaatgtaaaaaacaaactcaaggaaccctaattttttaataagagaaaaaatgtactatttttttactacaggaaaaacaaaaaacaacagaaacaaaaacaaaaacacacaacaagtgaatttaaggagagtggatggagcccccgaggggcgcgggagcgggggataggggggtgggcatgttagtatctccgtggtggcagggggcagcatcagagagaccacgccagcgactctggcgctaaaa

SEQ ID NO: 31161 - DNA, 581 bp, Oryza sativa
tcgtctcactttgctgcactttgtttggcggcgattccgacgccgatctcccagatccgctcctgtcgggggaaacgcccgcggatcaacgggctacccaccatggtggaaaaaccgaacctgggaggctgggactgatcagtgagctttcaccggttcactgcttggaccgccggttcatcggttggaccacgatttatggctaattattttttatcataattaacgcttaaactgctaaacagaatagttattcagtcctcgccaacaaatttttcttacacagttggttaggtggaaagtacaaggcatgcagctcatcaagtctgaggtttaactccccatttgctcaaggttttttttgcatatttgttttaatagttttaagacaattcaccagaaaaccagctggttcgatggttttttttcatatttgttttaatagttttaagacaattcaccagaaaaacagttgattcgatggtttttttcaatatttgtttaatactattaagacaattcaacataaaaccagcttggttgaagggttttttttcatatttgttttaatagtattaagg

SEQ ID NO: 31162 - DNA, 548 bp, Oryza sativa
ttgcgaaaattaatccgtcaccatccatacgttgtcgttctcgaagggagtttgctcagcatgtggcgtcactgcttagccgtgatgaacatcaagtgcattccggaccaggcttcggccggctatgtgttattagtagatgctgtcacgggaacaacaaaccagtttaagctggtacaaaagccacctacttttctctaactttccttaattatttcaaactaaatgggcttgaagaaaacgatgatgtggtagctttgtctctcaaatttttcagcgctcatccaattgaagcggtagttaaattaatatcgtaatttccgattacattctttctaacttggctagctttatgtaattaattttcatagtggtggttgaacacacgttattgcaaactgatttagattcgttagtacatcttttccaacgaattgacttcaaagtctgcacatatgcatgcatcctgatctttacatatacatgtgttatatagacttgtttagtccaaaagtgtagtccatgctaacgttacattgggtccaaga

SEQ ID NO: 31163 - DNA, 537 bp, Oryza sativa
tgattatgaaattaattgacaaaaatcaaaaaatgatatatcacaagtagaaaaaaaagttagagatgttaatggtcaagtaaaaaatgctaaagcttttgttttaaaatgaaatttagttgttgatgttaaattaaatggtaaaactattaaaagttttaataatttaaaaacagctgataatcgtaatcaacacgattattttggtggtaattatttatatacttatttacttaatgatgattttaatgtcacatataaacccagtcaatattatttaaccaatgctaaatttaataataataaaacggatgaagctttattaacttatattaataatactgctgaagaaattaaaaaaactaacgaaaaatataaagatattactacaacaggcagatatcctactttaaatcaaaattatgcattaagcagagaattattcaaagagattgttctaaagagctttgattttaatcttaatggttgacaaattgaagaagttgtaagttatttaaataatgatactgataaatt

SEQ ID NO: 31164 - DNA, 551 bp, Oryza sativa
cagtgacacaatgtcacgagaatgtcatgggggaatgtcactgaatctgcgttcgatagaggcaagttcatgtccacacttcaaagatctaattgttttagataatagaaatgtcttacatcctgaactataccataaaacactttcttatccaaataaaaaggataactttaaaagaaaaccagctgataggctaaaagaccacattgattacatcaccatagtgaaatactcttaaactttatagatctaataacagtgggaatactgtaatagaacatcgtcatcattggggttaagttattaatccccggtgattaaggggtgtacacttttgatcagcaaacgagctctgcaggtcctagcctttcctaatttcttttcttttgagctgtgaagctcagcctttgtggttacttggtcaatttctttatgcagtgcccagttgcccacgtatcaactgtttagcatctatgcttagagcaagtctaacagtatagcccactactagctccaattcatatatagccgatatatagataattcataca

SEQ ID NO: 31165 - DNA, 630 bp, Oryza sativa
tgcaattaaatctttcaacaagatatcacatgattatattatgtcaaaaaaaaacggtatgtttcaaaccgttaaaacaaaatatttcatatgtgatagtgatatgtttcaatatgtgtcttaagtgtgtttcacaaaattcctgaaactacctactactactctctctccacctcatgcatgcatacatgcatgtattttagcaagcttcaaaatgatttttctcttaaattacctattcaatctaagatccgatcacaccattgtattcgttttaattaaatctttacaacaagatatcgcttgattatattttgataaaagaaaaacatgtgtttcaatcagttaatacttgttgtttcatgtgtgacagcaacatgtttcaacgtgtatcttcaccatgtttcataaaatatttaaatgttccagttgctgatttttttcaccatatatataacatgatgttttacttgttggtcaactgcaacatttgaccatccatttttttttaatttaaaaatgtttcacctaatgtactcatgatgtttcactatgtatgaatcaaatgttgcagtgagttaaaacatcctttcgctattcgctgaaacattattttcatataaggcgaaa

SEQ ID NO: 31166 - DNA, 634 bp, Oryza sativa
aggatcacctaggttagatctagtcgggtggttctatttgggtttgatgaacgacattgtagatgaaagggagagggtttagataccgaccggttgaggagatcgtggaggaagaggcgccggacatcgtcgttgtcgtcgcggcttgacgtggatgcggcggtggcgtttcccgtcactggctgcgccccctctcgatcggattagggttttgtggggtggagttggcggcggcggtgaatctcgtaccatgtgccgtgccggcctccaccccccttttatatggcgcagtgtgacgggggcccaccagccattgggctgggcgcccccgatcagggcgcggtcaaggcccccttgagccgttgggctcaaggggagagagatctatctaacagaacgatcaaagcttgttcagctttatcattgacctgttgtgcaacttcatcatgcatgatcatggtcatcccctcgaagttctgtgtaatctataacatatatatggtcacagatcaaccagtatgaagaaatatgactatcaaggggcaaggcgagcatacatatgttttcttgcttctcatccggtctacaatcccccgcgactacgtcgttccgatgcacaggtgagaacaaacgg

SEQ ID NO: 31167 - DNA, 574 bp, Oryza sativa
  unsure (1)..(574): unsure at all n locations
acaaaagcctatcgagttatggagttctatcttcctatgctttccgtttggtttgccaatggatggttgcctttgggccgattcctagcacccgggggctcgttggatggaccgagtaacgcaaggtgctaagtattattcggaataaatcaaaagcatagagatgagataaatttattttctgctcttaataattgcaaaagtacccgagtagtaaactccgatccgtgaaactttgttccattaatgaagaactcatgtcactcatatgcatgtttgggaagtgcttaggccgactcccagtgcttggtggctatgactagttgggcagagcgtttaaacgtaatgagtcatctgctcggggaaatcaaaattgacaagaggagaaatacatatttataaatattttaaaatacttgattttttctcgagtattatatttatatcagatactactcatcctatatgtttgntctgcaggatccagatccagatatgcataaaagggattcatggctttaagcttatctcttacgctctaggaatggatcaagtagaacatcaccaccgggcg

SEQ ID NO: 31168 - DNA, 576 bp, Oryza sativa
aggccattctgtgctggtaatgatcatcttacggacttcatcttcggttcgcattggtgtttttcttttctgctgaggacgctcccttgcatagtgcccttgctcatcacacataaagcaaatgttacttgcttcttttgggtcaacatgtggcacgtcaccatgggtccttcgggatgctggcggcatgctgacttgtggtgtgagtgcttggactgcctccaactgcacttgaggttgtatttgactcaggttcagaattggcgtctgatgctgctgtagtatctctataagcaatcggttctggttaatcaggtgttggaccagtgtcacacaactggtgtctggtgcttcattcactcgggagcttgaggtaccaatgtcctgacttctaaccttattgcctttctcattgtcagccatctgttgcaaaggtttggagagggagagagggaaaacaaaggggagagacagattagaaactaaggataggaccttaacagatctaagtcttttgctgttatgatgtatgttaggcttattaagcaagttgattaagcaaacaacctagcatgg

SEQ ID NO: 31169 - DNA, 672 bp, Oryza sativa
gtgggcattttgggttttttgatttttttggtgaaatttttgtttttgcatggggtcgggttaaggacccgcggccggccaaatgcaaaaatcagttttagtagcatttagaaaccgaatctgtagttatattttatattctgagaaaccgaatctgtagttatagaacaaaaagctccctcatttttttaagctatttttttctagattctattgattctcttgattttaatcagctgcttttaagaatttaaagccagacataccatgtttcccatgtcgtatatctcacgtacgtataagtttattttgtcacgtttggattcctttgatcctatggcaccttaattaattagcatcaactgttgatgcttagcattggaagtaccttgacaatatattacacccattgcagtggagggtgctaatttaatttcttgtagctacaggaatgtctcctcaaactgcttatttcatatgacttcaatatatgctccttgttagacaataagaacatagcaaatgttgtgcaattttgttacatattatgatatggaatggattcacaagaggcattattttttcttcataaagacggaattgtttaaagtcagataaataaaacggttctggcacatattttcgtaggtagcacaaagttccaacacttgt

SEQ ID NO: 31170 - DNA, 608 bp, Oryza sativa
taatgaatggggtcgacagagggatacgacattattgttgtgatgacttcatcctccacaggccagatctattactaacgtacgcaccgcttaggtggccctgtcaatgtgattcaccggactcaacaaaatatgtcactaatttattggttaaatcagatgcaccctcttgtctaacctaagtaagctatgctaaaccaaatgcaccctatatatatacacataaatattatatatttgatttttaaataattaattaagttgatcaccatgaatcatcacgcaatatatacacatctaaaatcacacataagcgaagtgggcgtaactcaactagttagatttttttgtggtggaaccaatccatccgggttcaagttctagacttgatacgggtactcgcatttatggcaaattattctttcagtagtagacgatgtacccattgacatcgagacacccatggtgactttattaatctcaagatatattggctcagtctcgcgaagatgcttataggggtagaaatcacatgtaagagattagattcgcagatacgagtcttgcgaagatgtttatacgggtagatatcacaggtaagagattag

SEQ ID NO: 31171 - DNA, 612 bp, Oryza sativa
tgttaagaaataccaacaacgggcagcgacatgcaaccaccggcgatgggtgctggcgatgcacgagcaatggcgggaggtgcggggcatggtggcgcacgcgggatgctgcggctcatgtagaaacaaaaggggagagggaaagaggaagtcctgtccagggaaacagcggtgaccagcgcagagcgcgggacgatggcaacgttatgccaaggagcagacgggctacggcgagccgtagaggaggagatgagaagggtcaagaagaagatcacttgcaattgaagaagagtgggttccggcgacggggagcgatgaccgaacggtggccgaggggcagacaggctcgacggtggtggcgacgcagctaggtgggtgaccctagcgctgtctagtggacaactggaggagagcgatgagtagtggagctctctcgatccggagtttgaatctcttcattctcgacggacggctgctcaggaaccttttcatcaatcgagctagcagaagtggatggttgagcgagtggcttcatcgttagaggttcctctatcttggacactgatgccttcgactggttttcattggtttgcgtcatgaaggaagtatttt

SEQ ID NO: 31172 - DNA, 1490 bp, Oryza sativa
ttattttacacatagaatagggagagtatggtagaagaaatcggacgagttctggagttgtcggtaatctcctcttactttttgtacattgttaattactctggtttaatagaattatcttcctgagtaattaagatttacttcatgtgaataattcttggttattttctaattagcatgcgggatcattgttcactaaagtccattaatttattgtgatcgctttagaatttagctagcactaaagtagttattaattgaatagacgcagtatctgggtaattaatttccggtgattccttcgtatcccacagtaggtttgagatcggtgtagaggtggtgatagccctcaagtacactaaagtcctccatgtacgggtatgtagtagagtgacatttgggagtagcgagctggccagtgcctgaagtatcgcattaggattaaactgagctttctgtagacaccgtttctcactaggaaatcatctctaccctttgcatacattttctttgtgtccttggatgaacctgaagaggaactgaacacacacgttccctatggaaatagataccttggaatactgccagttgaagtgctgcatcggtatcttccgtgcacttgcagattttatctgtgacattaagaaataccaacactggcttaatgtgttcttttaaaagtaaatctcacttaaccctaggtactgtgatctaagttgcacaaaaccaaactattgatcattttactttgatctatccttttgagttctacaattacatcttaaattgataaatttatgagtttttttaatccatcatagaaattttacatggatgtaactaaatcattttaaaattttgaggagtatgtaaaattggttaatgatgtggtttcgtgaaaattggttaatgatgtggatttgtgtcgtgcaccaaaatccctatgattttgtgtaactgttgacagtcgttacagacaaattttgaccgtcaatataactaaaataatggagaattagctatgcttacaatgcatatttgttttcaaataatatagttccacttatacttggagaacaatatgttgcaggaatttatcaaataaaataaagagaaagtggagaaaacctcactcctaagcaagcttatggatgagagggctcagaagccaggtgtaaccgtcctggaaaccgccttaactacaaaaccgtcaataggacccacctgtcaaagactgtaccgaagctggaggcctgttgggctagcccaggtttcggccgaactggcggtgcccaatcagcctggccctccacgtgtacgatccggatgcactcttaatgacggttgtgagggtaaaatgcacaattcgcattggtacaaccgtcataccggccctataaaaggaggagctcattcactctctcaacacactcaagttagctcaaattcctcttcatactttagtattagtattttagtgctaagtggag

SEQ ID NO: 31173 - DNA, 680 bp, Oryza sativa
agtactgtggttgtactcattcttgctctatctttctcccctcttcagtaagagaagctttggagaagatgtcttaggtggagtcctggcttataccccagttgagcgcctgtgaagatggagccgtaggcccgctagtccgctgctgtttatttttgattgtcaggcctgaagtgcctttgtaataatgtaaatattatcgatataataaagatgtgtcctttatatcatgtttgtgtggtgtaccccggcttttcctgggacggggattaatacactggcgttcgggaaaaggcaattttcccggtcgcgacaagatggtatcagagccatctcgactgtaggataagccaagtggataaaacctaaggacatattttataaataaaactatttgcgaaagttccttttttctccttcccttaatgctatttgcaaaaggtttactcccttcttccttcttcggatttcaactagtactagttggtcaggtcagtgaagaagaagacatcgtcagttgtttgtcgaaactccagaaggctgttggatccgtcagcgcagcaaaggaagcagtgaagccagatgtgaagcaagagtgaagatcttggaaaacccgtcgcaaaacctaagccaccctctagggtagagtcactagttgtgagtttcctttcttgtgtgtg

SEQ ID NO: 31174 - DNA, 990 bp, Oryza sativa
tttcaattcattttatctccaacaaatcaatatataatcttaaatctcctatggttttcctatgatacatccaaacacatgttttaaacgattcctgtagtattacttcctgtatgattcaccatcgtgtgacatctcaatccttgtgttttttatattcctgtattctcctgtgacttttgttgagaatgccttggaaggctgaaacgataggtggtactacgtgttgtttaaactgtgctgataggtagaccacaaattagaacttaagaattgatgtttgccagcagcctagcaccctagtcggaacttggaagggaccagaataatgaaatgatttgttggtcattaatagacagtttcttttgattgacagcggaaattactcgatattgttcttcaaattattagtggtatgaaccttttgagtgattgacaggaaacaaatccaccactatctgttaaagatgagagccaaaagtctgcagttggcctgacgatattgttctgttcatagtcagtcgcgtcttcttgtattggttttgttttaccctgattgcgtgaagtgaaactattattcaggttcgctcaagtcaataagattttcacatttctctttttaaaaagggataagattcagacaatcatttctgcaagtgcatattgttctgctgctccttttgcagattataattgtcgacgctatttgtgatcccgtgcatgcactttggcactcgtccatgcctcattttttccccttccgcagccactgcagatggttggtgatcataggttattcaacactcaagtcctgaacttcccttttccttaattgacaataccagggttggtgccgatattggcttttacctaatttaagtatctccgccatgtgtggcagggatttctcttggttaggattaacctaattaaccatccggcatgatccatgcatggcacagcttgtgggtctcctatttttggggttga

SEQ ID NO: 31175 - DNA, 598 bp, Oryza sativa
atgttgtgcaattttgttacatattatgatatggaatggattcacaaaaggcattattttttcttcataaagacggaatattttaaattcagataaataaaacttttgtggcacatatttaaggaggtatcacaaagtaccaacacttctaaaagaattgtagtcactatatatgcaaaaagaaaattgcagaagaatcaaaatttcagttaattcaatactaaatatgtctcatttgcttaatgtatattgaaaagaaaattaaagcgctttatatcactgcaacaacttgggaaaaaagtcactagtgtcactatcctatgattttgaagcatgccccaagcgccgtccaattatcctagtcagctaatatattctagccacataacgcaaaacgttgttcgagctagctgtctttgtcaatctcaatgggcgttttggttagtgtctaaagcgaaaattgagtcctttctgttttctttttcccaaaacagttcatttcgaaattctcatcaacaagctctagtatatgtacagtacaatttgctaggtagtagttttttatttgtttcgatctcccgtacacttttctataggt

SEQ ID NO: 31176 - DNA, 1016 bp, Oryza sativa
atgtggagctttagtagttagtgggcatcaactttatagtaagatatgatttgacacattaaaagaaaactaaattctattttaccacctaagttgtttcttatcagtttaatattccctccattttagaacataaggtgttttggttttatcctgtattaaactttctgtaagtttaacccagcttataggaaaatatagaaacaaattgttaacgccaaaatttggtaagccccgaggtcatcatcggcctaggaaccgtatcggcttcagagttctagaatcggctaatgggaaatgtcactcgccagcggtcagattcttagtggattcggggcatggcaattacaggaagattatcgagaacagaccaagtttaaagagtatgcggcatggcaatttttgtattaactagatagagtcagttagttccttttatttttaggaaatattgtttagagtctgatcaggacttgtatattttactttatctttaggaaagtttgtgtctttttccagcaaggactaatatctacccatgtgtataaatatgtacatcccgtatccttgtaatatatctctcgatcaatacaattatggcgcatcccaccctttttatttccttctttctcaacgagttcttgtttcaagttaggtttcattggcgtcgatctccgatgaggggtaaggcttgttaaggatgtttgatcggcagggctagggcctcgatactataatcttgtcgatgtaaacatctattcattatatatcttagttaatttaagtcaatgtctgaatttacctgtatcgactagatcttttctaaggatttattggtattaggtaaattggttcatcgatctagattagttaaggtatccaccaccctgaaaatcagtcaaaggccttattgtttagacttaatgctgcatcaattgggtttgacctacaaagtcgtgcttagaatcataaaagctaatctgcctttgattgacaataagggtttcattggtatt

SEQ ID NO: 31177 - DNA, 1063 bp, Oryza sativa
cgtgacaaaaaaatgaggtaccttgttaacgtatgattaatgaagtatgagctacaaaagacttaaaatattaattaatatgattttctaaagcaactttctaaatgtatttttaaaaataagttcaggaagcgtgcgtatggaaaacgaaagggtggaagtgggaaaagaggagaaatgaatgcagcctaagtttacctttctcgccaaaaaaatatctacattatttactgatgttaaagaagatataattgctaatagggatgatttagatattatatagtataaatctaagaaatagcataaatgtttatcaaagcaacatagtataaatctaacaaatagcataaatgtttatcaaagcaacaccattcaagaaattttatggagaactcgtactttagatgtcatttatatgtcttgtcaagcgtagcctacgatgcatggccgtgcttcacatgggctacctttgtagttaaagaaaaatgcttgtatttgatatggtccgagtagtacttcataagtctcagaatgaataaatttttcatttcccccctccatttatcctcggataagttcattttttcagccattattactttggagattataaaaatagatgataaatatattaagaatagataaactactgaataataaaaatagttacattagggatttgataaagggatagtattttagtttttttatttatatatactacatccgtcccaaaatataacaacctatgattgaatgggatatatcctagtccaataaatctggacaacactttgtattcaacgtgcaatcctaaatagtcatattttgtgacggagggagtactagtagataagtaaaataataaatttattttgtgaaagatggagtatagttcttacacccaaaaatgaatttcgtttgtttgacaaacggaccaacgatcagaccacgctgtgactgtgagccggacaacactttgtattcaacgtgcaattgtgactgagggagtactagtagatagataagtaaaataataaatttatggctgaatagctaattt

SEQ ID NO: 31178 - DNA, 522 bp, Oryza sativa
cactgcaacaacttgggaaaaaagtcactagtgtcactatcctatgattttgaagcatgccccaagcgccgtccaattatcctagtcagctaatatattctagccacataacgcaaaacgttgttcgagctagctgtctttgtcaatctcaatgggcgttttggttagtgtctaaagcgaaaattgagtcctttctgttttctttttcccaaaacagttcatttcgaaattctcatcaacaagctctagtatatgtacagtacaatttgctaggtagtagttttttatttgtttcgatctcccgtacacttttctataggtaatggatctactggtttacatgttcccttgccacaacactaaataaaatgtttacaagcgtactcaatattactgtacattctgatcacaatcgtcaaatgagttgacttcagaattcccagaaaaaaatgtgtgacttcagaatttagtagatttgaggaaaaacattcacgcccggtcactctgtcccggggcgacgcg

SEQ ID NO: 31179 - DNA, 592 bp, Oryza sativa
  unsure (1)..(592): unsure at all n locations
gatttatttaattcactcttctcctctcccatttaattcgctattctattttctaactaacaacttaatataaaaaatcttagaaatcatgagaaaaaaaacacctaacgtttattcctaaaatggtgggcatgttattttaaccattaggatctgtttggcatagctctatatctttgatccattgtagatttgaaatttacatgttaaattatagttgtttaaaaaatttaagtttcatctaaaataggaacaaaatgatttattcgaatgctatcaatgtaatcgcggatataaataaatggatttgtgaaactagaaatacacggttttaataaatcttgtatccgaacctatggcaaaaacaaccaagatctatttttaaaaatagacaactcanatggatgaccaattggatctatgtaaagaaaacaaactatcctcccctcccctgctgtttacatttatatgtttctnctttcgcacccactcttcccctctttctncctccatttaattcacccctcctaaatttgaactaatgacataataataaaataatctaatagttacatagctaaaatatagtata

SEQ ID NO: 31180 - DNA, 594 bp, Oryza sativa
tgcattaggggaatgagcaagctagttctcttttgcctagacttgaaatgctgaacttaattaagtttgtatgtataatggttgtcacttgaatttggtagatcatctcattcaatcaggcttgcccccctgacattgatatgcgctgtttggcctttaaccccccccttagtgttggccaatcaagcagctgtaattttctttgtattctcttggttgtaacccctgtactccgttttttttttctactctaatgttaaattctagcagatctcctgccgatgttctccttaaaaaaaaaaaacaggcttgccccatcttcaatgctagctctgttcactgatgtatgtgaaccaatgcattattaggggagtgaggcagctagctctatttgcctagacttgaaatgtcgaacttaattaagtttgtatgtataaatggttgccacttgaatttggtagatcgtttcactcttgccccatcttcaatgtgagcaaggtctccaacgtctagaatcacctgacctggttaatagttttctgctggaaaaatatgatgctcctcacagtcctctggttgttggggaaaagtgaa

SEQ ID NO: 31181 - DNA, 605 bp, Oryza sativa
caccggtggttggaactcgttgttaaagctatgatcttggtggtcgcttaaaatcgagggaaacctaggtggttgcttggaggctaaatacttcttcctagttgtttgtcaagtgaggcaaggagttaattgagacctagctctctggagctgctcaatgagagtagatccctgtaatctgaatttcggaaaaaaaaatcattgtctccccatgtttttggtccatcttgtatgtgtgttgatttaaatgagctaaccgtggcctgcttctattcggtaactatcacaccatgaagtttccctttcctagccttaatgcatttaataaatcaccaaacgaaattgtttaagttaacctagaatgaatccctaattaaaaactctatctaataagtggaaatggcttggtgtgatttttcttgagtttcccttgccaaaatatattaactggttcttgccaataaccgaaaatattttttaatagtattgtataaacaaagaaaaccagatacatgccctaagttttataaacacatttagagaccttttaagattggaggaaatttgaaatatttgaaataaattatgctaaataagtttttaaa

SEQ ID NO: 31182 - DNA, 574 bp, Oryza sativa
tgatctaaaagttatttttggtgtaatggtacaaatgggagatgcagatcactattggtgtgcaactgacaacttacatctctaaatgttttctctaaacaactcccatatcagaatgcctgctaagacatttctaggttttactttacaactgtgcaaatgataagtgttaattccttgggtgctgatcatctcaagtctcaacataatgatatttgttttaccgagatatgacttctggtgataaggtatggcccattgtccagtgattttctgcttaatttatatgttactaagaatgaggtccggtgcaattagaattcatgttgcgttgtgtcacgactatgctaaattatatatttttcatagatggtgcctcttatgagcataaattatactgtcattttctcaagagatccaattaaccatcatttttccttttttttttcaggattttcatataatgaattcagtattaattgttcagtggaacagccaagaagatatgattatggatccttggggtcatattcttgcatgtgttctgcagctacactatgtataacgaaaacac

SEQ ID NO: 31183 - DNA, 653 bp, Oryza sativa
caaacataaaaagtaagctggtatgactttatggaagaagaaaagtagggagatagtttggactgtagattaatcatctaaaggctaaaaacaggtgatgtgatatgaattaattagatgaaaaaaaggagaaagataatttggaccatagattaatcatttaagtactaactaagtgaggatgaactataaaagtatataggatatcataaaacataataaagatgtacattgaaacattatgtgaattatgttggatgataatttaacatgtttgtatttgaaaagctcttaaattataaaaactctaaagatatagcatgtttgcataatgtttaaatgtgatgattgttagtggatgatgatgtgacatcttgttaattagtggatgatgatgtggcatcttgttagtggatgatgatgtggcatctttgcatgtcaagctcaaggagttagtgggggataactttatagtaagataggattttactggggccaaggccctacttgtcatacattaaatttacctttggcgatatgctattgctgttatataaagcctaaaccccataatcacaaagttggagaagaaactcgaacaaaaatgtcgcgaccggaaaaaatgctttttcccgaacgctagtgtataaatc

SEQ ID NO: 31184 - DNA, 586 bp, Oryza sativa
cccaaacttccaactttctatcacatcatatcacatccaaaattttcctatatacataaactttcaactttttttccaaacctccaactttccccaaacttccaacttttttttaagaaataaacacacagccctactctttggccggcccggcaaaaaactgagcagcagccgccatgaactccccaccctcatttctcattactgcaagagaaattatttattttttagaccttttaatttttagattttaaaaatagtccttttcaaaaataaatttttttggccacgccagtcgaatgggccaacgtcgactgttgataggaattccttcaaccctatctcaaaaccaaccttgtccttgtcgtcaaatgtctcctgataaagctattaaaagctaatttgttagtctgctgtactagtagcagtgacaatcattcgaagtactgattttgtatatctatggcgtgccacacaaatactgcggacaaaattttttgtcatcggattcttttaggctcgtgctgattttaacgagagattgggaatttaaagagatgggattgctaacttctttgtttgatat

SEQ ID NO: 31185 - DNA, 502 bp, Oryza sativa
attatcctctttggactcagagaagggaaagtggtagcgacataagagcatctctaacagcctctccattatactttccaagccaaaatttagccattcatgccaaaaaaaaacatgctccaacagcctctccaatccactagccaaatttggcaagccaaaagccactagccaaccatgggcccctcgcacattcctcctcccatctcctctccggctcctctctcgctaacgtcctgccatcaacgacgccacaaaggagagaggcgtcgtcgccagccgcgaccaccaccgtcctccacgaccgccgttgtcccccgcgccgtcggccgccgccatcctccgtgaccgccgctgtcctccgcgccgtccttcgtgaccgtcgccctcctgacgtcgcccaccgtgacctctgccacgaccaccgccgtccgaggtagagggcgtggggaggaggcagcagtacatgaggaagaagagagatgtatgggtggggaaaaat

SEQ ID NO: 31186 - DNA, 577 bp, Oryza sativa
cttcgccgccacgcaccggaactgtcacagcacccgccacaaggaggaagaaaaccagaggaaagaaaggacctcagccggttcggacggaaagaagccctccctgcacagcacacaaacaaaagatgaagcaagcataagatggatcaagaaaaagaagaaacaaaggtgtcgctgacctggccaaaacgcgaaatcacacaagaaggtgtcctcctatcaatcggcagtgaggtcgctgcaagaagcacacacgaagtaagcacaaggaactccgccaccaagcacagtcgatgcgaggatagcacatacctcgccatagccacgaacagcaacagagaggccggagaagaagcggaacaaaagggacagcaagacggaagagcagtacagtcgaagcaaagaggattaggctggagaagaagcggaagaaaagaagaggagaaaaatatggcgcctttcttgcgtgggacgccgtctcgggcagatctgtaccacgttgtctaacaccgattggccaagcagtacatttgtggggcccacccctctgtccacaaccaccctcgccataaaaaat

SEQ ID NO: 31187 - DNA, 592 bp, Oryza sativa
ctgtcacgttcttttagggacttaggcactttttgcttaggccaaagtgcgcgtgatcaagtgcccaataccttaaaatccttttataccgcagttactcaactttttaggagttggtacaatgcatcttaaaaggtgtcaaacagtaaagctttatatagctggcccgctgacttttttatatagtcatggtgctgtttgggtttttaagcaattgattggatacaatatcattgctttttgccacgtaagtgtgcatttttattgaccaatattatggcttaggctgattatatattgtgatcatttttcaggcggttggtaaatcctttatgagtttatttactcggattttataccacatatgccatatatttccaggtgtggtggaaccatgtgtcttctagggacttaagcacatctgttaaagcagtgtgcgcatggcgtatgcccaatactttggaaatttctttattcacaacatacaagcttccttatagctattttgctatgtgaattttcaatgatgtagccaactttaggttacactcatcatattttacaaagcagtcggtatatcacttggatcata

SEQ ID NO: 31188 - DNA, 528 bp, Oryza sativa
acaataaataattaggtttgtcacaattaattaatagtatgttgtttgctgcattgattatttatatttccatatgattatgtgtgtgtttctcagatattgtccattcttgtcccacttcacttttctttctttgttagatggcggcgtcagctcaatttgggatcgaacctagtattgaattcatgatattgcctgctacatgctcatgagagagattgaatgacagtgacaatttcaattaatgtaaaatctaatctgatgaggggccggcttattcgatcgtaccaatcaagctagccaatagaaattgtgattctctattattaagttatttcaattcgtcatctattgtgaaaataacactgatgaatgatcatggaaatatttccatttattgtgttaaaggccaaataacaactaggaatattgaaggggtaagatttataaaaactatttattgtaattaaactaatatatccgatataacgtttggtcgcaaatgtaaattattttgatcttatacta

SEQ ID NO: 31189 - DNA, 504 bp, Oryza sativa
tgatataaagtagtatcggagtattagccgattcatgctagatctatctgatcggttatgctataaacatatatagtcctgttattaatatatatttcggtctaagtggtttatactgtctcggcatggcgaccgatctatcccaatcacttgatttaagtatatatcgatataaggagtatatatcgttaacatctacagccgatcaagtagatttagttctttcttacttattcaagattgccgatcgatacacatattacatcggctcagagataaatgatatgtcatcggcacttagccgatcggctatcatttatagatttaaccgcgatttctttgcttctacttcttgttggttacatgatcaaatcaactggcacgctagcacacccgtaggcgagctttggacctgcactggagttaagcagatcttccaggcctcgtgttttctgtcaacaggaaggaagacgactacattttttaaatagtagagataaaaat

SEQ ID NO: 31190 - DNA, 1216 bp, Oryza sativa
tctcatgtggccagcatgactcacgcacccaacttatagcatatccgaatgtccattcgcaatcatgtcgggtgatcaagccgacggtgttcgcgagaaattatccgttaacaatcttttctcgagtagtccagccatggccgatgctatgaggtaggtcgtcggtcttcgttggtaggttgggcgcgacgactctgcatttgtcgagatcgttctcgataatgcggtgtactcgacgacaacctactcgggtgctcaattgttcctgaagaatattttctagaaggcaagacatatagcagagaatatcgagtatgtactcaacaaactgcatggatcttctagcattatcaggatataacgagcagatataaatatcaggcattatgtagaccataaacaagcatgatttatacagaagaaaatagagcgagcccccagcgttagaccgtagtcaatttaacatcggggacacccgcgcaacaaatattgtataaaaaacatgctctaggtaaacataataaattattgatctgacaacatctgaaaataggtacggtaaattgtgtataaaatattgcgtacctttatagatacatgccggatgtatctacgggattagtagattaatttaaaaaatcaatctactatataccttgatttgcatgcccgacatactatcaatagaagatataagtatgcatgcagtagacctggacgtcaatatcttgctgtcttggaagagcaatgccacctgtcgcatgcatacatgtgtctaggcatgtgtacgtggcatggttaggcaagcacgcttggttgaccaattccggctagcacacggcaagttggcgacgcagtggcgcctattctcggagaatttcgcgcggcatgcatcgaggtatattggttggtgggaatcggcgtcgtgtccggcctgtgcgcagccagccaataactcacaccaattgatgtcgtgcacgaggaggaattgatattggatcggttttggaagctgccgatactgaagattctccacggtggcgatgacttgatgaagcttggtcgatctcgccggatcgaatattcgacgacgatggttccgatcttgttggacgacatactccggtcgggttagatctccccataaccgaagttgtcaagtagcttgttgttgaagaatccatctcttaaacccatctcgtcgaaaccctgaagc

SEQ ID NO: 31191 - DNA, 1079 bp, Oryza sativa
taagacatgaatgaaaaatgataaataagagatagatgtaggggtaatagattaattttaacgatttatggatggttcaaacatttctggaacttcgttaattaaacagagcctaattaatgcatttcctattaggctgtgatgtattagactcgaaaaacccaggcctctaagcaagtaaacacgaaaatacctaaattgtgatcaaatgtctcactatttcgaattaatacctgcagtcagatagcagttaattgcccattctgacctctgaacacaccagcctttacacgaagactttaaccctttccaaattttcttcaaatttattccaaatctaaagtaaggccaaatttggtcgtcacactaactagcagaagttcaaatcaagctaccatatccagcagtatataattaaagaagttcatctctaggaaaataaaatataatgaaacccatccttaagttagttctaaaatcatcttttttgcaatgtcattttttttggtgtttttcgtgcattttcattctttctgccacaaatatcgtatagcgtgatacatataaaccagatatcatcaaataaaaagatttttgcagacaaggctccctagtcccaataggttgcaggcaggtattaactgctcctgcatgaaaaaattactcccctcgggattggttatagggccgcctgcgaaatgcactatcacggacggacgcttaagaccattgcaggcctctgcgaaaatcgccgttgtcatcacaggcctaaaaccacgaatagcaggttgacaacggcggcggtagactatggcaagcacgatgacactagtggtggtggtctagggtagccgatttggtgttttgaaattattttcacaagcggtcggtataggtgaccacatgtctcacatgtggttacgctagctgcatgcaaaaaaatgggattttcgcatacacgtacacctggtgtaggtggaccgtctggtcatctgcgaaaatcgattttgatcttatgcaaaaattgattttgtagtattgattgttactcgtcataaaatttaggcaattatgtttgt

SEQ ID NO: 31192 - DNA, 897 bp, Oryza sativa
aaaatggtttttaattatttcaagtttttgttttctaatttcagattaaaatgctttcaaggtaagagggcctagtgattcctaaataactgcagtcaccaacctctggtgaactgttctgtaaattactttgttgtgtgttcttttctacttcatttaactttattttttctcctttttcacgtgcacgtttaatgaactatataaacaatacagtttttacaaaagttttccgtacggaagttttttcacatgcacgtttaatgaactatataaagaatacagtctttacaaaagctttccatacggaagttttttctcctattttcccaacttctctctcgcttttcattttccgccgtgttttgctccaaagttttcttcaaattttcaacttttccatcacatcaaaactttcctacacacacaaatttccaactttttcgtcatatcgttctaatttaaaccaaactttcaattttagtataaactaaacacagccttcataggcataggcatgctttctgaacaaatgtttaaatgttacgtttctaaaaaaaaagaaactttataaaaagctgcttttaaataatcatattactatccaccattcctaacccccctccacagaacagtgcctcatgtactaaatagaacgtactccctccgtcccaaaaaaaaaaaaaatacaaaccctaagtttccgtgtccaacgtttgaccgtccgtcttatttgaaaaaattatgaaaaaaattaaaaagataagtcacgcataaagtgttaatcatgttttatcatctaacaataatgaaaatactagttatagaaaaatttcatattagacggataattaaacgttggacacggcaacccagagtttatcttttttttttttt

SEQ ID NO: 31193 - DNA, 627 bp, Oryza sativa
cacaaagaagagagtactagagacatattcagaactctgagaagactataggactgaggctcctaagcttatttcctactagaaactatagagaataaagtggaagagagaattgatccttgatgtgtgtgttacaaagtgaagagagctccatttatagcctctcaatagcagttgtatgacggttattggtctgctaaccatgcataaccaccatcaggagttgctgtagagtcaccatgcactacaccatgtccctaaacttagctacatcctttgtcggaaatgccacctctagcatcggtggcgggggcaccaagcctggttcggctgaaccctagccaccacctttgatgggaggatgacatgtgggcccctatgacggttccttgtagttggtctgatccaaagtcggtttgcgctgacttgtggacccattaatcctcttgctcgcacgtgatccaatttttcataaaaaatttttacattatctacataaaaaaattcacattacgacagaaaaaatcacataaatataacatatgaaatattcacattatctcacataacaagttttcacattatatcacaaaaaaatttcacattattcacattatctcacataaa

SEQ ID NO: 31194 - DNA, 514 bp, Oryza sativa
aggtggaggtggaagaaggtagaagggtgggggtttgggggcgtgcgtgtgtgttgattgggccgcttcctcggctgggcccaaaagcccattagggtagctttgctctgccgcggttgagagatgtggagattatcctggccgtccgattagttatggacgtcttccctgtaattctggatgttccttctaaaggaaagacatggcgaattaggtatctgacaaacgcgctccgacgcataatgataagggccaggttagggtttattctaagcactttggttagcgatgtaacagattatcctggccgtccgattagttttatggacgttttccccggaatcctggatgttccttctataggaaagatatggcgaattaggtatctggaaaacgtgctccaacgcacaatgataagggccaggttagggtttattctaagcactttggttagtgaagtaactatgttctccgatcaatagaactagtcgactagcattcccttaaaaaaaag

SEQ ID NO: 31195 - DNA, 537 bp, Oryza sativa
tgtaagtttccatagttattaaataatatatcttcaattttttatgcaaagttgactcaaataaattaatagcacacaccttgctctgctcgctgatattggaggactccaccacgaagtgcttgctcggttcagcactgtggttggccattgtcccctgccacaggtcacctccctgcggataagaagcattcgacgaaaaggaggccttggtaatggtagaactgggtcgtcccatgccataagtcacattggagctcatcagcttgccaattttaccgcctcgcttcttctccatttcaacaccatcgtgaatctttttcttgggcacaacgtcaatgaaccaatcttcaaatacgaagtcgcctccttcatcatccaaatcaggccagaactcatactcatccatatcgggcccatcctgggtatcaaagatcacgttcttgccttcttctaaacatcggccagattcacgatgaaaccacttgcctcgaacccgctgcccgcaccacatctgggcaggctgtttgcattcat

SEQ ID NO: 31196 - DNA, 527 bp, Oryza sativa
catgtaccaaaagattgtcaattcagttttctgctgacgaagaagatggctaaccaacccgccagttccaacggagagaagcatcaaggcaacaccaatcctcgccaagattacagtttcagcctaactccagtgccaggacagaggaatcaaaatgagaaaagaaaatgccgagtccgggaagatatctgttgcttcaattgtcaaggaatgggtcatttcgccgacaagtgcccaaaaccgagaaacatagctgccagcacgtcagtccacgcaactccctgcaatcggaagcttgctcctcagcgaattgtcatccatgcatcccgaagcagtcctatagcccgcgttgcaacagctccaactccagcgagtgcattaccacagccccagccatcagttgacaagacagaggccagtatcggcattgtacctttggatgttccagcacagcagccaagaaatcaagtacaggatgaagaacccaagcgtaagaaagttatttacaacggtagtacctgttaagg

SEQ ID NO: 31197 - DNA, 579 bp, Oryza sativa
aatgtggaccgttgatcaagagaggggtaaggtatggaataaaaatatattgtaaccaatggtagaggagtaattaactagtgaaatattgccattatcgccgaattgaataccttgctccgttgatcggtactgtacgcttgtcgaaacaagatttcggcaatactaaaaggggtggctatcaagctggaaaagtggatgggtttagagacaaggaattttatacaggttcaggccttcttaatcaagaagtaataccctactcctgtccggggattgatccgccgagtgtattattgattatatgatatgggtgaaagtcgtgcccctagaggcacccggacccctccttatataggggaaggagtccgtattacaaaatacagtccatatccctaacggaatatgtagttacagataaaatacaatcgtaaccaactaggatctcagatatttccttgacatacaagtttggaatttaacccgagtccttttaaatatattctatctatacatgacaccccatacccagtcagactatacatgccgtgtaggtatggggtatccataaactccaca

SEQ ID NO: 31198 - DNA, 850 bp, Oryza sativa
catatttttgcgggcaggcctgttaagaggcccacctaccactagccctccaggtcgagctcctccttaaaatgcataagtcctttcctcatcctcgtcctctactatcctctcctccacttcctttcttcttcaccttatctccctcacctcagcctcctctatctctctctcggcagaagctcggcgtcgacgacagtgcgatgtagaggtgagttcagcagtgaggcacatgttaatgttggtgacaggggtgaccatcggcctcgatggatctaccgttactggtgataggagggtcagatatgcctccactagcctcagatgagcagcaggcctccctagcttctccatttccatcatcgatctagcggatgcggcctcaagaggtgcggatccactgccgttgaactcgggaggggctggcctccctcgcctctccttctccatcgtccatccggcggcggcggcctcaagagggccagatccaccaccggcgcccttgggagcttcatatgcatccagtcaagctggggacggtgggagcagaggcaacgagttcggttgcgatggcgacaatgacgatggcaagtaggacgtcgctgagcagcaaagaccagtccatccactccagcgagggaagcagagaagcgtgctttagtctgtggtgacgttgatagtgacaccgacgacagcagtatggttgggttggctagggtttttagattttgatatctttcggaatttttttgccaaattttgttttttgcataattcattttcgcatccggttcagctaggcgcctcgaaaattactaatcttcatacacatcgtacgagtgggtgagcg

SEQ ID NO: 31199 - DNA, 594 bp, Oryza sativa
tcacaatttttttttgcaaatacattattcgctttttcctccaatatgcgacacgacgtggctaaaaatttgtcacaaaacaagcgtgacaaaaaaatgaggtaccttgttaacgtatgattaatgaagtatgagctacaaaagacttaaaatattaattaatatgattttctaaagcaactttctaaatgtatttttaaaaataagttcaggaagcgtgcgtatggaaaacgaaagggtggaagtgggaaaagaggagaaatgaatgcagcctaagtttacctttctcgccaaaaaaatatctacattatttactgatgttaaagaagatataattgctaatagggatgatttagatattatatagtataaatctaagaaatagcataaatgtttatcaaagcaacatagtataaatctaacaaatagcataaatgtttatcaaagcaacaccattcaagaaattttatggagaactcgtactttagatgtcatttatatgtcttgtcaagcgtagcctacgatgcatggccgtgcttcacatgggctacctttgtagttaaagaaaaatgcttgtatttgatatggtccgag

SEQ ID NO: 31200 - DNA, 2193 bp, Oryza sativa
ttgctagcatgtgtctcacactctgcactccctatgaagaagaccatccaccaggggagtgtcccactcgcaaggtgacatgttttctgtgcgaaggagcaaaccgtgggcccaaggattgccaactcagtgtgttgttgaccaagaccgcagaaatccaacgaacaaccctacgattgtctcgtcagctagtcagctccaacaacaacatcgatgatatcatccacagcaccaatgctcctcttgctccacctaactctgcaataaatcatggcaataataccttcagcattaaccattctctgcaccggcagcctcagcaaggaattgtcgtcgatggaaaaagttgtgtctctccccgacctactccaggccaagcaaagggcaatcaacctccggagggcgataccaagcagaagaccgtcatccgcttcaaacagcaatcagaaggaagcttctcctgtgaatgatagcaatatgcagtcctatcacataatcacagaaccaatcaaggatgatgcagtcactagaacaatgccagctatatctctccagaatcaaaatgagcagccatgtttgtggttttcagctcgctacttatcatggtgtaatcgaaagtttgcagcaatcatgtaatacataaatatattcatgtctataaacagtgagcttgctatgcttatggatgattcatgttgaggatacaatgtaccgatgttaagcaccgtccctttttgtttaaggcagtgcctcgtattcatgtaatgagggagaaatgtgtaatacagacaagttccatgggattcttttggaagagatcggaaaagatgtttggttactgggaaaagaagtaggtcgaaaggtgattgataaaggataacgagaaccatgatttgtgtcactcgaggaagactcccgatagcaaacaaccctacaacagttgccctgtcattaaagtaggtgaattcacgagtaagagagatgaccgcaggtagaagtacttctatggggacaaggatggaaacttttgtgacatgaccaagaagtcaagaagtaaaacctgaacagtggaatctaaagctcggttcaaccttgggctttgtatcagatgctactagaataaaagcacttgcaatagtatcgctcaacgcattttcctagcaatcgatccatcgagaaagaacacatcaaggctgaaggtgcacaggaatacgttgaatgctaaatgatgacaacatgaagagaatagcgggaagtaaactgaacataaagaaagtgaatccgagctgcttgttcggaaagccattcccaggtatagaaaccagtgattggtttaagatcagtctacaaaggccagatctaaatcacctctaacaacgaagcttcaaaactggcatgatcacgatcagacaataactagtgcagcagcaaagtcattcgggaagacgtcaaagcatgtcaagcgggataaattggttctcttgggaagcataacttatagttagagtggttgaccctggaatcgaatagcagaagtagctagcacccggagaccaggaaagctaatatgaggcagttaggggcaagttgccaaacatgatatcctagtaatgacaaagctgatgtcgacgcatgtcacgaaggtggtaactggtatgaggttgacgccaaagatatgaatgataagaagttctagaactgaagccccatcctcaaccaccgcagcctagtctgagtcagttaaaggtgcaaccagggacaagtcgggtgaagagaagatttcttctgcaacaggagatcgagccaagcagtccagagcggaagaagtcagacaagaagagaagaccgcccaacctatcttcttgctagccccctcgaatctcggggacgagattcttgtaaggggggtggatttgtcacgtcctgataaattcatcccgaaattaaaaatcattcgctaaaaggaataatagaattaattaaaattcgaaaagaaattggcaaacactaaaatacgtacaagaaaaattcaaatgcggcccggagaatttttgttaaattctccttggtctaaaaggagcccccaaattttacttgaattttcagagcacaaataataattattaagaaataaacaaagttaaaaaggttttataaaaagaaaagctctaaaaagtcttttttccccccccc

SEQ ID NO: 31201 - DNA, 619 bp, Oryza sativa
gaagtatgacaggtgggtcccacatttttttataaatagaatgctgactggactgccacgcgtacgccacgtagaccaaaaccactgcggattgggtcgaggggggtaatttatccggtttgcatagttgggggtgaagaatgtctggttttgtggtttagaggggtaatttggtcgaccgcgattgttgggggggggggtaattcgtactttttcctttcttttaacatatctgtgttatctcattcgtgactaactacaccatcaattccttaccatgtagcaaccattacatatgtttcattatcaacccaaagcacggctccgtggcagtccttgacccccttgattataatcacaagacatacaaacaatttccaacaatctgttattctgatactattgcatgtctaattattaatgcattacaattaaatctcctccttaatacgaaacggtaaaaaatccatactgtgcatacaactactacaagaagggtggagagcggattcaaacaagggagaagctgctagtacatacatattggccggtaatagtctacacagtttatgtattccaattatttaactattaaaaaattaactttttccttctatga

SEQ ID NO: 31202 - DNA, 732 bp, Oryza sativa
ctatagggcgaattcgagctcggtacccttttttttcttttgttgcaatatttgtagtagaaaatcaaggcatgacacactttgatactttcatggtctatagattccactgtccaatttcataacactgatatttttcacaatctttaagtacttatatatatatgtggatgcatatatatgtttctccttctatatatttgcattaactaatgtaatttctaacaaaagaagaaattaatatgatgttgttaatggactttctgatgctggggtatatatgagacaaggagaggctaggtctatacatctcagacattcatggaggctgcgtcatgatctctacatgcatattacatatttttctaccaccaaatacagaacatttactcacattatcactgtttagttaatgcataatttgagacagaatgcatatttgtggatatgttgcattgtcaagcacaagaggattagaaatattaatttggattctgcattatttaattatttaaatttgtatttgcataatccttgtaatagagaatcacagatttcattaggacattgagtgcaaacacaagatgaatctgccccttattcgccacagtaattgtcaatctactaaaatcttttttttaacgactcgcacaagacggtgcgaagttctattgatagagcaggagaaaaattacaaaattacaaccatggaaggtcgtaaccaggaaaagg

SEQ ID NO: 31203 - DNA, 645 bp, Oryza sativa
gagttaggaaagagaagaaaagaagtcagccttagttagttcatcgtatggataggtatgatatgatccctcagaatcttttttgcagatgttatcggtcggttcagttcgtcagttgggttatatatgaactaaaaaggatcagatctttttttacaggatttgttgatttctcggtttggtaagctaacagatacatacggatccaaggaaaggttcacaccgaaaacaccgtcctacaaatacctcagtgagctcgacacagacataacggaaattcgggaacgaaatttcaagaacatctgaaatttcaggaatttccatcctctgataggatattctttcgtccgatatattcaaaaataaataaattaagtcaattttactcaaatttaaacaaaattttatcgaacttcaactttccccctctaaataccccgagatttctgctttttatttccgacgcatcgagctttttttttttttcattctactacaggagcatgattgctcgagcaaaatgaatcgaaagggctgccaattggagtgaatccttgttgggaaggcaagaaatggaggaagaagcagcagtgaggggaaagcaacctggtcgaggaggaaaacgacccacgagcgggacaacgt

SEQ ID NO: 31204 - DNA, 717 bp, Oryza sativa
aataacatgttaccgagagattcttgaaagttacatacaaatttcattatagttacagtgtaattgcatgcaagttacagtgtaattacactacgattgtactgtaattacatctgacaaatttttggaggaaaatttgtcgacaaatatatagcaaattcgttttaacagtgtgtagtgtctatttggtttgaaaccaaattttgacatgcctaagaaaataggccatttcaataattaacttgggctattttggcttcaatccaaacacaactttgcctagccaaaatttggcatcgacaaaaattggtaaggccaatttaggtcacaaaccaaaccaggtgtcaaaatctacgcgaattttcgcactactaatgctgttccctctataaggcgcggttaaagttaaaatggtctacaaaactaatctttagttcataatatcttatatattataaggtttgtagcaacaaaattatagccatatacaagtaaatttaaatatcaatccaatgatataatttttaataaataaaattcattccatattatactatgtatgggtcaaatgttttacacgttgaatcttgaaatacgggcgcgtcttatattataggagggaggaaataattctttggtaggtagagtaatctgatattctagagccgacgggttttcatgcaaatttacgcagcacggcgcactatacattagatg

SEQ ID NO: 31205 - DNA, 628 bp, Oryza sativa
ccaagctgtacctcctcatgaaacgcttggacgaccacgagaaaaggccacaaggcaccgtcaaggccttggactctcacatcacgtgtgaggtctgtggcggcacggatcattctgggaacgactgtccggaaacctgtgaggaggcgatgtacatgggcaacaacaccgggtaccgtccacaaggaggtcaggggtggaaccaaccacgcccatattatcaatgaggtaaaaacaacggtaacttctctaaccagccctctcttgaagatcttgttttgcgcaagatgaaaccaccgatgcactaagcaaaaagcttgctgctaccgataagatcctagagaacataaaattcaaattagatggctttgcctacgcatttcaaaactagatgagctttataagatgaaagaaacccagttagctcagttagcatccttagtccctgcaactgaaactgggaggattcttgggcaacccgactcctccattgaaaatgttaaggcaatcacgacgaggggaggtaagtccactcgtgatccgccgtatcctaaccttgcaggaactaatgggatatcaaaagaagcgtcatctaatgactcggctgacaaggagattcagccagaaa

SEQ ID NO: 31206 - DNA, 1226 bp, Oryza sativa
  unsure (1)..(1226): unsure at all n locations
gatcatattaaagaaaagattagggagatttagaggagaataatttcacatctattaatgagtggaattaatcccctgtaacctcgatctaataggaaataaccgaacaaagagaaataaaagagacatgtaggctaatatttttatttaacctttcacataattttttttctattaatccaaaaatgaatgttatttaatcagcactatgtctagtaaccaatatacacaatttgagagaatctaagattgacttgggaacatttctggattgatgccaaaatatgccataccaattatttggcaacttaaatagtatgcgattggtttggattagagccagagcattgctaatgcccatactttatttggcaatattctagaacttccttcactgatatcaaacacatgaatagcaaaccaaatatatatactactagaaaatttatgctcctgttggcgcgcctactgattaacccgtacatgcgaaatatgtagcgatatagcctcttaatagtattttaatttccgttatttttaatccaaacggatagtatgtcatgatcaagctttaagataaggtgtggcttggttagcagttggagtagcacacagtggtaaagctcgagaagctttaccattgcacgtcatcgttgataggaccgatcatttttcaaatgatttcatgatgtgccaatagtaccttgctatgtatttaatttattttgcattaacatttgattttgatgctactccatttttattttttaagatagttttttttacttgatttagttctctatacttttgtagtgctaatattttacggatatataaaagtggcatttgtttactttgatgtcaaattctgtagncatgtaagagaaaatttggggggaagacattggtatatacttgaaatgttccttaggtagtaacctcttgttacatagttgcataatagatttattggtaattttttaattgcttggaattgtgtcatcctttatacaatttttttggaattttaattttgtgtactaaaagtcacatttagatctatcatatgacacgtataagttaatagtacattggctcataataatgaagagaggaaaaaaaatcctctcaaaaaacaagagaaaaaaaaaagaaaagacaaacaaccaaagaggcctagtcctacccctctcccactggctggcacagctgagctgcagcccagc

SEQ ID NO: 31207 - DNA, 579 bp, Oryza sativa
tgattttcgtaagctgtccttgaacgatccgagggggagcgatttttgcatacggtgataattatagtctgcctacaacctaaaagcggtctcatctgaaaaattgattcggtagtagtgagtaaatcggcacatatgtgatttctgtgagaaaaggtaaattttatagaattatatctaagttactgttggtatttcttaacgacattactagaaatattcattctcagcaatggcgccagaaattgtcctggtatatttatggttacagaagtaatccgcaagcgcacggatataccattgtagcattttacccggaagtattccacggtattgtatttttaatcccaagggaagataataagagtggactatgctaatacactttatacatatgttacttgtaattgtcaaagcctaagcaggggttaattttcatataggggtagaatgacacgaagcaaagctaatcaaatcctcataataaagtaattctaactaagtggaagaagaattagaaagcattcaattcctatacttctagtatacactcaaatcctagtttacatcggctagtat

SEQ ID NO: 31208 - DNA, 656 bp, Oryza sativa
tccttttgacttatacggctgagattttctctaatctctgtaactgtgtttctttcctttcctaattaaattactagtaccaaagcagcagaccatcgtttcccctccagagccgcgatagcttcgtctttgtcatcaaactttagttcagctatggtgataaaattggcatattgttcttcattgcctcaaacagtcaaactgaagattcaagggtattccacccaccatctccacctccaaccatggtgaagaacataatgctaatgtttatttatatggttttgtgatggccagcgttgttttattgatactattggtcggagaataatcatggttatggtgggaagtacttcaaaaaaactaaatattttcctctaaatctatatgattaagatagttgattagaagaagagtaggtgccatgatcccagccgtagaagtcagaagaacggttaagattgagccaaatctaccggtggagttggctccaactccaggggatctagacccaaattttgataaggtttattttggatacaatctgagcaacccctatattgattggagaaaaaacaacaatgtatgatatatgtagatattggttcattctacattttggtattacttattcaatgaataatggatcgagccaa

SEQ ID NO: 31209 - DNA, 749 bp, Oryza sativa
aatcccatggaacatatcaattcacgtgggttgcctgtaaagttggagtcattatggggacgtagctagagtgttggagccatcacacgggaatcaattctttgattgcgcctattccaatggcaattggcaactaagggaatattgttcttgtaagcgcctccactctgtattatgagccacaatatgatcccactgtcaaattgcccgcgctcatcggggcacacagttgttttaatttatttgatcggttaagtcttgtacatgcgttatgccacgattagctcgagcaatttgacagtgggatcaatttgagctagctaatatgttaaaaaacgtactattgcattattgttgactactccctccatcccatttcgagtgaagccataattttctgtgctcaactttaatcgtccattttatttaaaattttttttataaattaaaaaacataagtcaagcataaactactattcatgttctatcattttataacaacgaaaatactaattataaaaattttcaaataagacgaacgatcaaaattagacacggaaacttatatggttacatttaaaaaaggacggagggagtattttctgaatcgcgtgtgatcttgtttacgacaaaagaaatcggtgtgagacttacattttggaaaaaattgggacatggcacatgttggacaagatttccatcgcgaaataagatgagttacttgtttgagcaatttgttttaagataat

SEQ ID NO: 31210 - DNA, 1094 bp, Oryza sativa
ttaattttgatacggcaaccatatactccatccaaactaaaatatatatatagctatttctcatgagtggcatatcaaagatagaataactaagaaaaacatgaataagattgaacgtacagagacatatgtacatcactagctaggactgcgcgcgggtacactgaggcgtcattttataattaagtgcctccggatcctgtgaaactataattttttaatgttttcttaagttgtcacagtgcagattaatattactaatttacatttttactgatgtagatataatagaagaaagcttgctgccggctgactttactgaaaaaaaaatcatattccgtggagtcacctcccagaccactcaagcggccggccgggttccatatcaccggccgcgcgtctccatttgctgattgccggatgtgtgttcagaaattaaacaaggttggtaattgaaaaatgtcattatagtcgtctagatttatcggtgtatttggcttcgccactctggatatgcatagagtggtattaatttaatttagcttaaaaggcagccccatgtatataaggggctaattaattatctctagatataccctaatagtatagccaactactagatccaatttatctatagccaatctaatagctcattcatacaatagttatatactacactattaatacctggtcccacctgtcatacacacactgcgtcttggagtccgtgctagaactggctacaaatctatagcccgctgctcttctttttcctcatttatctccttaaaatatgtttgcagctagcttatagcttgctattgtacctgctctaaacaacatccggaacaagtgtagccacacttataattatgttatccgagtggacttaaatatttaatgctaaatcaagaccttccaccgtggtttacgtcagtaccactagtcactcatatggacgtacacatcaaaaaacatcccttttaaatgatgagattgtcgtagaactatttttttattaagttcattttactcactaaactacatttgccacagaatttaacccggaaccctagctaactattttcaaactc

SEQ ID NO: 31211 - DNA, 1278 bp, Oryza sativa
ttggtatttcttaacgacattactagaaatatgaattcccagcaatgacgccagaaatggtcctagtatatatatggttatagaaggaatcggcaagcgcacggatataccattgtagcatttcacctgggagtattccaaggtatcgtatttatttaatgccaagggaacattgtaagagagaactatgctaataatgtatatatgctacttgtatgatcagagtctaagcaggggttgatatattcataacggtagagtgacacgaagcaaagaactcatatctctcattaaacaatcctacactatgtggaagaagaaatagaaaagcaatcaattcctatacttctatacactcaatcttagtttacatctgctagtatacaactatgtagccaataccccctaacagtgccctcctggtgtttcgagagaccaccccgggttgccgagttccttacgacaacctatcatgaccgtccaaccggggctaaatacggagtagtaccctccccaggaatttctcttaggaatatgtactaacgtggaggaatacctgcattgagctgtcaccatcagaggcccacctctactatccccgcatatatccctaattaatgatatttaataatctaagtaccgtgcttacattactaaatactactctacacccgtgcacatgacatagaaactgataaatcagacattaaacccgcaccattgcacctctctggatggctacccacaaaatcggtacaacacagatataaggtaagaacagtactcagactaaacaaagtaccgaagatatataaagaagaatatttcattaaaattgaaagtattacagaaaagaatacaagagctgctagagccataccgaaactctttcgaagactccgaggactccgaatactattctattctactccacttagcactaaaatactaatactaaagtatgaagaggaatttgagctaacttgagtgtgttgagagagtgaatgagctcctccttttatagggccggtatgacggttgtaccaatgcgaattgtgcattttaccctcacaaccgtcattaagagtgcatccggatcgtacacgtggagggccaggctgattgggcaccgccagttcggacgaaacctgggctagcccaacaggcctacagcttcggtacagtctttgacaggtgggtcctattgacggttttgtagttaaggcggtttccaggacgggtacacctggcttctgagccctttcatccataagcttg

SEQ ID NO: 31212 - DNA, 559 bp, Oryza sativa
  unsure (1)..(559): unsure at all n locations
ttaaatgctgtttactgcaaaacttaatccctatattattattcccttgtacctcccttgcattaattatgcatccgccggtgtggcttgctgagtactgtggttgtactcattcttgctcaatccttcccctcttcagtaagagaagctttggagaagatgtcttaggtggagtcctggcttataccccagttgagcgcctgtgaagatggagccgtaggcccgctagtccgctgctgtttatttttgattgtcaggcctgaagcgcctttgtaataatgtaaatattgtcgatataataaagatgtgtcttttatatcatgtttgtgtggtgtaccccggcttttcctgggacggngattaatacactagcgttcgggaaaaggcaattttcccggtcgcgacagcgcgccccgctccctcggctgacgcaatanataggatttttaattgaaaaataaatgaagaaattcgccaatattcatttaaagagcatataaacttcaaatgggcatatcttggccatttgaactcggaattggaccgttcaagtctctaa

SEQ ID NO: 31213 - DNA, 594 bp, Oryza sativa
tcaatttcaaaagtgaaaaacctagtctaatcaccttcgttgttttttgcacttaggaacattcaaattggggggtctccttgcattcttagccatcacaactagctttgggactaaactcctgtgaataaacttgataaacacgttagtccgctttaaccaccttgtcattaatcaccaaaacccactagggggtttaagtgcatcttcaaagtccattccactaaaaaaattaaccagttgagttacactcacttcgttgcttcggtgtatcatgataatctcaattcaacttttagacattttcatgtttgccttggtggtttccagaaaagtgaaaaagttcttagctttttattatgatcttttaccaaacaatctgtagaactttttcaagatcatttttcggtatctgatttacctttggcaaaatttgctaaaggacactaaaagtttatggtctttgctgagacatgagacacagaaagagcacgtatcttttcgtggacaccacaaaaacttggtattgctggacacccgatgaattattttattatattcagtcaagaaggtgagagaaacttaaataaaagg

SEQ ID NO: 31214 - DNA, 767 bp, Oryza sativa
aaataaagcaatactcctaaatggtgagtaaaacttttgtctacacaaaggatgagatggaagacatctggcaaacaagatctattgctgaaggaggttgcattggatcaatattgagtacataagttcactcatactatattgcttcattacaagataatgcagtagtgccagaacaaaggtggttattcacaaaataaacacagagcagaatcccaatggaatcaacatcaagctaataatccaggactccatgatctgaacatctaattctgtcaacattttagccttaattttgtgcaaggcaaggcaaccactccatacagtataatgtttcatactaaaaaaacgccttgtattacaattcatctttagttcaaataaactgtctaatgcaccaagcacaggttctgattggccaaaacgtaatgttcaagttactaaatgtaaatcactgtaatgcagattttcacacgtaatattcctgcggttaatcagatggcaaattcagagcaggatggctgtcagaaaatatagtccactaagttatgcagcaggttcgtggtttttctcggccagtttggttgaggcttcttcttaatgaaaagccgtgggggtggtcattcccccgctggtcgacatttcttttaagttatgccgtacatttttttttctgcagttacctttgtcatagccacatacaagagttaaggattatctaaaatttccgcaagtaactgctacatagatagctagatatgaacaaa

SEQ ID NO: 31215 - DNA, 501 bp, Oryza sativa
caatcataacaaagtgcaaccacaaggtggaatgggacaccctagctaagtaactagtcggttcagggaaacctcgcatgccaatagttggggaacgccggggcggggtcggttggagccaacccgggttcctggtaaggcaagaacgcgaagcttgccagattaccgatcgaggtggttggagtttgatttgtgaaaactgatctggcctatatttatgtgaaggatttgatccttctatgtggcatgaggtaaccctgggtcggcttgggaaaggctttgttgcgaacctccgataccgacaggtgttcggaataagttcgtatcttgtgggtaaagtgtacccctctgcagaggttaactaactgttcgaacagccatgcccacggtcatgggcggttgtgaggtggttcccgttgcgtagatttgtttgcttgtgctttgtgaaaagttgttgtgtgggaatcgtaaccagaatcagcctatgtggcagatggatga

SEQ ID NO: 31216 - DNA, 671 bp, Oryza sativa
  unsure (1)..(671): unsure at all n locations
cagtcacgttaataagcaacgcaaccataccagcgctagttccgatttacgacccggttctgccattgatgcttgcagcatccaaatgccggtgcaaaaccccgaagaaattaaaagagatgatgaacacgtccgagccagtcgagagggagatcagcaacgcgatagtgtacaagatgacaggacaggagtgnanaggtgtggggcgtattggcggaagtccgggtgcgcttttaaaggggcagcgagttaaccatggttaggtgctctaaccatgagtaggtgttccaacctgagttacgaggcccaaataccgacgtcgtcgatcaggattgagaaatgggaaaatatacggtgaaaactatgtatacggtgaaaacttaaaacctaccattaaatcgaaaaataaacgtctaagattcatctacgttatcacgggtaaaaattttactcgtaagtttacttatgagtaaaaattttattgagacttatattgacatggacgattctcgtacatttaattttcaatttaatggtaatttttgagtttctaatatatatgatttgcaccgtatatttgtcggactttctgtcccacgggaggttgtggttaacgtcggaggctcggagcgagaggaatcaccaccaaaggggatcctctagagtcgacc

SEQ ID NO: 31217 - DNA, 571 bp, Oryza sativa
ggtgttgccattggttcaatctctcaaatagtatttgggtccacatgtatgtaagataattcggtggcatgtgtgaataagaagatgaatgcaaaatacgatgcatgccacaagttattagtggtaaaaacattttttcccttgtctttcatttacatgtttaagtgttacatgcacaaggttttggggttgatacttgacacctatagcccgtttctttcttaattagtttgtttattctacttttggaatgaaagatgatatgctttgaataaattgggggaagctctaatcttcttgtgctagtaggaaaacataactatacttcttgtaaaaatattcttccatttaaataagagaaatttatagttggagttatgaattatagggacagaaataaatttaaaataatagtggtggtagtggtgaatctcctgccatgccaccacctctgctactattctttctacagaattctccctaagcatgcattttcatattatttataggtgttttacgccattcccttcttatttcgtttattagaaccacaatgtaacaagaaaaaaaa

SEQ ID NO: 31218 - DNA, 896 bp, Oryza sativa
agcaccccctaagtgtgtacaaaatgacatgacccttttgcacaagaaattcgagtctttttatgctattagaaaaatgtagtattgatcaggcggttggcctttcttacttacacattggtaatctccgaggatacatgattgcgtagtgaaagaagattactctggggggtgtagctactaaagcaagtagctgaggaagttgtggggttaaagacattgtgagaatagcacactagaacttttcgttgtggcaagttgttttttcttgtatttcctcttttttttttcctctctaatcaccgcgggtgattatgtacagttcttcctctgcttaatataaaatcagctaaggctgacttaggtttcaaaaaaaaaaaaagtagccgaggaagtgtataatgcaagacatgggtggtgttctagctccagatgtttgcaatgaagacgacacggcaggagcagagcacaacagctggaggagatgatgcctataagaagaagatagaagatgctactgatggttctttttatcatgtttagctgctgcttcctgttttacaaactactgaggctggaaaactgcttatggataactgattattctggtggtctgggaactttccttttggtcttgtagcaggttggtaagtttagtttggtggtccttttgctcttttccactttgtcagctgaaatagtgggatggcactattgcagcagctgataaagggtagaaaaaagcttttatctttatttttgagtaaagtgtacgggcggtccttaaacttgtagtggtgtgtcatctaggtccctaaactctcaaaatgcttatccaagtcctagaacttgtcatagtgtgtcatctaggtcccaaatcaccacaaccccttcag

SEQ ID NO: 31219 - DNA, 632 bp, Oryza sativa
agtttaggactcggaggtgaatcattggagtgggttagggttcggacattcgacaaagttcacgggtggggtttcaggacggaactccaaatagaagggataacttcgggattatattaggatggaaattttgtggagacgatctttgatagcaggaagatggactaaaggagggattcaaattgagatctttggcacaacttagactcagcactcaaggaatcaaaattttcgcaatagggttgtttgtaaattagcttttaacgccacgcagaaattgaggcgttatacgaatgctacttaccatactccgtaaaacagaagaagtctaggactggatgatccaaaacctccagaaatacatcaggatcaagtgctggtaggtactactaccgtataagcaaagcaggaacaacctcatgtcaaacagcataggatgtgagatgttatggaactactccctccgtcccataatataatggattttgagtttttacttacaatgtttgaccactcctcttattcaaaaaatttgaaattattatttattttatttgtgacttactttattatctacagtactttaagcacaacttttcattttttatatttgcaaaaaaaatttgaataag

SEQ ID NO: 31220 - DNA, 668 bp, Oryza sativa
tcactttgatgcaatttttaactatactatttttttagcaaagttgcttaaaaaatatctacgtttattttgttgtcaaatttagtcaatacataagaaatcctattaaaattttgacaatattatcatcttatcaaaattatattattactaaaacttgataaggtttattttggctacaatctgaacagaccctatattcgcagaatccaaagcacaaagccaccgacaggggcggagctaggattttgaaccactggggtcatggtttttacttgtatttatgtcgtatttgaaactctaattattctcgaagctagatatttttagctcaaatttcttttggagctagaggtatgagtaagttgggattgtttcattttgctaaaaataaatgtttaaactctattctataataattcatgaggttttaaggtcaaaaatttaaaagttaagactatatataaccgggcataacaaccatgtgttttttcagacatataaatatgttctaaaacttgtttattactccatctgtctcaaaatacaactacctatgtcttttaagagattaatgttagggtgcgaaataattatgattggttgaaaaaaaaagtaggtgaaaaaaaataaatcggaaaatattatgattggttgagatgggatgg

SEQ ID NO: 31221 - DNA, 926 bp, Oryza sativa
gaaggagggatgtatattagacttgggccgagcgaagggaatgggctgagcaagcaagaagcggcccatcggctgggagaggatcattagacttttgctgagagttatttgaaggaatttgagaggcacttgaggtgggatttgaattccaatcgtatatctgaactcaaggatatatggagagtcaaggatgggcagcaatttgcaagttggacttcaaagagggaattagattggatttcgtggatgaagggattcaaggggtaggtaggttggtaggtcaagacttttagagagagagagagagagagagagagagagagagagagagagatgggctggaatagaaggaagaagtggacctaggagagaaaggaagaaggaatccaacattatggggaggtaaaatagactttcacagggatgactggaacgtcggttcaaatcgtttgaggggttattgatcttggaatatttcgaaagaattcggccgaacgatattcgtgagagaaattcggatacgaaggtccaaatttcgagaatggttttcgatgaatcaagggaagggttaggattcacgaggtggatgtttgaactagactggattcaaggattaggcaaaaatatgtggctaggatttcaggaatgaaatccgaatataaggatccgaacttcaacattatttacgagacaaaaacagggattcggactatcgaatttgaggattgcaattgcgggaccttcgcacgaagtaacctagaggtgatttgagtgcagactcaaatcttgagagatcaacggaacggatttattaggaggggaaatatctcagaagaaatttagaaacaggttttgaatacaagggtgagacccttttcaggcaaggacttttagagctagggttttggcatccgagaattgagatg

SEQ ID NO: 31222 - DNA, 1247 bp, Oryza sativa
cctcgagtttgtccatccaggtaggagcggatcagcgatggcttgcgccttgcgacggccggcgaggatgccctagatcgcagagggcgtcgcggcgccgtggtggaataggaggaggaaacctcgacgtgaggaaattattgggcctgtaggtgaggcccaacccaatgtacggttcattacagcatagctcccatacaccagtatctttcgagctggtttatggctgtacctttggttcgaatccagaaaaaggactctattaagccctatatgaaacgcaattgctaaacgtacttaaactatagctataatgcaataactatattatactcttttttccctcaaatgcagcaagttatagggatcaaatattgtatcaaatataacaatataaggcatgtaaaaggtcatttttgccacaaaagtatccatattactccctctcctatcccttggctctattatacttctggcgtacacctcacctatctcacctatctcgagaagtgaaataagtctctcttaccattccttaatacacgtgccatgctctaaaagttattacattttgagacggaaggagcggttatatttgaaagtttttcaccaaaagactgtgcgatagtttttaattagatagtcacataagaaaacatgtgagcatatgatttaccaacctagttaaaaaattatagctattgctaagaaaacatttgatagtttttctttccccccaaacatttgaatttgtaaaaaaataaaaaatcagttcacctcaaatatttgtgtggcacataagggtacagaaaaatgcaagtcgcaggggaggcaatcgaactgtgtgtaatgttaaatttataagttacactgtaactgtataagtactctatccttccacaaatgttagatttattctatatttgtagttttcatgtatctaaaactgaaataaagagataaattaaatatttaatcgaaacccaaggattcatctttatactcattggttgcatgcatgcatacactttttaatctttattacatgttagatgagttaattttcttgatcttggtgataaaagtaatatgtccaaattcttgtggatggaggggtaatatactataattacatttaaaagtttttcttttttgaaagaacccagcaaagctggttttatattatagagagaaagaaagaactatacatggggggttgcagtttagtgctggaattgcacttccca

SEQ ID NO: 31223 - DNA, 3805 bp, Oryza sativa
tagtactagtactatcatgcatgcatagcatggagcaccccaagaatccacaggtttgtcacgtcccaccaccgtttgttgccatctccttttccttccagctacgccgccgatgcagctagccagctcccaaaccccaaccccatgaggccgacccattgacgaacctcaccggcctgacgcgcgcaggcgcagcctctcgcgctcgctacgctccggccccgcgcggccgcggatgataccaattccccggtgcatgtggcccgccacatggcgaggcaggcgacgagtgacgacacgagccgccgcgcggatcgtccaaccgcgcgctcgtaggacggcaggagtcgcgccgatccacttgtccttgcttccccgcgggagcgccgtgacctttgtcttcgctctcccgcgggggtgttggcctcgtctgtgatcgcaactgctcgcaacgcaaaggagttgagattgtccagaagtgcacgcttctccctcgatcgatcgatcgatacacgtttttgcgaacgtataaggcctcgcgcgggccaacgtgcatggataaaggcacacggcgcggttggtagtattatactatatgctgctgtcgggtgaagtcctccgatctgtataggatctgctacattatcattgttgttcagtatcgtatcgtcaaaatcaacctgcagtatgagtaccaataatgcttcggttggagaatgcaagatgtacttacactacgaggtgtgtcggacatttgtgtcagtcagaacattgagaaaaatacgaaatggagaaagacaggaagagaacaaaaggtacactgcgagaccaccgtggtagtgtactgtaatctgtgtgcgcccctgctataagaaatcggtttgtggataggttaaaatgactagcccatttccgtacagccggagtcttttggcctaagtgtagggtagtatctgtcgggttcatcagccaagtatgatcatgggagaattatgcatgagtaatgatggcggaatcctaatgatggtcagggaacgaaaattgccacttgagttccctttggagcttctgaagttttgtgatgggagtaattttacgttcttaaatctcgaggtatctatctaaaataaatggtatcttaagataattaatacctataactttggatggagattcacaaataaaattaaataatttttatgatcttgttatgccgtgggagtttttattagtttgtgtgtgcttttgtttattcatgtgtgagtttttgttaaattggtgtaataattatcttaaaaaaactaatacttaaatataccaaattttataatagaaagtacgatatcttctaaggatgtgttcggatggccccttttctcaacccatctctctcgtttaccgcgcgcacacttttcaaactactaaatggtgtgtgttttgaaaaaagtttcaatatgaaagttgctaaaaaaaatcaaattaatctttttttaaaaaaatagctaatacttaattaatcacacgctaatagatcgttccgttttctgtgctcactgtgctggatgggaacagaaccagagaacacaccctaaggatggtaaacttatcatttgtgatgattgtatgaacattcctaatgcacgggttctcagggtcaggtgctcacgacctcaggtgtcattgtgtcaacactcaaacagaaagaggaaatgctctagctacacatgtttcacttcatgttgcaagttacttttgtcgtataacaacatgaacagaacacaggttaccagaaaagtcacaaatgtcgagcaaagttggcaagacccagcttgtttgaaacacagaaattatcttgcttttattgggaggaatcgagatgtttcattatatatttgtcttctagagacattccatgttaaatttgtagaggttgtcatgctagcgaaagcagatcaatatcaaccatttcgttcttttttttaaaaaaaaaagccggtgacaggatctctgctagatatattaagaagagttggcctggcctagcttataaggaagatcgggcctaaaaaccacacaaccgaccaattaattaaaggagaactggtaaaacccacacgatgagccaaaaaaagaaaagcttgcagcaacaaaacaactagcacacaacatagcgcaaactacctacaaacaaccctactgaagagcaggaagagaagcccccaacaaggaaacaacatctaggatgttgctaaaactagtttagcacaccggactaggtatttacttacaagaagagatgaccgcttcaacaatgcccctaagggaaaaaaggcgtccattgacattgacatcgctaaagatagataaaaactgaataaggattttgccttaggctctctaaattgccaatcacctccataacaagatgaaggtgttgtgggttattgttacccagctcactacacgacataacagtttcgactctgccgcaacacaaactacacagcaccacggaggcgaacaacaacactactccttcgcccacaccaaacataaatagatggggatcattgttaccgggcttgccacatggacaagtaactctgacctttgcccaccatgcgaatgctcaccaatacgattccataaccaccacctccatgcgcggattttctccaagaaagtgttgttgatgccgaaggtcgctcatcctctgacaagaagacaccaaaatgaccaaactaccacctctcctcctaccatagggctcctcgatcggagtctagaagtagaatgaccttaagagggaaggagctctaaggtgagagaaggagcccagtcgaccaaacggagttccgctcaccgtccttcaaaccaccaccagcgtcgatgctcatagtgacctcggtgacaatccatcaagtggtattgcggcaagaagtacctgcaggctgtggcttctagccaccctacttcggcactctttgaaccaactccagaagctccgatggtctccctatgacaacttgtgcgacaactcttccactccaactccatctcgtgcagcggcgtcagtggcaccctccaactccaccttaacagcaatgctaacgtcgagctcccagtcacctgccagtgaagtgggcaccccattggccacccatgcgcccccaacttaccctgttggtaagtgcactgccctactccgacgccactcctctcgccaccatgttcccaacccctgcgcctctgtcgccaaacttgaatcgctgccaccttcacacctgcatcgccgccgccgccacacccaccatcggggggggggggtcgccactgtcagatccagataatcttttggatctggaataggtccaaccaccatgtttccctccagacgcaggttaatatagggttggatcgtcgtaggtggtgggatggggaggggatcgagagtgggggacaacggcatagagggttgcgtcgccacccaacaaggagcgaccggaggtatgtttttcctaaatcaaccatttagatggctttgtcagggattttcaagattagctcaggtgatttttcagctgcctcacgttgatactcctactccactagaaattcgtcctacctagctacatattcctactacgtactctcttcatactcgtaaaggaagtcgtttaggacaatgtttaagtcaaaccttaggagtataaatcatgaataactcttaagttgttaagtttgaaaatgtaaaaattatatgaatatatttatcttgaaaaatattttcataaaaatatacatg

SEQ ID NO: 31224 - DNA, 541 bp, Oryza sativa
taacgtcggaggctcggagcgagaggaatcaccaccaaattcgctgcatgcacactttgcacggttgcaccaggtttgggacttggataaatgaattcagacggcggttaactggaaattggttggattagctaagctacgaaatggatttgtcacacgcttttccttttgtatagatgctcagagtaaattatagtttacagtagttatccatcgaaacgttccacatatacacttataatttttttcctttgaaatcaacaaaaacaaattcgtggtaacttgttttcctaattagcaaatttggctcagtagatcagtgattcacagtagtcaccaccgttgtttccttctcaaaagagtatatctatatatttatattaattaatttttacaaaacttatcttttacaccaactggtactatgctcctgcttttcaacaggactaaaagaaatactaacaattagtttgatggggttgaattttatctatccacttttttatgggttgattctcgtgcagaaacactcttttatttt

SEQ ID NO: 31225 - DNA, 520 bp, Oryza sativa
ccctaggcagccggtggcggtggctttggcggcggtgggcgagcggatctgggaatcaattgtggggctttaatggaacctcaatgctcgtaaaaaaaagccactttcttccctgctaacttcttcctcggcgacatcatccccaatgccgtcgacgcctaccaatttcacagctccaccccccgtcgattcccagagccggtcgctcgccacctccaaccacctagggttagatttggatgagaatttcaggtatggggttgaacggtgagtgcgtttggttgaacctgggttacatgctactgaggttgggggtatttttgtccttttgaaatttctctctcatctttttcaccggaaatggtaacatattatctcggatgtcgctattgctaattatataaaggcaaattttgctacaggacactccttatatgtggttttagccctaggacactgcccaaactcacttttgggggaaaatactccataaacgtggtaatttgccagtggacaccgc

SEQ ID NO: 31226 - DNA, 708 bp, Oryza sativa
tgtactaattgatattttaatgaaatggacaaatagcagaaagttattcttgcaactctagttacaaaataacaaaggacattttattcttccttcaaaacggtgaaagctggcacagtttttcgagaaggatatttttttagccgggctctatatctaaccggatatatgcagccattttaatcatgaacttaacctatcgaataggaaacttagccctcaaataactcaatctgaaattcactcctatgaagatttgaactcaggaccttgggtgctactcatgtcactgcaaccactaggctacatgccatttcacgcacagtttttcttataaacacgatcactatagttaggctcacctaagttcagaacatttaatttatactgttaaacgtagaaatgcctataccatgtagtaaaataacctatgattgacttataaagatataacataaagaagaataatgtactagatatttttaaatgttttgtgctagctaacagaaactaaaaggttgagagtagttgcagcacaatttgtagctgattattatagaaaaagagtggttctccctccaatgtaatgcttatgtgctagtatatatattactagttttctatttagtcggtgatgcagtcgtgcatcatgcaaactcatctccaaccatctattatgtattttcttttgttccactttttataaga

SEQ ID NO: 31227 - DNA, 703 bp, Oryza sativa
gcgaattcgagctcggtacccgttattaattatttttaatatcggattttagttatttgtaattatatatgtccttatatggactctagactcgtcttttaatattcctttctttttaattccgaattttctgtaaattgtatttctatatagacactatgctcttcttccaatattatttatttttatttctgaattttcatattatattttatatacgtgttagttattaattatttttaatatcaaattttagttatttgtaaattatatatattcctttatggactttagactcgtcttttaatatttcttttttttaattccgaattttctgtaaactgtatttctatatagactctatgctcttcttctaatattatttatttttatttctaaatttttattatttctaattttatttctatgtggactctaaacttatttttcaatattctttaatttttaatttcgaatttcagttacttctaaattgtattcctatatttgtattcatatattgaccttaaactcttcttcccatgtttttcttaatttataattttagttatttgtaaattgtatttttatacggactctaaactctacttttaattttattatgtttattatttcaaattttagttagttttaaattcctatatggactctatactatacttctaatattccttatttttaa

SEQ ID NO: 31228 - DNA, 517 bp, Oryza sativa
tgtgtgtgtatcagatcgagaattcgagaggctgtgtgcagcttcttgatctcaggcaattgtagaggatggagaatcactattattacctctttcgtgtgagccacctgttgctgcagctttctcagcatctggcaaaaaaaaaagggaacaattttgatattttggatgaattttgtcctagaagttttcctgactatatgtcacatctccttgtgtaaacatgaaacattcagagggtagcattcaaaaacaagaagaaaagattcagacttcatagtgctatctggttcatattaacagattcaaattaactggtagttgcagagatgttggtgctaattagtttcttcatatattatacactctggtgaaatatgttcatcatgtttctttctgaagaaattaacaagagatttcacaagttgcacctggaatagctcagagcaacaaaaacatgttctctgcttggtggattattacagcaacaaaactagtaataagcaaggttgtcaat

SEQ ID NO: 31229 - DNA, 505 bp, Oryza sativa
gcaccaaggacaaggatctgatctctgcttggatcgcgcaactggctgacatgatttgctgtctatcatggctatttctggatccacatcaccagaatggaaggcttggggtgggttctacaaattgatgttaaacattgtagctatatcgagccaaagttttgtacaccttgtataaactgcagcatcgaactatagtgaaagctgcacttaacattcatctacgtaccacgatcaggactctgttcttagagcttgatgtcgtctttaaatgaagaaatttcatggtatctaactatttattatattatatcattataagataaccttgaaacacgtcatcatattcgtttgagggatttggtgcttcaagattttgacgagatgagttcgaggcagattttctgatgacgacttctatgatcgccctggcctaggagatatgacccaaccaacgtttacttttctccaagttggatccatcacttttctggtctttgctgct

SEQ ID NO: 31230 - DNA, 531 bp, Oryza sativa
tcttgacagctgcaacttcgtactagtgctaaaaaagtcagaaaaggttagaagcttgtctcctccactcagaatcttcagaaaaagatactagtagactgattcactttattgacaaaatattggttctgaaaaaaaaaattatgtgacaggtgatcagagatcatggatgtatcagtatcaggagtcgcagtcattagtttcgtttttaagcctacaggaagaacatgtttaattcctgatcgtgtgtatgtgaattgtgaaacggtgacgtaattagccaaatagccaggcatgttttggatgatgaggatcgattttgtgaattgagtttggtcaggtactcttcctcctctctgtctactgcacaacaactccaatgaaattatcatgatgcaacagcaacccagattaacagaccaactagaaaactgaaaataacttgatacataatttgcagtgatgaaatcaagttgggttccattgcacactagcatcccgactgcttacctaacagaaggaaaaaaaaat

SEQ ID NO: 31231 - DNA, 689 bp, Oryza sativa
ggcgaattcgagctcggtaccctgtaattcttttgagatatactttgtatttcaatcaaatataaagcacagcttcgtctgttgaattgtaagtttgctatctagaaatgcacctgaaactctgatgccttggggggaaaaaagcatcttgaacttttggaggtctgaccaaaggtttttggcccccaccgccaccttagggaagtccataaaatggctgttttgtggttgcataaataacaaatggcaaaagtttttactaatggattaaatttacccttggacccttggggtgacacagttgaaaaatgcactttgttgaaagtcaaaaactttcttaccccgtgatgttggcagcattatggtttatggtgaaacactggcttcagcctgtaaaggtgactttctttggttccttgcaggaccagaatgatccatctttcatcactttccaaattgcagtgttctaaaaactggttggtttgcacacagaagtggctaatattagtatctacggagaagccaaggataacgttagtgttcaatgaccattgatctgcattgttagcttttaggcttgtgtaaaataggaagctagcagccagcacacctgcacaagcaataccaggacctgtgtccactgaagggtgaggatgtgaagcatatatctacaaaaaagatcctctaac

SEQ ID NO: 31232 - DNA, 620 bp, Oryza sativa
aatttcttttaacattttaaaattttaaaaattaatagtaaaccttttagtcacgccagtctcattggtgtggtagtgtggggatataaaatacattgacaatataattgtgttgtttcgtcacgctagacgaagtggcatagccaaaagaaaatatttttttactataataaaaaattaaaattgttcaaagaaaaaaaatcaccgattataaggggctccaaatacacgagcaagcgtgagtaaaccaaattgcacgcgagcccctccaccttatactttttgtccatagttcaagacaatcttcacgtgtaagttgcagctgagattataagatgactggcgattgcgatggtgctgacataaaaaacattccccgctcctagtttcccacctctcctccctctaccctcaccctccagtgcttggcatcttctcttcttcaacagtgaaaagttggcaaactcaattcccgcaaatgcaatgctaacaaatctcatgacgacctctcctccggctagccagtcatggcaactaggtgagctatttgtctcatcttccctcctcctctaccacctcccaccttctatggccaatagcgccaccgtcttctcaccaca

SEQ ID NO: 31233 - DNA, 691 bp, Oryza sativa
actcctacgaatgctcttagtccgtcacgtgactcgatcaaatctaaccgttgattttcacttaaatggtgaacccgataattttaaaccattagattaaactttccggtggacccgatattttaggccattagattacatatattttaaaaaaagaaactaattccttaggcagttacgtgtttatgtatacaggagaaatttgtacgtacgtacaactgaactaatgaagagaaaaaaaactacacacagaattaccataaaatcaataagaaaaaaacatacgtacttagtaccttgcaaaagtttgataatatttaaaataggattttctattatttaaatataaaacatattacttcataaatttacataaatatcaccgtcgatttttatttaaattggtggacccgatcgatgttttagaacattagattagatgcctaaaagtccattaaatttctcaaaaatgctcctaattcgccatatgacattctacaaacgttcctaaattgtcatgtgatgctataataaatgagtgaaattcttaaaaaatctgaaataacaaaaacatatttcatttaatttggtggacagattatttatagccattagattaattttcaagaaatgaaattactctcctaaacctaggaccacctaagcctgtatgtaaaaaacgaacgtactt

SEQ ID NO: 31234 - DNA, 788 bp, Oryza sativa
gtcagctgcccgagcccgcgggtgcggctgacgcgcgggacccacggcgccgaccgccgccagcagcgtgcgcccggtccaccgtggaccgagcggctgacgcgtgggccccacttcccgtggacccggtccgcgcgtgtcacgtcctgataaattcatcccgaaataaaaatcatcttctaaaaggaataatagaattaattaaaattcgaaaagaaattggcaaacactaaaatacgtacaagaaaaattcaaatgtgacccggagaatttttgttaaattctccttggtctaaaaggagccctcaaattttagtggaattttcagagcacaaataataattgagaagaaataaacaaagttgaaaaggttttataaaaagaaaaaccctaaaagaagtcctcttttcccccccttccttcttgggccggctcggcccagtccctccctctctctctcttcccccgcggcccatcagctcccccgcgcgcgcgcgccgctgacaggcgggcccgcccgccactctcgctgacgggtggggcccacctgtcatcgccttcctcccgccgcgcccgccgccgcgcccgtgccctagcgccgccgccgccgcggattgcgccgcatcccgccgtccccgcgcgcattaaagagaggggaatcactccccgcgtttccctctcccgtttccccctcttttccctctctctctccctcggattcgtccggattcatcccgcgaagttcgccggcgtcttcaatggcgcccgagatctccgcgcgcggtttc

SEQ ID NO: 31235 - DNA, 748 bp, Oryza sativa
aaatgatagattttaatcaatcaataaatcatttttcaatttttagttaaaaaagtaatagcaactaaaacattacaatccggtaaaaagaattattacaattatatgcacgcataatctctacccttcaacgctctctttctctactcactcatttaattcctttatctcctaatttttaactaagtaaagaaatatcaataataagaaatctaaatgattataattcttaaattaaatcataattttaacttatttgaatttttgttttatttacaattaaataaaatgtttaagatccatattacccatatttcactttataaaaaatgaaaatatgtcatttaagcatagacatcgttcctttgcatggtaaccaaatagaaaaaacatggaccataatacaaaatgaaaataagtattatattaccgtaaatcactggacatcctctgagcacactcaaggcgtcgcgtgttacaccttaaataaaaataaaactttacaaattggaagaaaaaccatcttagcatcagtttccacttaaataggtagatccattattttcaaccaatagataatcttttaagaaaatcttaagcaaccatgtgttacgtcttaaaaattagaaaaaataacataaaatgtgagaaaaatatatcatcggtttcccttaaatcatttagataaaatagaaacaaaatacccctccacttcaccatccccccacacatacgcgggctgcaggaa

SEQ ID NO: 31236 - DNA, 1263 bp, Oryza sativa
ggatacgcagacgaaccattcgtactagcgaagcaggtcgaacaaattttctacataaacgaccccgcaaacaagaagatgcacgtcgttagggatggcaagcaaagaattgtgggggtggacaacgtcgtcaatgaagaagaatataacaagaatcttcatgtcagacctcagatcgaccttgacgatgatcccgaagatgaagtggcttacgttcgttcagaccattcggaaggcgtaccactgtgaatgatgcatttaatttgtattggagccttaatgaatgaattgcatatgttttatgccattccagttaaaactttttgaagaaatggatttgttaattatgtggttttaaaaaattatacttgttattttaaactatatgtgagatagccaattgttaattatatgaattttaaactatatgtgagaaagtcaattgtcaattatatgattttaaaaaattaataggaattttaaactatgtaaataagtcatttgttaattatatgattttaaaaaattaatagcaattttaaatcgggtagaagttaattataaatgattattataacttaaaaatattttaataagtcatctttgattggctttagtactttgcccgatagagattattccatctctgtcgggcttagtgctaatgcctgtcacagataggtatcatccgtatcgggcagagtactaacgcccgtcacggatgagtgtcatccgcatcgggcatagtaatatgcccgatagacatgaggattgactagggtttacttagtcaatcctcatccacgggtccttatccaccgccgacgccgcctctcactctctcactctctcactctctcagatccaccgccaccgccaccgccgctgccgcctcctcctcctccgctgccgctgacgccacctcctcctcttccaggccgtcgcctcccgaccacagccgcctccctccacgcctcctggttcaagatccaccgccgcctccctccacgccccctggttcaagatccaacgccgccgcctcctcctccaagccatcacctcccgaccgccaccgcctccctccacgcctcccggttcaagatccaccgcctcctcctcctcgacgccgccaccgcctcctggttcaagatccaccgctgcctcctccctcgccgtggatccggccttcctgaccaccgccgccgcctcccggttcaagaaccaccctccccgaccgccagcacctcctccacgcccaagacc

SEQ ID NO: 31237 - DNA, 592 bp, Oryza sativa
atttgaccgttcaaatttgaaattaactgttgggaggctaaaaaattcataaaaaattcgaaaaaattccaaaaaatctcaaatttcgccctataaatagggcatgaaccccagccatttctcctcatcccacactcctcatcttgtgctctcaagtgttttaagtgctctctttgttctcaagtgtgcatttttttttattttgacaaaatttgctcaaattttgtcaaaaatcaaaattagtttcgtagttcaacagtttgatcgcagaggtttgaagagctcgcggttggaaagatgtaagtaatattcaaatttgtgtattatttgtattgtgtttgtgaattcaataaatattcgaaaatttgtttatgtcggtttaaattttcagaatggatccgaactttccataccagtcgccgtcgttcaccttgggtgatttcgaccccaactacatgtcggggtttgacggtacctccggatcggctccaactccaccatctgtggaggaggtaccggttcatacgactgtcgttgagaggtaccggttcaggcggaaacagcttcggaaggattttccggaaccgcgagc

SEQ ID NO: 31238 - DNA, 1438 bp, Oryza sativa
gccaataacataagcatggtgggtttcactggttgaatagtagacatagtgccacaccgctgttacctgcaaaataaagggaataaccatttgggcaactttactcactgtcggagtcattttttcccatgcatgtttgttctgtaacagtttaaaactcgaggaagaaatattctcgtccaaaatatttattccctcggtcaaaaatatttaacttggatgaaaatttgatcaaacctctaaaattttgagaataaattatatataaagtaagtttatagtattatgatactagttttcaagacaaatatctgtatataatttatttcgtctttaaaacacacatttgaaaaattattgaaatatatagaattttaaattttttatcaaatcttattgtaaatattcttcttttttgcagagggagtataatataatgctaaaaagcaggaaggctaagctttgttaaatccgcacacatagggtatgtgaaaggcaatagagggttgaaataccaatcaggagaggagagaacacgcaccttcgcccggccggagtgcagagcactgcaacctcttcggcttggctatgcgcggtggtgtgtgtgatctgggctctgggttggatatgcttatctgactcaggccccaggggtttaaaaactattttacagcagccttacctccacacatttgagctgtcacaccttatcttagcttgaccgccgtaacagcggagaccttgattcggagtcgttgagactaatccattgcaacttttcagcccactcaggcactcacgggttcacggcctcacccacctcagcggtcgctgtttgaggtcgacaaggttgttgcagcttgttcagcctcgaatacgatctctctatttcccctccggctctgtactttccatccgaaaccgggcatatatattctgcactgatgtgcgacttgtctccggcggcttcgatcctgacaagcttagcacatggacggtatacttttcaatattctcgttcaactacatcgttctttctttagtgagagccacgagtttggctttggttctttgtgacattggtgcttccagaatatttttatgtggacgtgattcgttctttggcagagcagcgggtcaagcaaatttgcacgtattcagtttggacaacgttgcaacgtactaatgccgtgtcgtccacggttatacatacatcaaaatggtgaaatatctagcagggaccaccaattcagtggaggggtcaaaaaaattgttttgaaaataaaagaaaccaaaagaattatgtagtatatggctagtatttgttggcggtaggtttacacacagatcctctcatctgtgacggcccattacatgcctgggcaacgtgggccgtcagaacgaagtcatctcaattgggcctaagggctgcaggaat

SEQ ID NO: 31239 - DNA, 636 bp, Oryza sativa
tgcacccctttaagacactatatttgtttatttatacttacacatatgaacaattataacaaaattgacagcaagtggtgcatactatttatagtcaaagttatcgtttatttctattttacatatgctaaatatcaacttgcatattttttatgatgtatcacatattaatttatcttattaaaatataatttttttatgatttcttgagcaacatgaaaaaaaaggtgcccctcaagggatgactggacttttccaaatgacgaatttattcacttcattaccaaaataaatcttactacttccatttattggtaaaaccaaggattgacaatgctaaatttcgtcaagtcaatgaatgtgaaaatgttgtttagtttaatacttactaaaatttggtgcattttgttaatggaaggttctggaatagtcaaattttgatagattttggtaaggttgcaatggtaaaatcttgtttagtttgttaccctataaaaatatcaaaatttggtcaaatttatttttgcaatgaagtgatcagtccgcaaacatagtacataatcaaattcaacttgtacatatggggggaattaaatccaacaacaaatgcagctgtaggttttcacaaaggaacac

SEQ ID NO: 31240 - DNA, 724 bp, Oryza sativa
tatagatgttaatgaatttagacacatacatatgtctagatttattaacatctaaatgaatgtggcaatgctagaaagtcttacattgtgaaaaggaggaagtatatgtcattcacatccatttttctctctaaaccgccgacatgcatcaaaacctgcaaaactaagttataaattggaacaattttatatgtaattagaaatgcaagtatatacagagacgagctacctaggactttactctaaagaatttaattgtattacaaagaatatttacaaaaatcaaatgtttgtcgcatatgcattgcaaatgttctgccattccgagacgagatacctaggacttcactctaacatccctttcggtgacaagatatcatctagtatgaattgtgctatctcctctctaatgatttcaaagttgattttcggaatccttgaaataaattcctgcatgttcggcgccaagttagtccacatacttgtaaatttgtcgtcctatgtgtgtataaacaattgaattacacacctaaggctttgtagcattggccacatacatatagatgttaatgaatctagacattaacatctaaatgaatgtggcaatgctagaaagccttacattgtgaaaatgaggaagtatatgtcattcacatccatttttctctccaaaccgccgacatgcatcaaaacatgcaaaactaagttataaattggaacaatt

SEQ ID NO: 31241 - DNA, 690 bp, Oryza sativa
cccataaacatctagggttggagggattcctaggctcccaggcactcaggctcagccgcccaccagccagcgccgatagccgaccgcacccggcgccgtcccctgcgattccgcgccgccggcgccgtcccctgcgattccgcgccgccggcgccaccaccggcgtcccctcccggcctccccaccccgcaagcccgcgtctctgcgccggggcggcgccgccacctccgtccgcaccgacaaccgtcccctcccctcctccgcgccggcgccgtgcggcctcccctccagcctcccctcctccgtgccggcgccgcgcggcctcccctccgacctccccgccgtccgtggctccgcgccgagtcgccgacgacgacgccgcgccgtgctgctgacctgccgcgccggcgccgcgcggcctccccgccgtccgcggctccgcgccgtgctgccgacctgccgactgccatccgcccgtcccttccccttccgtggctcagcccactagccaggtaacaaatagatgcctaaactaaatgactagatttgtgaatttgtgattagaagatttgtgaatttgtgattagagattagttagtctgtgaataactgagaatgcaatttataaattgttactaattagtgaatgtgtgctaaatggtaattgctattgtttgtaggatctatgtt

SEQ ID NO: 31242 - DNA, 506 bp, Oryza sativa
tactgtagcacttatggataatcatggactaattatgctcaaaagatttgtcccgcgatttctctcctaactaggtaattattttttaatctatatttaacgctccaatacatatatctaaagatttgatgtgatgtttttgagaaagaaattaaggagctaaacgaggccttagctgggttagctggggcatggcgcacgggtgggggatcacgtactacgatggataagagacaggtctgtgacagagttattagtagccgtgcaatcaggtagatctctctcccggccagaacccaacacggttctatgggcagcggccgggcagccatgcagctctgccctgtacgttaagccactgttccgatcgagggagcgaactttcgtggaaaaagacgggtgcaggaccggccagccatgcatgcatgcaactatgcaagcaactcgtgcacgctgaaaacgtcttgatcgatccatcgatcgacctgcaaattaagtttctgcaa

SEQ ID NO: 31243 - DNA, 559 bp, Oryza sativa
gtcaaacgttagacataaatagtgtaaaactgcatttattttgggacggagggagtataacgaatctaaactggagcagatttattatactaaattatgtcatattttattttaggttaggtttttcagtgacggcagagtgccaagagaagaaaatactagcagaggcagagacgatcagacgaatggctggcctctctacccacacccatgccaaggcatgaggatgatgttgtccttgtccacagtgcacagacactggtgcaccgtgatgcacagtcgcacacaggcacacagccttcttcacgaagccatatccctcattcccctctatatataagccagcaagctgcgccatgtcatatcccccgctaaactctccgcccgcgcagccttgcactcgcgtcgcacatatcgacccatccatccggcacgcatgcaggcgcagcaggccatggacgagcccgccaacgcgcagctgtacggccacgctcacgcgcactcgcaccaccaccggagcaagcgcccgtcgcccggtggcggcggcggcggcgcggcg

SEQ ID NO: 31244 - DNA, 741 bp, Oryza sativa
ggcgccacggcagcgaaaccgctctccaaaaccgccgagggagtcaaatgcaccggttttaagagttagggggtcgagatatccggttttatggtttagggtcatagattagatttcgatcaatattgagggtcacaaagtgaacttattccgttatagagagagcacatggcctcgtagaactaacggcccaggatccggtccatgtgggccatctactagattgttgggccctttgagcattaatagatgggctttgagttgtaccagattgggctgaaaacatagcactcagtccccttccgtgggctaccacaatacacccgcagctaattaaaggctgtaatggaccaaatgtccaatggagaccatgtcttgagctgggcctcatccagtcatcctggaccatttcaaccatagcaaagccctactcacagaaggtttttggttttccttatctctcgtgcctttgaatagtcccgatgcatttggattatctatagtgaatttgctgcagaaaagaggtgattgctttgataagatcacagaggctaataatttactattatattcattctagaatataagcatcgttttgctatatacctagatatttcttcataataaatagccagaagcgattatattttggaatggagagaatcacctaaacgtctgcaacggtgcaaaaagaattccgagtcaaagatgctttagataaaccacctatactttaatact

SEQ ID NO: 31245 - DNA, 834 bp, Oryza sativa
gagacatgcttgtataaccaccggcggcaattgagtcggagataaagtgggatgattggggaggcgacgttggcggcctcgtcgttgtcgtgttcaccacggccggccatgtcttggaagggagaggggagaagaggatggggtcgcagctcgcaaatctcgacctcctccctgacgttgccacccccgacgcctagctcctctccagtggccgcccgccattgcgccgaccctcctctctgccgcgctccgccctcgttggccgctgacagtcgcccatcgcgtcggccctcctcttcgccgcgctcctcccctaccagccgccggccgctggccgcacccgcgatttgatgctgtccacttctcaagtcggtctttaaagttctataaaggtaggaaaatatgatttggaaaatatattagccccttagctttttcttcaccaattgaccaatctaccacagatttgatcatgtatgtcaaggtattgactagcactccagattgattaatcaaggcataatgcacggctgagtcaatatgatcctgtagagttggcttgcattcttctttagtcccatcttgtgcatcttcagtcttcttactagtctcctccagtaagcttcggcaactcaactttattcttctgaatcaacttgccttgccgagtaatgtgtaagaatcaagatacatcttgtcggtgacatgggatcgggagtatcatgactagaggtttgaggcagacacagtcgcccacgtggcctggcaccctcgggggacgtcgggcccgaaggtggtgtgttcgccctcctcttagtccccccgagggggtcg

SEQ ID NO: 31246 - DNA, 738 bp, Oryza sativa
gatcaaagttaaaagtttgacttagtttatagaaaaaattagtaaaatttttaacccaagacaaatttattataaaaatatattcaattattgatttgatgaaactaatttagtattaaaaatattactatatttatctataaacttagttaaacatatatttgtctataaatttagttaaacttgaaacagtttaactatgacggaagtcaaaacgtcttataacatgaaacggagagagtagtagccaaagtacatgtgacacttttaatctgattattttaacagccaaattcaacgaagcctaacgtgcacttatcatgattttttttaaaaaagaaaaagataaacgaaagtgagctaacaaaaaaaaaagattttgtagtacggccatgagaaaatgaagtgaacttgaaatgagaaaaaaaaatcttattattattattctttaaaataaaagaatagcataggccggcctggctatcactaggataggagtttcttagggacatattcttctcccttgctgttcatcccttttcggatgcatcgatcacaggcgacaaatcagacaaatcatcattcggagtttcagttgcgcaaatgggtatcggaacatattcttaaggctgattttacatcaaactttaggcgaaaaatactttttttttataatcgctagctaggtagccatgaagagcattttcggttcataatgctgcatgctaatcaagagca

SEQ ID NO: 31247 - DNA, 630 bp, Oryza sativa
atttttgcaccttccaaatacaacttgctgtgtagacaagttgaaaactcaaattcttatccaggatattgctactattgtacagttaagttatgccagtttgtggagaaattagtgtttcataccataactttgaatgcagttggcaccatggcatctacagagtaccatctcagtttactgaatctctgattatttttgctctacttggattggaggaagaggaattgtgaagccagtatactgtccaaaggagagctcatatagtcttcttaatatttgttgtctcagaggatgtgtcggcttcctgccaagtgccgaccaccaaaaaatcaattctccttcaaattcttcccgtgacatctctgtttcttgttgtattgttcctttgttgaaaatttgaagacatcaagctgatctctgaactggtgacatcatctgccactttgcattggctgttctgcaggtatgaccatatgaatattttgttttgacaaacaagtgcaatttatggtgctttttgttaggaaaatgccaacattctttatagaaagttaacatgcaggttgtggttagttctctgatgcctgaatataattgcaattcgattacaaccaagcctgcatattt

SEQ ID NO: 31248 - DNA, 2186 bp, Oryza sativa
ccaaatacgtgtaatgatgaaagtataagtacacaattggtagttttcgctcacatctcttattttaaataaaataaacaattgaaacgctctagtcactcacatatcttattttaagataaataaacatatcaacatgcactagtcatccgcataccagctcatctgtactccctcccatatttgattttaaatatatgtttgacaattcattttacttaaaaattataaaaatattgcttgttttgttgtgacttttaccattaaaggtgctctaaacatgtcttatgttttatactaaatttttaataaacgaactatggaaacatgcataaaagtaaataatgtcatatatttaaaaatggatgtaatattattttgctgatttcaccaatgtgaaaaaaaaaaactgtccctaagaatcggtcaagttatgtaatttgtgtaacctcccccctccctacaaaagaaactgatggatgttggcagtacttcttttcagctgaaaatttttccaaaaaaaaaaaaaaacttaagcgcgtaattaatctgcataacgcatccgttaacccttttttctttgcaaaagcttcagctctgacctcactcctcactaagccatccccttgcagtttaatttggaggtacaaaacgccggtggacgtaagccggatggcacgcgagaacagacgtcagatatataccaaatcctatgaaaagtaatatgttctttctccgatgcgtcggtgtcgcggcaaacgtcagatgcccgcatgatcatccccggccgttctgttcacgatttcttccacttttttctattccaacggctcgctaatctctctctctctctctcgttgatagcaatcaacagcacgtgatttggaaggggctcacacgtggggaagcatcgatctgggacggtgtcatcaggcgagagtcatatcctgttcggtctgtgcagaaacgagttgaatttggtgcttagtatctgtcttaatcatggagctatgcatcttttgtcagctcaacttgggtgcttatttttagtcccatcatgaaagtgtattactactagtttcttgttatggacagcttgtcctacttttaaatccatctcggctcaaacagagaatattggctttggacataaccttgatttgggccttgcaaagggaatgcatttcgattggaccaatataactcagtgaagcaattgactaggacggtacaggcccaaagacgaggtggaaacagtacaaaaggcatcaaaatgcctgtgtccacttgcttggagactggagagtgctttaacctgagaattcttttttgtgtgtggagaaaaacctgatattatgtaaatggatattacctagggtaagcctctcatttgcatattcattcagattcaaagccaacaaactagaaagatagaatagaatgatagaactccagctcctcgttgggttcacgactctacccacccgctagagaactctagttcaagtcctggtttcgataattatgaccgtgtgcatctgtgattagtgtagatgctggaatgtatagaaaaaaatcttattaaattcaactagcattgtggcctgcgcagattgcgcggctaacatcattatattttctctcatataatagcatatatgttttctcattatattatttaaatatattaaaatgacaacataattttaaattttgcaataactttacgaaactactaatatgtaatgttcctattgtattttatatacgtgttagttatgaattatttttaatatcaaattttagttatttgtaaattatatatattcctatatagactctagactcatcttttaatatatctttttaattctgaatttttattatttctaattgaatttctatgtggactctaaactcatctttcaatattctttaatttttaatttcaaattttaattacttctaaattgtatttctatactgactttaactcttcttccgatgtttttcttaattttgaatttcagttatttgtaaattgtatttttatacgaactcaaaacactacttttaattttattatgtttattccgaatttttgttagatttaaattcctatatggactctatactctacttctaatattccttattttttaattccaaatttctattttttttct

SEQ ID NO: 31249 - DNA, 722 bp, Oryza sativa
attcttcactccttgatctaggaagtagcttagaaacaaaagagaacaaaaaccttgaagagaattttctgaaaacatcaagggcgtactggccccagcccaggttgcttcggcccagccctggacatggtggctccttatcggcttctttcttgggccatgtatatggcgtcagaactcagaagtcgattccgcaacaggaagaactcatccctctggttcctcttcccgcacacaaatttcccgtcgcccgggtgcaaaatcccatagctggcggggcaaaattcacacttcgtcttgtagccgtgcggtttactcttatctgttgatagagtaggaaaacagaagtcataaattaggatccttgttatgagagtaaaatcattagcagctgacatcagagagtcggcatagcagagagtgacataaattaggcaccaaaccaacacatgataaatgcagtttatgaaattcaataaatccgtaacatgagccgtgacttaccgatgatggtgcaggtcacaacggtcgcagagtcgtagtcgtcgtagcgtagctcggcgaagaactgcttgtcgggtgactcgggaggagccctgttgcgcttgttgcgggagcgtcgcttgcggcctcttttcacgtctgattcgtcatcatcggcagcagcagctgctgcttcatcggctggcttcaccgggctgctcctcctgcgagccaggaag

SEQ ID NO: 31250 - DNA, 789 bp, Oryza sativa
tcctgcagccctaaatttttgcattcattcgatcattcattcagtaaggctcttaggtttagcttgtaataagtagtggtagtttctattaaagcaatgaccaatttatccattgtcttaaaaaacttagccttgtcctatcaataatctcgttagtctaaaaggattataatcgtcgtattcaagtatactgatcattaacttttatatgccgaaacaaaatttcaatgcatttcattttcattttttcacaaaagtgatatactgacaacaaaaaatgtgggggcgtaaaagtgtgcgggtgttattatttagccaatagatctagttgaacgagtcgtggtttaagaacaacacaatggcaaagacaactatattaaaattaaaaatacaaatatatactaaatttactgttttactacaattgacgtctctatcgtagaatcgtggatatatatgctgcactcattgataaatgtttagtctcacaactgtatgctaacaaatgtttaattaattgagtgctataaagccaatggaacgcaaaaacatttctccatttggacccccaaaagtgttcatgctcaggaaacagagatttggtgcggaacactttcgcctgtgttattaacacaaggcgttctcacatcacgtcagtacgtcactaacctaacaaccctatgacgtgcccatgtacccgttgcagattagccctcctcccgtcggctacggactacccacccacagagaaatcaccccaaaaatgcaccccgctttcgcgcggcttaa

SEQ ID NO: 31251 - DNA, 505 bp, Oryza sativa
agccggtggcggtcgggaggtgatggcttggaggaggaggcggcggcgttggatcttgaaccagggggcgtggaggaggcagcggtggatcttgaaccaggaggcggtggcggcgtcgaggaggaggaggcggtggatcttgaaccgggaggcgtggagggaggcggtggcggtcgggaggtgatggcttggaggaggaggcggcggcgttggatcttgaaccagggggcgtggagggaggcggcggtggatcttgaaccaggaggcgtggagggaggcggctgtggtcgggaggcgacggcctggaagaggaggaggtggcgtcagcggcagcggaggaggaggaggcggcagcggcggtgcggtggcggtggatctgagagagtgagagagtgagagagtgagaggcggcgtcggcggtggataaggacccgtggatgaggattgactaagtaaaccctagtcaatcctcatgtctatcgggcatattactatgcccgatgcg

SEQ ID NO: 31252 - DNA, 603 bp, Oryza sativa
caactttgaaatcattagagaggagatagcacaattcatactagatgatatcttgtcaccgaaagggatgttagagtgaagtcctaggtagctcatctcggaatggcagaacatttgcaatgcatatgcgacaaacatttgatttttgtaaatattctttgtaatacaattaaattctttagagtatagtcctaggtagcttgtctctgtatatacttgcatttctaattacatataaaattgttccaatttataacttagttttgcatgttttgatgcatgtcggcggtttggagagaaaaatggatgtgaatgacatatacttcctcattttcacaatgtaaggctttctagcattgccacattcatttagatgttaatgtctagattcattaacatctatatgtatgtggccaatgctacaaagccttaggtgtgtaattcaattgtttatacacacataggacgacaaatttacaagtatgtggactaacttggcgccgaacatgcaggaatttatttcaaggattccgaaaatcaactttgaaatcattagagaggagatagcacaattcatactagatgatatcttgtcaccgaaag

SEQ ID NO: 31253 - DNA, 737 bp, Oryza sativa
  unsure (1)..(737): unsure at all n locations
gttttttaatagaaaacgccgttgactttttttcatatggttaaccatttgttttattcaaaaattttatgtaaatgtataagatataaattgcacttaggtacatgcatgatcaacatggtataacatgtttgaccatgtttgacatatttaatctttagtcctggttcaaatgcnantagggcctgtggccccccccccccccccccccgtgatctttagtcctggttggtaacaccaaccgggactaaagtcccacccctatatatatatgtcttctttctcctccagctgcccaagcaagcttcaaaatttcttcaaaaaagaggggaggtcatgccaaaatttctagtgaatttattttggtgattacatacaaatcggaggtgcctaaaaggtttgcaactttatcctccaatgttttttttgtcatattacatttggagctatgttttgcacacttttttgtctccaaaatttagttgtgatgagagagaaaatttgtgtggagaagaaagaatatatataaatttagttgatttgctaaagaaggttttataaaatatttgagaaggaaaatatagtgaaagttaatcttcaataacagaaaacaaactaaaatgaaaattaaaagaagtaaaacacattaatattagtttaaaactttagaaatagtaaataagaattatttggtgtaatattttatgatttttgtatgaataaagatatgttattat

SEQ ID NO: 31254 - DNA, 672 bp, Oryza sativa
  unsure (1)..(672): unsure at all n locations
gaattcctccancccattggagacgatagatttgactccgtgatgttggttgctgctggattagcacagagagggggagaactccgagccggcccaagccacgccgccgctacttcatgccgtcgcctcgagctgcgacatcgtcactgccacatcattcccgtgctgccgccgccgctgccgagctccgaggccgaagccttctcttttcgcgctgccacttccctctctcttcctcaactccggcagatgccgcccgtcgtcaagcgccgccttcccaccatttcggagctcgatgccgcgccacgagtccacctctatctcctcatgccggcgccgccactcacgaatgctgccaaagcgttgtctccaccgaatgccgccgtgccagagtgcacccacgacgcggtggagcgctgccgtgacattagaaaggggaaataaggaggaagaggaagaatatgacaagtggggcaagggatatttttgacttttcacgctctttatctctcctactcaactggaaattaatattttaacgcgcgaggtgtctagcagcaaataaccacgtttagatagtgttttcctctaaaattaagtttgtgctgtgtcctacagctaaaccacaaagtcgtgatgtcctatagcaaaagttgcctttttcttatggtg

SEQ ID NO: 31255 - DNA, 626 bp, Oryza sativa
agcatcgaaatggtatccaaagtatatttgatatttttctttctaatcactactagagaaaccatctttggtcggtcgacccaaatccacaatagtcccggttctatgaaaaaccgggactataaagcatttttagtcccggtttataagtgtaaggagactgtcatctttaacccggttcgtgttattaaccgagactaaagatcatctaacaccaactgggactaaagatgattttcagtcccggctcatctcgtgtcagaggctgtcaatccctagagatctttagtcccggttgatactaccaaccgggaataaaatcctaactttagtcccggttgttgtttctaaccgggactaaaaatcaatatactgtatataatcccttgctcttatcctcaaaaatttctatctcctattcctcctcctctctcacacacttttatcctctttctctaagtctctttctattccttcttgtctaagtctctctctcacacttatcctctcgcggtagccggcgaggagcgagtggcggggcgaggcggcgggggccgggcgcggtcggcggcccgtggtggtcggtggtggcgtccgcccgtggcaggaggaggcggctgcggccg

SEQ ID NO: 31256 - DNA, 1061 bp, Oryza sativa
ctgttgtagattgagttagaatctaaaaattctctcctaagtatcttgttatgatctcaagtgagcctatttttcaaaaacaaaaaagcatgcgcgcgcgcgcgcgtgttattagcacaaatcatctaaaaaatatcttaaacgaagaaaaaaaaatttataattgcttcaggtattgaggaataagggcagctatggcagcagcatttcattttatgcatcttacaatcattttcagtttgcagtaatcatatcgaaaaatcttttgtataatttagagttgtttgtactagaacaataccctcagactcagaattaggaaaatggtagatattccaaactaattttcagaaaagtatcatgattgacattacattgattgcagcagtttattgttctttccagtataagatttgcaaaacattcttaaatatgtgataatcaaaattatgatggcttcaatttataaataccatatgcgcagaatatattagctaattaaagattcaatactataactgttgggatacgcgtaggctacgatagcataaatcaaaattttctatcgcgtaaaccaggaaacatgcaagtattagatcatagatcgttaccactcaacgcgctgtgcagcggaagaagacgctgagaagtcgaaggaactctcgcgaagtagcgcgcgtcgatgtagaggaagtagtcgatcgcactggctcggccttctcctcctcgtgcgttctcttcgccgtactcccacgccaatcagcaccgcaaaccagcggcgcctctaccagtatccacacgtacagggacggaacgccacgtgcagatgtgctagcacccgcgcgcggctagggttttgctcgggtagggaagtgacggctagggtttctcacatgatgcaatacctccaccggtcacacctctcacgaatatataggatccatcactcgggcctccaaggcccgtaggactactatttggatccctatccgaattaaactcatattagatctctatccaatccccttatttcggcccattaagtggggctgcaggaattc

SEQ ID NO: 31257 - DNA, 668 bp, Oryza sativa
gaattcctgcagcccccattgccgatccattacatgagtcaaaaaaaccgtacacaaataattattcttacaataatgacagtcatacaataattataagatatctttattcatacaaaaatcataaaatattacaccaaataattcttaaaaactatttgtaaagttttaaactaattttaatgtgttttacttcttttaattttcattttagtttgttttctattatttaagattaactttcactagagttttccttctcaactattttataaaaccttgtttagcaaatgaactaaatttctatatattctttcttccccacacacattttctctctcatcaacttacaactaaattttggagacaaaaaaagtgtgcaaaacataggtgcaaatgtagtatgacaaaaaaaacattggaggatgaagttgcaaaccttttaggcacctccgatttgtatgtaatcaccaaaataaattcaatagaaattttggcatgacctcccctcttttttgaagaaattttgaagcttgctcgggcagctggaggaggaagaagacatatatataggggtgggactttagtcccggttggtagcaccaaccggggctaaagatcaccgggatctttagccccggttggtgctaccaaccgggactaaagtc

SEQ ID NO: 31258 - DNA, 1351 bp, Oryza sativa
ctctatataaggacttcactttctcacttcactcacacacctcaagcaagagctctctcatattctctcaagttagtatagtgttatctagctagtggagtaggaatacagtagaaatctaaagtctggaagccttcggaagagttcgcgtatggctctagtagctttcctttccttttttgtaagctttgtactttatttagaatactcttctttgtacatttatggtattgaaatactttccgactatatgaatgcctactttaaattatgttcatgttatactgaatatgctgctagcttatctagaagatgctttggtgcgggtataatgtttgtatatgcaattactctatgtcatgacgatgatattaaagtagtatctggtagtttagacgtggtgtctagattacgggatatcattatttggggttatatgctgcggatgagaggtgggccgctgatggtgatagctcagtacgggtattcctccgtatttagccccggttgtatggtcatgacgggctgttgtaaggaacttgacagtcagggtggcttctcgaagtactaggagggcatcgaatagagggtattagctagtatatcatataactagaatgtatgtatactatgtgtactagaagtataagaatagattctctttctcttttctttccacttagctaggaaatttagtatgagaataagtagctactgcttgtgtgtgactctacccttggattatcttaacccctacttagactttgattttcacaagtaacatataaattattagtcaggttctctctatatgatcttcccacgggataaaataaatacgatacccttggaatactctcaggtgaaatggtacaatggtatattcgtgcgcttgcggatgaactttgtaaccataatataccaggagtatttctccgccattgctgggaattatatttctggtaatgtcgttaagaaatatcaacaatcggcttctccctatccaactcggtatcagccgatgcagacggtagccgatgcgtactctgattttgagaacaacgaactccttccaaatccgcttcggcttcaactccaaatccaatatatgatttgcgaaatttggttgtgatttacttacttaattacaaataaaataatagttcaagcaaattgaaaaccagatgttatttgtttgccatatagaaggatatgtgtgtgttaaaatggtgcaatttaatttttttatatagtaaaaatatgtgtaatatggatcataaattatttacttatctacttataaaataatagttcaaaaaattaaaaatcagatataactttgttagttgtt

SEQ ID NO: 31259 - DNA, 659 bp, Oryza sativa
gaattcctgcagcccaatatatacggatttgaatgttgcagatccgttgacaaagtcactccctcagcctaagcatgaggcacacactagggcaataggtataagatatattcatgattgactctagtgcaagtgggagactgttagtgatatgccctagagacaatcatagagatgattgtatcacatactatgtttatatatttatccgacattgttccttgaaatagataactccgtattggttaatgaatatgtgattctttcatgagactctttatgatgtttgttactatttctaaaggatccctgatcaaatatcatatgtggaacaaatatgtttatatgatcagcacatgtattaattcacgatcatgtctcatagatcatggtatagagatatcaaattaataatgtggacacatgttggtgaacatgttgttggatagacccaacatgagacactgcaagagccatatgtgttgtgtcatcagtgatctcattgagtgttggtgttgaatccttagacctgagattatcatggttctcaacatgtgtagtagcttacttaaggactgctaaacgctactccgtaattggatagttataaaagtagctttcgggtatgctatgaaacatgtagtgggatatgaataatc

SEQ ID NO: 31260 - DNA, 570 bp, Oryza sativa
agtgatccggtccgaggtgtgtaccaacctacctccgcatccacttatcattgttcgttactcgatgggcagcccagaacttcatgggcccatagggcagttctgaactctcgggccccatcgagcccacatatataaatcatataaacatgaaacatgtcactttgcttcacacacttgaaagctaatggccaatacaccgaaaggcatgcagaagtttaatcaattggagcaatatacggccaggttcgacaaatcgattgtgtggatgggcgaaactatgtcattcttcttgacacaagggggttaattattatatcaattttaaataagaaataaccataaatatatcgatatacccattatgaccataaacaggtccatgaaaccaaacacatgaactctatcatgtgttccacccgctcatatgcggtgtcaacaattcttagcatatagccataaatagttccataagcatgttttcatatgcaatgataataatatccatattaaatcgatagcatgctaaataattaacattttgtttaaatgtttatcaaattttatcct

SEQ ID NO: 31261 - DNA, 1043 bp, Oryza sativa
cttttaaatataagtgatttatatctgtccaatctatcccaatcacttagtttaaatatattttgaagcatagattatatattgttaatatctacagccgagaaaataagtttagttctttatcttctatatacttcattgctgatccaaattatattgcatcggcttgacattagacgatacctcatcggcaatccagccgatcggctatcagttgtagatttaactttggtttctttgtttttttgttggttgcaggatcaaaccaactggcacgctcaaaacccgaaagaaaatatttggatctgcactagagtaaagcgaatctcttatgccagtatgtgttttttgcatcaacaattactctattttactatataaaatttaaaatacgtaattcaaacatataccgaacaacaatggaacattaaaaaattggtaatatatattacatcatcttaaatcattctacattgtaaaatttaaagaaaatacaaagccattaagtcactacgtatgacattttaaaaattagaaaaattattgaaattaaaagaaaattcaaaacatctaaccatcagtttctacataaatcaatgacctattaatattattttcaaccgttaaaattacttttagaggaaagcttaagccacgacaagccacatattaaaaattaggaaaaaaatcttgcaaatctgagaaaaacaacatataaacatcagctttcacttaactcatttataaaaaatataaaaataaggtcaactccacctcccccctgatgtgctatccaatcatatattgtttagcaaacatgcaaaactacattagatatataataccaaagaaaaaaaaatcccaaatatgaatagtcctagccactgcataaaaaattcgaagggacacactccattgtccttttacatgtcatccaaattgccataaaaattataaaatgatttaacaacacatattttaccatcatacatttttttgtaagcatgcatagctaaattaagaaaaagaaagctagcttgatg

SEQ ID NO: 31262 - DNA, 662 bp, Oryza sativa
agccataccacgcagatttcatctgacaataaggtctgtaattcctctgcatgcctttttttttcccatcatatataaactcacattttcatgttgtgtataaggcaacaactgaggcagagggcaaagcaaaagctccacagccagcatcctctgttgaactgtcccctccagatgtcgagcataaggtatcaatcgatatccctgcttaccattcagccttcacagactaacaaaataaattgtggtgcaaggcaaaggcagcacaccagctcctacgagattttccatctacagacccatcattacttgctaaagacatccagaagaaaaggtacattttcatatcatttcctgcctagaatgtcattctttccttacgaaaaatgtaaccgctgtctgctaaacagagacaggcctgcaacatcagctccagccgctaagaagctgttcagagacaacgctcccagcaaaattgagaaaaggtgaccatatcaacagccatctgaaacatatgcaaagcaacatgcataagcgaatacatattgctgacctatgttttcctctactatttatgcaggcagtgaacaatgaagtggcagcatgcagccagctagcaccgcttttgcttaatgatgcaccatagtatcaatgtctgcact

SEQ ID NO: 31263 - DNA, 717 bp, Oryza sativa
cccgttttggttgggggagtttttaggagggattgggagtttagagggatgaagttattaactcttttgtttagttgggagacatgggaattttagtgggctggggatgaggaattgaggaatgaactccctccttttcaatacctgggtagggggtggtaattgggagggaattcctcctttacttcgcctaaataaatctcagccatccgttttcattaatgacctaatctccaactaaactccatatcaatttccaccacctctttcaaacaagagtctaggaataaaaaatatttgaattcaaatttaaatttaaattggatatataaactttttacttataaactttgggtctaaagtaactttaggtatatagaaatactatatataaaaaaatttaaatttaaatttaaattcaaatttgaatcgggtatataaacttttgacttataaactttgggactataaactttaggtgtatacaaatactatatataaaaaaattgaattcaaattcaaattaatatttgaatttaaattcaaatttgaatcgggtatataaacttttgacttataaactttgggtctataaactttaggtgtataaactttagatgtataaaaatactatattagaaaaataatttgaattcaaatttaaatttgaatcgggtatataaactttttgacttataactttggatctgtaatatt

SEQ ID NO: 31264 - DNA, 537 bp, Oryza sativa
ggcgaattcgagctcggtacccgaagtggtctttagtcccggtttacaacccctcctttagtcccgggttacaaaccgggacgcccaatccggaactaaagatggcagcaccacgtgttttgcgctaccatctttagtcccagttggtgttatcaaccgagactaaaggtttttttttcttttttttcattggtttttactgcttgcatattgatttcctcaaattgagttgctccctacatccccaagtcacatataacaccacatatcacagataacatcacaaattcacagatttacataataacatatcaaatacataaaaaaattcacagattcacatcatagatcaaatatgacagggttatggataccacatacctaatagtagttgactaaatctcggtaggatccaccacataccatgtcctatacggaaacaacctgtggatataggaggagttccggataaggaaagacaaccagagttctacatggaaacgacaaggactactcggattgtatccatattggttt

SEQ ID NO: 31265 - DNA, 902 bp, Oryza sativa
gcacaccagctcctacgagattttccatctacagacccatcattacttgctaaagacatccagaagaaaaggtacattttcatatcatttcctgcctagaatgtcattctttccttacgaaaaatgtaaccgctgtctgctaaacagagacaggcctgcaacatcagctccagccgctaagaagctgttcagagacaacgctcccagcaaaattgagaaaaggtgaccatatcaacagccatctgaaacatatgcaaagcaacatgcataagcgaatacatattgctgacctatgttttcctctactatttatgcaggcagtgaacaatgaagtggcagcatgcagccagctagcaccgcttttgcttaatgatgcaccatagtatcaatgtctgcactcatatttacaggcatgacttttgtctaggggctcttacgcatgatggcagctatacatagctgttgctatatatgctagctactcttgctatattctctatgatgtacatatagctgcactttcaatctaccagcaagcaaggcagctctagaacatatgctactttcttcatgttctgaactgccttcctagtcagctttcatgtatgcatgagctgtctcctctatgtgtaattatatgttttattgcatgcgaaccagtagcagtgctctctgaagaccatatattcattgctatggcattgtctcagcaccaccaatttctgtatcatgcatttcatacttcacatataaaacaaggctacgtaatccgctattatccaaggatagataactgctctatttaaagtttatacactgaatcagagcaaactgtctgctctatataccttagctacgatctatcgtaatcttctatatatatttcctcagctatcgtccta

SEQ ID NO: 31266 - DNA, 504 bp, Oryza sativa
cagtattatattgtattaggcacatattgtcttcccactcatccatagtgaatgttcaaaattgtagttaactgttttctaactcaccttggagaacctttgagctagtagtactgatgccaatggtggatgatgccaccctgatcaccaatatttgatatgcagtggttgctcctgtttagagtaccttatgtatgtctatctttgatgtttatccttggtcgcacagacccttgtttagcttgggttgaaagtgctaatacactggaaggatttcacctactttatgtctctgagcatttgtttttaagattgtgaggaagatgcacatgcacatacctgtctgagtgtcccccttagcacatacttgaacttatggaggttagggatgaatctgtctacctcacaaaaaatgtattgaagcgcgcaagtgtgcacatgaatgcattcactaggatttgaaccatggtaggtgagtcatacaccttctccacctctgtgatt

SEQ ID NO: 31267 - DNA, 577 bp, Oryza sativa
agaactaagtaaaaaacaggtttagtaaaaccataaagaagagggttcgaaccttggtcactgtaacgccacctttcaaatacctaccactgagctaagccaaacctaattgttgcttttgcttttgcttttatttagccagtataaaggccagcgccgctgtagaacatatattctgatatttatatttatatatatatatttaaaaaacagagagcatcattaatcatttatatgtactaatgtacgcacgtagattgaagatttgaagaaaaaaaaagaacgaacaaggctgccgtgatagggagtcgaaccatggtgctagggtacacaagcaaatggtcataccattgcaccacaagtgcattgcttattaatggccgcgcatccttttaattagcctgtacaaggggtcagcgccaaatacattggcgctgaggccctgccacgtcgcgtctcgcccgccacgctggcgcgatgtcagcgccagtcccattggcgctgatatgaacaacctcagcgctaaagaggttggcgctgagccgacggcctatttctagatatagtttttggtgga

SEQ ID NO: 31268 - DNA, 613 bp, Oryza sativa
cccgtttttttgacaaattggtccttataaaaaactgttttcgaaactagtccataccaaaaactatatctagaaatatgccgttgggtcagcgccaacctttttagcgctgaggctggtcatattagcgccaatgggactggcgctgacatcgcgccagcataaacggcgagacacaacgtggcagggcctcagcgccaatgtatttggcgctgaccccttgtacaggctaattaaaaggatgcgcgcccattaataagcaatgcactcgtggtgcaatggtatgaccatttgcttgtgtaccctagcaccatggttcgactacctatcacggcaaccttgataaatctttttttttcttcaaattctccatacacttgggtacattaggacatataaatgattaatgatgctgtctgatttttaaaatatatatatataaatataaataatagaatatatgttctacagcggcgctggcctttataccggctaaataaaagcaaaagcaaaacaacagttaggtttggcttagctcagtggtaggtatttgaaaggtggcgttacagtgaccagggttcgaaccctctcctttatgtttttactaaacttg

SEQ ID NO: 31269 - DNA, 640 bp, Oryza sativa
agtcatgttgggtactatgtaaaaccaccaatggttggtctccttgtaaggtaatgcatttttttttgtttttaccaaaaaagaccattgctatccattctttcccgcaatcaatattccaagggaatagtgatattaagttgaagaaggtgatagttactagttaaatgaacagactcgtgaactggactaaggctaaatattgtgacctgaacaaggctaaattcccaagttttcaggtgaatggaggcactagtttggagctcgttatattcctatgtgctattaatcaacaaatgctttcatgagtggatgaagatagaaatttggaggagaatatgtgcatatagatatacctaatttgttactgtattttgctttccagtggaaggatgttttagtctgctactctgcttcatgatatatgttttaaggtgcccagtgtagattttggagaagcagagacaacatttttactcctttaaaagatgacagtagtggtggttgtcgatctgccaccacatcttctctatactggattttcccttaaatttcttcaatattacacaatagtacttccacatgttaattctccttgtttgccattaagaaaaatcaaatttaatatggaacagcccaa

SEQ ID NO: 31270 - DNA, 641 bp, Oryza sativa
ttttgtggtatcgtttgtgtctaggctcgcgtctctagtacgttctagcctaggaccagcacggtacttgactttgaaccattattcaactttgcattctctcatttgagcatttgcattctctcatttgagcatttgctatccctttgctacatatttaagcctacccagagctccacagatctgattgcagccgtacagcaagtgtttgccaaggcatcgatacatccaacctccattggggtgcttggttaagtcggtgtacatcaccattccgcttgctttagtaagaacttgtaagagcttggttaaaagcttgagtgtgtgtgatatttgagctgccactacctagtagttgataggagcgtgcatatttttgtgtgtttcttggttgctactaaccatggtaggattgtgtaagggaatacgagaacatcgacttctacaccttcgacgagatatgacgacttctccatgtgatgcatatgaggtacatgactattattttgaacaagtgcatctaagttaccattctatgatgggaagtatgattcttgtgcatacattggattgggagctagtagtagacaatgaaattgatatatatgaattttctgaagctcaaatgaataaagctgcta

SEQ ID NO: 31271 - DNA, 673 bp, Oryza sativa
ttcttgttgttcgatttgcaataaaaaggcaggattgtgtgggtgggtatggcaaagtaagaatacgtgccattctgtttatcaatagctcggtcacaaatatgtgttgtttttctgatgaaaataataatagtacacatgtatttaatctacaaacatctaagcatatatgtattgaaaatcgctgtctctgaatacccaagcactgcaggtggtaccttgatccatcatacgtcttagtcattcttgcaagctgaaactgccaaagtacttactgtatactgctagagatagtactccttcgtttttttaatatatatcatcgttgactttttaaaatacatttgatcattcgtcttattaaaaaatatagtaattattatttattttattatgacttgatttatctttaaatgttctttaagcatgatttatttatatatatatatatatatatatatatatatttgtgtgaaaaaattgaataagacaaatggtacaatatttgataaaaaactaatagtgtcatatattaaagaaacggatgtagtatcatagtgctaccagagtacaaatttgcaacgtatgtctagaaaaagtgtcctaatgcatcaatattcagcccaaaaagggcttatgatgttaggggcaacctactccaaactttttactc

SEQ ID NO: 31272 - DNA, 582 bp, Oryza sativa
ttgcaaatttgctgtgatataaaagtgagatttgatcatttgatcctgatcacgcacgacctatccactcgcaaaccactgaaaacaaagttgattatcttgtgctgtccagttaaactggaactgaatttctttcctcaaggcacagactaccaaacatgttcactcttggttgtgtgaagtttgatcaactgcaggcatttatacagactaccatagaaagtcataggtatgtctggcaaacttgcccaaaatcatgctagctccaaaactttggcacctatttgtaaggttgccaaaattttgcaagcacatgtttgttcgttcattgtgcatttttcttgcaaatcgtaggcgaaatatagttagacacaactacaaaattatccaacacaggctattaacatcgaatttccagcccatgaactcacttccaggtccactactctcttcggcccattagggtttgctcgcgagcatctgacaacgcccgagcctataaaatgcgtccacccccctccaccgaaggataccatcgccggcgcagaagccttcagtgttcgatccttcggttctcttttc

SEQ ID NO: 31273 - DNA, 636 bp, Oryza sativa
taagaaagctatcaatattagaaaacactaattccatctaaaacagcaagagctctacgtatttaataggataggagcggagaagctcacaatgattttcagcaaaatgaggtcttttgtcctcgtgtagtccatttactagctcaccaccgtctttctaagaggatctcctagttgcaactacacatcaaaccaacagaatggatgaaccatgcaactgtgcaagagtggtgagggaaaaccatctcggcacaaaacatgccctagaaagtactctcaagtcgatgattatcatagtctcccgagagttgtgaaggagagaaactcaagagttttcagaaatctcactaacacttcaagatccatcacgggctcatggccaagaataaggaggaagcacatttgtgggtaatggcgtgggcgggaagtgaagaatcttttttttgaccgaaaaatgattttttttttacggaagggagtgaagaatctaaccgagctatatcttgtgcaagataattcctttctttctttggtcaaggataatcctaactcccacggccagtgaatatataagacaaccttcttaccttgcttttaaaaaaaaaacaatgatgttcaaaactactacctccgact

SEQ ID NO: 31274 - DNA, 583 bp, Oryza sativa
  unsure (1)..(583): unsure at all n locations
aaggtccgcgacggagcgcagcgcgtacgggtcgccnagatgtcccatcgccgccatcgcgtgcggtccctgcagaaaaatcgagcgatcgcgggtgagtagccccgccgccgaggaatttcgtcgaacacgttgcgcgcggcggccggcgatcggagccgaaccggctcgatcacgatcaggaactcgcggacgaaccgagcgggcggaggcgcgcagcgtaggaagacgagaggcggagagggagaggcttgcttactgctggttggtggaaccggatttggaggggggggggggggatttggaccggaggagtcggagagatggcgagagagaggagcggctgcttcgcgagggaacgaaggtgggagaaggaatggcaggagaagccgcgcgcggataatgcctctggtgtctcgaggtgaggaggaggaggcggaggagatgagccgtggatgattgcaacggaaaggaatttcaaattctggtttgcgttagaagctggctcacgcctgttcgtgctagcgctactgtctcgatgcaggtaggagtagtccatttttctctacaacacgaaagcacc

SEQ ID NO: 31275 - DNA, 580 bp, Oryza sativa
cccgagtcagcgtgcggtcccgactccgactccgcgggcgcggttgcgcgctgttggttggagtacgccgcggcgaacgacgggaagagtggtggactggactggtagcgtgacggtggtggggttaggccccggggctcccgtgttgacgacgcggcgacccgcccgaccgtataaagggagacgtactccctccgtactcgtaaagaaaatcatttagaacaatatttaagttaaatcttagaaatataaatcatgaataatcacaagttgttgagtttaaaaatacaaaaattatataaatagatttatcttaaaattaatttcataaaagtataaatatattatttttcaataaatatttttataaaaataagaagttaaaattgtgttttggagatcgtgccgtttaaaaaacgatatcctttacgagtacggagagagtataacacgagtacacgaggcccggcgcgcgggcgcggagcggcaccgaaggtgaattcgccaaaacgtggtgtggtcaaagagaccgccccggccttttggcggacggcgacgggtagctatattaatcgatcgg

SEQ ID NO: 31276 - DNA, 595 bp, Oryza sativa
tttataattttacagggatgttttaggtctcactgttgactgtacaaacatactgttacataattatgtattattccctttcttgttaacattgttttgcatgtttttgtttgaaataaactcttccttttatcaggtgcaattgattatccatcatttcttacgctcctgaagcagctagttcctcccttatctgctcagctgtctgaccgacggtctagcatagtaaaacaggtatttgatttaacaccaattcttgaggggctgtcaaattagttcatccaaaaatatttcattttagaagtacatgtgtgttatggaattctgttagaaaaaaaagaattcttattgaatttgcaatgactgaacaaaccttggtgagaaaaaattgctgaccaagtttttttccaggcatgccatctacttaatatgctatcaaaagaactccttggtgattttgaagcatgtgctgaaatatttattaccgtcaccataaaagcaggttcaatgttttgcaacagtaagtcagtacttttatactttctcagtagggctaacatactgatcaaattatcaggtacttttcaagcttgtt

SEQ ID NO: 31277 - DNA, 638 bp, Oryza sativa
agatttgaagaagagatgaggccagtgaagttgacaccaaaggtttttggtatggttcttgtttctcatcatattgcaaatatttggccaaagcgtaagaattaggccatttgatttacttattatgtcaaagtgacaagaaactgtgtcatgaatacctccatcctacacatgcaacttcctcacagaatcagtcatgaaatgatgttcgaatagatcattatttttgttttactccacaaaatcatgaactcttgaaaatgccactttgattacttagcatgtcctgacagccttacaacacttaaaccagcaatttatatgtttgacctaatctatatctgtttcactgtgctatttaggttatgctccagcaagaaatgacttcctgtttgagagggtatgcattttcttactatctgagaatgttccttctttaaaatgagaagggacaattagggcgtgtgctaagtcagatgtcttcttcatctccttgagctgtactactgtactgataatttgtgcataatcactgaatcgaatctgatatatttattttctttatttctttctacttgtagagactccaaagtttcattttcggtaagttacatctacctatctgtcaattgtacttt

SEQ ID NO: 31278 - DNA, 603 bp, Oryza sativa
cacacacgtgccaatcgagaagagatgttgtgaccaagttgaagcctgtgctgctgtgcccaagtagcctgtccgtccatgtgttattgtgttgtactactaccatggtgtgtactgctactagttgggcacagtcagatacatcggaccaggagattcggagatcgcttcgagctggatggactgctagcatggtgtacaggaaaagcgacgtgaaggagcatgtccgtttgacttgagcagcagaaactatatatatatatgcgattcggcgaaggcctacaggctacaacttgacggaggcctacaggctacaacttgaccgacttgaatgcatggtaggccatgcgcacgtttcggcgcaagtcaactgcacatatggcaacgcacgagtacgacactcttaagacaggtcaactgtcctaggccagggcttgttccaatgggcacctgagcttgggccatatgtgtatcttgtatctcatcctaaaattttaaagccatgtgacatcgaatgtttaaacacctgcataaaatattaaatatagtctaaaaaaataactattgtacagattgcgatactttgcgagacgaatattttaa

SEQ ID NO: 31279 - DNA, 608 bp, Oryza sativa
ttcctcaaggcacagactaccaaacatgttcactcttggttgtgtgaagtttgatcaactgcaggcatttatacagactaccatagaaagtcataggtatgtctggcaaacttgcccaaaatcatgctagctccaaaactttggcacctatttgtaaggttgccaaaattttgcaagcacatgtttgttcgttcattgtgcatttttcttgcaaatcgtaggcgaaatatagttagacacaactacaaaattatccaacacaggctattaacatcgaatttccagcccatgaactcactcccaggtccactactctctccggcccattagggtttgctccgcgagcatctgacaacgcccgagcctataaaatgcgtccacccccctccaccgaaggataccatcgccgccgcagaagccttcagtgttcgatccttcgtttctcttttcgtttttgctcgtctcgtctgtgttcgattcgtttgtttttggatttgtggtgaatctggtgattgtgttcgtgcttcgtcatctggtcattgggaggattagtctctaatcggttcccaatcgactcgttcccttgaagcaaaatcggcctgttgtat

SEQ ID NO: 31280 - DNA, 674 bp, Oryza sativa
ttattttgcaaatccaaaaatatcaaatgaataaatgtaagttaatgctttcctgaaaaaaaatgcccggttaatgtgtagctggcgagcatatcttcaacctttaatcgtgtccgtctttagaaatttccttgcaggcatgagctagcaatagctaatagatattactcgctagatgataatgagttcacaccaaagatatgttcatccccagttcatcatatatgtttgagttaatcctctttcatatgcgcaaaaggaattcaatttacagctacagaaatgattttcgctacattcaaagagttccaaggattgacgatagctgccatcggatgggccatatccgccacagaatggatgatttcccccttcactaataaacttgtaaacaagggagccgccttcatgctcgctcgccatcccagcttgcatttgttaaaaagcatacatagttatcttgttaagaaagagaacactagattactcgccaaccgtatttttatcaactctacttttattggattgtttaaccatttattgcagttgagtggaaaaaacaatgaaactagctacgtaatttgaggctcttattaaagccccattggtctaaaatctcaacatatttgttgcaagtcatcaattatattattaaaatttagtaaagccacaat

SEQ ID NO: 31281 - DNA, 691 bp, Oryza sativa
aaactcccaactttctttaaatttttaacttttttcaggaactaaacacacccggagtatgtgagtctgaattagttctctgaaagtggtcggtgttttggcatgttctgttctgtcactaaaaaatgtaagctctaatggcgccttttacgccaactttggtttcttattagttcctttcaatctagttgcccagcatagacccaatcaaagccgggcatcattttcactaaaaatgtcgaagggagacaatcgtgggatcgaagatcaactagaatgtactcaaccaagtagcgatgttatttatttaatcttcattagtgatccctttgagttttccacgagagcatgtagttgagatataaaatatcttcatcttggggacttgcatatcctctgcggctacatgattgcaagagaaatccatggccaacatatggagaaaacgctgtgtaatagatactataaaaaccaatattaattttatcttagctttattaattgttatctctgttgcgatgtaactaatttcagtaacacaaaagagaaagggaaaagagaaacatcgttggtacgtatgatatcagctcagcgtcaactcttagtatctatcttatataagtccattaaacttcctacaaacgctctcaagccgccacgtgggattcctataaacactcctaaatcgcca

SEQ ID NO: 31282 - DNA, 663 bp, Oryza sativa
ttgggtgagcataaaagaaattcttcatggcacggttcctaggactaaattgcagagcgtgatcgagcctgcatgtggctaaacgaacaaaagaaaaacaaactttaaaaatgagagagagagagagagatcaggaaggcaaaggaaagcgagttgggggagaggttgttttagtatctcaacaactatgcacgactacgtcactgatgtttaaagaactaggaaggtagcgcatcagcgcgggcatcttatttagtggtgtttgaaattttgttacgaatgtttatgtatatgattttttttaaaaaaatattttttctcttctaaatatgtgtatatcaataatttgtttgggattgttttgaaagttagtttcgatcactggacgtacagacgtgcaaagaggggatatgtttctgggcatttaatttatctatacatatgttggaccgatgggtacgtcaggtcttttgagggggtgtctgtgacatcctagttcgattagatatggcctatgttttatttaaaggatgtgatttgtgttgtgtgcacttcagtagtactatcttgctagttaagcaagagtgcaactaacttgtaaggcattgtccctctaaccatatcattttcgtgttgactattttacatgaagcgacaacgaaa

SEQ ID NO: 31283 - DNA, 575 bp, Oryza sativa
tgctgggccacagtccggtgataagcgcctcgccagcgctcgcgcgaagtaactaactagatcaagtttgttatagagataaaatcaattggtttgttggttatctcttaattcatctggttttatctcttccgcatattaacttctgaaatcttggcgcgtaggcagctaccgtcttcggccatgggccgagcctatgattaatcactcggatatgcataggttgcttaatcacccaggcatgcacacacatacgaccgtctactgtagtacatgcatgcatgcacgtgattgcctcaccagccaatcttcacacggctagttattggttaattatacatgcacatatactaatccaagtatatatattcccagctgcctgtgcatgcatgtatttgcgtgtatatacatggccgagcattgcgtagaaatgataagctagccaacttacaaactgctttgttgctttgtccatcatgagtaagtcttgtgtacacatataatagccaaaataccatcaaataggtggacggcagggctacgtctcttctccatccgccggcgcgagcgggaga

SEQ ID NO: 31284 - DNA, 612 bp, Oryza sativa
agctcggtaccccagcacaactctcctctccccactggcccacccttcccaccaccccatgcacgtacgtatacatacatacactttttccgtctccaataattctttctctcatcttcctattttataaataataattttaattataaaaatattatgaagaaaacaaatctaaccatcaatttttaattaaattggcagacttataatttcatcaattttcattcaaatcagtcgagttataagtttaacaattagatttaaagacataaatatttcaaactgatgaacgcattaaatatacctcaataaaaacaaagtatccttgccaaataacaatgaaacattgaaaaacatgaaaacatatattatatattcttgaatcgttttacatagtaaagatcgattaaacgtgctctatagcactctcaagtcaccacgtatgatattttaaaaatttgaaattcaaagagaaaataaattatatatctatccatcggttttcacttaatttgatgtcccattatttttaactattagattgcttttctctttataaaaaaaactttaagccaccacatgtcatgtcttaaagatccttagaatgagaaa

SEQ ID NO: 31285 - DNA, 611 bp, Oryza sativa
gatcaatcaaggatgctatctttcctggacacttaaaagctcccaagaaaagtactgagtaaagcatctgtctccagcattacaagcacttcttttggctgtatgttcatgtccaagaaagcttttctggacatctgccggaaatctgtgctctagtactagcctgcagtatgcgggaagcactttggcagcatcagcttgcaagaataaccaagatgcaattacagtgcttcagtctcagtacatgcttagacgttcgtagattcaagtattcaacacatacatgctcttcccattctttctatcagaagcaaaaaaatttatgactgaagctacagagccttaagtacttccaacaccgacctcacataatcctgtctcttcgtgcaaataactttatgcatttttttttcgaacgaaaggaaataacttgatgtaaaagaagatataacaataatgctatctttcaaggtaaatatgagcatctcggataaaatattcccaagcaacacacaagcaaacatttgactccacaaaacaagattacaccgagacaacttcttatctgcttccacaagatacaattgccatgacctttgaagggggaacaa

SEQ ID NO: 31286 - DNA, 508 bp, Oryza sativa
tgggatacaaaatagaaagcaatgatatattggaatgtaaataaaggagcgacaccctccaaaattgatagttgaccatggtttctctggcaaaatatcatctaagaaaaagtccacctttgccatgttggccaagtaggcaaatgataatgagtctcgcattacttgggtgggactgaaaattcctaattggcctatgagaatgctgcaacactgttgaaaggctaagccatgtcaccattggatccagcagtgccgcttacactgctaccttcgaactgattgtaccccattgagccagtgccccttgcaacatccatcagccatccctccctctggattggtacctccgtgctcgacaatgagacagatgcaggtatgaggccttgctcacggagcttcttgaggcggtcgttgacaatcttgaggcgtgaatttgccatccttccgaggctgataatctgctcgatggtgagaccatcgaggcttgggtggcggccattgatgg

SEQ ID NO: 31287 - DNA, 558 bp, Oryza sativa
tgtcttcattttcttcagtatcaaaggttcataagaactatccatggatttcgacaacattagattggggaaatctctggatttcttgcgtatgtgatcaaaaattgtgttgttggtggcacttttgcattctgcctctactggttcagaagccaatacatctggaacatctgaacatgataacacaaattttcatgcaagagcacaaatgaaacacaatagatgtgcatagtgtcatatagaattgtgttaccttcataatcttcttcatgcagtagagtaaagcttggggcctccctgtagtcatcaaaatatcaccttagaagttagaacgctatattctatattcagatagtagagaactttcggaaaaaatggttataaataaagaaataattacaaggatgacgaatacatgttagaaatttcactaatagctgtgatctattgcaattctgtggtgacatattgcaatccttgcagaaaattaaataaaaaaaaaagtctgtgtgtagaatgatagccaccggataggcgttctattttctctgcactgat

SEQ ID NO: 31288 - DNA, 596 bp, Oryza sativa
aagaagaatactagtataactctattttacagcgaagattgcatgaaaacctcgactagttcgtaaaattttatctcaaatctgttagtggatttcaggaagcacagaagcacatataaagttggcttgcaatttacacaagaattacatttgggaatttccgtgccgcgatcatttccttcagttcttggacagaagatgacttttatacctaaccagatcaactttgcttgcatttgtaggatgttgttccaagtgtaattaagtccaaaatagcttgaagaaaccgttggagaaaatagaaactcccaacgctgaaggacaaaaaattgttgacctgacaaacttcataagcaataaaaaaatgaaaaccataaacccaatgtttttgcctaatatacatcgattctcagtatacgagactaactgccctaaaaaggagattgaaggaagccctggatcataacttgctaaattctactttccaaattaaattaatacaacactaaattaaaaattgacgataattacagcatcatagtattaactttgaattcaacaaatattaatttttggaaaatgacaaataaagagtc

SEQ ID NO: 31289 - DNA, 701 bp, Oryza sativa
  unsure (1)..(701): unsure at all n locations
agaaaaaattataaaagggagagaacaatgacagacaggtgccttaaaagaaaaagaaaaagaaaaagaaaaactgccaaaaagagaaacaaccaccataaaattttgtttcccctaagtggcgaaaaaaaccgtagatccgattcctataaaaggcaaaaaaaaaaggggggaaaaataaaagctagatccgattactttaaaaacggaaaaatgaagtctgattcctataaaggtgagaaaatctgaaaaaacatctaaaaaatttcgtccaatttcctaagaaagtggcgaaaaaaaaggttcgtaaaaaataaaaagctagttcatacaaaataaaaaatacgcgcgagaaaaaaatagaaagggcaaaacaaaatccgatttctaatcagnatatatctcttctctatctctaatctaatctaactatttaaaaagagaaaatacacgagaaaaataaaaacagttcaaaaaaatgcgtgagaaaaaagtcagaaaaagcgcaaaaaaatgctaaaaaggttttccatcttccataaaaaaacgtgcgagaaatattatttccatcgtcggttatttttttaaaaaaaacatacgaggaaaaaactggtagaaaaaatgcgcatttctaaaaatgatttgaaaaacacgcaagaaaaaacaccgtctttaaaaaaacaaaatcgcttcgaaaacct

SEQ ID NO: 31290 - DNA, 502 bp, Oryza sativa
tgatgcaacaccaactccaaagataattgaataaaaacatcagacaatgaggagaagtaattgacctacatttaatttgtaataactttatatgtctatattcgtaaattcaaattcaaaataatctcaaaattctagattcctgaagtgttactagtacaatgaggcagtcattaatggtatttttatctctaataaggcctgtcacaacttgaatatcttggcaactaccaactaccgagttgattactggtgtaccttatacaactatttcattgaagcttcgttgctggtttacttgtgaatgagattaagtaaatattttttatattacaagaaacatgttagcttgtagagctgttccatctcatactggaattttattgttcatacataccatactaaccttatttggttgctggttttctcctggtaattttgcagcttgttggacgcctatcagagggaattaatgactcaactgccttattttaccagcact

SEQ ID NO: 31291 - DNA, 742 bp, Oryza sativa
actttcgacgcatcggcaccctagttttactcgcgacgagttcttgttttggatttgggctacatcggtctcgatctccagcaagaaagtaagttccatcaaaatccttcctttgcatcagcgacgaaattagtacttcctcggttaggtcccatatactagttgctctttttgcttgcgttatgcatcagatatatggcatgagctatgatttgctatggtatctgagtttagatatactaatactcatttagcttgtctatcttatcggatatatatgctctcgctctgaatcgaactgcgttcagagttcagggtttctatatcaatgactctgaaaagagtccatcacgctagaagagatgtatcactgcacttgtgatacgacccaagtagggatggtatcccgatcttcacggtgtaggatcaagaaccgatagctagtctcaaagagaccaagataactagctgcaaggagccaagataatagtacaacctgacgatcgtactcgaagccaaccaccatctctattacggcaacctaaatcgagggttcgcccaactacactctaagttaccaaccaacacaacctggaatcaatcaaggaaaaacctcgaagggaccaggagcaccaattggggggcgttgaacgccacttctataatctcacaaggaaatcacaagagcaaagggatagagatctctctctgaatttgttagcacacagctgaacaaaagggg

SEQ ID NO: 31292 - DNA, 608 bp, Oryza sativa
ttgcgggtataaatattttgttgtcataagtttttaatttaatctacccgagcattatatccatataataggttagaaatttctatcgcgagctaaatatcggacgaaatcctagaaatattatacgatttaatttagtctatgactaaatgattaaatataatacatggctaaaatccctagtaattaaatccgaatttctaccgtgaatcgattacttatagggattacccaaaaataatctataataatctataagaattcatctatttgtttagtcattaactacatctaaattattaccgcgaattgatttcttatagaaattgccaagaataatccataatttatattaaattttgtaattctacaactataattaatctataattaaattctaattattttaaattttctaaacttccctgatctcccctaatttctatttatttttttcttttcttttctctcctctttctctcttcttttctttcttctctcccagctcctttctcccttcctctctctctcggctctttgccctcccggcggcgaaagcggtggacgcaagggggggaaaaggcggcggcttaccgacagcggcggtc

SEQ ID NO: 31293 - DNA, 609 bp, Oryza sativa
attcctgcagccctgatctgacgagccacccttgttggagtggccttgcacgctcgaggaagtactcatgttgtcgccgccgccgcctctcaaatctagatctgacgagcctcgggctagatctaacgagctcggtgccacagagtgccgtgtcgggggcattggtcgagggggactcgctcaccaacaacccaattgcattggtgggtaaaagaaaagggagaaaaaaagaaagaagggaaaaaaaataagcactaacatatgggccccctgactcaactgggtaaaactaggtcatgaaccccattaaccaaaacccgccccaaaaattacccaaggaagtaaattggactgaatttattgggtaaggaagtaacatttgatattggaggtgaatgaatacaattaaaatggaccctattttcaaaagtgaaatggacctggtccctggctttcccctttggcccccagaatcaaaacttaaaccttgcccaaccggttgatggagaacccggccaaccactacgccccccgggccgtggcttcgccgcgtacctattttccgttggcttttttttccgttacgggcttggcaattaaccaacccca

SEQ ID NO: 31294 - DNA, 654 bp, Oryza sativa
cacccccccccccccccccgggtcccggcgctctcatctcagccacaaatactcttatgacaataatacagcaacgcatcagcatcatcagcttaagcaatttgaggttttaaatccagatatttctctatagaagtgttgcaaaaataattagccttcatcccctgtagctggacaaggcaagcctctctaaaatcaggtgaacatctgtgaatatctcataacatcatctacatacacttctgtaccctcaacattcatcgaagtaccatctgctaacagaataaacctggaccaaaaaaaaaaaacaatagaacaaggtatacatcggactggactaccaccttaggccatcaagacgcacagaagcctccctgatgccatccatagcagagcacaaaccaaataatggaagatcagaagtgcacaagtcatttgggtttccttcagctaacatgaagctgcagtgatcttccaaatcattgtaagtattttcctctgacatgaagccaagtacagctccaaaatcatcatcatgagattggagatgatgcactgatgaccacaattctgtggaagagtcacacaagccttttccatcttgcttacaaggatgatctgtgtatggcgatagagagttcaaacaagcaccgt

SEQ ID NO: 31295 - DNA, 609 bp, Oryza sativa
tgttacatgtatccggaaacaccccgtacatgtgaaggtataccttatcgggatgttccataagtcataggatagagggtatgccttattcgtaaccctgacaacttcaaaatttcaacccaaatttggaagtttctgctaacaatttgaactttcaactcgaaattttagaaaacactactcgaatttttgaaacttttcaactcaaaactgaaaccttcaatttaacttttgaaactttgaacttatatattaaaactttcaacgcatctatttatttattattttattataacaaattatgcttagtgcttagtggtggaggcgtggggacacgtgcgtattgtgctaggtgcctcctgacgccattgcacacaccgtacctctatttaagaagagaaagggacattttaaatattgatgtgcaatttgtgccctaccaaccttttggtaggctctattttgtggtttagattgaacacaaaggttagtttggcaacattagctctctacagtggtggacgcacccattaggcagggagggtcggccggtccagctatgatccgtgtcgccccacgcagctacgccacataaaccttaggggtgca

SEQ ID NO: 31296 - DNA, 2299 bp, Oryza sativa
aaagaaaagtcagtatatgcaaagtttagagaatattactgtatgtaaaaaatcagcatatacctctctatgtaaaagtgcaatatatacttcttcgtaacaaggtccagtatgtaaaccactatggaaaagcctctgtatatatgtggaaaaatgcagtatatgctatcttctagaaaagttcagtatgtaccacatacaaaattcagtacatactatatgctgtcgtataacaaagctcagtacaaagcctcccatagaaaaattcagtatatctgtgaaaaattcagtaaatactggtgcgtatcaaagttcagtctatgaatcactgtggaaagattcagtatagatgtggaaaatgcagtatatgctatcgtccaacaaagtagagaataaagctccccacataaaaattcagtatatactattgcctaacagagagttcagtaagaaccctgccacaccaaaaatcaatacttaataccgtctagcagattccaaaaagtttccctccaaagaaaaaatgagtatataccgttgaaaattcagtacgtactaccatctacatttttctttatgggggtgggggctaaaacagcattaacttcatccacccaaaaaaccatcatatgcactaaaaggggaaaaattagcatctgaaactgagagagtacatgaaccgaactacacctaatccctctctacaggcatacatgtattcaatttcaggtggcataccttggactgtggtgacaaactaattttcctgtgaccctgcggcaaagaagaaaattttaggcaacgtgtcttgatcttgccgtacaaaaataaacgaatactaacctgctgctttggatgaaatccactgctatggcccatcgattttgccattgttgccccgctcctgcattcagccgactctagatcgattacttctgcttcaggaacacatgctgttgagagaggatccatcgctggaggaaggggaggagtcatcactggaggaaggaacgaactgctatctctgtaccgccgccagccacacagtcgccgctgaatcgctggtccgtcgccgcgccgccccccaaaaccccaattttcgggataatctgtttggcctgttgggagcaaaccccaaattacgggataagcagtccggtcttttaattagaaaaactaatcggatccaccgagccaaacccgttatgatgagggagggagtacatatctgatcgatcagatgaacggtggatgggagagggagtacgtactccctaggagtatagaaccattttcctatatatatatatatatatctcataatccatatgattgttatgtaaggtcgttttatgtaatcggaatactatctaaataatgaaaagaaatactgtaattaataacttccagtctctacaattgtcggaggggttgcaaatcttatgtgatttttctagtggtcaagcctacataaataattgtagtgtgtaatcgattgtggtgggacatgcacaaccaagctagaaaagcaaataataattcgtgcgtacgtgcacatgttgatcgggatatgcatgctacggtgtgagatacacgtacgtgctgatgactcctgctaggtaataatagtaatgtaaaaatactccatgcataggacactggagctagcgagtgctattttttttaaaaaaaaataacaatcatttgactattcctttttctagaaaaaaaatatttgtgtaaatagagagatcaggcatgcttaaaatacttttgatgacatatttggtagttctcttaattaattaagtaattgaataaactgttggtcaaagtatataaaaacagagcttatatatattagcaattagctaacattaatacccaggctggacaaaatatccagtttggaacaataactaatcaagtgtaggccacgacgggtatttatcatatatatttagtggaaagtgagtatctataagttgcaaaagaaaaaatattaaatgtggacagcttactgagatagctagcaacatcaatctcacctatctaattaatatgcacttttgagatatatattacatcaatcgactaaatcatttcccgtagattgtactagctactaatggattggtagtggatactgaccactgaagtaatacatactctacttagatataatgttgttgtgtatcatggtataaatgatccagtgtatgcatggtaatcggtcgagactatctagataatacatccgtcgataattttttaaaaaatattatcagctgctttatag

SEQ ID NO: 31297 - DNA, 4738 bp, Oryza sativa
cggagtcgaacagcaaggcccccgcccccgcggggagcgccgggccggcggcgcccgatccccgcacgcggtacgccgaggcgtcgctgctgctgatggccggcggagcccgcgtccccggcgtcgtcaacccgacgcagctcggccactggctccggataaaggagtagaaccgccggggccgtgaggcgcacggtcgccgtcgcggcattggcggggtgggtcgcttgcggtgccgcatgcacgtctcccgaagcgatcggagcgaaagaagagaagaacggatgcttcggacatggcaagtggttttactttcacctcgtctcttttccttttaaatgctttttttcatgttaagaaaaaaaaatcatgtaggtttgaacttgaaactgaaggcgctagcttagcttccggtgtgtttatcccccaactctgtgtctcaaaagtgtagcaaatggttgacgaatgacctatcaacgcacgatttgttgtgcttagtggatacatatatgtacagaattaaacgagatgttatttagccccgttaatgccaacctgccatgtgtgctactggtatgtggaacgatggttacatctcgagtgaagcttttctctgtttcgtgagtttgatttcattcttaatatacttgctgtactgtttccagatttgcaatgttatagtttcggtccagatgattaaatttatacgtttagtccatccaacttgttttaaataaatcgaagaatctaaaatctgtggttgccgtccaccgatccggttattaatctagtatttgcaaaaggcaacaatgctttgtgttggaaaattttgccattttattgcacacggttgatgaagtggtgatttattctttgtgtatattcatggttaggagttaggacgacgccattgtgcattcttttttgtttcagggaaacaaaagtgcaacaccctatggtttctagtctctcctccttttttaaattagaagaggggaagtctttgttcttgttcagcgggctattgttggttttcgtcaaattgttcaatgtcgtagcagccagataagtttaaattatgcagagtcaatcgaaggacttgggtactttgacagtttgacccgcttttttatgagctattttggtctctgctgctgcagtgtatacgttttcaaggtttgatctcaaaattccgcgcttcttcaagatgaactttggttcatacacggtttcttctgtacaatctcaagctcaatttgaaacgagaaccggaaacattttcgcgtgaaaccagcaggagcaccaatagctattctcatttcagcaaggtgttgattccttgtggcgagacgattgcaatcgctgtacccaaagttgggcgatatcacattgggcaccgtccttgcgatctgatcataatcaacaaccattccacattagtgacgaccgttgcgcagaagtggttggcctcactgctgtgtcgacagcgacggagatacacgggagacgcgtactactggactaagaggtacaacacgccaggtgactgacagctgcgggcaacaacaaaagataaccgattggggcaaaggtagggaggcaggaattggcgccatcagaatacagtggttttggtgtgatataagtgcaacactagtgtttatccagatgcattccgtagacacacaaaaaatgaaataaaatataagtgtcacaggggcgaagtgtccacctaaatatgcattactttgaatgtgcttacacacctaaatattcagatgcgcttacacaggacgatagaaacacaaagagcccctgaagataacacaggggatcatcatatcccaaatagaagagaagaggtatgtgacattatttcaccaacagaaacacactgccaaatgccaagcacaaactaatgctagcatcctaggtcatatctttgctgatgttgcaccgaagaaaagtggaaatcaaggctgaagccattcacatcagagctaccggacacgaagacatccacttaacggacatacatgaagcaccgaaaatgaaagttgccggagggccttgtaccacacaatcatgctgacttgatttccgacgttcaacggttgtggtcgtcgaaggccaccggcatcgatgccctttgagggaaggaagccaaaggggagagcacccaccgaagatttttgccatggcctcccacatcaagccatcaagtgttaggttttattaagttgcaagtaagttcaacactctccaatgttctttggggaaggaagcccaaaggagagagagccaacgaaaattgtggccaaagacatccaagcaaaaatgattaagacgaagcagggaactagcaaacatcaacgacgacgacgacagcagggaaggaagaccaaggtgagtagctggtgaagctcaggcatgcacaaagagaagatgaagggaacacggatgctgtcctcactccttagcaacaatggagccattggtggtcaccattagccatgatacttgcaacagaacctatgaccaaaatccgtctaaaatgggaagaatcgaagggaaatgagttatccgggttagcccgtggtgttaaggcctcgtccaggttcgttgtaagctctagataccgagggacagtagacattggcgttagatctaggtgtgtcttgagctctcctttgcaggaaggaagaatcaattattgatgatgagaagggcatcgaagaggaaaaggaagaaggccacctcaactagacaatcaacggttaccaatagatgaagaaagttgccaaatctaaggaaaaggagggaaaccacaggaaaaggaagaagaatgtgaggaatgtcattgagtcaaggtggtggcaccggccgcggtggccgatgatgcagtggggatgtgggtgcgtctcctcctgggtcgctcgaagagagcaacacgaatatcaagtcttcaagtccctctgtatggaaatgtccctagacaaattttacatcattggcaggaaaatttggctaacttttgtcaatttcctttgaaagctccaacacatttgcatctagcacccatgcatttcaaaataatactcccttcattctatatcataagttgttttaagtttattctaagttaaatttcttcgagtttaaccaatattacattaaaaactagcagcatctctaacacaagctagaagtttggaagcactgcctaacgccaaccattgtcgtgcccctgcatccatgccaaacagcgcaagctagccatgcgcctcatagcaagtttaatggcaggggtgattgacgcctctaattttatccacgccagcaactaattagttagaaggtacttccttcgtttcacagtacaatataagtcattctagcatttcccacgttcatattgatgttaatgaatctagaaaatgctagaatgacttacattataaaacggaggctcactccgtccaaaaatataaacgatttttgatggatggaacataccctagtactacgagtctgaacagagagtttattcaaatttcatagaactataatgtatattatccatccaaaatcccttatattttgagatggaggaggtagcatgtagtatacactatctccaatacaatactactatttatttttattcacttgcatctaatcaatatcactcttttcattttctcccttagagtttgtgagagctaagtacaacagtaggcaatagtcaagcacatgtaaaggacagcggggaggagatagaagaaaaatgagctacatatttgtagctagttgtaagttgcaacacatgctccgagatattatgtgtgtatgagacgtggaccaaagtataaatgatacaatatatgtttatataaaactattctatgggtaagctattaaaatgactatagataatatgtcaattttagaagtagcagttgactatactattaaacttgctctgaaaatgctactccttacacgtgaggtgacttatcctctctcttcttacctctcttctccgctcatcatttaagtatatgtaacatcttgagttagtgtatactccctccatcccaaaaaaaaattctaattttaaaaatgaatctggacacatgtgtgtccacattcatctctaaaattgggctttttctggaacagagggagtaagactctagaggcttagaataaggatagtagtgtgttacaagcttacgtggagaagaaaaataaagaaaaaaaaagaaatgttgctctcacacatgagctagctctccacatgctctaagataaatacattagttataagttcatagccagagtaaaagagagaagataataaatagagctaatcttatatctaacctattgtaaatgttaactctaatatacacatatatattgttgttagttctactactattaattgctcttacagtaactggtcttaaaacgtgatcaagacaacttgtgtaaaaaaaaaaaggtaacctatcaagactgtgaccgtgtgcgacacttttagccccatcgtttggcctaaacagctaaagaataagccaaaatttgaatttttgaacttaattttgaagttgattttgaaatacttttaacgtaattttttttaatattggcttttaagtcgttacgaataaatctacaaaagttttacttataaatgaattttaattttctaataagtcaaataagctatttt

SEQ ID NO: 31298 - DNA, 1723 bp, Oryza sativa
tatgataaatatttttaaaaatacttatgaatagtatgtaaatttaaaaatcccacataatgtgttgtttccttgttaacaatctttttttgacagatgtataaaaaatatcaaattggccacctggtttaatgatgaactacgtggaataaaaaccaataatggttgattgaatcatgatctgtccacaaaataaaaacctcatttctcattcaaacactactacaaaaattatcaacggtatgttaataccagtggagaagccgcatcagtgttgcactagtgcaagtaaaaaaaaaaaaaggaaggctggctcaaagcatcggagccaagcgccccctccctctcccttcgcccccaaaattagcctcattgatgccccctaatccccatccacattgtagatcaacaagaagaacgcaagagcctacatcaagaataacaacaaagcgcatcagatatcaataacaagctaatcacatcacaaatcaaaatcttcagccattgccaaccataactcattcaacagatcggactcaccgccatcatcctagtagagatccaccaacaatgtaattgatctctcccactattgtcatctccctcaagccactgtcgccatcgatcgtctcctttgagctgctctgcaccggttcctaggtgtgttttggggggggagggtgagggggtgttggagggcttctctttggcatgtatgtcgaggagaacatcagcaacggagagatccacagtggtgagatcagaggcggctggatccaacggcccccaacctccaggcagccatttccgacactagaacggataccctcatctcaatcgggcggtaagccccatctcaatcgggcacaacgtccgtcacaggctagaagtcactgatgtgaagagttatctccatcgggcaaaagcgccgtcacagataatctatctcaatcgggccctaagtaaagaccgtcaccgatagctttgacccagacgaccagtcaaactatagcccgtcacagatgacctatctcaatagggcaacacctagcgcccgtcacagatgactactacttcaatcgggcctaaactagagcccgtcacagatgatactcatctcaatcgggcctaaactagagcccgtcacagatgactgctgacctcaatcgggcttaaaatagagcccgtcacagatgactactgacctcaatcgggcctaaactagagcccgtcacagatgactactgacctcactcgggcctagactagagcccgtcacagatgaccgtcatctcaatcgggaatttagttatggcccgtcacagatgactataatccaaaaaaaaaattttgttttttggctagcctcaggcctttgctagccatgctcgctgcaaaaatgacagaaacaaacacagatatccaatatccccatctccccagcatcacccattcatatacatatgcattcacatacacagacatcaacatatttcacataaccacacattcacagccatctcatatttcacatccatttacatattttacatccattcaaatatttatcatatttcacctgcaaaaccgagttaattggatcaaatatttatttagcaagtcttaacataaacatatgaaatatatacataaatataagcatcacagttacatcatcacagttgcataataagtgttcatcattgcctaaacataaaagttc

SEQ ID NO: 31299 - DNA, 601 bp, Oryza sativa
agagagccaagaacttgcacggtggcattttaaagaggctagtgtggtgcgctttatgggaaagaatgacaatgaaaggtagaaaacaaagtttactgtgttcagtacgtttattttactgaacatgcctcaaacatcaatctactaaacttaaatctgttgacaattctactacacttcatctgttgacgattcttcgttcctatcctacttctggggctcccaaacaaacttactaaatgtaggtataattgtagagctgtcactcctacctatttaagtgggacattcgaacaccttctgtcctccaattagagtaccaaaggcatggatgttagtaaaagtttaaacaacctctatacctcaattgatctgtcaatttttaccattttggtagcagctgctgaccaacagtcatgcttgcctgcaaaagttcagaagcaaacattcatgttggcatgtagctaaccaattacttagaagttaagcatcttacgactaacctgggacaattaacccaaccagatgtttaccaacaaacagagtcttatcagctttactgtgcaaccaaatccacagatccgtgataaaaaagaagagg

SEQ ID NO: 31300 - DNA, 703 bp, Oryza sativa
ggatccccccttatttttgtttagctacaatatctattaaatcttagaccaatgttttgggcctagccctcacattttgtaggctaaaatattggggcttattaccacccgtatgttgaccacgccgacattgctagttggagccacacttccgccggccactgccaagtctccctcgcccctcacttcgttgatgattcgtcaggcaggcaaccactttgcctcaccctcgacctcaactcctcaagctgactgatttgttgggagaaaagaaacaaaatgtgaacaagagagaggcgcttttgcaaaattactgagatggatgagtgacgtggaaaatattcctatgtggagccctttggatcaaagatgcaccgatcttgccattgaaccaatatatttaatttttaagttgttgcatcggaatgcgctcacagattaagttgttgtaccataagtgtaatttactctttaaaatatatgttatagcatgtccaaagaaaagaacctcctggggcctgggccaattactctggtggtgatgagaatataaaattcacatgagccaaaattctagcatagagaaagggccatagagcctatagaaagctcaaaaccattaccactatttatatctggttaagtagcaatgcaacaatgtttagcaccagtacatccatgcccagcatagaaatctacactt

SEQ ID NO: 31301 - DNA, 670 bp, Oryza sativa
  unsure (1)..(670): unsure at all n locations
aagtaatattgaaggtctactcgcatgtgcgtaatatgtggtggacaccaaaatttaatccttgtgggtgaagtcatgcactcacaagtcacaactccaccactacaccacctctgcttccccaaaattttggttgtggtagtttttggctaaatatacattagaaaaaaattacacatgcccaccacacgagctgcccacccggcatggaatggtcaatagctcgccggcgacgaccaccacacgagctgccctcccactgcagcaccgagctcaactcaatgtagcggcgaacttcggccgagcgaggtgagtaccagaaaccggcgccggagacccgtcgtgtttgctcgccgccgcttgctcccctgctgctgcttacgtcaccgccgccgcttgctcccttgctgctgttgctacttgctcaccgaaagaggagagggggggggggggggtcngggggcttgtttcttgttgttgttggtcagttagagatgaggcccaaagtaagggaaaaagaaattaagatgagatcgataggatctaacagatgggaaggatgaacaggagagagaggagaagagatgaaggaagaagaaatgggcaatttggtccatacgaaaatatgttagttaaaaaaggattcaaataccttatcaagtgtatagga

SEQ ID NO: 31302 - DNA, 671 bp, Oryza sativa
ctggcctgagagatctgcttagctccagtgcaggtccaaatataatgagatgcgggcgtgccagtcagtttgatcctgcaactgacaagatatgtaaacagtagataaaacagcctatcggctgacaagccgatggagtagttccagccgatagccgataatagccgatagcgatagggtttaagcaatcggctatatgtccaatgtagataatgatataaaggcaatcagatgatgatgatgatgtaataaaataacaatataatccagtataaaccaatcggctagcattgatatgatagaataagcatcgatccaaaggttaaagcacacatcggctggaggtccgatgtcatgaaatccacaagattagattaaacagtgaaacctttgttgtcatcggctaaatctaacttatatgtatatgcaatccttatgagctgatgcaacgtccagataactcaccggctgaaaccccgatgaaacccttattgacaatcaagaagcaagctagagattatggttctaagcacgacttagtagatcaaacttaactgatgcagcactaagtatgaaaagaaacataatatctagacaatcaagccgttgactgagtcttcagggtggtagatgtctaagctaatctaatctagcaacgcaatttagccgat

SEQ ID NO: 31303 - DNA, 775 bp, Oryza sativa
  unsure (1)..(775): unsure at all n locations
ctgctgcnccccttttgatanggtacagctcgggctcccanaccaanccattcaattcatccagttcatccaaaagtcaccgaatcaattcatccagttcatccaaaatcaccgaatcaattctagcaaagaaagcaaataaaaacaatcaacacatcacggccgccgcccagccgtcgtccaccgctcgcgccgtcgtctgccgccgcatggccgcggccctccgtcaaccgcgccgcctgcgcacggccgtggcccgcccccctccggctatatctgggagggaggggcggtcatgagccttccgactcgtcttaaccccttcgccgaacgggccgcgccgtcttgacccttctagtctccattgattgccatcatgctccccacggcccctttggccaaaactgcgagggatgtgcccgaatccatctgacatcgttctccccccgccccactttgatcagacctgcgagggaggggccggtagtcactccacctttaccctcatcggagcaagtctttaaatgtttctgccgagtatggaataatgaagtggcgctcttccactgtgccatccctataattcattaatacctcttgctttatatgtcgatacttgtaaccttcaattatctacaaatggggagggtttaaacacccctccccaaccgatgctttatcaacacacttgagcctcacctatcttataagcccgcgagtcgggttacacaatgaaatttggttaggactttcgcattttttcttggactctccg

SEQ ID NO: 31304 - DNA, 940 bp, Oryza sativa
  unsure (1)..(940): unsure at all n locations
cggcctgatgcattgcacgccagtctnnnnnnnnnnnnnnnnnnnnnnnnnnnnnnnnnnnnnnnnnnnnnnnnnnnnnnnnnnnnnncaaagctgtttattttaatcttcaattactagtacaatgcttatgttgctgcgaggcatatggagccaatgttttgtttgtttcagttgacatcgtggctgttgttaaccagcggccgtgccaataatgcttatgttttgtccattgctacaatagctatttttgcatgccgttgttttgatttttgtgtgcggtagattcgcccgtcgtgcgggtgcgccacccgcacgcgaaaatcttgcgggtgcttatgtcgccagcaagggaaaataaaaaatccaaaaaaaaataaaatttcaaaaaatggaaaccctaaccctagatccggacaccccgccgtcagatccgggcggtgggcagccgtcgccgctcccaaccgcctcgcgcgagtagagatggcaatgggccccgttcaccgtttcccgcggtgaattcacctattaggtgacggggatggttaatatgtattcaccatggggaataaaatggttacaatactctcaccatcggggatgacggggtgcgtcttcttactcctaatttttttgtatatagagcttacatatataaagtctctctaataggaagtctgacttagaaattctccccggttattatacatttaaaaaaattccgtcttcattttattaattctaaggaaaattatatgccctaattttttaactacacacgtaattttttctatgatttacattttcataggcctttattttatataaattttacatttctaagttcttatatataaaacttttttttttcaaggtttcacgggaatggtgttttacaaatttctttaaaatggtattaaattctctttcgaaaaatatc

SEQ ID NO: 31305 - DNA, 874 bp, Oryza sativa
  unsure (1)..(874): unsure at all n locations
actccctcacgtgatagacaatcctgtacgtctgctaatactctgatcncactgcgcgctttttttntttctatcatgaatatgtcctacataattattctccctnnctcccccccccncnaagttatgtctgacatacnactcggaacccggcggctcccggtgacgacggctacaggcgccgcgcctgactgcgcgtggacggaggctcccggcggcgcgtggacggaggctcctgccgacggcggctcccgacggtgcatcgacgggcgcccgcgccgcgcgagagaaggcagcgagcggcggtgcgcctagctctcggcggattgacggtgcacggtggcgtgcctgactcccgagcttcccggcggactagcggacgacggtggtgggctggtggctgcgtgcggatctggaggatttggtattttgggtagagaatttgaagttgactggttgacttaggattagaagttatatatgcctgttaaatgggctttagtattatgggccaaaacatgtaaaaagtctaaaattagtcctctatacagtaaagtcgggtcaccgtggggagcggcgtcaccctcttgccttataggacacaacagccccaaaatatatgttgccctaaaaaaggggaccaatacccacgggaggaaaacaagacgacaaaggcaccggacgggggcaaggtaaacataaacacctcaaggcccgaaaagaaccggcacgtgaaaactacgaaataccccaatcacggggcgaccccttatttcggccagcacaccgtcatctccaacgccggtcaaaactggcaaatgttctgcaaaccgacacggacgccgcagcactaacccaacagcgcatacgtgcc

SEQ ID NO: 31306 - DNA, 545 bp, Oryza sativa
tcctgcagccccagcgagagcatcatagttgacatggtcggagctacagtccccatatccgtctctactctttctgtaattgactccctccgctcccccttttcctttgaaatggttgagggatatgaatctggatcccgatcttgtctccggactatcccgtagtggttctgtgaccgcaattggatctatttctttcacacggtcaactggcattggtttaactaactggctggctgctattgattgatatcagagcccgagcctttgcccctttttgcatggtctacctcctatcggctactgaagcccgagtatcaaactactgaaagcggaggttcaaatacctcggtacctgcttgatggtgctggcagatcgactacttggtctggggggtttcgtatcaatccatgggggctttagtcatagcccccgcctctgctttgttcccgctctaggcttaaaccatccttcgtcagtgcttcctgcgcttctgattatggagctgtacgaccttcccggtcaacgaatgaaatgaaacaac

SEQ ID NO: 31307 - DNA, 1080 bp, Oryza sativa
tcgcatttctcatattctaacctatattttgttagccttatcttaaccttggctttgaccgtgtctcccgtgcaatttcaatacatatggcgcaaaacgattccacatatatatcgaggtcagaataggatcgggtgttttcatgtctcatcgtagcgtccgatttgtcttgataggtgattgataattagaatcgggtcggatatggatagtgtcgaatatgaatacaaacacagcgggcataaatacgggacgaataggtatcaaaatgggtatgaacgctaccggttacgaataccaattaagatattaagtcaaagcaacaaccatatataccaagtggagtagaagatagccagtcaactattttatatatccataatgtgactatattaggggcttagggcgtagattgcctaatattatccacatactccacatcgttaatcattggcagtttttaacaatgtaaaaatcttgccagcagtatctcatatgtcataaactcacataatcacatttgtaattatatcactgagaaaaaaaaccatttatgttcgtttgaccagtgacgagttgcttacttctagaggagatcaggatgttgcaggatgatggcctcgactactgagacgtcgaggagccaaacacggcaaggggtcaacgaagcgaaggggaaccgagttaagggagatgtaacgcagcgactcgcgacggttgccgtcggtggtgcgacgaccatagcagtcccgacaactcgcaatagtggctgacggcggcatgacgggcgcaaggcaacatgcaacgtgcggtggcaggacgaacacgaaggttagactccatgcttttggactatattattggtttgtgcgttgcattgggctaggctagatgatgctatccagataatatccagatagtttgctgggtaatatccgtattatttatcgggtactccgtatccatcaaataccgccctccaaactagatctcatatccaccaaaaagtaaaattcggcttcgatatccgtacaagcacccaattattcggatttttgacccgaaattgtcccaaaataa

SEQ ID NO: 31308 - DNA, 635 bp, Oryza sativa
atgctttaggtctcacgttgacttatggaatgcatattattactagagatcaactgggtgctaaccacgggagcctacagccaatatgcgtacaattaacttaccactcgcctacaatggcctgaaccctgcctatgtataagccatctcacagagcggagaccacgcaatgtagattatggacgacatatatggccacttgctcacctatgttttctagcagtgcaaactcccatcatgaacatcctgtattgctagatgaaaaaacatgctatacagagctgcaacaaattgagatctatttaaatcagctttatgcttgagtaatgtcatataaaagtacatttcaggatactgtacaagcattctaaatgaatcaatacatagtaccaaacaattaacctgtatgactatgagaaatgctcaatgttgatgtttctgctaatgcacaggtgtttaatagaatggaaatatttttttgacttaaatgagtagcaatagagactattaatttctgatgaaatagagcatccacagtatgataaaatgcgtactatctcccgaataaatactagtaactgattatggacctaagcatgcacaaagattaaagatttcatgttcacataccatgt

SEQ ID NO: 31309 - DNA, 2747 bp, Oryza sativa
  unsure (1)..(2747): unsure at all n locations
cgcgtagttnccatgaananctttgatatacgcgctcggnacccaatcaaatccaccctttactaccaacagatacagaaatcacttcgtccatccccttcccacacgtgatctctccccacatgtcgctctctcctcttgtcatgcgaaaattgggagcgatagcgtctcccagcttatagagagcgagaaaggagaagaaaggcggaaaggataattagcgatcgatcgcttgcgggatcggaccgcgatcagatcgatccctatactcctctctcttctcccccttcctcctccccttcttctctttctactacagtataccacgaacttcttttaaaaaaacaaaagttagaaaaaaaattatgtatagaaatattatatataaaaaatttgaattaaaatttaaatttgaatcgggtatataaacttttgacttataaactttgggtctttaaactttaggtgtataaactttagatgtatagaaatactatatatataaaatatttgaattcaaattcaaatttgaatcgggtatgtaaacttttgacttataaactttaggcctataaactttagatgtatagaaatactatatatagaaaatatttgaattcaaattcaaatttgaaacgggtatataaacttttgacttataaactttaggtctataaactttaggtgtataaactttagatgcatagaaatactatatataaaaaatatcaaatttaaatttgaattagatatataaacttttggtctctaaacttagatgtgtaaacttgaggtgtacaaactttagacgtataaatttactaaaataggaaagtaatacggtgccaaaaaaggaaactatgtggagggagggaggggggaatctgatcgctacccctaatgccaaggcgattgatcgcctattagaatcccccattgaagaaagggactccattttttaatacatctatagggaactaaagaagcattttttttaaaaaaaatctcaattttagtgttgttggcaatgcttttaggaatcctcaggttctcaatccgtgaatttgagggagagcacgtaggatcatcgacaggggcgaagctacactcattcatagaggtcagttgaccccaacgatcttttgcgaacctctggtacccctctttattttaccatctatgacctcggtgaagagaaaaactagaccccggtgatatcgttgattctttcgtcaaaatccaactagcgactaggaacggtactaacaaacagcaaattagctagcacttataatttatacattacccgaatatacatatatacgattgggatttggatccaaaaataacattggaagcccacaactccacgagtttctcttcttgcgtcatcgtattccttcgagcactttgtcctgcaccggcattgtgcatcttgatatcttatattccctccatttcaggttacaagacgttttgactttggtcaaagtcaaactcctctaagtttaactaattctgtagaaaaaaaagtagtaatatttacaacatcaccatagtttcattaaatctataattgaataaattttcataatatatttgtcttgggttaaaaatatgaataaattttcataatatatttgtcttgggttaaaaatattactacttttgtctataaaattaatcaaacttagaatagtttaattttgaccaaagtcaaaacatcttataacctaaaacggaggaagtaccatcttatttctagcagaacagaaggcaagaaattagtggttttgataatctttggtgcatttggtgtcttttacaaattaataatgtataatttttaataaatttgtagacatttcattttatcataatgtattgtcattaattttgtcctgtattatgtataatcttagatcattaattacaaactagatgacatattttcgatctagtattggattccaatgtagcgatatgacatttttttacctaattttaataagttttgatctagttttaccgtgaagtctcaaaaaaattcgaaaatttcactcagaatatacttttcgtcccacggcgaaacatcaaaattacatgatttttgatcagttttgatcgaaaacataacccctggttaatactggccccggtgaccatttatcctagctttggccccggtgaccatttatcctaacttcgtccctgatcgtcgataatgggggagatcgtgattgcaaccaccctttcagtttttggtcatgtgtttgaaagatgaatattttcacgcctgaggaaagactcctgtgccgatctcttggaaggcacaggaggcaaccagcctcgagcggaggctcgccggccacgtccagctcgcggattgggatcccctgcagtatgaacagcgactgcaagttaactactgcacgcgattacacccgttcattttggtgatgaatggaccagatcatcagctccagtgtcaccgcccaatacccaatatttttgnttcagtgatctacagtatccgggtgcatgtggaccgttagattcggatctaacaggtggcagtggtctgcataagttgtagtcgcggtnccaggtngnttcaaaaggtttcaacggnnnnnnnnnngnnnngtaatgnaatagaataataaatacgtaaggnggataaggtgaagtatgatagggtgaagagaggcatattacagaaggatgacgatcgaacagtgttgtat

SEQ ID NO: 31310 - DNA, 577 bp, Oryza sativa
gttcattttaagtttagtgcctgataaatgatttgctctatgtagagtttgctgtccttcaggaggtattgggcatggataaacccaatcagggatgtgccttagctatttctggatcttgagaggttcctggtttgtaatttgattgcaaaagacctgcacgttgcaattaattatctgtatgaatagtaataatttttttactaccttttacaaaggaaacactgaaaatccatatttgttaattgatagcattcgctacaattactctggcttggttcaaagagcttgaaatcacatttgttgggcatgcttctttcagagaatatagcacatcaaatttaccttatcatccatttaatattcttttgaaagatattgttctaaacttcttgccacaattctgtcatgtgctttgcacagttccaattcctcagaaacattcgtgttctttcttttttaaaaaaaggaaggatctctaaaaaaatataagccattccttctttaaaaaatctgctttttatactttattttttttggattaacgccttgggctaacaatttgccatttgcttgg

SEQ ID NO: 31311 - DNA, 629 bp, Oryza sativa
gttgcagatttgtgtcctaatccagttaatgagttggaaaaatcatgagatttggcacgcagaaaatattatacagccatcggattcatgagtcatgcagctcctaaatatctttccaaaaacagaacatcatctctacaaaagaagtaaaagtgcatagttaacaactacagaatatcacacccaaccactcacagaattggacagagtatctgcaaaagaaggaaatgctcagaattaacagctcctaaaacacaaattcctaaaactgaacattatctctggaaaagagggggaaatgtgtattttacactgcatagaaaccaaagacattttacactacgtagaaaccaaaaatttgtatttgataatgaacctgaaaactaattactaacttgcaccagatttcaggggtaaaatgccacctaagaaacgaggcatcaaccctccaggctccacggcactgtaatactactgtcttatcttctgataaaaagggctagaaacaaaatagagtaaattacatgttggactatatttttttaccatggtttcactttgggctacccttaatataatgttttcaccttaggccagattttataccaaaacctttcactttgggcgta

SEQ ID NO: 31312 - DNA, 611 bp, Oryza sativa
cttcagaacaaaaggatgtatcaactatcaagcatgacttgaccagatagagcatacataacagttcgtatataaataaagatcagcatcatgaacctaacatgtttcagggaaatcagacacctagcatcattgatgatcatgttaactgtagcacttcgcgtacaatattgggcaggcaaaatatcaatgaatatagaacggtacagcatagccggatagcccaaccctgagtaactatgactctatgagcaacctaaagataattaactaggagttatttcattagaatgaagtaaatggataaatatgatctgtcatttttgtcatgcgcaaaagcatcataaatttagaagttggccaatccggcgcctagaagtccaatacaacatgtacaatcaccatatggccggaaattttgatgcacaaattagaaaaagaatttgcaagttaattgcaaagggaattaaccaatcattctaggcggagaaagcacgcacctttcacctgctggcaggaccgccggatagcaatgtcgtcgcccgcgtccgatgcttcgtggacctcgccgcgacccgaatatggagctgttgcccgcgccgcctgtacga

SEQ ID NO: 31313 - DNA, 642 bp, Oryza sativa
aatattaaatagtactgattaacactataaacaaatcatgtctactttataccacaaatctactcaaaacgtaaataaaactatttctgtgagaaaaactatttttatcatctccatcatctctcttgtccttagttgaaggacatcaaacatggatgagaaaactttctacgttgttgtaagcgttagcaaaggcttacatttggttgagttgaggtggccctattggaggctactgttggtaatagtgctcaactttctacttaccattgtaatcctctatgagcatgccgatagtgatttaagcgttaaattgccctcaacgccaggtttaagtgacatggctacatggatgtgtgagaaagaaagcttggcggctacggcaagcttcatccgttagaggggttttacgtcaaaatttaacggtgttattccattaaccagtagaagtggtattcttacaataaatatacatggatttggaaataagtgagacctgaacactcagattaagggaaaacctttaggatataaaaaaggattaggcttaattttggggatggacatatgccatttcatccattaaataaggccaaggtttaaaacaatgataataaaaagcctgataatatgggaatttat

SEQ ID NO: 31314 - DNA, 638 bp, Oryza sativa
  unsure (1)..(638): unsure at all n locations
ccaaaaattgttttttactaaattttgttcgcgtgattaacatttcattcttgctaattagttttccatctgcattctgttccaaaggctagaaagtatcatatccatgttctatggttgctttctgatgtttatttatttgatgtcaatatatgttgtgttactatgcgaatacttgtgaagatctagtaattcatgagattgaggtcaaatagatatagtgtttgtatgttttttttatggaaattgctgagctagtaattatgtatttagttttcttttaccagctcatgtttgtttaatcatatttcgtgtgtcattgcccattctgtgtggttatcgttgatttacctcctattattgtgcataaagtacatatcagaagatgtcttcaaaatgttttttgcaatgtgatacacttaaaatgcttacattaatgtaattttattatgacttgatcatttgccaagtttcttctgatttatgtcgngttttcttcagctatttcctttgatgcactacagttctgatttagtaagttacttaatagggtgatggatatggaattaaatttaatatagtgcacataggtttgaatctatattatttaaaatattttcaacctatccattcaaacg

SEQ ID NO: 31315 - DNA, 533 bp, Oryza sativa
cttcgaatccccaatctcaaaacacatttaacttatggaaagagaagtactactctcattctttccctgcctgcaattctgtccctcacatgacactccaaacaagaaccgtcttacactagtccatttcgctatcatattcttagtactagagaataacaaaaaggattctcatggatggtattactaatgggatgtccatcaagtcgttctgatataacaccattaaattatattcaagataggtttaacggtgtcaagtgaacagcgaatgcactaaactttcatgtaaagcacatgtagcaaagaaatgacataaacaaactgcaaaaaaaatagtatcatgaaagaagcataaacttacataagattcttttaaacaaccagcagttatatacccaattgcacataacaatccatggtaattttcgaatctggtgcaattcatcaaatatccacgtgaattagaagtagcataacagtacagagaaaatggatttgtgttttaaatttctcttccataccttgatggg

SEQ ID NO: 31316 - DNA, 599 bp, Oryza sativa
aattgagatgcatgcatcctctcgtttgccgcttccttcgatctactccctctgtcctataatgtaagggattttaggtggatgtaacatattatagtatagtgaatctgggcatacactttaggatgtgtcacatcaaaccaaaatctattgtattatgaaacggagggagtatatatattaaccatccagctttgcctccacggcggttaaacaatgcaatgcgtgcgtcgagtgtggggagtcgaggtagaaatgggcggcatgcgcacgcggagcaggcggtggccatcgtccatctgccattgtccatgagctcaagtattcctgatgaccacggagactccacaaggggtgtgctaacggctgtcggatttcttcatcgatttgaggcctcacccgtccatcgactgtgctgctataacgaaacaaaacggccgtggagtgtggactagagatcggtttgcccatggtagtaacctgaatgtttcttttagaaagttaattttccaatctggaaaattactattaattaccaacatgaatcaggactcctctgcgtgttagaattttttttccaaggctatgtatttatttta

SEQ ID NO: 31317 - DNA, 575 bp, Oryza sativa
aaggaaatgttcagtgtttcaggaatccctgagacagattttcacactgataattttagttcagagattgttctgaaccaggaacttcatgaattggactgaaccatggcatcacttgtcacaatttgattagtacagcaagtttgcaactttagattagatattgtttctgaacataatgatatattttttttaaaaaaaaatactgcactcagctgaccaatttcatattgccattcaccagcaaaattttgaggaattgtattccactcttccgggtccaatctttagtgatacgatggctaaatccatcgtcaatttcataacatggacaagtacaccatattaaactttgggcaactgctcaattgaagccgaagagctctaatgatgcttttgtgaacaacagtttgacatgaacagaacaaagccacccgttggtggtgataggactgtttgagtacatgctaagaaatacaaaagtttctattacccatctaaaaattgaatttctgctaccaactttttcattcactagaaaaaaatacccgtgtgttgcaacgggaaaaattaaa

SEQ ID NO: 31318 - DNA, 597 bp, Oryza sativa
aggatccgtgcacgagttcatgccgtgttcaccaaaactataatcacaactgtatgcttaattaagtgctatataaaaaataattacgcaagtatgagatgaggtggtgagagcctcagaataaggagtctagattaattaatttatgaattaggtcattggtatgtctagattgataattcagacagagtggtacatcagggttgataatttcagattatccgtgtaaacggtctatcagaaaatccaatagaaatattaaataatccgcatatgccggattttagagataccacatccacatccgaaagcgcaccatactatttggaaacatataccatatcctcgtttcggatggattcggagcgattttatctgatccgttttcaccccttcataaatgtatgattttaaatccatctataatctacgagactatgaaggtgacatcttcagcttatacacttcggttgtttgggcattcagctcagtgagtgacatctccaaatttgtgcacaaatagctatatcacggtagtgggtcttactatgacccttcccctccttcacaatttcgaacaagattctttaacatatt

SEQ ID NO: 31319 - DNA, 630 bp, Oryza sativa
ggtaccccactataactggattgtagtaagaaactatgtggagtaaattcacaaccaaagtgtatagaagattttcaagtaaatacatttatgaaagtaagtttaataaagtctgaaagcaatttacataaatcataaaaaaaataacttagtacgaaatggaagtaagttgttacaacattagaagtaaatccgttatagggatgaaaaacatgagtttatcaaaaaattaaatttaatcggcaccaaattgtggaattgactaaaaacaataataaatgtaatctactcagagcactatgaatgaagtaacttaatcaaatctaaaagtaatttttatatatgataaaagtaacttacatatataataaaagtaatttaccagtataaatattttttatcataatataatcatgtaagatattgttataatgatttaattacaacgaacacaatggtgtaatcgaaatatagatcgaataagtaatctatctatcttctatctatctatctattatatactaaaagtccattaaacttcctagaaaccctcctaagccgccacataggacccctggaaatgctcctacgccgccatgtggcgatctaataaattatagaaattctaaa

SEQ ID NO: 31320 - DNA, 539 bp, Oryza sativa
aaaaaaagtagagatgataagaggcagtaatagatgtgattgctacctccaaatttatttatggcattcaccaataaattaagatgcaagatactccctccattccaaattgatctgcatatagttttttttgaggttattcctaaatgatctacatatttgtgtttatttattaagtctattcgttatttgtccattggagtaaatggacattgatgcatgcatccatgcacacaagtatttataacccacatgcaatatcttaatttgctattggctaggaaatagtggggatggtgcatgcattgggtttgttgctagagtaaataaaatatgagagagttattagctttttttggtcttggtgtacctatgaaatatgtagatcaatttggaatggagagagtatacaataggtcacctctaatacacaaatatcaatgactttagtactctcacatccttcttgaagtttgtgtggggggtggttcatcatctctgtcctcacttctctcctccacctcatcacccaatagggg

SEQ ID NO: 31321 - DNA, 666 bp, Oryza sativa
cccaccggcccacagtactacaactacgtacggacatacacgtagtatgtacgcttcctcctctagtactacatctctccttcctatataatcctattctattctatagctaataatttctgaaggtagctactaattttaatgtagaaaaaatataaaagaaatgaaacaacttactgtccatttccatttccagaaacctactatcttaaacattagatttgaagtgtagataattcaaactagtggatccattaatttgaactctctctctctctctctccccgagtcgccacatgtcactttaataaaatagaaaaatctgaccatcaatttacatataaattggtggacccaataattatgttagatttttctttccactaaaataaaatctcccttcgtccacatacgcctgcacaacgtacgcactattcatcttcacagcaatgtaggtacgatccctccgtatactttcttttccttttgtatttccatgataattaaaattaaaaaaaatagaggcctaaaatgtgcattaacctactagatctatttagctcttcgtctaggctctcctaataagttcattacacatcatataaaaaatctgaccatcgaattacatttaaaatggggaacccaatattttaatgttagaatttt

SEQ ID NO: 31322 - DNA, 561 bp, Oryza sativa
tgcgtgtaaaatcgatttttatttacgagccttgacaagggactctcctaattttcacagatgggtcttcttttgaccccacctaaaaaataaagcggatgtttgcgaaaatagtttttctagtaatgtatgtgtggcctatatatatatatggtatagtcactcaaatttagaagataatatgttaaagaatcttgttcgaaattgtgaaggaggggaagggtcatagtaagacccactaccgtgatatagctatttgtgcacaaatttggagatgtcactcactgagctgaatgcccaaacaaccgaagtgtataagctgaagatgtcaccttcatagtctcgtagattatagatggatttaaaatcatacatttatgaaggggtgaaaacggatcagataaaatcgctccgaatccatccgaaacgaggatatggtatatgtttccaaatagtatggtgcgctttcggatgtggatgtggtatctctaaaatccggcatatgcggattatttaatatttctattggatttctgatagaccgtttacacggataatctg

SEQ ID NO: 31323 - DNA, 678 bp, Oryza sativa
attcgtataatatttaaatatcaaagattgtatatattcttttcacaccgtactgatctcctttatcttctacttatgcttcatttgatctagctggatggctgagcttattcaggatacatgaaacgacacgtatcattatgtgcaagattaatcaaatattgaatataataaagccaaaatatatttatttaatttttaaacttttatataaaatatattttaattatacacaagttgcttttaaatatataccatgtaagttatggatgtcaatagaattatagtgcataaaatggttcagatggatttagatattattatcaaaagatatgtcttttgtaataattcctatatcaatgggtagataactgggaaaaggagcaaccaatccgataattactctagaacttattgcttatttactaaaacgtttaatgtgttgcatataatatactttatgaataaaaaaatatcctaatctatcaatcatatgacagcactgatccataagtatataagatctattcactaatcgcaagtcatatagcttacgaggtattcatgcatagtgcatctaataattaactaccattcaacgagcacttatgtcatgaagcaccatatataacggactatactaagtggagaactatcaacaaatgataggtaaagtaa

SEQ ID NO: 31324 - DNA, 600 bp, Oryza sativa
acatcccatttctgaggccaaaacgttttttttttaagagagagagagtgagaaagcaagaccactactgaattgtaatgtgttattttctgtagcgaccatgtccaaagaggagcagcgtgggctacagggaagtgggagtaggcgtatatatatatatatatatatatatgtatgtatgctggcatgtcccctctctgttttaaaatattaacatttttagcatggtgacaagttaaacaattttaactttaaccattaatagcaacaaaattaaaaaaaccaatcatgtaaaattgacgttcctaaatttatcattaaacaaactatcataatatgcaactctttttatttaaaacatcttacttttatagatattgttggttaaagtagcatctcggtgaccgtgtcaggatctaaaaaaatgcttatattttgagacggaaagagtatatacatgggcaatataatgatgttatgaggtgatggttgacaaaattcaaaaccaaatcattagcaaaccgtctgctaagagacaatcatgagtttatccacgcgagagatcggaggctctgactgacagtaatcactcagagcgat

SEQ ID NO: 31325 - DNA, 633 bp, Oryza sativa
  unsure (1)..(633): unsure at all n locations
tattcttttttttaagacaacatctgagaatttccctctagtcacaacctgaaagtactctcttgtcaaaagtaagtgatntgtttatcctttagtggtcagtcggctgaagagctggtctgtagcatttttgggtccgttgatgctaatcgaatcatacaaatagcacttactcctggtagcgaggaactcaggatgttgtagcatggcaacatactaaatctggtatgctcactgttcgatcggtttatcatgcacaatgcaatcataagttctgcaatcaggataggcaatctgagaaggtagagcaaacatgatttagataaggtttattttgttatgcggcttacaaaaacatatttaattttgaattgattcttttattggtacatgcagtgataatatgaacttattccttttgatgatagtacctgttcatctaattaattttataccacacagtatcctgagggaaggcttcatatttgctaagtgagttgcgtttttttatgtgtgctattgaattgaagtgagcaaatattgctgtcgcacatacaggtctgttgttcttccatccttcttagtgatttttacctccagatgtttatatatagatagaatagccaattctaa

SEQ ID NO: 31326 - DNA, 746 bp, Oryza sativa
tgatggtaaaattttcgccaattaggataaaaggctcaccatcatctgaaattattttatcagaaccacaaatgataaaaataatattaaatgctcataaaaaagatataatgacaataatgtttattttaatcagggatttctgcgtatatagttttaaggcatattttgctataggacatcgtgactttgtggttttaactccaggacaccgcacaaagtcacttttagggaaaaacactctcaaaaacgtggttatttgccagcggacaacgcacccattaaaataataatttccggttgaagaggagagagaaactacatgaaggctgcgttctttcttcttaggaacagtgattacggaaaacggagcgatccattagcatatgattaattaagtatctgctattcttttttaaaaaaatggactaatatgatttttttaagtaactttcgtatagaaactttttacagaaaaatgcaccgtttagtagtttgaaaagcgtgctaacggaaaacgagaacgactatcctgaaaagaacgcagccgaaatgtcaaaaatatcctcggacccacatgtcagctccttatctctcttctcttcccttctttccccccccctttttttcctttcccccccctctttttcgcccttccctcccctaccgacagaagcagcagcggcagcatgcaacagtagcagcggcggcagcggcaacaagcagtcggcagcggcggcagcaac

SEQ ID NO: 31327 - DNA, 694 bp, Oryza sativa
  unsure (1)..(694): unsure at all n locations
ttttgggcgtcccttccccccctttctgcctttccccttgttcctggcccccccctttccggtggttttttgggggncccccccttccctttgccggggttctcttctttgttggtggcccgtctccttctcctgggtcgggccgtcttttcttggttcgtggtcctttgcgcccggggcctgcttttgggttctctttctcctcccccgcgtttgtgttcccttcgttcggccctgcgtggttcttttgntcttcccgtcctcgcgggcggtctttcttcttagcctcgtccgttgtctcgggctttttgtttccccccggttgtttgttcttgccgggtttctttttttcgccttgtcccttgtcgctggcccctttttttgccttccgttgcttcgtctccggggtggtctccgcctttttgtgccccttctcgcgccctgggtcctccggtgttctgtggtcctccnccttcttgtcctgtttgtgggcctccttttccctttcgcggtcctccctggcgtcctgcgccgtctggcctgtttcgtccgcggcgtcgttcccttctcctgcttnttcctcctcgcccgtttgttttccttcccttccccctccttgggcgntgtccggngtgttgtcgtcttccgcttcttctttttccttttcnnccccttgctctccgtgggntgtccc

SEQ ID NO: 31328 - DNA, 1506 bp, Oryza sativa
tcgtattgcattttcgtaaaagaaaaaaggtaacatacatacgtacgtggcccaggtaagatcgggtttcaagagataaaagttttttaatgggttcatcaaatttaatgaaaatcaatggctagattttttttttttgcatttttctcaggatttttaggaagtctttgatttacctaggaaggtagcccatgcaaatgtgcaagcaccttattcaatactacttggatttttgttataaatgtttacgtgtggataaatttttctctaaatatatttatttactctattctaaatctgtttgttttgaataatttgtcttgggatagctttgaacaatggttataaattctttctaattaccctcgcaacgtataaatgaaactaaaattacttgaaaatatgctgtattgaatttatgagaaaatattctcacaaaatgaagttggttcatatgaaaattactaaaaattctttttttgggtaatatttagcatatattatttttggggtttataaacattaacctaatttttttttcttatatactatagatgttttgatggattttaggatatattaatttgaaaatattttctattaaaaatatggctaataggacagtttcatctaatcaaatactaacttctatttacttatactctcttttttcttcatatgctttcttattttgtttgaaatttaatttaaaataatagtgatattatataaatataagtaggtatagagtacctataaatgtttaagcgtgatagacaaaattacacttttggtagatcaattcttattataaagtatatcttattttttttagaattacacagtacaatatatatactcacaacgcacgcgcacttacccctatgaatgcacgctcgcaaatcctacccctatgagcatcttcgaagactgggccgacaaattcttaagattgacgaagtcaccacaggcgcttcgctgtcgacgggtacgtcgcctaccactgaaaacacagctgtgtgttccctaatttactaaacttagtatgaaatacccatataccatgtgttaatagaaaactagagaaaaaaatatgacatttattccctttattcttttacttaatatatatagggcattaatatagtatccaaaatagcttataaagggtgataaataggactgatagtttacgttattcatgtatgggcccaatagactgcaccctacatgttattaaatatgatgatatatcattgattttttttacgatttgtcataataattgaatgccatgctaaagcgccaacatataacctgttatatgttaactgataactgatatgtagtgatataatctatattttcatcattttcataattcgcatgtctatttgaattacatgcaaaatatgacctaaaatataatttcttttgcaatataaaatatagataatacttttttaatttaatggcaaataatacaatgggggtaaattttgtttt

SEQ ID NO: 31329 - DNA, 524 bp, Oryza sativa
ggaaatgttggaaagaactactatcttaatcccagcatttgttgtaactgtagtaactgcccatcatttgttgtaactgtagtcttctaccaagaattgtatgatattttacctggttaaattattgaatgattgatccaaaatttgccggcttgtttcaagttgcactctttctgcgtttgctgttagcctgttatgctgtatgttgcacactttgcactgcgggctatagagaattggcacatttgcatatttattactggtatgcaattatgagtcccattgtttcacttatgcttataagcagttttaaattttataacttaattttgaagttgattttgtggttttctcatcgtagcaacatttgcttttgaatcactaagaacacatattaaaatttttatccatattatgtttatattgctaataactgattcaaataagcataagcataaagccaaataatgagttcgtatcttaaatacaaaatatgatttcaagcagttaagctaactttgttt

SEQ ID NO: 31330 - DNA, 1211 bp, Oryza sativa
atagatctaatccagacgaacgtattttgacacacgggagattaattacaggaaggaattattattttaatagatctaatctaatggcggtaaataatgggtccaccaaatttaataaaaatcaatggtgagatgtttttcttttttctcagaatttatatatttttctatttttattagagtgtcacgtggcagtttgagagcgtttttagagcgccatgtgacggcatgagagcgtttgtagaaagtttaatggactttagtatataatagatggtgggtcaaaagatacaataccaatttatcacttttagatttagcgtttaataatttatcatccatatatctatatttatgacacgtgaattctcatgactatagatccggtgataaattgttaaacactatgtgcatcagagtgttaaatatctccctcccgagtcctatccgacgcttctcttctgtagtccgtggccatgtcgtcctcgagcaggtcgtgtcgctgcacggtggccgttgtggctttgaatccatcggatgagatcccaggcgcagcgcgtggcgaggaagcggggcagttcgggatcggggacgcgatgccgacgcggaactgggtaaagtcccctccgccgaatctcgcaaaattctgcgtgcgaaatgcggctgatggcatgaatcatgcgcggattctgttggtcatctcggtaggttcccggtgtgttcagattcagatcatgcggcagattacccctgttacacttacatcagctgccttgttttccagttcgttgaaacaatttgtggcactaacgttaaaattaaaaatttagttgaaattggaacgatgagacggaaaagttatgtgtaggaaagtttcgatgtgatggaagagttagaagtttgaaaaaaaactttgaatctaaacacggcataactcaacacgtgagcttgttgaacagtattatcaattggaattcggagagttgttgatctctctctctgttcctcgtagctatattcttgctatccacgatggctgattggaattggtttttgatgttaactggacctccgcaaaccctttgtagtactagtttgtaattttctttagtctcaggttgtaaattgggactataaatacatgactgaagatttttatccttagtctcggttaaaatacccagaactaaagatttttttttattttgctt

SEQ ID NO: 31331 - DNA, 1259 bp, Oryza sativa
aacaatttatcaccggatctatagtcatgagaattcacgtgtcataaatatagatatatggatgataaattattaaacgctaaatctaaaagtgataaattggtattgtatcttttgacccaccatctattatatactaaagtccattaaactttctacaaacgctctcatgccgtcacatggcgctctaaaaacgctctcaaactgccacgtgacactctaataaaaatagaaaaatatataaattctgagaaaaaagaaaaacatctcaccattgatttttattaaatttggtggacccattatttaccgccattagattagatctattaaaataataattccttcctgtaattaatctcccgtgtgtcaaaatacgttcgtctggattagatctattacgaaaaaaattccttcctctaatctcctgtgtaattaaatacaatagatcaaaatacgttctcaaaaaaaaaaaagatcaaaatacgttcgcctccgtgactgatgaggatgtacgtacgttcctgcctggtggaaacgtaccggccctcccctcacctcctcaactcttttcctctcttatttgaaataatatttactatttatcataataaattttaaataactctaccttctaaactatacatacaataattatctattcacgtcatatatttttctacaattaaatcaataacacgttggatcgcattatcaagttataacaataaatattattttgggtcgtattttgaccctttatatcgtatctaaccaaacaaaatggcaaacaaaatggcaatgttcaaaaacaaaatttacacccattgtattatttgccattaaattaaaaaaagtattatctatattttatattgcaaaagaaattatattttaggtcatattttgcatgtaattcaaatagacatgcgaattatgaaaatgatgaaaatatagattatatcactacatatcagttatcagttaacatataacaggttatatgttggcgctttagcatggcattcaattattatgacaaatcgtaaaaaaaatcaatgatatatcatcatatttaataacatgtagggtgcagtctattgggcccatacatgaataacgtaaactatcagtcctatttatcaccctttataagctattttggatactatattaatgccctatatatattaagtaaaagaataaagggaataaatgtcatatttttttctctagttttctattaacacatggtatat

SEQ ID NO: 31332 - DNA, 558 bp, Oryza sativa
tttttttaatccaaatttattgtcaatatttgttcagaatcttggtacttgtcgaaattgcaaattttcttcctccaatcatacgtatccgagtagtgaaattatctgtcatgccttgagggaattttatatgtctctaacccgtatttttgtatcgtttgatttcttcagatattttctcctggtctgatatacccatttatatatttaggataaatgagtataataagttccttcagtactaccatcttgaataattattggttcatatccatctttccagatcagggtcttgaatagaatacctcttttattcaggccttcatagtcggtcgtcctaggtcttctttgtgtccactttatcatgtaatcttcaaattatgaatagtcatgcttatgtgtcgtaattactatggcacataagttactatcctattttcttgtataaacctttattccattttctctacacaatgtcgttatgttgcttagatttatctgttcagactccctttgtaggtcttgcttttttttatccagtcatagttttagcttggc

SEQ ID NO: 31333 - DNA, 526 bp, Oryza sativa
caacatccacgcttctccagacttctcgttagacactgtaagaatctcatgactactgctatctgaatcatcaccacgagctgctaaacttgcaatgccatctttcctcttcttcagtaacggacaattcctccttatatgtccaaactcatgacacttatagcaccgggcccccttctacttgctcttcaacacccccgcttcatgatcatgctttgccttgaccagcaaactcttagcctgagaagcctccattgcctcgtttttctttgatcttctcaagtctcgtgcaagcaacgacgaaattatcttctcagttttgatagtattcttgccgtgcattagggtagtcaccacatgttcatacgacggtggaagcgagcacagaagaattatggccttgtcttcatcatccaggttcacatctaacttacttagatccacaaccaactgattgaagacgtccacgtgctttctaagatctgactcctcttgcatcttgcaaccatacagctattgttgagat

SEQ ID NO: 31334 - DNA, 546 bp, Oryza sativa
tttaatatttagaccacattattgcactcaaatatttaggaaatatctcttttgaaagttatctccaaaaatagattcatttcaaaagttagccacctaaattccttccaaatattaatttggattcaaacttccttcttcaaatatcttccaaaattcaaaaataacttctatttgcttttgggccaaaattcccttttcttcttctatcggcccatctccctcttggcccaggacggcccagccaacccttccagctgagccgcccctctcctttctgtgggcaccgatgccaggtgccctaggcgggataagttcactttgggtctctctatttgtcgcccaggccgattttcgtcccttggtcgcaaaaccgggtacaactggtcccccaacttacgaaaccgtttaaataaggtccctcagcggtattgtacctggtttttgctgacgtggcgttgacgtggcttctttgactaggtcttcgtcatacatggcattaacatggctcttacgtggtaatttgatccttgaaaaatattaaaa

SEQ ID NO: 31335 - DNA, 632 bp, Oryza sativa
aaaattataactcaatctatgactaaaaataaggaaatttgtcgtagatggttcatatccttttttttaatccaaatttattgtcaatatttgttcagaatcttggtacttgtcgaaattgcaaattttcttcctccaatcatacgtatccgagtagtgaaattatctgtcatgccttgagggaattttatatgtctctaacccgtatttttgtatcgtttgatttcttcagatattttctcctggtctgatatacccatttatatatttaggataaatgagtataataagttccttcagtactaccatcttgaataattattggttcatatccatctttccagatcagggtcttgaatagaatacctcttttattcaggccttcatagtcggtcgtcctaggtcttctttgtgtccactttatcatgtaatcttcaaattatgaatagtcatgcttatgtgtcgtaattactatggcacataagttactatcctattttcttgtataaacctttattccattttctctacacaatgtcgttatgttgcttagatttatctgttcagactccctttggaggtcttgctttttttatccagtcataagtttagcttggcagaaagagctatct

SEQ ID NO: 31336 - DNA, 1219 bp, Oryza sativa
accactcgctgaatggtagctgcatcatgagctcgatcatagcggaggaactgtcattctctgaattttctgcatctctaaacatgcctctgaacacttcgagtttgtgacttgtgagctctttggctttaccactgacctcttcaccaacagtgcgccacttgtgctgcacttgcaagcgcgcacaagttacacaacgagtgtccgtttcagatcagatccaaactgtccatggatccagcggccggtcaaatcgaatgcacatgcacatgcaaaacggatcttcagacagaatcatgggctcatggcctcatcatcatcgttctcttaattaacttgggttaaaatttttatctctctcgcaagaatgtcccccctaagagaagaaagatatttagggtatccttgtttgctccaaaaagaattagtcgtcactaaaatttgagttttaaacataaatttggagttaattttaaggtattttgaacatagtttctttttaacattgattattaaatcgctaaggacacatcatatacaattctttatttacaaattattttttactaataaattatttttgatttataatcagcatttgatcaacacataaaggcctgtttggggagtttgctgtagcttctcccagaatcagaatctttcccaaacagtataacttttgtttcagattttgagaagctgtagttgtagaagctagaaaataaactagaagttagaagctgaaaaaccagattctcaaaggctggctaacaacagcttgtgtagaattaaatgtccttttcgaaccacacgtaccatgcctccatttgaatgcaagtgcaactatgcatgttcatgtgaagagatgcatttctctatgagtagttgtatcatttttgttttcttgtgagatgccaatcaataacaaaatcgcagtacaaatatttgctggattactgttcactactcccatcacggcacactgattcacagcacacagtacaccatcgccaagctggcaggcccgggcccaccacccccctccctccctccctgcctcctctatttgagagagccggaggggttagcgggttacagttgtagatgcacccctggaaaacccaggtaattacgaactagtccttctccagcccggcgacgcgggggaattttacagataagccctcggattccttccccctattctccgctcctcgcg

SEQ ID NO: 31337 - DNA, 739 bp, Oryza sativa
ccatcaaggttcatttgtgcaccaaagaaatgttagaatgcataacacgacttcattttcttggtttttaggatcatgacatggatcatgaaacttttaaagtgccttaatagaggaatttaaatgcccatctagttttcaacattttaggagaagatacaaaaatggcagatccttggatgctgataagcacctccagaaagtaatgttgtctgtctttccttcatctgttgtatgacatatcaaaaggagttaagacaaagcatatgtatagatagatcacacattttacgtgaataaggtccaaaatactggcctctgagtggacagccttgcgaaccgtatcttgtatggattccatcaaagatcttttggataagaaacaataagagaccaaattaatgatggtagcatttatctatcacatccgtaacattcaaagtttgagatcagatacaaagaaagaatttcaagagaacaacgctttatccatattttggtggtgtttctgttacttggggaaaaacagaagttctatcctggtttatttgtacttatatataaagaatccaccgtgagctaacttctctctaacaaatttcagtagtgcagatctcttgcccaaactgatagttacaattacgggctcagaccagccatgcttgaacgatgaggaagattagttcgatactaagaaagtagtccatacatcaagtgatggtctccgaatgagaggtgt

SEQ ID NO: 31338 - DNA, 545 bp, Oryza sativa
ttagttaaaaaaaaaaagatgaacatataggacaaagggaaaggctagctagccagaatgtaaaattttgatttatctttttaatttgttaggaaaattgaatctggaactttgcatgacagtgaacaagattgtagtacaacagtcttgcagcattgcaccactccactgctactacaatattcaccacagctaatttacaacattcagttgctggcagtggaaagaaccccaatcgcagctaataatttacaacatttgaatactttcactccaaaaaagtatctcgtccatcacttgtcgctacattctcgatccaaccgaccaattgatcagcgctaacggcaggcggttgatgagaatgctcttgtgtaggcagttcgagttcaacccgggaataagccttattagttagcatgcttcccaataccgctcattccaatcggttttcatcatatcgtcgtcgtgcaccggccagccaagagatacacagaagcaataaaatataatgtggagatgtggaacggtgggtgatggccgcaggg

SEQ ID NO: 31339 - DNA, 521 bp, Oryza sativa
gaaaactgcaggctgagcaaggttagttcgtgtcggtgatggcgatccttggtagccttcagcacgagtcagaagcaatcgtatcggagacagaaatcaattatgcgattcccgcaccagccgtcttggcaaagatctgcacggcgcgcggcaactggcaaatcggaaccaaaaatcttccagacctttgggcttgcatatattagttttatcggcagagaaacaagggctaagatatacatagtccttacgacaaaaaaaataaaacactagtacaacagtaacatggatatatagatggcacattaaagcaaaatcactgcgtgcagcatttgtcctcctactggctattatgaacctacttctcccagtaggttaaacatggataaatattgaggaccaatcgatgacctcagagcacgaacatgatgtaagtcatgatacatttggacttgtgcttgatcataaggagcccctgttcactgcttgttggcaacacctccacgccggtgaagacagtc

SEQ ID NO: 31340 - DNA, 508 bp, Oryza sativa
actggcatatacatcaagtgatgggctcgatcggaatgggaggtgtcgagaaaatatctttgaccttggggatttcgaattgcatccgctccatacagtttttgcgcatagtatagctcatcggcataggacctcattgttacactcatcctaagccccttagtaacgcctaagggtcttatggctagctttacaaaatggtgggctagctgatctaggttcgaagtctcaccccctctaattatttattattataggtcataccctaatattcgtgtttgggagcctccatgcaacaactgttcatgtggctggtgaactaacgttgaagttgaaatacggcttctgactattttgaatatggtttgtccaatttccgtttggttcgtccattagatagttttcgctggcacctccggttttcttatccaggagtgtaaagttttaacgtgtcacatcgggtattatatagggtatcgtatagagtgtttggatactaataaaaaaa

SEQ ID NO: 31341 - DNA, 1035 bp, Oryza sativa
aggatctccctcatggcttccccctccttcgccgcccgggatcgcgccgccgctcgccggaaaccggagccggagccggagacgacgaggagagtagcgaagcggaggagacggggttgcttgcttgggtgagaattcgaaatggtttttttcgccgtctttataccgccggacgcctccgtgggtggagaggcgcgtgacttcggtgggacccagcatccagttgacgtggggcccacgggcaggcgacaccagctgtgccgtggctgtgttattgatctcgaccgtgcgtttcgccatcggacggtcggggacctgaagtttctggaagcggatcagaggtatcgctccccccggttccagcctggcgcaaccgaagatgaatatggggggcccacctgcagcggcagatggaagtgggtcccgcttgccaggatggcataagccagagaggacggatgtggtggggtcgtactacacaccctgtgagatagggtgtgtagctgaaggaaggatgattagatatcgaattgtgacggcaatttaagaggatcatggatgatagcgatgcttgactggtaatccaagcaacgcatggatcatggatgtcaaaggatgtagtaatagctgttgctaagaaagatgaaagggaccaatcaacagcagcaaccacacggatacgggtctatcaggaaacaaaagcaagcaacgataacatctggggccgaattggccgaaagtacaaaccaaacttatttattcttattcatgaaaaaaaaacataagccgaattcgctacaacaggatgagtttgcggttggaagtttgcacaaaaaggcaaagtacatcagcatcaaccggttgaggcaaatcatgggatagcttcccctctagcaaaactgaagttaaagcacaatcgatcatgtcgttgcgatggtaaacggatggtgatgctaccgaccgatgaaacagcatgccaggttcatcaagcagacgagctgttcttgaaaatcattgatcaggtaaggggtgcag

SEQ ID NO: 31342 - DNA, 568 bp, Oryza sativa
gtagctcatgacttcctgcatgcatgtgaattaaactcgtaaatgcctcaacaagcaatctttgaaggctcgttttttttctcttttttttggaaaagagagctttattgatcttgtattagaattacaatcttgctacagtatgagcttaacacaggatggggcatgatcactctaggccagttatgtatgtcaaagatgcaaagatcttgcaattaatatggaagagataatatcgatctaacagtgctttaatcttagatgaaaacatttggccatcatgattttgtgttacatacatttttcttaaggaaggtggccgagtaaaacaatcaacacattttaaatttttattaaatccttgaaagaaaattgtgtcatctgtaatatttttggcccatcatcgatcccccacctctaaacttatgctacaacataaattgggcttgaaaatgtcttgggtgcgcgactttgtgaaaccaggttccccttatgtaatccatggtgggtaaccaagtcagtggatattgtagaaatgttttcaatgccgctcattcccattgaatcc

SEQ ID NO: 31343 - DNA, 647 bp, Oryza sativa
tctaaaatattaacatttttagcatggtgacaagttaaacaattttaactttaaccattaatagcaacaaaattaaaaaaaccaatcatgtaaaattgacgttcctaaatttatcattaaacaaactatcataatatgcaactctttttatttaaaacatcttacttttatagatattgttggttaaagtagcatctcggtgaccgtgtcaggatctaaaaaaatgcttatattttgagacggaaagagtatatacatgggcaatataatgatgttatgaggtgatggttgacaaaattcaaaaccaaatcattagcaaaccgtctgctaagagacaatcatgagtttatccacgcgagagatcggagggtctgactgacaagaatcactcatagcgagggacgatggtttgttcaacttgatatgccacaaacaacaagaaggacgaaaacggcccaaagttgatgcgtcgcccgggcacgtgcaccacacagtcgaacgtacggcgtgggattggatgcccatatatacggacgtgtgagccggtggcttggttgccaaacgttgacattgtgttaatgaattgctaagctaatattacctccgttttttaatagataacgtcgttgactttttttattacatgt

SEQ ID NO: 31344 - DNA, 925 bp, Oryza sativa
tatgctagctggaatcaccttatggccaccaacctgcatgatactgtaattctactgaattggtcagtactcttaagaaacattcgttctcggctttttgagtgtttttgacccgtcattttcccttgtgtcgtgcggcggcggccacttggttccgtgtaaaacgccatcgctacgatctggtctacctacctggacctggctaccaaccagccaattgtttctcttgcaacgtacctggatctctcgcgtgtcgtacagaggcgtttggctgtgcacaaggccacagggggacaattttatcgaacctgttcaattcgataagatgcactctcttttgtttaaaaaaacaagacaaagcagtagtaattctgatgaagaaaatgtctgacaaaactttgtacaccgcaggctattctgtcctactccctccatcctaaaatatttgacgccgttgacttttttaaaaaatgtttgatcgtttgtcttattcaaaaaatttaagtaattattaattctttcctatcatttgatttattgttaaatatacttttatgtatatatataattttacatattgcacaaaattttttgaataagacgaacggtcaaacatatttaaaaaagtcaacggcgtcaaacatttagggaatgagggattactaacttggttctacagaacaagggttttgccctccttacatgagtgaaatctcttatagtttaggatagtttaggatagaagtgatatgcaataatcatccgaaaccgaaatcatagctcgtaacacgtgacaaaataatgcccaagaaaaactttgcacatggcaggttatcatcatattagatgactagggatcatccctgtacaagctacacaaaactcctccaacatttagtagtagctatcaatcacagttctaaac

SEQ ID NO: 31345 - DNA, 711 bp, Oryza sativa
ttcctgcagccctactatgacaaattacatacacaattcattgcttatgctatgctcttatgctaacatcgggggttcgcattctcaccaaagcctgaatggattctggtaaattcgaatatctagaggcggatcgaactatgcatatgataacagtcctatgtgaaaatagtagatattcttcataattaacaaacaatctcaatgtgtctatggggctcgagactcacttgcccatctctaaaacctgggtaacatgcttggaacgagggagtagattttctactcgctaaggctctctttggcacaactactaattgaagaatttctttagctgagaatccctggcttcatcatgccatggatatacacgatcgcgatgatgatattatagactaatgctactattgtaggtacaatttaggagtaatatcactactataatttagtaacatataaatgttaaatcatacacatatatgatatgtatacgccatagctatatggcgaatggtcctatgctataacacggtttacgctgtgttaggatacaaactctcaacttttttcatcacatgaaccgcgtcatacacataactatgtactcacatcgtactaattacaaccaaaaactataacattggacacagacttggaccgtttcatcggtgcagaaaaccactcgatgctctctatgcaaggggaccccct

SEQ ID NO: 31346 - DNA, 721 bp, Oryza sativa
aagattttactgctaatgtctttatcttcttgcaggtcatggggatttgattgcgatgttgtccaacactgcaagctgatcttctgctgatgattaattgagaaccattatatcattatcatacaaacttttgtttgtgaccaaatgatcttcttatgcagcttattcaatatcttcatctgaaaaagtggtgggttgacttacattgctcgtacattaattgcttcaagagtgtagggttcatctaactgactaagtaactatgtcactcaaccttctccttgttgttcagggctgttcatatcatgacaattaaaatcttctgcgtttcaaccttctccttgttgttcaggagggttcatataataccaaatttaaaatcttctgcatgattcaaatgttttttgtgtaccaacatggttagccttattctcttacggtactcaatctgccaatcatgagaatttcagttttgctggtttagtgtatgtgcctttcaatctttcaattttttacagtaactgagcagtgaactgtgccaaactagatctgagaaatatctatatgatacctagaatcagtacaaaatccaaaataagtgcagctacacctaggcttggttgaatttatagaagcatcttgatgtgagccccttaatgatttctgctagtgttatcctgcataaataaatccataagcatattgccttgtcttatttgtg

SEQ ID NO: 31347 - DNA, 524 bp, Oryza sativa
ctaacaatgctgacagccgcacgatgctatttaacacatggtgctaattactaaagagggtaccatattaaccaactttatgcactgccatactctaacgtttcttgaagtggacaatgacacacgtgggacttcactcacacatcagctacagcaaccaagcttgatctccatttagtcgtttacagggcacaacgatcggtgacactaatttggcatgaactagtgccatcacaagagattgcctcttaactgttcacacgaatctgactcttaccatgccgtgactacaaatgcaggcacagaaaaatctagttctaaatccaaacttgtccttcccaccaagaagtactcgatcttcaagtcgacatcggtcaatccacgagatccctaaaacccccactagaatttactaccagcaactaaactagacgacgacgacgacgactaatgccatacttgccaagaacgaagcaacaaagcaatgcggtggcggccatcaagaaccgacacaaacggggcac

SEQ ID NO: 31348 - DNA, 630 bp, Oryza sativa
ttctctccccgaacccctcgaagaagacggtctggtcaatctccggcttccacactccgatcaatcgccaccctcgcgatcaccacctgccggctccacctctccaccgccgctgcctcctcctccaacgtccacaccgagatcacctcgcgctccgccatgacaaggctcaacaccgccccgccccgcgacatgaccagcatgagctcgctcatgctcttggcgttgctgcagcccagcatcctgtcgacgcaccccggtggcagatcgatcgtcctggccgccgccgtgtcggcgtgcagggcgacgacgcgcacgccgtaggtgttagtgctagaccctcgatcgaacaccttgcgtgcgtactgcagcaatccggcacggcaacgaacgagattcagaggaatacagagcagaacaagaacacaggaaattgagaagtttcagaaaacaatagcagataggaaatttgtggggctaattttctgtggttttcattcactgaacagagtaacatgcaactagaataacagtacaaaaactcctacttaaattccacacaaaagaaagaatccccggctcaaatcgtgccatcccagatccggtttcctctgatccgacgactcacgc

SEQ ID NO: 31349 - DNA, 677 bp, Oryza sativa
ccccctatagcaatgtacttcctccgtttcacaatgtaagactttatagtattgcccatattcatatatatgctaatgaatctaattagcatctatattaatatggacaatgctagaaagtcttacattgtaaaacggaggaagtactaaccaagagcaagaacaatatagtgtatgatatcggcgttttggagagaatgtcacattatgagcgaggatatatttatataccattcaataaaatatttaatacactatttataccatttcgtacaatacatctgttctaaaatatagcaacttttggctatacatagagatatactcttgtttaaattaaatgtactgtggaagttgtaatattaaaagaccctcattgttatttaacaaaatagaatacaaagaaaacaaaattttggttttattaagggtagcgcagtaatcgtacaaaatacaaggacttgtgtgcaaaatattcttctctccggctctcccacaccaaattcttgaccccccacctgcgccccgagcctcttgacggcggcggcggcggggacgacgaatttcttgcacccgcattccccttcttctagcaagctagccgacgggaacgccctccggttccccctatgaactgacgtcgagaccttattaccgggcggcaccagcgccaacgc

SEQ ID NO: 31350 - DNA, 723 bp, Oryza sativa
ggcaacggttgacaatcaggatccgtggttaattaatagttaatttgcccaattccaaatgcttgtttgaagtatgtcaagtccaagatatattaattcacgtgaatctaagttaagttttgcatcttctgcaggagttggttcttcataggccaaaccaaacatgaaacatgacaataggcagactagtacaaatacttccaaccctctccccccaaaaaaaaaaactaattaataaagatcctattacgtgtggagatgtaccaatcgagattctctgacttacttccgtctgatgttggcaactgacgtatgaattctctactcagctgatctacatgtcagtaatttaaagttaaagataagtaaatcagaggatcaaaatagtactctaacagtctaacacatcatacatgggactatttcaaagccgaacagttgatttgagccacgccgcacaaaaaagtatcatgttgcaagcctgcaattcgcaggttaagtgaggtcgttggaacttggcacatgaacccataggccataacaacaggcgacgctagtagttgtcgggaaagtggatgtccacccgtttattgcatgtcatctaaatggttatgaaaaaaattgaaaaaatatgaataagatagatcaatatgtaatatatcaatccacaaacatgcaatttaaaattcaacttctacagattgtaacaaaaataacaaacaa

SEQ ID NO: 31351 - DNA, 550 bp, Oryza sativa
gtcaggccgcagttcatgaaatcgtcgcccccgccgtccgactagaagctggcggtgttgagctcgaagtcccccgacggtggggctttgacggtcaccgtcgccggcggcctccaggcctgctgctgctgctgcttcctgtaggtgatgcttctcttgaagattctgcagatggtccagacctcctgcatttttttcagtcagaagtgcacaagttagaggtcaatgctattaggaggctgtactcttatcggttagaaatggcaatcggtagaatactagaaacacgtcagaacgtgagaggatgtccagtactcctttaaaacgtgggaatttcagtaggactttcacatggattagttcaatttttgtagaattttcgcaaaatttcttcgttcaaaaggaggcctgtaatctcgaaagaactgctgaacttagcttgaaaaaaaatattaagacgatttggtgatgtaaagtattgcagatgatattgtactccacactatcaaattgtacgtagttgtgatctgtcacagatgaggagaaccgg

SEQ ID NO: 31352 - DNA, 730 bp, Oryza sativa
ttggttttgaattttgtcaaccatcacctcataacatcattatattgcccatgtatatactctttccgtctcaaaatataagcatttttttagatcctgacacggtcaccgagatgctactttaaccaacaatatctataaaagtaagatgttttaaataaaaagagttgcatattatgatagtttgtttaatgataaatttaggaacgtcaattttacatgattggtttttttaattttgttgctattaatggttaaagttaaaattgtttaacttgtcaccatgctaaaaatgttaatattttaaaacagagaggggacatgccagcatacatacatatatatatatatatatatatatatatatatatatatatatatatatatatatatatatatatatatatatatatattcccacttccctgtagcccacgctgctcctctttggacatggtcgctacagaaaataacacattacaattcagtagtggtcttgctttctcactctctctctcttaaaaaaaaaacgttttggcctcagaaatgggatgtgtcaggaaaacacattcgacgacataggcaaatctgacgactaacaaggatggtcaaggctcctgagtgggtatatgtgcagtggctcttctagattggccatgcggataggtgtcctcctcgtctttgctctattgatgtggagtattagcagccttttaacttctggcaacta

SEQ ID NO: 31353 - DNA, 993 bp, Oryza sativa
aaacgggtggacatccactttcccgacaactactagcgtcgcctgttgttatggcctatgggttcatgtgccaagttccaacgacctcacttaacctgcgaattgcaggcttgcaacatgatacttttttgtgcggcgtggctcaaatcaactgttcggctttgaaatagtcccatgtatgatgtgttagactgttagagtactattttgatcctctgatttacttatctttaactttaaattactgacatgtagatcagctgagtagagaattcatacgtcagttgccaacatcagacggaagtaagtcagagaatctcgattggtacatctccacacgtaataggatctttattaattagtttttttttttggggggagagggttggaagtatttgtactagtctgcctattgtcatgtttcatgtttgttttggcctatgaagaaccaactcctgcagaagatgcaaaacttaacttagattcacgtgaattaatatatcttggacttgacatacttcaaacaagcatttggaattgggcaaattaactataaattaaccacggatcctgattgtcaacggctgccaagcccgtggtgtagttgccagaagttaaaaggctgctaatactccacatcaatagagcaaagacgaggaggacacctatccgcatggccaatctagaagagccactgcacatatacccactcaggagccttgaccatccttgttagtcgtcagatttgcctatgtcgtcgaatgtgttttcctgacacatcccatttctgaggccaaaacgttttttttttaagagagagagagtgagaaagcaagaccactactgaattgtaatgtgttattttctgtagcgaccatgtccaaagaggagcagcgtgggctacagggaagtgggagtaggcgtatatatatatatatatatatatatatatatatatatatatatatgtatgtatgctggcatgtcccctct

SEQ ID NO: 31354 - DNA, 536 bp, Oryza sativa
tgattatctgtaaaactatattaaccatacttttagagactcacctctgttgcgatcacaatcaaaggccgaaaaggaacagaagacatcaaatccgtttccttgttaccaaaaactgaaccacatgaccgctgttataggaaggcgatcgatcttcttgtgactagttgtgagttgcgaaccgactctgaagccgactcgcctagtgcgatgcaacacggcactgaatcggagtcttcgcctacagtatgtatgtaagagagccaaaagcgttgctacctgcatagatccaacgccacatactcacatctatcaccatgatggacaacacgagacatgtccctgtgccttgcaacgcctctgaagcactgatccgattcatacaagccggcgctatacatcatctcggagaaaaaggccatcgatgcctacatacccgggatgactaacagaaacgcctggccgacgcagctaggatggatcctgatccgcgacgacgccaccatgtttctgcagaacccacaggatcctgacga

SEQ ID NO: 31355 - DNA, 540 bp, Oryza sativa
catgctcagtttgttacattttcaaggtgtaatggcatattttcttttaatatgcctctttccccctaatcctgtaggtgcgattgcgtttgatattataatgcgcagtgtgtgaacaacacatttttggtacttcctccgtccccctaatataaaagattttggcattagcatgcactgtttgactattcgtcttattaggaaatttagcattattattatttttatttgtcacttactttattatccatagtcctttaagcacagctttttgttttttatattcacacttattttttgcataataggagtggtcaatcagtgcaagcctaatgtcaaaatccgttatatttgggaacggagggagtagttggtgacagcgtaacttaaactggtatttttgtgtcatggtacatatctcaggagccggtattgttttggtcacagttagggttaaagacaaatttcttgatgcattgatggtcccttttgcagaattggcccaatcaggttgtaagcgttaatgtcttttcttggata

SEQ ID NO: 31356 - DNA, 509 bp, Oryza sativa
cgtcttaatattttttttcaagctaagttcagcagttctttcgagattacaggcctccttttgaacgaagaaattttgcgaaaattctacaaaaattgaactaatccatgtgaaagtcctactgaaattcccacgttttaaaggagtactggacatcctctcacgttctgacgtgtttctagtattctaccgattgccatttctaaccgataagagtacagcctcctaatagcattgacctctaacttgtgcacttctgactgaaaaaaatgcaggaggtctggaccatctgcagaatcttcaagagaagcatcacctacaggaagcagcagcagcagcaggcctggaggccgccggcgacggtgaccgtcaaggccccaccgccgggggactcgagctccaacaccggcagcttcgagtcggacggcggcggcgacgagttcatgaactgcggcctgactccggccatctcccagcagcagcagcacggcggccgtcatcagatgatg

SEQ ID NO: 31357 - DNA, 544 bp, Oryza sativa
ctagtactcgcaagcatgataccactattctttgtatacttgcttacattgctctgtaatccgaagtgcttgtcgtgtcctagactgtcactgtggatataaacttaagaacacattgtcaagtacataacggatggatgaggatttaaacgcacaaacctattggaacaagcacatagcctaaggcactgagctgacagtgaatagtagcatgaaggagcaagcttgatcaacatcgcagatgacaatggcatgcacaggacaactactggggatggattctaatagctcgagtggatgtccacccgtttattgcatgtcaactaaatggctacgaaaaattttcaaaaaaattggcaagatagatcaatatgtaatatatcactccacaaacatgtaagttaaaattcaacttatacaagttgtaacaaaaataacaaatttaactgtaaatatacatatagtaatttgagttttgtttgttatttttgttacaatctgtagaagttgaattttaaattgcatgtttgtggattgatatatt

SEQ ID NO: 31358 - DNA, 519 bp, Oryza sativa
gccagcgcgcgtgcccgagccgcgccactccatccgccgcgccctcccgttgtttcccgcgcgcgcgtgccgagtggccgaccatctggtcgccgccgccgtcactctctgccgcgccagcccgcgcctatcgcccgtgtcgtcgcgccgctccaaaccgccccgccgtcatcgccgtcgtcatcgcctcggccccgccactccgcacgcaagccgccaagggacggaggccgagccctcctccctctgccgcgacgcccccgctcccctcctcctttttcctaaatcggcaagggggcaagcccctttctccccctcctttttccccttttcctcccgccggcgtcatcctccctccctctgtcaccgtcttggccgcgagcgccgagtgccagctcgcgccttgaccgcccaaggtcggttttcaaaccgacatcgtcgtcctataaaccaaggcgccctcccatccattccccctcccgtttcgctcgccgcccccgcgccattgccatccctctg

SEQ ID NO: 31359 - DNA, 583 bp, Oryza sativa
ttgtagcacatgcttatgtgttgacatttctagcacaaatgtatatatcctcacatgcttttgttgaaatttgaaaaactatctgaaatccttaaatatgatcaaccttgcatgcatcacgtatgaaaatgtgtgtgcatgacctagcgacataaatatcttatattgcctgggcacaatggtcagcttccaatcactacaagaaaaatgacagcatatatttctatccaaagctatatattgttcctgatttccagttgtgggctacagcgctttgtcgctttcctatttggatcactatccagttgagcgactgctaatcattttgagacaacattgagttcaaaactcttgacatatatatatgctcatttgcataaataaagcatagctacctgtgcagcttctattaagtgtgtgactagtacaaaaaaataactcccttccctttctatgttaaaagacatgacgaccagttaaatgtcacgtatcaagcttcttacttttcattctatcagtgttcagtggtgcctacatacattcaaatctacccccttagtaatttatattcatctttggcaca

SEQ ID NO: 31360 - DNA, 776 bp, Oryza sativa
cagtagttcatcagaaggagggagtactatttttgtgaatataaacagatgtcaatattttaattgcatcggaatggtgttcaataaatacctgctgtagctgattaagattgttggcgtggtaaggagcataggagccatcaaccgacataccgactagagcaaagaaatcattgaagaagattatagtattttctcaactctgtaagaatggatctcatccccaggatcagacgtggttgcatgactaatcatggtattccaatcttcattcttcatgccagtaagctggttgcaagaagatgtgagtttcttagcacgtgaatatatatagcattactagcaattttcctttcaggagcaaacatggtattacaaggtaaagtaagcaattaacttggtaaataaacaaaactgatgttcactgaacattttattccaattagtatacctgaatgatgaaatgtaaaatagatcaacttggtttaatctttaataaattggattattataataattctgatgtgtactgcacctacaagaatgtctgggttaacgttagtgcaagcggcaagtaccgccacgttttaacccttcagcatgtgaaaggtaagtagttgtgttccacacgtatgcgagtttttcttaaagagatttcttatagattccttctatatttccaaaaaagaataaacttagaaatcgacacaaatacggatttgtattttcaaaagcgaacgaaccttaaaaaccgattcatacacgaatgatgtacc

SEQ ID NO: 31361 - DNA, 504 bp, Oryza sativa
  unsure (1)..(504): unsure at all n locations
aggggtacgaattagattcggcctattttaaagggagtcaaagtggaccttttcctcgttaaaattctctgacggcccagctaggcagctaaaggcctgatataattatatttgtaaataaacgaaattatatccggtaaataaacgaaattatatttagcccagctaggctagccatcatttcgaataagcgaaacatatttgtaaaaaaaataatttgtgaataaaacttttatatatgtgttcttagcgatataaaagtaaaagataaaaaattaaaatttatgaaaaaaaccttgaaacaattcaaaatttaagattaaaaattcaaattttagccgataagcatgagtataaaccttgatcggacaattgccatccaattgtccacttgtaccacagtatcactagccccaacccactgacgcttgggacccgcacaaatccggcattctaatcctttttaacccacaccactatgccctgggacacgcgtngcgcccc

SEQ ID NO: 31362 - DNA, 578 bp, Oryza sativa
cgggctgggcggtggtcgaatcgggtgcacgcgcccggctaaatgggctacgagttattgggccgcgtcgcgagaggcgattttgggctttcggtctgcttgtcgcgttcggtgtgtgactgtaaagatgacgaggcctatggagcgcctacgagcgtcgctctgattatcagggaaaatatcagtccatgtcatcacgaggaattttactagtagatttactcacgagtaaaaattttagtgagtggtgatgtggacgaatcttagacgttcatttttcgattcaacagtaattttcactacatatatggtttgcagtatatattttcccaattatcatgacaaattccccgtctatgcttttgatgaatattgtcaaccaccaactcataatctcatttgtttgctcatgtgttctcatatcagtatgtataagtatccaatggcggatttaggccatttctgtggggtcggctgaccccacagctttttgaaaaacatcttataaatcttaattttcatgtataaatccaaaagaatttagagaaatgaccccacttaaatacaaaccactagta

SEQ ID NO: 31363 - DNA, 526 bp, Oryza sativa
tccccttctttttttttctccatatcatactaagtactctctcacttgtccttttccttgagaccaagcacaagcacagtccagcagatcgatggtagtggtgcattgtaggataatatataagcgcttaaaaaggcctagcaaaaaaattggatgatacatcgaacatgttcatcagttgctctctatcggaatgagcggcaccgggaaggattccatgaaggtggcagcaatatactgtacatcacttcctcgaaatgctgcggcgaatgctatcgaagtagaatggccacgatttttatgacttcccatggaaatggaagaatggaattgtgtttagtttagttccatgtcgtctcgatctcgtgatcggcacacggagcaccagtgcttagtctatgaggtgaatgcagaatcgtctatgaagagaatgaagaatcgacttgcttaattcaagcttagtctctcaactaaattcagtataagtgctaaatgttggcctcttattatatatctggttaaactg

SEQ ID NO: 31364 - DNA, 663 bp, Oryza sativa
aatagtacatataactatgtttgattttagaaacctagcacaacaaatgtaccaaactttaattctaacggaccatgcatgcatgcatatgcaataatacatttgacgaccaatgcaatttaaactttctgctctaataagccgggtctatcagatctgatggacggccggcccattggcatgcatatgtatgctatcgctgacctatatctgccatgctcttatgctgcatactgtacgtataacttgcgtatagctagtacgtgatagcgacattagataatggacatgtacctgccattcatgcaggaaaactggactggacgatcgcataccaatggatacgcatgattacttaattattgattgcctcacattatttcctttgctgcaattgttcttagagtaactttttcaattgcaacaaaggtatctatctatcttctatctatcgattatatactaaaagtccattaaattttctatgaacactctcaagctgacatgtgacatgcttaaaacgatcttaagctggcacatggcacaacaagatatatatatggacccacatttgcagccccactcaatgtatcgtgtatctgtgtgtatagaaagcgagggcccacatgtgcatttcccggacgatgcatgcattttatgtag

SEQ ID NO: 31365 - DNA, 600 bp, Oryza sativa
ccgtagtaacatcagatcaagcgtaccattagagaacaagcaatctgcagagagggtacgtattaggttcttgaaccatcatgcaacataaggcgcgtgtgattgcgatgattaaagaaaaaaactaagttcacatatttcagttctgtggcttactttggaactactagaaaattagtttcaaatataatcaattaatatagtgccggtatacatgaaataaatttaaaagatggaggagaggtacttataaattaaatatcactactgtcacaataaatgggaataattaaactgcagggcacgccggccgctgcaaggaatacttggattcatgccctccaaatcgtccacgtacacttcttgtaacattatggctgctaatattccagctatatagtgtacggtaagtttagttcttaatttaaaattatttttaaggtcatgaattaattaaagtggaattggtctagcttgtaagtgtcagtgtacttgatcgatcgcatgtgatcatgaacattctattgccctgccacaaaaagctgctaagagtcaaatccgtagcttgcataaatatgtaaaacgacgcctatattatcg

SEQ ID NO: 31366 - DNA, 598 bp, Oryza sativa
attccttattttaaatttcgaatttcaattatttttaaattgtattcctacttagactcttaatttttttctattttcagattttattttatttttattctgaatttcgattaatctcatattgggttcctatatggagttttctttcaatattacttatttttaattccgaattcagctatttttaaattgtatttctatttggactctccttttctttttctccgattaatgtgggaatttctagcccccacggcggcaaagtggtgccttcatttaaggctgttttaataatataatagattatgcagaagtataagatataaatcatgtttaaagtattttgagggataaaataactcacaacaaaataaattataattacgtatttttgaataagacggatggtcaaacgtgtggcagaaaattaacgacgtcatctattaaaaaagcagaggtagtattaatttagactaaaataattcaccaaacacttcaccggttcaccctttgtcctattccgttctgcagagaaaacagtgcttgaggttcagagttagtagaagctgcaactctcagctttgctagctagctagaa

SEQ ID NO: 31367 - DNA, 596 bp, Oryza sativa
agattaggagtaggaagtggtcagtttgcatgcatgcaggttagttggttggtgcaagcaacgacgtcggcgaggactcagtacttgtgaagttgcggccaagtaaacaggacgtgggcgtcgtgtgtggctcgagaagcggaacaaccagcttcgtgtgtgtatgtgctgtgctcattgtaatcatttagttaagagaaaaaaccagtgaaaagggcacaagttgttttggtgccgcaaagatcctgtgtgtttgcttctgtgtttgtgtttcttcctcgctgcctcgttcagaaagtgtagcttgtattcgcgtgagttgctttgattcccaacatccctcgatctcgggctcctctctcccggcgttggcggtgccttcgacccctcccttccccccccctcccgggcggatgccgaagagggagagagagataatgtagagagagaggagggagaagggatagacccacagtgggccccacaaaatttccttttgtgtgaatgaccaatgggccccacatgtatgtttttaattgcaatgccaccctagcgccacgtcaatagcagactaggtcaacacttgcacgtagacg

SEQ ID NO: 31368 - DNA, 869 bp, Oryza sativa
ccgattagggtagtatcggagtttcagccgatcttatctaatttaaccatattcgatctatatgcttcagtgacatgttaaatccgccctttatgtcaagaaattattgcatttaagtatattaagcttttgtttggtatattatacttgttttgatatctttatatagagtagtatcggagtattagccgatacatgctagatctatctgatcggctatgctataaacatatataatcctgttattaatatatatttcgatctaagtgatttatactgtctcggcatggtgaccgatgaccgatctatcccaatcacttgatttaagtatatattaatataagaactatatgtctttaatatctacagccgatcgaatagatttagttcctcactgtctatttataaccgccgatcgatttatatatgacatcggctcaaagataaatgatatgtcatcggcacctagccgatcggctatcatttatagatttaactacgaattctttgtctctatttcttgttgattacaggatcaaatcaactggcacgctcatacattcgaaggcgagctttggacctgcactggagttaagcagatctcccaggcctcatgttttctgtcaacagaaatgctagaatgacttacattgtgaaacggaggaaggtacctacagctggtaaattaaggatgagaaaattcttcttaatgcctttggatttttcacaatttctttaatctttctaagtttttgccatcttttttaagaccattatgatgctctttgctactaagatttttctatcaagattatcatattagaagtgataccaatcggtaatttacgaggtctacagcagaaaaaaaa

SEQ ID NO: 31369 - DNA, 637 bp, Oryza sativa
ctgttttttaaacagttatgtaatttctcaaatagaatgagtggtcaaatatatatgtctaaatactacatcaacaatatcgtatatattaaaaaaatagagggagtactgcagtaaggatatggtgtggtcgggacctgtatatacgtaaaactcgtgatgatcagtcgaatccatgtctaatccattgcgtgattaatatttcgatcccactttcgcagatagttgctgggatcggcaaaatccctacacaaaaatactactaaaactgattgatctcgcacacgcgaatggagttattaaattatacatcatgcacataaacacttaatgcaagaaattaagcagatcaagatatatatataacaaatcgttcgtgtctagctacagagacagaaacagatcatccatgcatatgcatggtcccgctagtagatagctatctctcgatctctagctagtaggtaggtcgttaacctcttgatcagcatgcatggatgcagcttgcattgcatatatatagcttcaatgcattggttgaactctggaacttcaagctatctaatctactagctagcccttctctctctctctctctttctctcttacacacaaaacgtactctcttaattgatcg

SEQ ID NO: 31370 - DNA, 638 bp, Oryza sativa
catgtgggatgggtcctattactcagctatatgttgtttcccttatgccaatgataacttgggtattaaaatgactagatgttggtttaggagatgcttagccatgcttagttcaactagtgcacaaaaggggaccacattaaagcatagacttgattattggcaatagctttggattagtgccaccgcaatggtgttggctaattaaaatacactacatggtgggctgtgggtgcatggttttgctagacgtgcccatggcgattaaggaccggttcgcgggatgccctggaagaatttatcgtacttaccacaagccagcgtgggcaacggctgggcttgtagtgtagcttttctctagccgacgtatccaggcgagggtgggcgtgatggagttgggtcggccggggtgtcggttgatcggctgccggattcaccgcggcacgaaaggggggctgcccgttgcctgctggggacgggggcgaaccctaaggtgtggtgcgatcggttagagggggttatgcgaagggtcctgtcacggcctctttccggtatgtcgtggtggcatgtcggcgcacgggaacgtgtcgtggggctgtgtcttgtgggtacagttgtacacctctgatcagagtaaa

SEQ ID NO: 31371 - DNA, 1058 bp, Oryza sativa
aagaatttggaattgcagatcgatcgagtgttgggccgcacttgggccgcacgcgggccggcagatcagcaagcgagagaaagagtatagagatataaattagactttggtcgcttgcgggctgaagaagaaagtgggctaaaaaagaccaataaagataaaaggatttttatttaaataaatgctaaaatgatatttgtattatcaaaattagcaattaagctacgaaaattccaagaaaatttcaatgagtgtaattaataatatagaaaatttaataaacattaaatccaaccataacattttatttctcacacttactttaattataaattaatttaattatataactaactacttaaaaatacccaaatatttccaaccagaacattttatttctcacacttactttacttataaattaatttagttatatacctacctacttaaaaaatacctaaatatttcagaaaatttgtatttcatttaattaaatacctaaatatgttttaattcaattttatcttttttatctttacccgtagcgaagaacgggcattttgctatccattaaaacatcatgtggcatctaaaccgttacatggctctctaataaattagtgaaatctattatataataaagtccattaatctttttagaaatacttttaaaccgtcatggggcaacctacaaatgctcgtaaaccatcacatgacactctaataaattagagaaaatcctagaaattataagaaaaaaagcaaaatatctagccatctgttctaccttaaattgattttatggacctgttattttcaacctttagatcttgagatgatctcaaatatatgtctaaaaaaatctcctttatctcggcatgcgtacttcccctcctcccttaacatacgtgcatgtccatgtgcaaaagttgcgtttgggttaagcagaatgaaagaaagggactgtggatgtgaatttgttgatcttcgatcaaacggctgtggcacttcaagtgatttagctgaatgcagcacaggaaaattgttataactacact

SEQ ID NO: 31372 - DNA, 551 bp, Oryza sativa
tcgagccacacacgacgcccacgtcctgtttacttggccgcaacttcacaagtactgagtcctcgccgacgtcgttgcttgcaccaaccaactaacctgcatgcatgcaaactgaccacttcctactcctaatcttgtgcaagactcggctaatcactagcccacaattatgcatggctaactaactaagctacatacatgtgctctcatctcctggctctttattggctcactactccctgccaaccactactcactaagccatgcagcacccacgtacatatagctagctcgccaggccatgcaatacacacatgcatatagataaacatgctgaaattaagaaacaacaagattaatttctaacaagggagccgtcggcgcgcgcgacatgtgggtctgtctctcccggcatgcggcgggaaccagcggcggcagaagcgggagtggcggcgatagccgtgagcttcgtggatgcctccataaatgacgacgacgacggggtctgccggcaacttctgcgacgaggcttcaccgatgagatggccccc

SEQ ID NO: 31373 - DNA, 1197 bp, Oryza sativa
ggcgacttaatgatgcaacatttatactgcctccagtcaccaaagaatgttgttaattaattacgtgatccttgcaattttgattaattacaattattgattaaaaatattggccctagacatagaaattgtatagccaaatttcttataatacaaatgctcttataaaatcaaatgtttgtagctttttcgtatttataaaaagaataaagttgtcaaagttgtaccttgtttggctttgaaaagtccaaaacaacattatattttattgggggaaataacttttacacacccccccactaactattctatactattatcgtggtgcaaaagaaatgtgatgatgtttacgtactccctctaattttttaaatagatgacgtgttgacttttagacacataagtgatcgacttatttaaaaaaagaattgcacatgcataagatataaatcatgcttgaaatatttttagtgataaaacaagttacaataaaataaataataattatgtaagtttgtttgaataagatgaatgattaaactatatccaaaagttaatggtgtcatctattaaaaacgttggtagtattttggttacaaaacacatgagtaagcatgattcatatgaaacaactctaataattaaatgatgattaatttatctctactacggttaaaagcggagtcgtccttcttccctctccttctcccacatgtgcaatgcgtacatgctcctgagtaacaaccggtcattctaccctgtcccctattatatagacctgacccgttatgacatatggacatattttccctggacatattactagtgtaggtaaaaatatggagtattataaaatatagcttaacctcattatcgatcacgatgactggagaacttgatccaaactttctgttgatgccacttgaacttctggtctaacctctcaactaggcaaagagctctagccagaactttcggtcactattactggaacatttttcctacgtgagtgtggtgcattgtgtctcacttaagataaggctagagtaaattctatgtgtactcctgaaaactcactcaatcccttttgtacctctgaaatttacccaatcccttctatacccctaaaattacaatttgatctcttccatgcccctaccattatattttccatcatttcactattacattggttgc

SEQ ID NO: 31374 - DNA, 1908 bp, Oryza sativa
aaggcaccaaagtactggatccatctatgtttctcctggaattcgttatgcacggtcgtgctgatgtcaatcagtcaatgtgtgccagccaacaccatctgctaattcactataattcagtctataacgtgtgctcctacaattttttttctttactattatatttcagtttcaatataagtatattacttttacgcacaaaagaaatgttggtttcatataactatccttcaaaaatgtattaactctgtttttaaaaatatatatatacgatgcatttgacttttagacatatcgttgactatttattttatttaaaattttgtgcatatatctaaaaatataaaccgtgcatgcttaattaaagtacaatagtagcggcagacaatccccgtcgacataaataccagttagattagattaccccgcaataactgaaaaatattttacaaaataccatgtaattgccagatattttagtttcaaacccctccattggaattaactagttttcatgtataaggtagtgctgggggtaaaataaaagctataaattaatgtataagtgacgctaaaacttaacccacatggaaatttcaaaaactcacctacttaaccacaagccagctgaaacttttataccatatttttcctcaagctcataataacacaattgttgccatcccaaccttataattttattttatttttttggcaagactttccctgaaccaggaaaattaaagtaaacctctatatatatatatatacatatatatatacacacacatatatatatatatatatatacatatacatatatatatacatatatatatatacatatatatgtgtatatatatatatatataacaatattgcaagttaatttgcaacgtcgtttgtcatgtagtaggtgaaggtgaagtccagtaaaatgaacgtattaaggtttgcatggttggctctactagttacacgcacgatctactggagaatgccaaaatgattttgtttcgttttccgttgtcgcctcgctggacgcaaggcttgttcttgtctacatcatgccatgtgatccgatgcctatccttattactactttatagtatgtgggaaatgctacaggtacatatatatatatatctatcactctcacaaattctataaataagtgctttttttaaaagaaaaaactgtcgttgttcaccgcttgcttatgctttcgtatctgtaattagatattcaagccgaagaaaatcatgtgttagtcatataaagaaaacgtcatgtatatgaagcatctccttacactactgaataacttatcttttatcatggtataaaacacaaatatctcggatagactaagaaccgatattaaagatgtttttagtaccaggtctaaaagtccaagtccaaaaaacaactttaattttggttggtattaccaactggtattaaaaatgttatcagccaaaactaatgctggagaatctttaatctcagttggtactggttgataacaccaacacatactaaagatagttttagtaccagttgtcgtaataaaccggtactaaagatgcatctagggttagttaaaaagaaagcatctctctaagttaagatgtgtgtagttgatgggatggttacacgcgtaagagctgagatgagagatcttgagttcaaatcccgtgtcccacatatttttggatttggtatgcatttttagttagtaccggttatttttagtctcgagttgtagagcccgatgactaatagtattttctaatgtcgattacattttacaatatcacttgcaggacatcagcagcaaagaccgatggccacccgactagttagcccaggagctaggtacgctgaaaaagataccaagggctgcag

SEQ ID NO: 31375 - DNA, 1529 bp, Oryza sativa
taaagtatacttagtagggatctgttgcaatgcacggttgtgatgctaattaaacagaaaaatgatagggaaggtttctgcagtcagctctgtgttgcagagttactaaagttggagctctgtggcaggaatccaggatagagagtagagtacaagtcttgaaaggctgaaaccagttttgcatatcaactttaagaattggtgttgccgtaagcatactagagcaaactcctttctccatgcttcacagagaggaactccagtgttgaaagtgatacgatcccattgtttccaagtttgtctagaaagttaggatggtttattttcctagaagtagcatagcggaatgctgagatatgtcttttgcagaatactggtcagtggtccattagaaagatatgttccatattacatgcaaaacccaccagcacactaaaggagcagccaaagcagtgaaccagtcatgaatttgcactttgatatggcaacaggatttccaaagcaatatgaacagtcatagaacctccctattgttgatgatcatattgtagactggtttatagttgaattgacaagtattcagaagctgacaatacaaattttctaaaaattcatatggcgctttatagaatacatggagaaggaaacaaacaatagggtaattgtctggtttgttcagatagattagactcaatagaggacaacaacgagtggctgactttgctgaatagttcgtggtaaaacaatgtccaagaggtaagctggaaatgaggcgacttacaagggatggatctttcagtcaactggtacagtcctggcctacatttgtaaaacaatgcccacgaattgttcattccataatacatgattgcaatctcccattgtcttccttcagtaaattagaatggatgctctaaatggtatgactatgctacttaagtgtacacacaaccaagaccaactcaacacagacacagtccaaagcactaaatgttcctatcttattgaaatttggtcggtcagtctttcagccggcctggcagaaaaaacactaaatgttggactgtcaaaaatagtactttagtactccctctgtcccaaaaagattgcaattttaggagtgaggggggcaaattagtagggaagggaaatgacctagattgatgaaacaaagttatactataggattgcatttttttttgggacagaatttgaatgctagaattgcaatctttttgcaatggagggtgtagactttaattggctatactaaaccagattactgattagacttcaggaactgccagacttacactatgacccagaagaggaaaggtctgacacaaaaccagaaagtccagaactaacatctgacaaaaccagtacagatgcagctattcaaaataagcaagaaacttggaatttacaaaccacatgcaaattgtttttatgtaacaatctaactaatggtccttgggaaatagaaggcaagaaatcaatcctcaacatatgatttggcatgacatgca

SEQ ID NO: 31376 - DNA, 1630 bp, Oryza sativa
cacatcttgttatacctaattttgatggcccatgactattataaggaggtaaaggggtcttgagggtgtggggcgacacgagtcatagctgagtcggtccaccactctgcctaatgggtggatccgcccctgtatatagccccctttatctgacgcagttaagctgttaaaactgcctatgcacacgaaaattaaagtagtgtgctaaaaatttgcatatccacttccactaaggcagaagtaataaacaatgactctccctaattaatttatcaagctagcactctacattaattatagccagttgcaattggccacatactttgtttaaaactgcatcctctttggaagcaattccttttgttgttcttgacacactagctaacaatcttcacttggcataccaaaatgataatgcttgatttgaataattaagctaagccagattaagactgcgacactgaagtgcaaagcaatggcaaaccggtcattacacggtttttgccgacaatagttattaccgattgtagttaattaattggtcatgtgaataaataattcttcgacacagtgatacataggaatccaaagattgaaatcaaaaagaagaagaagaagaagcaggtgatcattccataaactggtgttatctgttggcgattaattaagcataatcaggggcctgatggatgattactggttgtgcttttaccttattttttttaagtttgtcttctcagcaagagccttttcggccaccacacgcaacaaagcattcacaggtagctaggcctcgccggtcggcaacgcaaagagtcacaaattaaattcccttttagctcagacagagtaatacagtaatttcaaaagagctgaatagtattactctgatttctttttttttttaaaaaataaagacagtagaagatctagtttttacatacctctagcgacctctgcatctgagatgcacaaattcatagttatactaaaattgatcagactataacaagtatgccctaggaaattgaaattaatgttgctttttaaaggtgtacaatactcttaacataacgattttatgggcttcatatattggaatacacaattggaaataaaaatgcacgaatagaatatcatggttgtggaataatatagggaatgaattcatattaatttctaaaaaatagagtttagtaatatcaaagataaatcatatgaacttcaagataatgaaggagataaaacatgaggtaagacctcatgctacctttcaataaaaatatcttatggaatagttccatccttggaattgaaaagagaactcaaatgaaatctgaaggatttccataagaattactttagttcctggagaaccaaaacaatttctcaagtttcaaagaagacataatcttttttttctatttttcttggttccaaagaaggcatataggtattcctcttacaaattgctatgtcaatcattgatttccttaagggcttattcggtttagagaggattggaggggattgagggtgaataattccacaccacaataggtgtggaataaatcccctccaatccctctatcacagggattaaccgaataagacctaaactgggcccgca

SEQ ID NO: 31377 - DNA, 604 bp, Oryza sativa
tcatgtacgtttgtatgttacggaaagaacatcagtaacgtttgtatcgtacaatctcatacatacggacagtagcagctagcgtttgtatgttataaacatgtggaagttattatttttttaataatagatctaatctaatggtgtaaaataacgggtccaccaatttaagtgaaaatcaacggtaagattagatagtgccatgtggcgacttaggagtgtttgtaggagtgccacgtggcggctttaaagcgtttgtatgaagtttaatggacttttagtacataataatagatgttaatgaatttggatagatatatatgtctagattcattaacataaatatgaatgtgggaaatactagaatgacttacattgtgaaatggaggaagtatatatattattggacagagggagtatattttagaacggattgcattcatacgcacatatatatacttcctccgtccaaaaaaaaagtaactcaacctaagaatggagattcattgtattaccaaggatcacatctacttctaaattgagttctctttttactactcgatcgatgctccttgttgtgggggattcctatttcgcgcgcgct

SEQ ID NO: 31378 - DNA, 625 bp, Oryza sativa
ccgctcttaaaaataccatgatgctaatctctatcccggaaaaaacataatgcgcttacgtcatacgatcgtctccctcccggaaaaaaaacaaaacttaaatacctacatcatatactataaaaaaaaaataaagccaaaaaagaacaagaaaacatgcataggtacatagtaaaatcggaaatatatactaataaggaaaaatcatcagtgtcggcactgatttgttgtcaacagcctttaatctacgattttattaaaaataatactacacatatatgcacaattaaacttaatataaacttattatagtgataaatatatcatgaaaaatgacgctaacatgtaatagttaatacgataataatgtttcaaataatttcatatcatattttacagtgtcaaatatcacttgacaaaaatatacaacgttaattttaatctacatgtgtaaaaattaaaaaaacaaaacctatcattgttttttaagtacatctgtttaggtttatttaattttaggagagattgagattctcaaagtatttggaagttttcaaaaattttcttacttgaggtgtgagaagcacaaataatagatagatgagaaaaattaaattaaatttta

SEQ ID NO: 31379 - DNA, 561 bp, Oryza sativa
aattcatgatgtaccgtatcaagtttaaatggacatttttcttattcctatatggaattagcttatatattgctaaggcgacgtcatggttatttcaatgttaagattccttagtgcaaccaacgtgctctgtacgatcaatatgatattcaactggttacgcgacttcatatatcacatatataatttagatgctatgatcatcttaagattatttatttatctcttaaaaagatcatttattgataaaagatcaatataggaatgtatgggtaaatagctcttatatacatgctgagggaaaaatataattaagtagatagaaagtcattagatgtctaatggaatataagtaatgggtctaccagttttatgaaaaattaaggtgggatattttgatttttagtgagaaattttagaattttcttttatttagtggaggcctcaatatggatgtgggtctagaatgtaaatttttgttagcaaaatatagtccatatgggtattaaattattgatttcacataaataatatggtaattcaaacagatcataaggggca

SEQ ID NO: 31380 - DNA, 567 bp, Oryza sativa
aatgccttctgttctccttcttaatcatgatagcaaggtttgcatttttttttagacattacaggcacaattggaattggtacttgcctggcagtaaaagaagaagtacaattgtaatttgatcaattttgtcaaaactgtccttccctaacaaagaattccttgtgaagtagtagcatgtatatgattccttattctttcctcatgcgtcatgtctgctcagcaaattaatgatttcttttcataaaaaaggagccttagtgattcttcttttttgatttgaaagcatacgatgattccaatttaaaaaagcacaccataaaatagccttttagagctgatcattctcatagttcccctttggtgcttcttcttttgaagataaagataggcctagcaggtgcatccacaagggaaaaaggcaaaccaactgtttccgttgtcaattctgaattactaatataagagtctctggatgctgcataatgcaggcaacttttgagaattatcaatagacccaagaaagagtactacgcaatggctttgtcatttcattccactgaatgc

SEQ ID NO: 31381 - DNA, 686 bp, Oryza sativa
tgacatcaaagattgctacaagttctttgccattggctaaagcagaaaagatgcatgtggtggttcttcgtatatgcaccctgagtaataatatgcaattcatgtaggatccaccaatacatgtttaactttttttaaaaaaaatatctctcaggtcataaatattttactttaacacaaaatattatcaattttttgaaattttgaccatcaatagtttattaagttcttagttgttaaacaaatggcatatatgtaggtaggttttcacttttcagtactatcgtaatatcgtgaagtcattcaattttataatttcttttttacaatgcaaagttgatgatcaatgctataaaagtttgacaaatgatcccattgttttgcttatgcttataaaccaaaatttaaattttttaaacttgattttaagttatttttgtgttctttttatcatggtttattttatggcactcgtcttttaccgctaagaataacgttttacccataaataaatgttttactaataagtaatatgaataagtataaggataactagaccacaagttttgttctaaatggtaaatatttatttataccccagaaaaaaaatgtgtgtattatggtcaggacggcatctcactgacctcaaaatgggtaaatatcatattttcttttaccgggggagt

SEQ ID NO: 31382 - DNA, 729 bp, Oryza sativa
ttccgctccgcccgcagttctagtcgtagtcgttgtcccggggtgagccgaggaccgccgttcgccttcccccttcccctcctctctgtcgggtgccgctcccccgcgccggtggtcgccggcggtgaccatcggggcgcgggcgcgtccccctcccttcggccgcgccggcgaggccgccttcgggcgcgccccgcggctgccaggtggggcccggccgtcagccgcccgcgcccgcgggtgcggctgacgcgtgggacccacggcgccgaccgccgccagccgcgtgcgcccggtccaccgtggaccgtggggctgacgcgtgggccccacttcccgtggacccggtccgcgcgcccgctccctcggctgacgcaataaataggatttttaattgaaaattaaatgaagaaattcgcaaatatccatttaaagagcatataaacttcaaatggccatatcttggccatttgaactcggaattggaccgttcaagtctctaatttttccttaagatgtaaagaacccatttttgtgctttgtttctgctgttatgtggagtttagtagtgtaaaagcccttttcttttccgttggtcgtgtagacgctgcagcttcggaagatccgctcttcgtggaagccgaagccgtcatttgggaaagcgagcaaggcaagtcacatcatccttgaacatattgaatcccagtttgtaaaattattttgatttaa

SEQ ID NO: 31383 - DNA, 697 bp, Oryza sativa
cgttggcccggtaagttgaccccccccccctcttatgcattagtaataatcatgatgactagtttatggtaaacttgttaatggttttctggaaattgggaaaaaaaattgagtatttatactgccgccgattcagaacatatgtgaaggtactgctcggaactgtcatgtggctatacagggcacatagccacaatggcagaaggcaatgtcaaccaggacctgtacctagacttgcaaacacgtgatgcgagagggaaaggcacttgcccacgcttcaaagttgaaaaatgctgcaaaccaaaagctgtatgagatgatcaaatgatggtatcttcgaaatgtacccacggtgggctgcgatgcacgtacgcagccttgtaaagtctttccaagcagtacccaatcccctcattgctcctgagaaatttcgtcactcaccaaaactttttagtcaaaagttcagcggaaaaaatggatcatgccgtcactcttttccttgccctattaccatcaacccgctgtttgtttcgtcttgtcactttcttgatatatgacgagttgtttctctaaatgatatgtttatcaactctttgttactgtaggtcacatcgttgtcataacacggccctcttttttctcagatcacacgtacaagcatgaagcatcactcgcaggaataaaggggctgcaggaa

SEQ ID NO: 31384 - DNA, 600 bp, Oryza sativa
ggagtgcggggactatttaaggttgtgctagcttgtcgaattgaatgcatggatgcgtacatacatttacatacccacttgggacactttcaccttgcctccggacgagcgagctatcagttttaactgatggataccaacacaagctaaggaagagggagactagtgcaaccacgctacggacctactccctccgacgtaaccaaaaaaaaaaaaagacagtccctgggtttccacgtccaacgttagactgtccgtcttatatgattttttttgtactcagcatttatattattgttagatgatcaagcatgatcaatacttgatgctggacttatcattgaaataagatgactaatttatttaagtaagacggacggtcgatcgttggacacggaaaccgagggtatgacttttgctaccttggatgggaaagatttttgcatgtcaaggaaacgacgcactattaacttactgttgtatatacgaggagtaactctctgacgctccacctgctgactgtataaacatgccgggcccagacaggtgtactctccgtgtcatacagcacgcgagcaacttatctaagccgacggatct

SEQ ID NO: 31385 - DNA, 558 bp, Oryza sativa
tcacgtaagcatcgatccctcgcgcaagaacctgtccattcccagcgatcaaggaacctgttggtcaaaacactgtttgttcatagatcttagcagtttttttcgattcattctccactggtgtcattgtcagattgtcaaattgtcaaatcgatcgatcagcactctcattctttgaactgtccctagaaaaagaagcgactccggcagcgttcataattacggcctgatcgaatcactgattagttcatcatgttcttcttttcctctctcgcgccagcagccggactaacactgatcctatctgttctcttagtgtactgatgacattgtcatgcaaagctatgattgttgagattttagtggcacgtggagatttattaattattatcagtcttcatctccagcgatacgtctcgatcatcgaatgaaacaaattcaaattcaccatgcatagacatttgatgcgaaatctgaaacttccgggaagcactagacacgtcctgttaattttaatctgtggaagaaatgcatgtcaggtccagacacagaattgca

SEQ ID NO: 31386 - DNA, 891 bp, Oryza sativa
ttaaaaagcccactgggccaagttccaacacaacattggggagccgccgccaacgcgcacgattttttctagacggcggctcaagcgatgcaagtgcaacagtagcatggcctctctgaaacatagcaccagcttaactgtatcgtgtacaacgaggacggcggctacatcacatgataccaatgaggccgccaaccactgccaccacggtggcgaggagccatgagcataatgcggttagaggtgggctcaggaatcacggcagcgacatgcaaatgcaaacggcttcgcatcacgccatcaggccatggtttaaggagaagggaaagatggtggaacattgttcactccatgtggcatcatacattttgactcattttagattgttcactccattggcttgtggcatcatacaaatcgagatgtagggagtatttgctaactcgtgtttatactaagtaataccaccatgtttaattccacccacaagatggacacttatcaatataagcatctttgccagcaatttaaaaaatacagcaaatctggacaatcaaattttgaccaagggaaagacaaacggactagcaacagctattttgtccgtcaataattcaataaagcatgcccggcggaaatgttcaactgttcatgtcagcaactaccagttcatccaaaataagcttaccttaattacgtaagcaacagcctctgaaaccttcatcgagtgcccatatcagcagcaaatgggtcagccaaaacaaagtttacataaattaacttcgaccaacagccctgaaaccactagcccaggccacagccagtgtaatagcagtaccctggtctccgtagtacatatataaagggtaccgagctcgaattcgccctata

SEQ ID NO: 31387 - DNA, 562 bp, Oryza sativa
gaagcagctcaggcgaatgttgtttcagaagagaagacctgaaaacaccatagcagttgaattcagaagagaagacaaatgcaaaattcaatgcatggcagctgcatcaatttgcaccactaattaattaattaacccatctttttatagtgccctgtcatggtgatcaggactaatgctagttcagtacattgttacttcgattctcttccctccgattcctaaaatctccgaagcatatcatttacaacatgtgaacttaacttagaaatgccgacaaaaaaattcagaactttgaaaaacctgagcaaaaaggagaatattttgacagaaccagttcactacagcagagactacttcctcctgtacaaagatactgttcatggttcaacagccacaaagctagcaaaagatagaaacgcaagcatcatcaattggagaactgaatcaatgctagaccaatgtaattgaacggttcaagctaattaccagcattattacgacaggatgggtggattgactattttactgaattgaagcttagctatcaagcggctttaaa

SEQ ID NO: 31388 - DNA, 542 bp, Oryza sativa
  unsure (1)..(542): unsure at all n locations
tcggtaccccatgcaaggccaagacacgtacaatccacagcccaattaatcagctagctagccacaaaacagnnttggtcctatctgcttaacgnncaggacgcgggggatatgctccaatctcctggagagcctagctagctaactacccattctaattagcaatgggcaccacgaatgattaatgtagagtatgtaaatcaggaaattcttcaaggggtctttttgctgtattgaaaggcagaaggcccttggcgcattaattctgaaggatttaccatttattaaagctggaaataacacatatatatacatcgatacatttatacatcccataaaaatactaaaacacaaagtctagacccttgctaggcgagataaaggatatgaccggatatcattcatgcccgaaaaagagtcggattcctaggcgtggagccaataattcgaggcaaaaaacccgggggtgaaggagatgaaaagaacgtccttgcattataccacgaggtcgtgtattatattagtagggtctatccaaaaaa

SEQ ID NO: 31389 - DNA, 578 bp, Oryza sativa
agcgcccgatggatttttgaatgatttgtagtttctttaagatgtttctgtgatctgtgaataattttgtttctgaatatgtttcgatctgtatttgtgagggtttgggaatggcgcaatgactacgattgtgagttccggcttgattcgagccggctctttttttttttttgctcgtgcaaacctataggtgccggctctattttggtataggtgccggttgtttttattggtgccaaccaataggtgtcggttggaaacccggcacctatagtcggttcccaaccggcatctatcatggctcttgtactagtggtataggctaactgcagttaattactcggtggtttcgttatttgtcctaaccatggaccattgggtctccatcgccatgtcactgtctcatatctaattggcatcttatggatttatgatgctgagatatgtgaacttccgtgtaaactctcgatggatcgatgtgaaagcttcaaggttttgagcaatagattatctaagatataatggccgagctgattcattcagagtctcaaaattaaatgtttacttggcctattagg

SEQ ID NO: 31390 - DNA, 592 bp, Oryza sativa
tctacaaacttagttataaagcaatttgactttgaccaaaatcaaaacgttatataacctgaaacggaggcagtagtacgaacatatctgcacaaaatgccgactagatgcatgacatgtactacatatatttcctgtcgtgttggttactgtactgtctgtacattgcaatataagacgaatttatttgtacttcattttttgcaatttgcagcaataggatatttatgcagctcgatcgatcacgtaatccatgtagcactgaatgattttcagaaacgtgtcctgcatataatgttcgcgtacaggtcatgcatggcccacgtacagattcacaccacatgaacaaaatcttgctctagttattacacggtcaaaggcgcccttcgcccccaattgcttcatgcatgctgcggccacagtaaaaactactgtttaattaattaaataaatagtatataatccaaaaattaaattgatccaatacctgctacattatatagtacaggttaatatgatgctagctgttcattgatctggcctgtcaaaaatgaggtgcttattttacatggacccttgagctaacacccta

SEQ ID NO: 31391 - DNA, 642 bp, Oryza sativa
taataaaatatgcaatattgatgatagcatatggattgatttataaatgcttatgtatatgctttattgaattgttattcctcaaatagcttttatttgctcattgtgcaagagaataaaaaatatctatgaaagaaaaaaaaagaataccgaatccttggaaatagtcatgacgataaatacatattcgatgtgagcaaaaataatgagtgccgaatccttggaaacagtcttgacgacaaggacatacccggaataattgagagaaaaaaagtgagcaaaaaggctcaaaaaaaagtttaaaaattctcttgattgttttgtactaaagttaatttgagaaagagtgataaatgtaataggtatatatgtatagtgtttatttttcaatctatgtgcttgtgaatatattgcattataaatcatttgaaattatgaatccttattgctaatttaagcttaattgtaatatctttgattcatgtttatattatgatgcatgcttgctaactggaaaaataatttatcttctttgtcttgcaacacacgatcatggattgcttttggtgcacttcaaagctctcgaaaaaaattagaaaatagaaaagaaaaaattggttatttcaagtgacaatcatgaca

SEQ ID NO: 31392 - DNA, 666 bp, Oryza sativa
tgcaaaaactttagatcggtaaaaatctaaagaagaaaacgagctctgataccacttgcaggatcgaatactaactattgttgtattttcttgcctttttttttctgcaaaattgtgtcattctgtctattcatcttgcattttcctgcataagtcgacgtgttctatctattcatcttgcattttcctacataagtcgacgtgttcgtgccgtgggaacatgccatgacatgccagaatacttaagtcgacatgtcttaagtgctctctttaatagtagttttgattttctatacgtaccatgccataatgactgttatgcagaaaacaagaagatgattaggtaggatttcgttttctggccttttccagcattgggccggtatgttttttttctatctttgttcaggttgaagttttgtttccctctaactgcattttcctaaattctgcattgtcttatgtctatggtgaaaagtacctattactatattttctttaacaaaattatccaagcaagtgctaaaaaaatatgaaaattgctattactacattacaattgattctagcacacctttagggcccctttgaatcgtttgaatgaaaaaaaagaggaataggaaaaacgtttctaacaaggaatgtaattgcaaacaaaggattgca

SEQ ID NO: 31393 - DNA, 614 bp, Oryza sativa
ccgtgcaaaaataaggacagttttcagaggcctctctccatttctatgatgtaggcttgccttgccactgcagctttaaacttctggcaaattgtccaaccaaatattcaaaactgaaagtcgagaaagttaatcttcgatgtttcagacggggagacatatgccctttattttacagaaaatttaacgatctgccactccctagatcgtcccttgccaccccatgagaaataacaccaaagatcatttcagttagtgagacgtgagtcaggataacaaattatcatcacgtcttttttgtttaccagaaacttcagtctcctctcagtaccatcagagatttgactgccaaaattcactgtgcattcacattctactctttccgttccaaaataaattaacatttagagttaaattttgtcctccaaactatactaccttttctatctattattggtttgcagatcgataaattttatgccttcaatacccccacctactcattcatgaatacaactttcctacttaagggtattttatttattttcttatatactcattgtgatgttatgaattgatttttattaagatggatggagcatgtttataggaaa

SEQ ID NO: 31394 - DNA, 504 bp, Oryza sativa
catgtgagcttgggtccaaatgtctaatgtaatcccgtcagtttcgaggatgtgatagcgttatttctttgctccaatgataaacaaatgtagagtttcagaagcacaattctatatcgtgattcgtaaagatatccagatttcctttgcaatggtgattgtttgtgatgtttgctacaaattattgttgaaattttgtcgaaatcctgtcaattttttttctgaaattctatcggaattctgtaaaagtcattgctgaattcatgtcatatttgtcaaactttctgaaagttcgtaaaaaatttaggacggatttgaaataagcaaaattccattttgaaacatgtccagagtctatgcaagcatggctcctgtcgtaaaagtagtaggcgcatatatgcaagggtatacttgtcttcttaccacatatttaacaccgttaaccgaagctaacagaacaggggcaatcgattggttcatttcaaaaaagtagggataaaatca

SEQ ID NO: 31395 - DNA, 718 bp, Oryza sativa
  unsure (1)..(718): unsure at all n locations
agagagggggaagggggggaggggggcaaagcccacagggacccaaccggttgccgngggcagcattttttcttggttcaaacccccatcgntcgattgggtcttaaccgagcaagcgcaaccccctcccttactcgtttccacctctcttgccggaggccaagctagcacgagctcaaaccagcttgctgaccgccttcccctccctcgactaccctctatggcagcctagcgaggtagtagctcgcgccttgactaccttttacgctcctccgtccacctccctcgcatggaggccgggcgagcttgaacttggatgggctcgccgaccacctatccattccttttccgcctccgacttcctcagccacccctcagggcgacagcccgcaccttgaccgcctcatctgtccccgccttcgtgaatgcgctctccctacgtcttgcgcttcttcccgaacgcctccccatcaccagggtccaggagagaagaatgaagcacgcattgccacgtgggccccatgggtttttatttatttttgctaactaggatgccaccgtcagaaaaccaaccacctatagtgtcataggacctaatttagtccagtttctaaggtggggttaggatttagtattgtgtgtacggataatgatattaaacctgatggaaagatgaagaaccttaagtatacttaataccgatatcaacgatgagtcg

SEQ ID NO: 31396 - DNA, 671 bp, Oryza sativa
ttctgtttacgggcaagtggaaacaaaaaactaaccaaatgtgcatctttcccacaaaaagaccaaatataattctcacaccaagttggtaaggtagatggttttaaaaaatttgtttttgtttcttttaaagttctagaaagagagggcaaaattccagcagacttaaaaactgttttctttagcacttggttttctcaaaatttcaccatgttcagtcacactcaaaacattggaatgatttttggtgaaatagttatgaacatcaaaaccaacacccctattgtaactagtcaccttagattgatccaaaatcatgttgagctgtttcttaccatcagaaaatctttgcaaagaacttttcaaataagaaacttctttttccaaattagcacaattttcacaatctaccattatacttttgcttttacaacatttggggcaagaaagcacttcatcagatttcacaatattttccatatgctcaaccagtcctaaaacatctttcaatttcatctcattcaaaaaacactttgaacaattttgagaaaccaaaacatctttgttttgtttaatcctttttgcacctaaaacattgaacaaagaacttgcagaaaaagtaactttgtattttgtcaaaatgttctttgtcaaaaccaattcatcaacaa

SEQ ID NO: 31397 - DNA, 585 bp, Oryza sativa
ccagatgaattcgggatataaaatacgatgtgtcctaaaatatataagtagttctgtaatagtataaatttcgtctcaaattgaaaccgagtttcattgagtttaaaaattttaaaccagttttcttgtcgttgtagcctactttatcctaggccacagacacgttctttttattttttttaattcgacacattttttttattttttttaccggacgtgtagtcacgtacatgtgtgcgcccctcatcaacacgtccgtccggcccagaacgccacggcctaattgcgaagagaaggagcaggcttgactatgggacccacctgaagaaataagtgccaaatctaccccaaactaatttactccaactttactaatctacccttaaaaataaacggttcagattaattatacttgtagtatatactacaagtaaaaagcatcggagcgtcgccctattacttatcatgttgccatcccatgagtctctctgatctgtgcctagctgctccaatggctatatctttttggcctttctgttccatccatgtttgcacagatataaataatctcagagattttatatg

SEQ ID NO: 31398 - DNA, 598 bp, Oryza sativa
gcaccatcaacgcagtagcatctccaaccaatctagcagacaccgccaaggcaacggcttcagccgatccaacagactccgatacgacagcaggtcgttcagccgattcagcacctggggtcggccaatgcatcggctggatttgcagcacatggggggcaacctgtgcagcagtttgtgaatcaagttatcccagagcatttggttcatcatgcacaatcggatggcaccgtggtacctcagatggttcctgagcacttggtgcgcaacattcagccgaatctgcataactaccaagggggtaacttgagctatcagtatcagcctccatccccgcaagcccaatatcaaccagcgggatcggcccagcaacaattcgctcatcagtttggtcagttcgagcccatgcagcagcaaccacaaggagcagctcagcaacgaccatgggctgatgtcattgtgatgtaatgagggagcaatttgggctgagaccaaaagagactgggagtttgtacggcagccttatcccgagtggtttgaaagggttcctcttcctaatcggtttaaaatccctgatttctccaagttctcaggacaa

SEQ ID NO: 31399 - DNA, 567 bp, Oryza sativa
cctgaaacggaggaagtaccaaactagctacctagaagattggtactccctccgtcccataatataagagattttgactttttgtttgcactgtttgatcactcgttttattaaaaaaaattgtgtaaatattaaaaacgaagtgcttaaaatactttgaataataaagtaagtcacaaataaaataaataaaaatttcaaacaaattttaataaaacaaatggtcaaacagtacaagtaaaaagtcaaaatcccttatattatgggacggagggagtagctaggtagagctagcaatgctacgtgtgtgtgtgtgtgtgtgtatatatatatatatatatatatatatatatatatatatatatatatatatatatatatatatatatatatatgctaccatcaaacatcgtacatgatgcattgctgttagataattaagtagctagtgaaagcatctatgggaaaaggactacatggatgggtctagcatcttaattagagcatctccaacaggggagcgtatcttatacacacaggccctcgcgtgtacacatcgtgtacacc

SEQ ID NO: 31400 - DNA, 582 bp, Oryza sativa
tgcagccctcctactattagaagaatatcactcagtcatctgtatagtagacaatagttctacggctttcaagttgcaatcaaacactgtaattgtgttatttgaacttgtggggtaaaagtagctcatcatagtccggattcttgcaatccacacaccaatatgtatttctgcaactaaatactattagttttagtatttttaccaacctgaacttcctaacaactaccaaagtaaggaacaaccgtgcgctagaaaatcaagcagattgacaccaattctaacaggttggtcagcacatcgatactgctaccatctcttagaaaatataacagaatagcccatgctgccagatcttaatgacggtcttactctaacatccaatacctccagatctgaaaccgcagccacttacgaatttccaaccttaaaccctacatataagctattatatcgccaattttccaacagctcggatgaatgaaacctccaccatatatttggtgctactagcctaccatacaaaagcacagctatgacctgatgatttacaccctttgatccacatccctgaaaccagcc

SEQ ID NO: 31401 - DNA, 584 bp, Oryza sativa
ggtacctaaccgatcagttatcatttataggtttaactacggttcttttgtctttatttcttgttgattgcaggatcaaatcaactggcacgctcatacatccgaaggcaagttttggacctgcactggagttaagcaaatctcccaggcctcgtgttttctgtcaacagattgttttttaggtgatagatacactaaacaatctaacaaagagcaatctaaacgatatcggcttattcaacgcgaatcaaccgataaggataaataacactatttaacttagattaaatagcgtatatgataaattagcacttgtatcgactggtttagagtgtcgaacttaaccgatggaaaccctagccctgccgatacaagcaactacagacggaactcatctcttgtcagagatcgaacttaattgatgcagcccaactcaaagacaagaactcatcgagaaaaatccttaccaacacaactcaaacttcccttaaggataaagcaaaaattacaagcacagtcggactatacaaaaaaagaaaaataactgactccacctaattaatagataaatcaccttgccatat

SEQ ID NO: 31402 - DNA, 702 bp, Oryza sativa
tattccctgatgtcatacctcaggtaaacctcaccattgttagcttgaataattgttagccgattcattacttgactaatctcttgtttttgttctacagacaatcgactcttcggctaattactcatagactttgggttgcaaaaagaaaactgctgtgaagaaaaaaccagcagcaacaattgtcaagcggctccaccagtaagatgtctttaattcttttacttaatcaatctcaaccggctctatatacacttgtctattctacagcctcttcctcctccttctcctcctgtacagcaaccgtcaagtgaccagactccatcggctgtggagagtcatcacatcgaggagtaagaacagccagctgctcctgctatcccaataagttattctttgtctcaataattagatcagctacattttacccagctcttactctttccgaaattgtctctgcaggttttagccgatcttttctcttttgacatcagagattatcttgataaggcagaagaagatacttctagcaaagctttagctcctctatctgacgatgtacagataacacttgaagatatctctcatcggctagctacaagcctcttctttagatagcttggtagttgactgcggatcaattaggacacggctgcatgaagttcaagctctgattcccgaagaattggccgatgtcctaac

SEQ ID NO: 31403 - DNA, 1830 bp, Oryza sativa
  unsure (1)..(1830): unsure at all n locations
cggcggatacgtcctcgcgtccggtggaaaggaggcggaagggcaccgccgcactggaagcggaaaccaggaccacagcggctgcgtgtgggctcaggagcggcggatccaccctcacacgtggcggaaaggaggtggaagggtggtgtggcaccagaacggcaaccacgaacttgcgggtacgtgcgggctaaatcgagagcggacaacccaccgtcgacaagcttaggaatggtggattcgctgccggagtgctcgagagtggtggatccgcccttgcacatgtggagaggaggcggaagggtggcgcaacaccaggagtggcgaccacgaccacgacggcgatgtgagtgcttggaagagggcggatccgtcctcgcgtgctgcacggaggaggcggaagggcggcacgacatcgcgagcggcaaccacaaccgcaggcagcgggggcaagggctgtagcgcggcacacaacggcggcgaccaagggtttggttttggatttttttttctttttttattttttaaatcattgcaatcaagcatccttatttgcccgcatgcaaaaatcgggtctttgcaagcggctttcttaggtcatctgtccgcgaaaatgattttatgcatgcaattgtgttgcccgcatgcaaaatgccgatttttgcagacacctggcgctccaggcgagtgtcactcgcctgtgaaaattagtttttgtcggcatgaaaagatcatttatgtagtatagtggtatattgtgcagacatctaaacaacacattttttttcttctctctttctctcggtcaggaaattatggagaataaaaataaaatggtattacactttacaagtataatgggatgcataaaacccacgaaacactagactcacacggtcatggcgtaaacatgtacaccaaaatgctgtctaaatatctttgtatttagaataatccctctggtttttgacggataatgtcgttaatttntgaactaccatttgtctcatatttttttgcaaatattaaaagcataagtcatgcttaaattatttaatgattaaaaaaatcagaaccaaataaatggccataacatattttttttaacaagataaatggttaaatgtatatttaaaagtcgatgttatcgtactctagaacacgtaggaatataatgcatgtgtatgtgatttgttgggttagaacatctatgttcactagctataactgaagaaaaatatatgaaacttcttgaatgtataccatgtttcacaatgtttatttcagattctgtgaaatttcatgatagttttataggtttgatgatgtatcctggtgttaagaacttaagtgaaacttatttcaagataacctggtgtaaagtgaaagtatatgctaaacctagtgcaaaacgaaacacgatgcggtttatacccgatgtagtacaatttattgagctagtgtcatagtgatcacgccgttgtccaaaacatcacatattctgtgactggagatagaattcgttccaacatgacaagaaaacacgcgggaagtcatgttgtccttaggatcttgtcaagagttttgacttgaaaacagcaaaagtatttagttatccaaaaggtcagccgtgcttattgcaggacattgaattcatcttgttgaatgtgtcgcccatcgcacttggttcatccgtacttggtcctgcgcgttgccaaactcccgtaaaatctcaatcctatgagtcatgaatctcgaatcaaatttgtaccatgccaagttaccaagttgcctcgttgtagcgcgtcgctgtttgaactctttgcaaat

SEQ ID NO: 31404 - DNA, 1879 bp, Oryza sativa
aattttgtgtttaactaaacacagccataattaatttgtatatgtcgttcacctcttgccaaaaacaaaggcatcctctgaatctcggtttagggatatatcagtggaaaatttcatctgcaaatgtcatttgcaggtacatcaaagtacatcatgctcatgtgaataaaatttgatataggtgaacaaacagtatcacatttaacccggtgatatataccagcttggtgatatattaaatttataaagaattaatttgtgtatgtagtactccctctgtctaatatgatacatctacatcgctaaattagttttattaaatataacattgaatatatttttaataatatgtttattttgtgttaaaaatattattatattttcctatagattaggttaaatttaaaagagttttactagaaaaaataaagtgacatataatataaaacaaaggcaatacttacctagtaaatatttttgtaccaatgacatgttccttttctcataaataattaaaagtgcaactatttaacgcagagctgaaattttgaatggatttgcatgtatttctagctgtaccgatgtaatatagtattattagggcaagtttggtatagttccaactcctaaatttagctccaggagttgggtctggagtagagttgtggagtagcctaaatccagctccaactctctagcttattttgtgagagatcttcacctagtgcagctcccattttagctgtaactgaaactgtttggctgagcatcagtccaagagagttggagaaactggagttggagctgtgccaaacatgcccttagattaacgtttgaatttactttcatatagcatatgagaattaaagctaaaaattagttttacttgaagaccatgataaatttaactatgctttatattatgagatagcagggagtactaaagacaaattatcctgccatttaccataggaaagtatgaattatccctctgaactattgcgacagtacgaattaccccctgaaccacaaaaccacacatattaaacctcgaactattgataccggacaaattaccccactgactcaatcctgagcggtttttctcctacgtgccatacacatggcgtcgacgtggaaatccaattagcaaaaagaaataaaagaaaaaatagggcccacctgtcattacccctctcccctcttccccttcccccttctctctctcgggcgcgcgtggacgggcagtgggcggcggcagcgacgtgcggacgggcggtcggcgtgtgggggcggcggcagagcacgggaatggcacggtgtgcggcgctgaggagggtgttggaggaggccagctacgtcatcatcatcatccctctctctctctctcctcaggctagcggcgagcccggtggggagggcgagacgagtagcgggcggcgctaaggacattggagatggtaggcgtctctctctccccctcgttctctctctctctatggcgccgtcaggagagccgagcaaggaggaggcggcagatcctgaccggcggcctccaaagaagaggacaggcggatgaggtggacggcatccagctgccgccaggagggggcgaatgaggttggaggatgcaccggcgagggtgcgccctcctcgccgcagcccgccgcctcccgcgccctttccgtgagtccgtgacgccacagccccacagcctcctcgctggcatccgtggcccgcggtgcgcctcccacgctgccgcccatcacccgcccccgcgcaatgccgtgggcgccgaccgtccaccgctgctcgacctgcgctagacgacccgaaccccaacgagaacgtcaccatgaacgccgccgccaccgccacg

SEQ ID NO: 31405 - DNA, 617 bp, Oryza sativa
  unsure (1)..(617): unsure at all n locations
ttcctgcagcccgtgaatttttctggatcgatgggcacgacgtttccttcattgacgtcggtcaatcccaacttctgggatctgttccttaacagtgcttggactaaccgaagatggcgatagcggggggttctccgccctgaagaagaattgcttgctgacttcttttggtcccactgggcatgcaaaaaccgtggtgaccgtaaaacacaaggccggcaagaactggctaactccgtgcaaggtccaaagctcgccttcgggtatgttagcgtgccaagttgatttgatccctgcatcaacangaaatagagacaaggaacccgcggtaacctataatgatagacgatcggctaatgccgatacatatctttattttgagccgatgtcatatgtaatctatcggcggtttaatagattataagaactaacctactcgatcgacggngatatcaaccatatatattttatatcgattatacataaatcgagtgattgggatagatcggtcgccatgccagacagttaaatcacctagattgaaattttattaataacagacttttatgtttatagcatagccgatcggatagaactagcatgtatcggctaatact

SEQ ID NO: 31406 - DNA, 1054 bp, Oryza sativa
tagatggtctcttctttcaatggtatttattttttattacgaattttagttatttataaattgtattactatttgaacccctatttttatttttctaatttcgaaatttattttactttttatttttcatttttattttaattaatctcatattatgttctatatggactattcttttcatattccttatttttaattttttgtttcagatgtttcaaaattatattcctattctaactctatttttaaaatttctaatttaggattttattttattttttataccgaattataattaatctcgtattggattgttatatgtacttttctaaaattgtattcctacttaaactcttctttttctttttctaatttcagattttatagtatttttatttcgaattttagttaatcttattgggttcttatatgtactcttctttcaatattgcttattgttaattccgaatttcagttatttttaaaatgtattcctacttggacccttcttttccttttctccgattaatgagggaatttttagcctccacaatgaacgtgttgcctcctttcaaagttatttcaataatataatatatgttcgaattgcatccctgaattattgggtgagtacgaataatccccctaaacttgaaaactagacatcgttcaccctgaacttttaataccagacgaattcccctccccaaagttccagcgccaccgtgttcgccgccctcaccgtcggctagggattcgattggagaattttcagaatatgccattcgatttgcaccactttcaatatttgtcactcaattcgcaatactttcagaacatgctaccgaggacatgaattgtttcattccatgccactgaggacgtgaattatttcattccatgccattccatcccttcgaagccggcggcattgcaagtccatgtcgcgtcgtccgtccacctcatcttgccaccgcaagcaagctcttcctcccccacaccaatggagctagcttctcatcgcacatgctaatgccattataggattcaatat

SEQ ID NO: 31407 - DNA, 552 bp, Oryza sativa
cagagtccgcacatcctcaaatacaaagcacttccctagttagatgtaggttagacttcccgttcgagaaactctaccttctacctgccctcaatttatgcacgattaatgaatgccacctgggtggaagcgagaggtggaaatggaaggtcttagttcggaggtgggatctctacctgatagttgcattgccattcatgatgatcccctggcattcgtccattcagccattcaccattcacccattcaactggaattttggttgaatgccggaattgtgtccacaaattgtggatggatagttggttggctggctggatggctggctggatggctggctggatggatggtgaatggctggcggcggttcggttgctttgaagcatttgttgctatctaaattccatttaaggtcgtaccttatcgcccagcatcatcttattctctatttgtattccctccatctttcagatacggatgtagccttggatgtgcccgtgcccaatgaagaggaagagcgcacatgaaacgtaagtccaaagtaccggacac

SEQ ID NO: 31408 - DNA, 632 bp, Oryza sativa
attagactcgattctattgaagggatgatactctgaccacgtcatagttggactaagtgacagtgtgaaacatatggaaaatgacaataataaaagggatttacatcagctttgcatgttgacagatgacaagggaagagtactgccaaggcgatccccccggtcaaacgattgttttcagaggaaattacgtcatatggtatttgttgttttgcctgtgctgatgagcattgtttatcttctagtagtaacttggtcacttgcagacaaagaatcataatttattgcatactgtttgatacggagtatgtttgtcagggtttgttccaatcgtatttcatttgtgatttaaaattttctaaagagtaaatttcacaaaactacatatactatgatcaaactatcacaaaactatatatttaactcggtgtatcacaaaactacacattcaacaccaaatttatcacaaaacaacatatttaaaatgaactattataaaactacatgttaagtaactaaattattataaaactacagttttagaactaatttagtcacagaacaataatatttatagctccagcataataatggtgctagggatttaaactcttaaagctgtagtttcgtga

SEQ ID NO: 31409 - DNA, 576 bp, Oryza sativa
aaatctaatggtaggggtatgtaaatgattaaatcaaatttttagaggcatacaggggattgagtaactcttcaggacacagaaggaattttctctttgaatctactgacactttgattggctataacaaaagatagaagatacttattttgttaattatgccagcatagtcggttttgtttttcaaaatatcaatcatttccttatcttcgacctcagtttagctcattggtgccatccaaacaaggaggcaaatgctaaacataaaagatggtgtgccgcgcggccggccggccggggaagggggggacgctagatttggcaacgatgaacatggttcaagtgggaagactcgcataaaagttcaattttagtcttgattgtagcataaacatgataaaggaaatcgaattatggatcgttggttgtcatgcacgatctaaaacattgtagcttggcctaatcgaaaactgtgtgtgttcaatggtagtaaaaggaatagaacagagcagagtaaggaagtgttttacattgatttcgttcataagtggatccaatggcaagcaacatccaaaa

SEQ ID NO: 31410 - DNA, 586 bp, Oryza sativa
ccactctgaatgaagaaaatggaactggcttcctcattaggttcgagtatggaaagaatattgcttgtgagttgtgaatcttctcttgtgaaaagagattttttttttaaaaaaaatctgaattactgactagtatagctaattggtttcttacggtaggagtatgtgttatagattgctcttcaataggtaagggccatcgttagtatcaagtttaagcttttcccgaacaggaaaaagggtcatcatcttttgttatcacctaaccaatttcacctctttaaaatgcccctcaacatgcttttcctgatatatccttggtagtaaccatgttctaagaaaatttggtgattttggcgttgtgatgtttatgacactagattgcaaaaggtgccttagctattgtaagttctagttagtgattatgactaagataagtgttctttctagttgtttcttatgcaattatttcagtctttttaagcaactttatgtgctatccttttccacatttaggtcttgttaatcgcaagtacctctgtagcatagatactaactaatgttcaaacactaatcttgagaaaga

SEQ ID NO: 31411 - DNA, 554 bp, Oryza sativa
ctgtctctcgtgactccctgccaccgaatctgccaccacctaccactctcctaagcattcactttgctttgccccgtcaccaaagctggcccatccccttcctcaatccccacggcttcggtcctccgccggtggtgcctcgccaccctcacatgtccaccaccaaccgccaagccgcaggccgctgcctcccatccccataccccttcccacccccatcccaacctaggatccaaccctaacttgtcgcgggtcatcgctgatactggggggatggattctaatagctcgagtggacgtccacccgtttattgcatgtcaactaaatggctacgaaaattttttaaaaaaattggcaagatagatcaatatgtaatatatcactccacaaacatgcaagttaaaattcaacttctacaagttgtaacaaaaacaacaaatttaactgtaaatatacatatagtaatttgagttttgtttgttatttttattacaatctgtagaagttgaattttaacttgcatgtttgtggattgatacattacatattgatc

SEQ ID NO: 31412 - DNA, 625 bp, Oryza sativa
agtccaagttcaagagagttggagtttagtttgattttgtaattagatgtgaataagggaggctatgcattgagggtaagccacaattgagagattaaagagtttactactctttgtgttagggttatgtgagaaattcgtgagaggtgcaatgaccgtcttatgaatactacttgaaaaagaaatatcatattcaatcaacaaggcgtcaacgatcttttctggttttgtaatctttatttttttcgtttttggcattaatttgtgattcttagttttgttatgggtttgttcaagttaatccacccgaaacatttctattatattatagatcagatctaaaaggtttcattggtatttgcttgactcgaatttgcttaaaatttatgttttattcatatttgatgaaatttctgagacgtctagcttttgagatgttttctcttaaaccgtttattacttttgcatgacccttcgatagatttgtctcttagtttcctgtcaagattagagctcgatctaatggctggttttagagaaaacaagattttacacaagtgatgtaaggatctttttaatctgacgatcgaactagtaattgtacttcagtcaaaccagttctaag

SEQ ID NO: 31413 - DNA, 776 bp, Oryza sativa
  unsure (1)..(776): unsure at all n locations
agtagagctgcgatcgtattcctgcagccccaacaaaatcaatttggctgattcttcttcaacttcatcgacatcggcttgcttggtcccaatctcggcaggcaacgtgaaaaccatgttgaccgaagcagttacgacacttttccccttaactaacctttttgcctcctcagctgtagcttcatcggctacaggaacctgatcttaacacgccactcctgcctcgactttgttttctgcaaccgatggttaattcctgttcaacctcctaaaagcactccctgttcctcaatctttgaacccttctcttttgattcttcgtgaaaataccagaaagacaccactgatttttcctgatttcattgtcctcttggccatgatcttgattcactggacccaatctttgatgaacaggaactcttgtctgccttagccgattgcccctaccatatgatcggcttgaattcttggcatatcactgcacccaagacagtcttcaatagacgggaagctttagaccttcatttcaacaaaatctaaaaaactcacaaccctcatgaggaataaaaccatcgncttcttctttatgatgcctctcctggtgcttgcataccttctctgaaatttggtggaaaaccttaccccaattcacctggaaaccccttggccgggccctaatgggttgttggcccacttgtttcccccatttaaccggaaaagggttggcttaacctttattagccttttaaagtcgccaaactgaattttgcctcccc

SEQ ID NO: 31414 - DNA, 782 bp, Oryza sativa
aatgtaacgttctccatcaggtgatacaataggttagatctctttgctgatatgtgagcgtcagtatcatgggttcctatgtgccgattaatattcgttgctgtatttgattagactcgcattcgctccgtatttgtgtacgataatattcgattccattacagtatcccggtgtcggtccacgatatcgatttcgacagtgtgggtatgaacagtgatatgataaagctagttgccgatcgtatccgatccattttcatctctagtgacacaggtcggaattcaggttatcctatgcggtggtgatagtctagctcaattatcgagacgtattgaaaaatagtaaagatacgtcaggacaaccacagtagctcaagtgctctgatcgagaagtgctttcagataagatggactagtattcataccacaagggacttctgagttctcctagacaaatcgatcggtgagtgactgggcggtgttaaggctggatggcgcgtgaacgggcgaccagtgtaggggcgaacgcgtgcggatggggaccagtgagtggaagcgagtaactcatacggcgaggagattacgtgttgataattgtcacaatacgggcgccaggattacaatgaggtatatagcttcggttcagagtttgttgtgagagcctagattacaggtataagttctatctcttctaactaactcaacaaactctatccggcagctatatggagcatcatcacatgtacacagtatagggccgcaggaatacgaagcagtctact

SEQ ID NO: 31415 - DNA, 830 bp, Oryza sativa
aatgcttctggagaccaacgcgtactgcgcttagtttgtcgtcctcctcgttttatttaaggtactagagcgtaggtttgcgtgtgtttctgtccaatgaacaatgtgtaatattgaccagcttatcaacaatatatagtgttcgcacgattcaagagtcggccatttgacatacgtatcatatactcacgagctacctagttctcgaagggaatattacaataatttgcacttggacaatacatgtatggataacaaacatccaccctaattacgaaactgctgagaggatctccagtagcagtaacctctagtttagagctcctaaatgtcaaatgggggctgccccaattcttttggacctaaatatgtcatcaactctagcagtagccctcatatcttagcctctatttcttttcctcttttattttagtatataatttatgtttatatatagtttaacaccataataattcaaacataaataattctagcacatagaatttaaccatattcgaatttacaatttcaaacatcacgattcaaatttgagttcaaatttttctaacatgaaaatgataaatcttacaagcaaatattgaaaataacccatagttgatagaaaatgcaaatgacaaactaccgagcaccatgaagtgcccacaaatatttcacaagatcatctcgaagttgctcatgtgcttgttggtcttcaatttctttatgtatctttagaaacttctccaacacatgtttatcgcgtcgctggtaatcctccttcctcaacacctccctgtccccctgatcatagtcaaagtctacatcttcat

SEQ ID NO: 31416 - DNA, 1524 bp, Oryza sativa
gtgctactaatgctcctgtaacaactaggctacaggccctttcacaggaatgaggttttggctttgctgattgtgtgcttgagaacaaattgagggtgtagctaatgggcgatcgatcgccatccccctatacgctctctccccccttcctccttcccttgttctcttcctagtacaccataaattttaaaaaaataaaaaaacaaagttgaaaaaaatatgtgtagaaatactatatataaaaaatatttgaatttaaattcaaatttgaaacgggtatgtaaactttttgacttataaattttgggtctataaactaatatttgaattcaaattcaaatttgaatcgggtatgtaaacttttgacttataaattttaggtctataaactaatattcaaattcaaattcaaatttgaatttgaatcgtagcgtctcattacctccttcaatcatggaacgattgtcctctccatccatgtcgcggcctcggtagaccgtctacacaccacattctcttttttccgagccttttcatttttctaaaaaccgttgtaacacacttgtactttgctaagtacaaacaaaacaaaagaccaatcctaagtgtcttgacactcttataataatctgagcgatccttgactctgcacagcagcatcctttgttcgttcaggtccagaaaagctggtacgctccacgaaatatttatccagaacatcagatggcaaagttcccatgagtctggaaagattagaacaaaaataaatataacaatatctctcaatgggtttgcatgttcaaacaggttttagctctgcattacttgtataaggcaccatgggccactctgatcttgctttttgttacatcaataggggccaaaagctgcaacgtaagatctcccattaatctgcataaaagggccatcagaatggtgggggctctttttgcgtttttggacagttgccctggggaaaggatagatttgttctagcaataaaatcatgtaattaccgtaaatattcagaaacagcatgagtgccactgtcactatttgagctatctgcctcctgtgtcaaggtttttacaaggtaagttcagtatccgtaatctaaaaaggagtagggagtagactgctatgccataatgcacagtttagaattaataaattttaagcttgaggattggttatcaaaacaaacatggatgccctttgccttggtaatgttaaactcgggggaatatgactagggaacttacatatcgaatttttggatcgagagatgatgccgaattagaggagaccaatggcatactccaattgtaccttctcttcaaagattctatgtgtgtctctacaaaacatataggcattattttgtgtgcttatgattggtatcatgctaaatgtgacctatgaaatctgtccaatactgacataaaaaatggtattctcagaaatagacttatcggttacctatattctggagctgctccaatgcagcaagaagattggtatcta

SEQ ID NO: 31417 - DNA, 1281 bp, Oryza sativa
ctaattatgctgccaaattgcggtaccacccatgggtgaaaagaacacggggattgcttctggaagcaagcatatcgcatccaacatttacagaggtcactgacctattggccccttcaatgctaatgatttccattaagcaattttccaaaatgacaatgcacctgacaagctacatcaaccacgatacatcattcgaagaaaccaaaccaataattcaaaagccaaactttcttgttcaagtgatagatgtgcaatgtcataattcctctgcataactaacatgacttgaggtctacatatttcatactacagcatcagaaatttgcaaaaataaacttggcaagtcccaacactccaaaatatgctctatctcagcacggtcaaagttggataattccataacctgaaataacataagcaaataatgaaatagttgtccaacgtagcatagcaattgttatgtaaaaagactaaatgatgacaattagtaaacagtactccctccatcccaccctctatcccatatataacacgcggtcaaagctggcacggtctccaaaactaatctttagcttataatttctcatatactataaggtttgtagcaacaaaattataaccatattaaagtaaatttaaatctcaatctaatgatataatttttaataaataaaattaatttcatattatactaagtgttggtcaaatgttttaaaagttgaatcttaatatgtgtgcgcgccatatattgtggtatggagggagtattttgatgtcattggctttagtgccctttacttagaggatgatcaatctgggatggagggagtactatttgtacattcttttaagaaacctgtagtttaacctacccatttttgaaaataaacatggcagcttcattattaatctactatattcaagacgcaaggtccggagcataaatgaactacttgttaaccacaacttcacttttttgcggccttcacaaaggagaggctaaacagcgaattgatcgtgaacttaaaagagatctaatcacattatagctccatcatggatactaatcagaacaaatgcatttttattgtctggcaatagagtagactagacactgtgaaatgaaccaaatactgataggcataatatcacacacaacattcattggctacttgttatgtttatcaatggcagggcatatgaaacaatttcatgcatggcatttgtattttttttcaatccacttctaggatgttgatgttcgctaaaaatatcagg

SEQ ID NO: 31418 - DNA, 657 bp, Oryza sativa
aatgcactggaatccaaaacaatttttgcagctagactattaacatatctaaaatgtccaaaatactattgagcatatcagttttctttgaaaaaaagtattagttaactgtatgctcaacaatgagattactgtgcctatcattagatcatcaggataaaaaaaatctgaactgcgttggctttcaacaatcctattgactgctacaactattcataatgatatagccaaaatggtttaactgcacatttccaattctgacacttggtcgtgattggagagtatagtagtacaccacccaaatggccaaatcattatgccccttggagttgaacaacagtatgacccagagtagcacagtcaaagaaaatatattgttacatctactctgagttacttagtaataacaaactaattgtaataggacaggagggaagttgaaaaaagactgacccaagcttgcactgtatttttctcctttcgtgtcaacaaaaatgtttgaacatacagtaacttctacaagtagccactacttttacatacaagtttagataatattttgactgcggtcaaagcatttagctagtagaacttgaatttgttattaagtaggcattggttgagacagccaaatctagtagtatctgggccgcagga

SEQ ID NO: 31419 - DNA, 730 bp, Oryza sativa
cccgggcagatctcatgctgaagttgactggcaggctaaagacccagcaatgcctccaatattcttctctcgagacgtcgaatgtttcattatatttatttgatgatataaattattcacttcatctatataatgggaggtcaagagagcctacgacaactctccgcaccgcacggtgcacgcgacacctagccacggcctgccggcgttgagcgacggctggctcctcgcagccaatagctcgctcctcgccttctctcctcctgcttggtgctaagctgacaatgcgatgctgtcactgtcgcagtccggccgtgctagccccaccaccgtctagtccggccggccggccatccccgtgcggccatgctgccgtgcggccaacagtccgcagcagtgcaacactgcagcagctagcagcctagcgcccgacaggccagccgccagggccaagcgcaagcaacacgtgcagacacgtgcaggacatcgtcatttgtggtggctagctgcctagcggctagcgcctaatcgatttcgtcctgctgctatggtctatggacatagaggaacagggataaggacatggtgtggtcacgcacatacatacatacatacatacatatatatatatatattaaagatatctatcgaccatgttttataaaatttttgggtgtatgatgaattatgtatggcgcaaaaaatattactttattttaaactggtttgg

SEQ ID NO: 31420 - DNA, 779 bp, Oryza sativa
agtagacttgcatcgtattcctgcagcccggccatcctctagaaaatactagagggatagctggttttatcttcatgtcactgataccactccttgtcttgctattcccgaagaaaatccctcatattctggggtcatggacctccaaacattctctgacccctgctctgaagggattcaatgacaaaattcatgatctctaaaacgcggtctgactgggtacgaagttgtagagaagactttgttcgtcgtctatccagtctctccaagcccgtgctcaccctgcatacgagtacatgggggcaaaggacatgacgtggatatcgcactttggtagaacccaaagttttctgataaccctagtactatgaactgtctctaacatctaatctttcactgttatctttgttatagctgtttctgatgcacccgtggtgaagtgggtagggcatgtagtggtcgatccaccatcggccactgctgacatcccgatgccgataagcaacctgccataggccaagaaggacatcatcgtgaacgtaagcatctcggactattctccatatctatcatatatttggctatagaagtagtaatcttgacccatactagcatggcctctaacggatgtgatcggccagcttgtcaaccactaggcgttcgcttctttgagagagctggctgtgttggagcaagcaaccgccaccctcgtgcccagggcagtggatcccaaagaaaacgtttgccctctctcgagaagactactggggtggagacac

SEQ ID NO: 31421 - DNA, 1107 bp, Oryza sativa
gtgtagagtggatagtacggtggacccatctaaaaagttatttaaacatgagtcatgccaattgcccaattaaaaaaatagatgggacccaccataaagtatacctggtagtaagcttataccctggtagtagttctttaccacctccacaatgtataatagctggtagtagggatgcattcaatacttattaaccactacttcattacatcgtggatgcccgaataaaaacctgctccttcgccatcattagacccgcgcagaagcgggagtcatttggtttgaaaacgaactaggacattgtttatgcttttaacattcattttcagaatctcttgtcacacgccatcttggttcaaagcttaaaaaatcatttaccaagaagtcactttctttcgagttctatcctttacccgttccgattttagttttgtcctaagttaaattggtctcattttaattacttttataaaaattatcccaatatctacaataaaaagtcaatacaatattaagatatatttcatggtgaatttagttaaactaatttaatgttatgttgatatatttttctataaacccggtcaaaattttaaaaatttgctaataacaaaatttaaatgactcataatatgaacggagaaagttggtcgtgaatgctcgcaattgatatttttgttggtacataatctctcacttaaccaatttatgattcctccttggcagtaaaccctagatcaataaaattaaatatacgttagggtatgaaaaagaaaagcataaaattattatcgtctatcgatcgaactaaacatatatgatcgttgctacatctcgatccagaccagagaatatataattaatttggttggaatagtaatcctcctgtcctcaaaatcaagaccgatcattttgactttctgtgtatcatcttaatttatcatttgtatgatgaccgtcaacttgtaccacttggccgggtgaagaataggaaaaaattaacctggcccctcagagtatcttatgaaatagaattaaagcatcatcaacatactaccaaaattcaatcctctttttttaatctctaatggtatttaaagggggagt

SEQ ID NO: 31422 - DNA, 763 bp, Oryza sativa
tcctgcagccttcctcctccccttcttctcttcctactacactacaaatttaaaaaaaaataaaaaaccagttggaagaatgatgtatagaaatactatatataaaaaatatttgaattcaaatttaaatttgaagaaggtaattaaacttttgacttataaactttgggtctataaactttagtgtataaactttagatggtttggaattcctttttttcaaaaaaattttggattcaaaatccaaattggattgggatatataaattttgattaataaactttgggtctgtaaactttaaatgtgtaaacttgaggtgtacaaactttaggtgtataaatttactaaaataggaaagtaaagcggtgcctaaaaaggaaaccacgttgaagaaaagggggaaaaccgatcgcccctggcgatcaatccccattagagcaacttcagcaaagaccctaaactcagcccctaatcagtttttgagggtttagagataaaaactagattcagcagggaccctactagagcccccaaagtgaggaggaccctagattttcctcccaagcccccaattctgggggttccgagtacggcccccatcgactttttttcctggcgtgaaaaaaaatccgcttcgcgcgatctcgcctcgcccgcgcggcaatacgaccagatctcctccgaccgccgccatcgactcccccacccacctccgccaagatcgccccaaaaaaggtgaggattttttcctagggctgcagg

SEQ ID NO: 31423 - DNA, 1696 bp, Oryza sativa
ggtctcaatcgaaaagttcggcggataacggaataaacactagctatgaacttgtagctcaaacaaacaaaatgtatatgaatcaaaaggtgacaaataaggtatttaagcaagaaataaggtcccccccttaatcaattaagcatgcaagtagatcaggtaaaaacaagctcaagcacaatatgagagaatgcaagaacgggcaaaccaagaggggagatgcgtgatttgtttcccgaagttcggatccacggatcctacgtctccgttgaagaaccacaaaggccgaggcctatttcaaccctttcctcacgagggtgcacaaatgcactcctcggtttcactattgatttcttcccttgcggaggcgaaatcgaagccttcacaaactttccatggcacaccacaaccttgggtgctcaccggcaacgcctagccgtctaggagaccttagtctccaagagtaacaaacacaatcgaagatttgcttgctatgaactcgagtgctcaaagtatggagtgaagctcactagctctcaacttctcaatcactcaatccaactctttccccttctcaaatccctctcacaaagaggcacacaaaggatggagtgaagctcactagctctcaactcctcactctctcaatccaactctctccccttctcaaatccccctcacaaagaggcaccacaaaggtagggaaatggggatggctatttggctttggatgtgtctaatactccccaagagcagcagcccctcaaaagaggggtggaggagtttatatacccgagcccctcaaaaactagccgttggaggccaagactgtaatttttggagtttccgaaaagcattttcggacaagtccgaaaacttacagaagcaaatctcatattcgcagccactttcggaatgtccgaaaattttcggagtttccggtaatttttcggactttccgaaaagcacagagtaaaacgactataacttttcactcgggagtccgttttcgatgaacttggactctatagaaagctcactcagaggactacccaactcaaccaaaaacaaggtctaaaaccactcaaaggataggttaaagcttgggcttctctcaaggtagcactatgataggtcactttgagcaccgagacatacacaaacacctcgacgttgcatccctcttaatagtacggcattcctaaactcaaatgtaaataagaagataattataccattaggaatgcctttttttcatccttctttcattgtctagagggacgccaatgccgataccgtttcaccatatattcttcaaatgattgatgcggttacttgtagcttcaaatggtctctcacggtccatcatgacaaagccggcactcgccctttaccaccaccggatttggtccttcggcgccaagccccttgcttgcccttcaccgccgcatggtccatcgcgaccgagcatcgcttgcccttcaccatcttgccataatagccacttcgtatcacacatcttcaatatcttcactttgtcattcttggtattgttaggtgtaatgatatcacttgagcatcaacacctttgtaatccctgggacctatttctatcattcaactcaataaaattattagtcccgatgatccggttgtcaaccttcacatgttgaccaaccgatcgcatgtataaaag

SEQ ID NO: 31424 - DNA, 1586 bp, Oryza sativa
cagcccatataggtctgggctcatggaaacatacgaaatagcctttcctcttttttatgtgtggactaaatgttgacatgtacaaaagtatatggtggaagcctagcaaactaatacattgagattgtgatctcgatgggttgtggcaagggctcctgatggattagcttttgtgaaaagagcttagccccctccatcacaaaaataacgaatggatgtgacaaatcctagttatctagatttgttatactagaagtgtcacattcagtcttaggttagttttttatgggatagatagactatgtctctgtattgatcctaacgaaaacttctacttgtcttgtcgtactcaactcggactttggtagttgtgttatgaataaaatttagcagtatgagatatacctagtaagaggttcacaccttaggatacgatttcgtttgggcaggttcccaactcctcttcctcatcttctacgtgcacgcttttcgaattgctaaatggtgcgtttttttaaaaaagtttctatacgaaagttgtttaaaaaatcaaaataatctatttttgaaaaaaaattaccaaatacttaattaatcacgtgctaatagactgctctgttttccgtgcaggggagttgggttcccaaccgcctgacacgaaacagagacactcaaaaatatggtttgcagtatatggtatctgcgaggagagttaacttgtgtgatgcatatacatatttactttcttgatacaactcatttagataaaaggttcaacaatgaattgttctaagataaaaataaaataaatttataataactgacagtaatatgtgcacaagtaattaaacttagataaaaataaagtaaaaccattggtaacaaaattaatgcttaactaaataaaattgtatattagatatcattaaaattttagtcctagcaatgtacaactttaaattactgaaacattataccttttcgagcccttggaataccattacaaatatatgactaacttgtgtaggggtttgaaattatatgcatgcaaatcaccggtgctttgcaaacttaactttagtcgaggattacaactcaaaaaatagtaagaaatataatatattgaaaatgtttgtcctaattgaaagtaacgacggacctagttagatctcagcacctaggtcgctgatcttttcttctttctctttcaccatgttaattcaaacaaagctcaaaatagaataggtcgacttatgcccacttgccggaacatttaactatttgccactttttagatatggcagttaacgatttgccactcgctgtctatgacatgtgggtccactggcaaatcctttaaaaccacttgtaagagtagcaaatagttaattattcccaccttgccaaggtttacaacaattaacaggacatctcttagccaataatataatatatttcttttgtttagtgaattacagagaatgaacagacagaaccaagccttaacatttgacggcttggacacaataaggtacctgtgtaatattgaaaatcctccccgtcggccgctcgggggggagggagga

SEQ ID NO: 31425 - DNA, 1197 bp, Oryza sativa
cctctctcgttgatcactttgaacctatgttttagaggttattgaaaatgtttgcaaatcttgcatgtcgattgtacactaataaattataattttgttaaacttgttagacaaacttctactacttgcattatcaccttaaccccacgtatatccatatccccattcctaaccttaggaataatataattataacactttatatatgagttttgatgtcactaggttactataatgcttagccatgcttagaatgatcttccttgtcattatgggctcattacaaatatgaaaattgattttgaaataatctggacagaattttaatacttgtgattttgataaataaaatgatggaaaacatagattctaggtttgggccttaagtggtgcacatatggtgattagttgtgtaccgatagggggagagtgcgcctaaaccgacctaaggacttcactcaatgtcagttcatttcgtatacagtataaccacatgtgctagtatgggatagcccaagattagtaaattatttatggtttagccttacattctggtaggccggtgtatatgagttcgaataattcaaaggagcttcctatttaccccgatgtggtagtttaggtgactaagcgtgtccaatacaatggtattgtgccacgtggtgggttcccgttgtgtccgccaccacagtgttaagtttaaggcgtgggcccgccacttaacggttctaggttatataacgtgtatggcttaggatggagtaacacatatcgtgctggtgtaaggctaaatcatgaattttggaaaaacgttgatgcgggtaataaatcgggtacttatgtatcgcgtgccatgctcttgcatgattattatttcgcatcatgtgggtaaagtgtacaaactcttcagagttaaaactaatcaattagccgtgctcgcggttatgagcggtgtgtggatatgtattgagtatagacttgtgtttattcttctaaatgctgaattttattttcaaattatgatgagatttgagaatgatctccttgctgccgtggatggcaatgaggtgtatatttatacatgattaatgtctactttgatgcccatatgctaagtactagcttgctgaaatttatttgaaagcaaatctgatttgaatgtgttttatgcaaataaaacttgctgggctgcaggaa

SEQ ID NO: 31426 - DNA, 810 bp, Oryza sativa
agcttcgtgtggagatctcctgcttcttgcgtgtgtccaattggccatcctagatgccatttcctttggaatcttttgattcatttagggcatccacaatgttagaaaaaaagcaggtagtaggcaatatactattcctatgacttagtaataagcattgtggaagtgggtagtaactaatgctcggtactaagcttatgacccactcataagaataaaaaaacattaaaatctctctcactctctccttccaacacaagatgtgctactactacatgctgagttgacaaaaagcaactaaaaagcaatatttttttctcatgcgacccactttacaaaggcctactacttagccctgctacttattacttagttaggtaagatacattgctgttgcccttaggatgtttctgagcagtgaccgtaacaaagcagtgaagaataatctatattatctataactagcatggtggcccgtgcagattgcgcgggtagcatcattatattttctctcatataatagcatatatgttttcccattatattattcaaatatattaaaattacaacataatttaaattttgcaataactttacaaaactactaatgtataatattcatattatattttatatacgtgttagttattagttatttttaatatcaaattttagttatttgtaaattatataaattcctctatggactctagactcgtcttttaatattttttaattccgaattttctgtaaattgtatttttatatagactctatgctcttcttccaatattatttatttttatttct

SEQ ID NO: 31427 - DNA, 1543 bp, Oryza sativa
agcctaaaaagatttgataaaaaataatcaaaacgacttataatataaaacaaatgaagtatgtattaactattgtatcatcatccaacatgcatgacgcatgcggagaataaggcgcgaaggcaaaagcaacttaactcgagacggaaacatgggagctactcccactctcccgtcccggtcccaaccaattgaaggtatcagtagagtggagagatggagatgcttgcaatctttatctgaggcgtgagagcgattggttgacacaaaaccagccgctcaccctagctaactccaagggacagagaacaaattgaagcaagacgcaacaactaccttccagtctacattgccagctaccccgtttggtcgacagcaacttatccttctttcatgtcttttgaagtaattattccagacaagctgacataggcctactagcttgtgaatttgtttccattttgaagcaaacacaatgtctctatatttcttgaggattagaaactttgtatagttggggtgacagtaagtatggtttgagaaaaataactctgttgcgaccaaaccaatcaattctacgacacataaaaaatgccatggcaacgtatgattatgaaactacaagaacagagtgtcatgctccttgaatttctataggaattaaaaaacaataaaatcttgaaactaccattttagatgatacatagaaataggtaagaactttgtggcatgggaagagacaaacatgcggtaaaacctaatgatagttttcctccaaaattcctgtgaaatgaacaattctataggatttttaaaagaaagtgacaaagctagccattcctttgttccaggtgaactttagtgattgtttgtccgtttctcctccatatctctacaaacgtaaaggtggaatcctcttcaatcatccccatgtaaaaaaaccaaccaacctaaaaaaaccatcgtcccaaaaactaattttacacgaaaattgacccatctcaaaggactggatagaaaaaaagaaaattaaacctagtgaaacctattctcgtccgtcttccttctaaattctactagcaatgcacggagatggcactcgtactactttgaaattaaacttgatataaaaagctcaaaaaggaaataaaaggactacatcatgcaagtacacaggacatttcatcacttctgtacatcctcgattgtgcaatcaactatatatctcctgcatagtcgtttatgcttttaaaaatagagaaattttatagtactttgagaaagtattttaagttatctaaattttacactaaaattttagtaacttaagatacttatagtatatgaaggtaccaaattttatataaaacaatatagtactacattccagtatcttttcaatgatggtataacatttcccttaaaaatgcgaccatttctttccttcaaaatgtttcggtgcacgcccggtagtggtggaccggttcatgcatgtattgcgtgaatttgggatcggtttgatcgatctgctgcccggacaaga

SEQ ID NO: 31428 - DNA, 956 bp, Oryza sativa
agtgacttgataccaatatatagcatatgcggtgtgaatccccgaataatatgatccagatgatataccgactgctttgcagaatatgatgcgtgcaacctaaagttgacaatatctttgaaaattcacatagcataacagctataaagaagagcttgctgttgtgaataaagaaacttccaaattattgggcatacaccacacgcacactgctttaacagatgtgcttaagtccctaaaagacacatggtttcaccacagttatctttgctagtttgcccagaaactaatcgtttgtcgtcacgtaattatgatatttatcatttttctaatttgcttgtaaattagtcgtgtgattccgcggaagtgaattaatctcgaaatcggtttcattagccgatctatcgattttgaggactctattatttacaccgcaaatcgttaggtgatcatatgttgataaaaaaacgtcaacagcatggccactcttcaagtagattgaaccgacgccgttacctcggaggttcttgccgctgccgtcatgtccgtccatcgtcaagatcccgtcgggcctctgtaagccattttcaagcttcggtgagcacccttgagtaccttaagaccacatgcatgcactatctcacatcacattgctctagaactcgacatgcacaagcaacccgagacatgccgctgtttccaccatcgccaccatctattctgtccactatggcttgtaacaagaccaccattggctttgcaaagaactcatctaaattttctatttttaccccaacgtcatccgagccacctatcgccgccggcaagctcgccaagtcacgaccactcctccctgtacatcggcggctggaggttgaagacaaggaccctgtcttgtagtaaactaaaagcttagggtttaaagcgtaaagcactagagacttacatgtggggcc

SEQ ID NO: 31429 - DNA, 785 bp, Oryza sativa
  unsure (1)..(785): unsure at all n locations
cggtggannagtgactgcttcatttcctgcggcccctacgtgngataagatcgctctagattgagtcgaggggctaatttgtcccgtattgaaccaactttggttcttcggtttgggggggggtaattcggccaaccgcaatagttcaggggggtaattcgtacttttttccggtggccctcccttctcctcctcctcctcccgatttgtggcggaggtagcaccaaaggctggcccaaagcacgaggtggtggccggtactaggaaaaaaatggaggtggaaaaggaggctcccccctctctcctggtggccctcctctctgttcacctcctcccttctcctcctccagatctggcgacgacggtggcggtggagaaggccggctcggagggcaaggtggaggccgttggctgggtangaggtggaggtgaangccgtcgcactccttccctcaccgagctctttcctggcctcgccatgcgcctcgccgtcagctgccggatccggcaatgacngcttcttagggctctttttgttatttcacttaatactataggtgttggtcatagggtaagaacctgacacctattgccggtttctaactggcacctatgggggttcatgtatactagcgatcattatcatagaatcattgaagggtgatttaaattgatgaaattctgtgatttngttgcaagcctgaaacagctcaataaaactctgtttctacccaatagtatattttatcaacgccacacagtttgaatgcaacctagtttttaat

SEQ ID NO: 31430 - DNA, 786 bp, Oryza sativa
  unsure (1)..(786): unsure at all n locations
tgcgggganagtgactgcttctatctgcgccccgaactctaacaccgagctcactctcatctctccacagtcgcatcgcctcgcctcatcctccagtcctgtgccgagagaaccgagggagagagctcttgctgctctcctcgccttcgatctcaccaccagccgtgacaaagacgatgctcgtcgtcgccgacgagtcttcgccaaccctatctcttccacgttccatactctcctcaccatgcccaagattctccttttgatttcatcctctttcgtacagcgaatcaacgggaacgccactgtgtcatcgccggccttggggcgtgctctgcgcgacgccgttgtgacctcgtcgctgttcccgtcgttctggaccaaatcaagcagagccatcgcgccatcaactcctccatgagatcctcttaaaaacccctcaagaaccgagaagaatggagcaccatggacggagatcggcctccatcgtcttcaacttcggccactgtcgccatgaccaaattctccttcgctggtgagcccctcatcgattctttgcacatgcaccatctatgggacctaatcaacctcttggacatgcatgcatgtgtttgtatcataatttggcttatagttagttcatttgtgcaggccaaattattttggaatagatggtgaaattatcttatgatttgcttgaaatcaattcagtttacatgtgtaggaatttgtgatgcaatagatggttccatgtaaatgggagggtggctttatcatttgatcatgtga

SEQ ID NO: 31431 - DNA, 714 bp, Oryza sativa
attcctgcagcccggtggcagtaagtttgcccctaatttttttctgattccttccactattcagttgtcgtttgaaatctgtacagtcagttattgtttcacccatcttcttgatggaacttgattgttgtctctttttgttctccaggagctcaaccttgggagagatagggtgagttcatggctctctgatcattgtgaatcttgggaagagttttggacttttgattgttgatggcattttcaacacgcatctgattagccaccatctttcttcttttgaagctaaaaaagctgcaacatcaactcgcttgctcgagagctgttatcgcaacaaaaacatcagaattggaggtataggaactgatgctaatgtcgttcttgctccaccttcgtttcataaattccatggaaaatgttgatgcaatttgctgttcttatcctcttattattgcaggaggccaagaaggcgatgaagcgcaataggaacctgccactgccagagaaggctcctcctgcaagcgaaacggcgcagcagcagcagggttctgatagagcggcacagatcaaggatggagatgtcgtcaatccagagcccgccgcggcttcagacgcatcgcatgcggcaagcaccaagaaactcagcaacgccagcaggaaacggatgcaaagatctcgatgtaacaatggccgctaaccattttgcttgcaatg

SEQ ID NO: 31432 - DNA, 683 bp, Oryza sativa
acgccgccgcctgccaagacgccgcagcctgccgccgccatcgacggcgccgccgccaacgccgcagcccgacgccgacgccgatgccgcctactgcatctgttagggctcgggagggagacggagaaggagagagaacgggagggggaggttggtggaggtagttcagtggcattttcatgtaaatacactaaaattttaaagggtagtgtgtcttttaaagtggagtggagctgtggagcagcaaaaacccagctctacccccgtagtacaaatttgtagagtaactatgccaactccgctccaaaaaataaatgatctgaaccgtttgacacagctctggctctaggtaagttggagttgggagctggagctgtgccaaacgggccagagattaattccctctcaaaggcaaacacacagcccacaggccgctcctcgcggtgtccacgtgggatacgcgcgaacttgcaatattgccataaagcccccgttttgtgcgtaattctatatagatcctcacaaacagttcctctgaggcattattttacataaaaacccttacaaaacccgggtattccatgcgaagaagagaaaatcacgaattagaatagatctctaaaatgtggaagccgaaggggatttctcgcaaaacgacgcccactaatccagggggtgcagga

SEQ ID NO: 31433 - DNA, 3161 bp, Oryza sativa
caaaaggaattcagctagcacattctcatccatgatcagctgtattttaattatacccgattcagagatttcatttttctttcttttaaaaaattatcccgtcatagttatttgatgtttatgacaagattcgattaaacttttaaaattatgatcaaaacttataatatttatagttgtagtattattctgcatattgataacccgtcgatttattcaatgcctttaaaatcctgcacatggggacaagaagtccatgtaacaagctatgcaccacaaatgtataatccctgcatggtaagcaacttgcaatggttcatttgggtgtggtaggtccatgcatgcatgcagttgtcatgtcctttaggagcttgcactgcaccacaaaactcctactacagccacaactaagccaataagctagggttccttcctagctaccagcttgtggtgcaattatgccttgggtactaagaaagaagcagccatgcacacatcaacattgatgcttgggtagcttatctaacctagtggtgtcacctcattgctccagtggtcacacacacatattaacaggatagcaacagggcaaagctagctagcttgagtgatcaaatcatctccaggatctcaaggtgatggtgcttcatatgagcaagcctagacacctctgggcagcttcatgcaccggcctctctccacatatttcatcaccaaaagtatagctagagctactatatgtctagctatatgcattgtgtgccattcatttggacaccttgatgaaccattgagatctgattggaaataacaagtatcaaaatatagaggtgcatgtagccaacaatatataggataaagatttacctttccttatgtcatttctattttatccgatttggtctctctatatatagattaacagcttatttggaatactccttctgtttcatattataagtcgtttgtcttttttcctagtcaatctttgttaagtttgatcaagtttataaaaaagtttagcaccatatgaaatatcaaattagttccattaaatctaccattgaatagagtatgataatacatacatacatacatacatacatacatacatacatacatacatacatacatacatacatacatacatacatacatacatacatacatacatacatatatatatacatatatatatatatatatacatatgtatatatatatatatacacacacacacacacacacaacacacacacaacacacacacacacacacacacacacacacacacatatatatatacatatatatatatatacacatatatatatatatatgaaaatgcagatttgcactcgggttcatatgtaactacaatctacaccgttgatgtgttccaagattcgtgctgcaaaatgtacctaaccttaaccaaatgaatgcttactatagggagaaaagataattaggattaggttggttcacaatatgtataacatgtatgttgcattttttaccaaataaatttttcaataataatcatatatgacatttatatatctagtgcattgtatttctctaatccttattttgtttataacatgatatttagtcaaaatgagaaaacaatatatctactatatcaccaaattgtcattttgcaaaaataatatttccaaaatgatatatatcctaccatcaaaaactacataaacaagataatttatataaacaaggtaaactacataaacaagttttgcatacaagaaatacaaaaattatataaacaaggtattttacacttgtaaaaaatatagtataacgtaaatatcatgcatgttacattttgttagaacctaatatacttgccctaagattcgtgcaagatacatataggatgtagattgtgggtacatgtgaactcgcatgcaaaaaaatcccactcatatatatatatatatatatatatatatatatatatatatatatatatatatatatatatatatatataaaagtttgattgtatactaccgtatttttctataaacttaattaaactttaagaagtttgattaggaaaaaagtcaaacgacttaatatagtgtaacggagagattacatgaattctgatggacggctcacattttgtagtcattgaaaacttttgtctcaaacagggtctaatgttgtgctagaaaagataccaatgcgcacaatatcgatgctaacaacaacaaccaaattctccttttccgtgaggaatcaaaatatctatgtctgttctgtatgtgaaaattttctcatatggttattggccaccacaagagatatatccaacttggatttaatttcatccatctgatccagttgaaaaaaacatataaacagaaaaaagtgaacccatatgcatccagaaagagagaaaaatgtggcgctgatgcatccgggtcagccacgcttgtcagggatcgcacaccactgaaccggccggaagctagcttagctaggcctgacaaatatactggcaggttcaatgaaccgacttgtctttgtcataggccttatttgagccgtggaacattccagaacattagcattcaaggcttcaagtctagcacgccatcatttactgaagttacacatacttcctccgtttcacaatgtaagtcattttaatatttctcatattcatattgatattaatgaatctagatagatatatatgtctacattcattgacattactatgaatgtgagaaatgctagaatgacttatattgtgaaacagaggaagtactgtgcaatccctctaaaaagaattattgtgcaataatatctcttaaggtgtagaaatagattacaccctctagctaaaaaaaaactaatcctagttttaaacttgaaaatatgggtgtctaaattcttagctagaatttgattttctttttataggacggagagagtattgcataaggattggtggagaggtattagtatttgctagattaatattcaagacatctgaaattttgtatttttagtcacctaaaattgcatattgctaactctaaaattacaatgtatgtaatgtacaatttttactttgtatgaactgtgtatatatgttattgcttatatatgggtttactttagtt

SEQ ID NO: 31434 - DNA, 589 bp, Oryza sativa
aatgaaagatagggatccaaggatgatacttgagagcaattatcgatgcaataatgtcacacagaaaaggttctgtgggtccagcaatgcaagaatgctagacacactggtccagccaccactaccatgtgcctcatgtaccagttggcattttggcacctaatgctaagtttccatgttcactgatcaaccatttcagcgataaattctaccacttaatctagattatggctaagcaaagcgctaaccgccaatcaagagcagtgtcagtctgccattgctttcctaaccgctgctcagcaatagaaaatatatcgacagaagaaaggctggtataaagaccgccatcttttcaagcacccacaagactttctagggaagaagcctctctttctttctttcgttctttcttttgttttcactttcttttcttcttcccatcctgatcttcttcccgtcctgatctggagcaatggcgacggaagaagaagcaagggaagcaacagatggccaggtaaccaatggcttctcgtagtctctgagttttgtgcagaacttgcttgtttctgtttccatgcatgcatacttt

SEQ ID NO: 31435 - DNA, 517 bp, Oryza sativa
aatctataattgaatatattttcataataaattatcttggattaaaaatattactacttttttctataaatttggtcaaacttaaagcagtttgactttgactaaagtcaaaacgtcttataacctgaaacggagggagtaataaattttaaatggttaggccacgataaataaaaccttagtgcttatgtttaagtacgtagcacacaacacatcttatttaagtgtttataattttcttgaaaaaaagacacgtggttatagtcaaatatgaatagcatccggctacaggtatttggaaactagctagaggaatataccttttcgagttgatggagggagcaaaataggagaacatatgttgagtaattatcagagcacgtgacacgtgtgcactttgaagatgtgttcctcgatccacaaattcgcgatagcaagcagggtttacgattccgacgaaatctggtcggatttcgcgaaattttgacattccgacgaggtttaaaagtagaaaccg

SEQ ID NO: 31436 - DNA, 599 bp, Oryza sativa
cccgatctgtataggtaatcacccaaactaaaatataatagacctactctacttgtttgcatacatagggtttttggggcataaacttgtctgcgtacttaggttttttttgggaacatagactttatgcgtgaggagatctacatgcatgagattttctttagggacataagttttatccgtgagaagttctgaaaccatatagatcatctactcatctacacaatagttttaagggaacatcaattatggatctttaacccaagaagatctgaagccgtatagaaatagatctatctatacctaaaactcacccatccaaaaaaatcatctattaaggatgcatcttcatcaaaaattgattattttggtacggagggcccaagtttttacaggaaaaaatatcttgattttgagggatctaaacacatacaaaagtatggtatcattgtgtcttctacataaactagaaaatcggtgtgttgttagcatgcttgctaatcacttaaaaatactacataataaaattgatgtgctcactaatttaaaatatatatatatatatatgtttttcttaaataagaaaaataaatgtaaat

SEQ ID NO: 31437 - DNA, 681 bp, Oryza sativa
aagcacctgagggacttcaatgctggcaacatagtgacttccattataccatggtcaggaaattttgtctcgagttgccattgctgcaaagtaagccgcaacaagctcaaaccattacgagagttgcgaagccggttatggcaatctttaagggtaacagaacaagtcatatccagcaatctcattgaaagcaatggaatagggtgagcaacaacatcaatcttgtgataagcaactatttccctgtaacattcaaggatgctatgccaaataggatggtcactttctttcttaagtatatttccgtagttctcaaagaagttgcagtaaggctggagaaggtgattgcaccaattgaaccatatggcatacaatttaagatcattttcagtagattgctccattacccagtttgcagcaataaaaagcatctgatcagctaattctgaattgaacaacccagttacacaaggcttgacagactgcttatcagaaacggttggaaactgcagttctaataaactcgtggcaggcagaatatatgggtggatgctagtgataggtcccaacaaggatgaattacttttcaaagtgcttatctgataagcagcgtattgggaacccaatgactgcaaatacatacaatttctttggacacaagtttcctttgaataccagata

SEQ ID NO: 31438 - DNA, 528 bp, Oryza sativa
tatattccctttccaatcacacaaacttatgctcttttacttctataaatataccatgcctactcagtactacttctataactctaaaatatatagtaaacccagaattattaataaaaaacaaatttaaaataacgaatttacatttatttttcttatttaagaaaaacatatatatatatatatattttaaattagtgagcacatcaattttattatgtagtatttttaagtgattagcaagcatgctaacaacacaccgattttctagtttatgtagaagacacaatgataccatacttttgtatgtgtttagatccctcaaaatcaagatattttttcctgtaaaaacttgggccctccgtaccaaaataatcaatttttgatgaagatgcatccttaatagatgatttttttggatgggtgagttttaggtatagatagatctatttctatacggcttcagatcttcttgggttaaagatccataattgatgttcccttaaaactattgtgtagatgagtaga

SEQ ID NO: 31439 - DNA, 707 bp, Oryza sativa
gcacacacacgcttcctaaattgctaaatagtgtgtttttacaaaagttttctatagaaagctattttaaaaaatcattccatttttcaaaatttttaggttaatacttaattaatcacgtgctaatggacaacaccatttaccattttccgtacggggagccgaacacagcctaaagctttttactacctccgaggtcacaaatgcatctcattattgtactaatatactatattcatgttgattaatttttgaaatgtgaaaaaaaataatatatctatcttttacaatactatttgagggattaaaataataagagtgaatttcactttggactatgttttttttacctaaattgcattttagactaggcattggcaaagtcttccactttagacatgattttattaccgagaaaggcacattagactagtggcccacaagtcagccaccagcatcttcttcctcctcaatcccccattcccccacaggcaagctcagcttcccccacctgcgagttctactattgctccttcccccctccggcgagctcttcgtttcccccgctctccctctccctcccatcagggcgagagattgccgcgcttcattctgctgtcaagctcctccaaccccacgtcaaccaatgcctctcctcccccgcgctggagttcgagcttcccgccgtcaaccccgcgtccttactt

SEQ ID NO: 31440 - DNA, 760 bp, Oryza sativa
tcctgcagcccactacgttggatccaaatatgagtgttttagatttgttcgtgtcaccaagaataaaacttttactcgtggttaaatctaagagtaaatctaggaaaaatatgtagtgcaaatcacatatacagtggaaatataaaaactatcattagactaaaatggacgcctacaatttatcaatgccaacaatagaaaaacttataggcgtccattttagtctagatagttttcatatttccactatatatgtgatttgaactacatattttcccaaacaacaccatacttttgcgatgaagcccacctgtacccactaacggccgaggatattgtctctgttctactaccttcgtcctagaaaaagacaaaccctgagtttccgtgtccaacgtttgacagttcgtcttatatgaaattttttttataattaatatttttagtgttgttggatgataaaacatgattaatactttatgcatgacttgtctttttaattttttttcataatttttttaaataagacagacagtcaaacgttggacatggaaacccagggtttgtttttttattgggacggagggagtatattacaaatctttcaggtttatcctaagttaaaattcttttaagtgacattaatttgtaaatatttatcaacaacactaaattaatttgtaaatatttatttacaatatatttattttgtgtggaaaatatacctataatttttttataaaatttaatcaaacttaaa

SEQ ID NO: 31441 - DNA, 753 bp, Oryza sativa
cgcttttttttcttcttcttgagttataatgttctcaattttgccacttcttgcagagttagccattgggctgtttttttttaaaaaaaaaaccccaaatgctacaaaaagttaaaccgatacatgtgccaatttctgtgcttttggcattgtcaggtatagtgtggagaaggtggcaactctatcatgtccttggtcccagaccatatgaattatgcatatggaaatcttgatttcttgggtcactggtccaatatttttctttttctagaatccactaatccaatattatactactagtactaagctatttaaaagtctcttactagagttggttagagttgcacaatttcactgtcaccatgagcttactttaagatttggcaatcctgtacatatgatgcattgtcttttaagtttcactaatcactgtcaaaacacgagaaaaacatggcattattttgctgaaccagtcaaacagttaccattaaaaaaagttaaacagttaaagtagggggagagaaatatggtagtagctcaagaaaaagtcatgaatccgttaatatggttcattctttcgcttatttgtagaataagccaaaatcatatttgcaaacaaaaaataatttgtgaataaaacttttatatacgtgttcttagtgatctaaaagcaaatgctgaaaaataaattacgatgagaaaacccaaaaatcaacaccaaatttaaggtggaaaatttaaattttggctgat

SEQ ID NO: 31442 - DNA, 535 bp, Oryza sativa
ctgcagccccaagcaaatcatctaccagcctgccagtgagtcctgaatgtgcaatctgaattgattagatggctcatgatgaacttatcgtcggacatgttggatcggtatgttcatcacatttgctccctttaattagctttaggcacaattgtgctgcatcattggtgcttatcgattgatatgtacatgcaagtaagaagtgacttggaaagtatttgttgctatacggatgggtctcaagatctacactcgtgggttctactgttgacaagaactaatgcactgtttacaagaatattagcaggattctgcatatttccttcaccaatcactactacccgtatcaacctaagactatcatgttttcctttttccttgcacctgtttctgatagttaaaagtgacatttttaagtgcttgttgatacaaaccattcatttatattcattttcataaaaaaaaaaattcatttatatccaaattttcaaattttcaaacaagggtatccttgttcctcgctgacctcgggctc

SEQ ID NO: 31443 - DNA, 681 bp, Oryza sativa
ttcctgcacccctgacgtgcattgtgaaatggagggagtagttgtgattgattagaaagagaatgttgatggagaaattgttatattttgagacaaattctaagtactataagttgttatattttgggatggagggagtattattttagcctgtgtggataaaagtttcggctgatctgacgcgcttgatctgtagtgtgaagatttaagatggaggaatgaatagtggtcttgcatgctggtgaaaactaacctatacgctgcacgcgcctctcgttatcttgtttcgttttggatggattaattagcgggtccatcttttatcatatgattatgtttattcatacggtttgttagcaactaaaaacttgtaataagaataattttacacgtgttgttaacgattcaaagcaaatgataaataaaactcataaattaactttaaaaatttcaattttagcataaagtataagtatagacgaaaagatgatgttgtaattaacctgcgatcttttgaaagtgagaatttattataatatggttttaaatccattattttaattttataatagctatttcattatctttttttatgatttattcagccagcaatcctcagtcagataagattatcctccacttcggccaactcaatttggagagcatgacttgcagcagcag

SEQ ID NO: 31444 - DNA, 701 bp, Oryza sativa
ctacccaaaggaaagctgctttcatctttttcttcctactggttgatacatccattcatccactagccacgcaggagcttttacagtctccttttgtcactgcattgctgaatgatgcattctactgcatacttcagagttgcttgcctcttactcaagagtcaagaccaaatcaatcctgaattcttgatgtgaaaccatgaacaaacataaaaagatataggtagataatcgaaaatcatctatactaatataaaagatgatagtgatggcggacacccaactgtcatgcagaattcagaaacgataaacgggcaccaaaaaagtaaatatattagacaatatatataatgggttattttttaaaaaagaaatctgttagtggatagaagaagaacatgtacaccgtatctatcaatgttggttggatgcagcaagaaacaggcttgtgatcaggtgtgcatcaccaaccatgcatgatgaaccaatagtttggtgatatgtcgcttgggaagaagatgaatcaaactggcaggagggcaatgccgatagaaaggagttttctgtcaccggatggcatatgcaaacctcacaccggcaggcagtacaaggcaccaacaaccaaccatgccaccattcatatgcatgtttacattactctgctactactaatctacttctccctcgttccattttaaatg

SEQ ID NO: 31445 - DNA, 894 bp, Oryza sativa
ttcctgcagccctatccaatgtactttaagcacaacttttcgttttttatatttgcacaattttttttaataagacgagtgatcaaatattacaagtaaaaacttaaaatctattatattatgggacggatggagtagtattaaagactttctgctgcccccacccaaaccacaggttctgaaattaaagtaaaaacgattccaaagaagctttcccgtcggtctccacctccatcatttcgttaatcatgggccacaaaacaccgattttggtcgccattatcggagctaattaatttaaagaggttttcttttgctgttatgcccagctttagctacctaagctttgcattgtggtgtaagccagtgctgcactgactcaccatactgtacccaataggtctcaagtcgctgtcatgaaagctaaacatatagttgcaacaaacctgacctctgaactagatgacatttttaattaataactaacaccaaatattctttggagcttaggtatttataggaccaaattggaagaataatgagtaatgggcatgaataatttcgattggaggcttttcaggccaggactgattttttgtctgaatctgaagattacctgcatgtaaaatcttgatctgaagattagcttcaagtgaaatgttgccccatcgttttacttatgattatagttatagccaaaatttaaattttaaaactttattctaagttgattttgttgttttctttatctttgtttattttacaatatttgcttttgaattgctaagtacatgtatataagaaaattatgtatgaatttttttagttactaataagctttacaaataagtataagtataatctaacagaattttgtacaaattaataggatta

SEQ ID NO: 31446 - DNA, 747 bp, Oryza sativa
tctggttttgttatctctgggcccgttttttttaatttttcaccgtttctttctaatttttttaaatctttcacacatctctttacaaatgtagagttgaaagttcttaattttgacttgaaagtttttaaatcttgattgaaagttttcaaattttgcgttgaaagtttttatgttgttaataaaccgtatgaataaacataatcatatgagtaaagatggacccgttaatccattcatccatccatccaaaacgaaacaagataacgagaggcgcgtgcagcgtataggttacttttcaccagcaataccactattcattcctccgtcttaaatcttcacactacagatcaagcgcgtctgatcggcccaaactataatccacacagggctaaaataatactctctacatcctaaaatataacaacttcttatacttaaaatttatcttaaaatataataacttctccatcaacattctctttcccaccaatcacaactatctatcattcactttttctacctacatcaacttctcaatcaatcacaattcctcccctctcccccaatttaattctaagggtttattcgaattagaggatcttcacaggatttttggaggaatactgtgcataggaatttttttctttcctgtcattcgaatcatgaaaactggtcataggaaattcctttggtactgatttcacaggaaaagtacatgaaaaatccatccacctcaagctcttt

SEQ ID NO: 31447 - DNA, 865 bp, Oryza sativa
cctgcgccccagaagctgatgtaactccaaaccaaaaggaccaataaccaattactaactaactaactagtatcataatcactaactaattaccaagtaagtaagtagtaattactaacttgccaggtcagcatctttagttcttttcacagcttcagaaaggcacaaacaaaccaaaggcttatatcagccagaagcagcagcagtagccagcagccagcagccacagccagcaaagaaagaagccaagaagcgccaaaggaggaagaagactcctctctcttctcctcccttggctgcaattgcaatactgcaatacagcaaatccatatccagagaagcggttgaattccaggagccgtgtttgcgcagagaacgcatgctgcttctggaatcgtttcctgcctacttttcttctcctcccgtttggctgggcgccgctgctctctccgcctcagctcctcctcctcctcctcgtcgctctcttccctgtcgcggctgttgcgttttgccagttagagcccgactgcgtcggagccgtggcggggattgttgttgccggtgccaaaaatctgatcttggcgaaggttttggggtggaaagattgggttttctttggctgggattttcatggttataggaacctgtggcagacaggatttggagttctgagtttgaagtacttttgatgtgattcttggcgcttcggagatccatttttgtgggtttgttgcgaggctctgaagtttttcgctatcaaaggtgtggaagcaatttatttttccagtacagaaggactgttagtactgtggagatttcgttgggagctcaaatgtttgtctgattagctaaagctccaatcatt

SEQ ID NO: 31448 - DNA, 534 bp, Oryza sativa
cggactgggcgacaaatagagggatccaaagtgaacttattccaacggaagaggagaaggcccataattcatagtgggccgtacttgaggactggcccaaattttgccgttcgtctttgcattgcaggtttttctctgaacctgattcggctcttgccgctcacagatccagccagcttctttcaaggcgaaactgatcaatggtactgaccaaaatatgaatattttttttattttttcatgaagtaatgaagagaaaggtaaaattaaataggtggactagtcgtaattggttaagatgaaagagtaagtaaagaaattaaacaagagatacattgtgtttgattgagatgaataagtatgccaagaaattattatattttgagataattttaaaatgctagaaactgctatatcttcggacgcagagcagtagatcatttgtcagattggatggattgtgctactgtacatgcatagtgtttcagactttcagcaggtggagcaaaatggattcagaatgttgtcaagagt

SEQ ID NO: 31449 - DNA, 683 bp, Oryza sativa
ccagttttgaggttgtgggtaatgattgcgcaagaaaataagggaggcaaaatagacgtatccttttggattctgattttgaatgagagaagaaattgacaagcaatatcacgagccgagcccatttgcccctctgtttcctgtgactagcaagttctgttactgttactactgcgtctgaaagtctcaatgaacttttgctctgagataaagcctatataaaattaccaattcatgtcagagtagcaaaaaataaaaactgtcttggctcttgaatcttgcacggatttatatcaccaattcaaaaacaaataaacaaaagagaaatggagaagatgaatgtagagcacaaccatctctgccgagtgccgacttctcgagcaagtgttgattatgcagaatataaagttgatagtgataagacaacactgtggagtagtagttaagattaattatttgtaattgataatgtcttaagttcatttgttctttttttctcaatgcatgacgaccacttttctgtttatagaaaccaattggctacaaacgttcaaccgaaaaaggacagacagatctaatcacaaacagctgcttcatcactcatcagtgactgttagaacagataaaccggcattaagttgctgtattataatcaggggaaggacatgcgacatgacgatcac

SEQ ID NO: 31450 - DNA, 800 bp, Oryza sativa
cctcttcttcctcctccgtaaaaatccagagagcaccactgccaactgcatgcgtaatgcatattcctaacacgtgtggccgtcatgaaaatcaccatttttcgttggtctcataatttaagagttgatataatatcatacttagcctgaaaaagctgtacttttttatgggctttcatgactgattcaattatagtatatcgagtgaggatgacaagtcagtgccactacatgatctaccgtagtatatttaagtcattaagtgcaccgagaaggaagagtagttcgatgtttgtgttacctatctctctacctcttattcaagttctgtccaaaatcacagtcaaaatttctgccagtgacggctcatcatctacttaattatcttcttcttcttcttcttcctcggttctcctcatcctgaagaaactgtagctaagctgcccattatcatcctctctctgtgattgtttggtgtgtcgcttcttcgatgtcaggggaggatgaagcgaagccggtgaccgtgaagatcatcgagacggtgtacgtggaggccgacaccgccgacgacttcaagtccgtcgtccagaggctcaccggcaaggacgccgtcgccggcgatgcaccggagctgaatagtgcccagaggtttggctcagggagagaggccagtcgccatggcgatcacaaggtaggctcctccagcgaaaagaagagcagctaataaagaagctattgctgcatgaataagcatagcataacttgcatgctacctcttcaattattattttttagtaaat

SEQ ID NO: 31451 - DNA, 683 bp, Oryza sativa
cgctttttacatcatagcggcatagatattgtaggcatagccattagccgagctggtgctggtgcatgctcgatctatcgcttttttggactgaaaaaaaggggcagaaacaaaggttgccgttgatatttccttcctttaagtggagtggaaactggagtatcgctcaaatagctagctagggaagttattttattcacctgtgcttgtttgacgctttgaccgcaaaggctaacagccccatcctttggctgctcaatggaatagaacttttatataggtgttctaaacaatctagaaataaaagctaaaaaataaactaggataaaaaaactcgatttaaaatcagaaaattcacgcgagaaaatataagtccgtacgctgttcgcctctggtgcgtcgcatgacggcgacgcgatcccgcgagtgcttgaccggttgacttgtccgccgcctgcagcggcctgcaacgctgcattcccgctggttcccacgatcgtatgttatcccgtcccgcgcgacacgtccacgacgaaagggctcgccgtctgtatccggcggccgtgcgtctctgaatctggtggccgtgcggcacgaggagtccttgggaatttctaaacaaaaaagtttcattttattccttaaaccttctaaataatttttttagctcgttttacactcca

SEQ ID NO: 31452 - DNA, 698 bp, Oryza sativa
attcctgcagcccttcataatgaacttttgctgcaaaaggttatatcaacaagacagttagtactactgactaaatatggggcagagtatgtgagaacaacaaaaattcacaactcgattaccatatatcccagcaggtactgctccagggataaaaggccagtgcatgaaacaacaggaaaggaattaatcatagggataaaatttcccggcacctagctaaaagaacagaaatcaaacatttttgaaagaaaatagggattataggggtgtgtgctaaaggatgatcaccaagtacaaacatttcagtatcaataagtctgcaaagcaggatcaacatagaatgccatccacttgattcgcttttgtgtattctgcctaatccattgtccttattgtgccactttatgctagataaccaaatcagcagtgaacttgatttgaattaaaccacatgaaaaagtcatttcgtgattattcttctcatcgtagtaatttgttgacagattgttcggatagaggctaactgtcatccagaatgactaagctgacagaagatcaattgccatagttcgttggatatccatatagtttaatcaacatgaaaatagaattaaaagtcactaactatgtaatatattatatatgcatccacatagcattgcatttatgcccctaaatctatgtcaggccttaca

SEQ ID NO: 31453 - DNA, 823 bp, Oryza sativa
actctttttttttttccttgtcagtgaccaggagggggcacgactggtgacagaggagtccccgcgcgaccgattcccccagccccacgtctcccgattttttttaatcttaatcacatgcgacctcctaattccaaatgtgagcatgtattgccctgaattctgtttctaatcaaactagctagcagccacaaagcaaatgatccattaacatgtttcgctagtattataattaccctttgttgatgcagcttctatgtgaaacaaattaagatttgtcaatgattttcatgatccaagcagatgattatatttcaaccgaccgctacagttccaattttcaaaacgaaaacatccaagtgatcaaatatggattaagaaaaaaaaagacaaagaaagctcgagactaacggcacgacggcacggtgccctatctcgtaatggttgatccaaccaattgcaaatggtaataagattttcttttccgacaacaaacaatcaattagacctaaacaagttgctacagctagtgatttctccaatgataagcagccattagtttgttatatttcgtttgacgttaagtccgatggaagaccactgcacacacatgtgggcttcttgattaaaattagaatttcatccattaccttctcatatttggaattagaagattgcatgtgcttagatgtgaaaatttcggccacgtctctccctatacatatatatactttcatgggtctatatttatatgtatgtatacatgtatatacacaaaagtatgtacatgcaaaattttacacctgtatagaaaaagctttct

SEQ ID NO: 31454 - DNA, 608 bp, Oryza sativa
ctgggcctcactcaaagacaagctgtgatttagctttcaggcgaaggcgcaagctagtttttttgaagatagggtgagtccccacccaaaagaagagtaggtagaagtggtgcatgtggtatccccttgagatataaaaggaggaccttgctcacttaagaggggaagaagggggagaagacctgagctcgtagagaagagaaagaggaagagggtttctagagtttgaactctcttgctctccagctctttgtaactccttcatacacagatccaccagaacacaggagtagggtattacgcttctcagcggcccgaacctgtctacatcgcccgtgtcttgcgctgtcacgcccggaatttctatccaaaattccaaacgcttacatgtgtgtgaaccctcgtctaggaatcagccgaggcacacaataacaaattgataatagagtacaattattactctaattaataagcgaataaaatgtcattacagaggtagatagttcctctcaatcaataaagatctaagcagcggaaagaaagataaacggcgcagacgactccattccacaggcagcttgaccagggctacacctaatcctccacac

SEQ ID NO: 31455 - DNA, 514 bp, Oryza sativa
cccctcgagggagttgaatccaatccctacttatggttcaagttttacaatcataaatttatgaatctcgtatcatatgtacaggtaacattagggtgtttttacctttattctgtacagttaaattgggtaacattactgataaattgcattttgttacttgctaatgtgacaatgcctattttttacaatgtaactagtatagatgtttggtgtattaatgggatctaatggtcttatggtgtaaatttgattgtttctgtttgttattagttaatattactcttatatgccgcattgttaccaaagcttattttctttttggttcattaaggaatatgagtttctctagagagcatatgatactagtcagttgaaagctgttagttgtcaccaatgtctctgtgttactttgtgcattctacttagggaatcctatccctaatatatgcaactttttactatatggagttcaactgaccaagcacctaaaaaattgatgtaggccaatcct

SEQ ID NO: 31456 - DNA, 678 bp, Oryza sativa
ctcgacgcggccaggaggaggcggccgtacgccgacggctccaggaggcgggcggctggggctgggcttggcggcgggcggcggcaacaggggaggagggatgatttgggttggattggattggaggggagatcgtgagataagcgtccactactccgcggcaacatcgatctgacctgacgaagcctcaccgtcaccgcaatgttttagcctagctggctggctgggtttaaacagtaaacacagggccaccaatgactgcggcatatttagaatactgctaaatttatacatgaaacttctatatgcgtgtttcttagcgactgaatgataggcgcgagatgtgtctacaatgaaaagccttcggcattaactccaatttctttgttgacagatctaaattttaacttatattgatatccctaagccatcgatgaggctgtgatgcatcgaaaataaaagatgctcatgtatggtgggtctattcgatcattcctgcaagtctatgctaataatcagaaggataaatgtatcttttccattatgatatggatggcaccatctcacacatcacacttatatatacctgcaaatgtatcctttaacgcacgctcaaaggaatggaaactaccaacatgtcctcgattcgtatttggaaacatattacaataagcatgc

SEQ ID NO: 31457 - DNA, 680 bp, Oryza sativa
taacaaaaaagaagttcaaactcagttcaaacttgttagtaaagaagttaatgttcatatctaaacatttaaaaaaatttcatactcattcaaattgggtatatactcaatttgaatcttggagcccatactccatgtagcaccatatatatatatatatatattacatatatatatataggacactcatatggggcaatacacaaattcgcccaattttttcaaaattttcaaattgtgagtatatatctagttatatgtattcgattcatatatatatatatatattggtaaggatcggcagcatgccagcatcaacatatacgaagatgcagaccaattgcacaggaaagctatgggccagttgtaatcatagctagaggcccaataagctccaagccaggcccaataatactgtgcgcggttggaatggatagagcggaggggaggggagtagaggcacagcagcagcagtaagaggtctgctagggtacggtatcccgtccaaacaagatactttatattgatgatgtcagctccgcctcagctttatccactcatgagtccacgacttagcaccgccctacacgctcacgccacagccggtggaagagcacgcgtgaggcgctaggagaaggacacgacactaatagtggattaggtgacaaagttggtccctg

SEQ ID NO: 31458 - DNA, 911 bp, Oryza sativa
aatcatttgaggactttcatggggtatgaattgtgtgctataataaattaaattgttgcatatgtgatgttgtaaattgttgctttgtgatggatctgtgatatgtgatgcatctgtgatgttgggcagttggggaatatgtgatatggagggggggtgactggcacctgtgatgtttctgtttttcagagggcatggctagcaattcctgaggctagccaatatttatcatttattttttttctggaatcaactcatcagtgacggttcggaagaaacatccgtcacaggtaacctcacctgtgacggactcgcaaacgtcggaccgtcacaggtgacccacctgtgacgggcctttactttcgggcccgtcacaggtgggtcaccctgtgacggctactatataccggagatcatcacctctgacgggcctttatttaggtgctcgtcagagatgagacacctgtgacgggtcctaacaagccctagtctagcttagaccaacacctctgacggccttctattaacttgcccgtcagaggtggatgtcaccactgacggccggccacccgtcaaaggtgactggacttaccagtgaccactgatcactgaccaagcccaaaaccgtcaaaggtgagggtttgggcccgtcacaggtgaccttgaccagtgtagtgataggagaacttctggaggtacccgacgcggcggccatcggcgccgatcacggccttcttgccgcctccgacttccacacgctctcgccgccgaccgcgcgctgccgcctcccggaggccttgcgcttgctggtgtagcgcggggagcagaagaagtaccagacgctgccgctcccatgggttcccggcgccggtctgtgctcgccgacgagctccgtcggatcggcggagtag

SEQ ID NO: 31459 - DNA, 714 bp, Oryza sativa
taagataaaaaaaggtccaaaacgatttataatataaaacggagggagcaattacatggttattggaggatgtgatgagaaaaaataagcggcaaaccgcatatatatatatatatatatatatacgcatgcgcttgtgcgtgggctggtgcgtacgctttattcccggttgatattatcaaccgggactaaagatcccagggatctttactcccggttgataatatcaaccgggaataaagcgtacgcaccagcccacgcacaagcgcatgcgtatatatatatatatatatatatatgcggtttgccgcttattttttctcatcacatcctccaataaccatgtaattgctccctccgttttatattataaatcgttttggacctttttttatcttaatcgaacttttttatatttaaataaatctatagaaaaatttagcaacgaccaaatcaatttaaatataatataaaatatattttaataatataattgttttgtgtcgaaaatattatatttttctataaactaagtcaaactttttaagtttgactggaaaaaaaatccatgataccagcgaaaatgacagtactctgtctcggagtcatcatgtgccatatctattgatatatttaagaccatgcatatatggccgattgatccaggtcaggtccaattcggtatgatacgatcgatcatctcttgatgatctg

SEQ ID NO: 31460 - DNA, 691 bp, Oryza sativa
caacatggttaagtatactccaagataggagcaggtttgcttaggtaggcgtgactcggtgagactgtgagagagctcagctgggttagcggttcgctaagctccttcgaacttaggcgtggcgcagaagatcccggtgatgagtaaggatggggctaactatatactgtgccctccccgaacagcaaatcttcgtctgtcgttggtccaagctcacacgtaaataatacccggcggggagggagcaatcagcaatagaaaaagatcagcatagagagagagagagagagagagagagagagagagagagagagagaggagaggagaggctgtcccatgcgtgccccaccacgacagatacctttgccggccggtcccaccaaagcataaaccgagtttataaccagcggcaattagagaaaaatcatcaaacgattcaaacaaacctgatttaaaccttttttttactttaacaccgtaacaaagcaaacacatgcattgatttgacagacgggagctgtacccggcacaagaatcaaagcgtttccaaagcagcgtcaaagcgaccggtacaggtacaaaagcaaatggatttagggagagatatactaccaaagtccagataaaaaaccagtccatggacatggtccacccatggtccgcgcgccccacccccacgcctccactaccg

SEQ ID NO: 31461 - DNA, 1754 bp, Oryza sativa
cgagacgcgcgagatcgtgccgaattgccgatgtcacgagttcacgactcagtgactcacgacgagtgcccatctcacgagatggggatgtggcctagtaaagacccaaacgggcccatgtcacgggagcccattaccttacgaagcaaaggcaaagaagcccactgcaccttcgtttgggtcgggccacgtctgacttcagcgttggtggggcactcctcccattccattttctatacgaacgtgtgaataagttggccagttctttttttaagagaagttggccagatgtgatattcattcgaaaaaacaatgaagacggcatcaacatgtacatcgtcatcacgatatctagatggatgaggcagacggcacgttgaatgtagtagcactaaagtagaattatgtcatgctttctattgcggagtgcgccgcctgtttcgatcattgccgctgtttctcccacatatagatgattctcgccatctgctgcaaaagaggaataagcaaccgccatctattttcttggctagaggaaaggagagaagtcgagtaacgaactaacgactccaaacaaactcgctcaagctgtatactacaagttagtagcaatagcaatccttcttgtattgtggtacattggttgtatagataggatcataggaacagtaacaacttgcgttgcgtgccaccgccaaccccacggcacgcaatgcgattctttgcctggagacggtagctactccacttgttgcctatcttcacgttatgcgtgcctgcccagtgcggcagtgcccacgtacattcgcgaccttaaattaacaccaactggtcctgctgcgcggcggcggtggctaccggggaggcaacgccaaattgcaaatccccttccacactggcccaggcccgcttgtttatcgtcttctatcatcaggcctctgaattctgtcacacctttttttttctcatcggaacactactggttgctgaagctcctttagaagtgtactcaattttcttccttaatcatccatccgacgtacattttgtattttgtgctgtcctatcttctgttatacaattagtagtagcatcttcgagagataagctcgatcgtgtatatactagctggagtatactctgtgtgttctcatcacctcatgacttcgcagtccccacaccattgattcgataaatgttccagctagcactgtctcccccgtacaataatgtttgcaaattgtaccaacagtgagtgatgccacggccaagctccaactagtcgcaacacaagaacaaagtgaacgacgaaatactactctctccgtctcataatataagtgattttgagtttttgcttataacgtttgacctttcgtcttattcaaaaaattttaaaattattatttattttatttgtgacttactttattatctacagtactttaagcacaactttttgttttttatattagcaaaaaaaattgaataagacgagtgatcaaacgttgcaaacaaaatcttaaaatcccttatattgtgagagggagggagtatatgcagaagaggcgtgtcagagagaagattactggcgggagaaagttaaaaagtactgtcaaaacaaaacctgcaaacaccgcaccggtgcgaaaacgtacataagtacatactggtgcccgcagcctgcgtagacgtactggagtacttgtattggattgatggatactccaacctactgtgccgtagtactagat

SEQ ID NO: 31462 - DNA, 536 bp, Oryza sativa
acgggggatgtatgattagaacttcggggcatatatatcaactactatatgggcgtgaatgaatatcggatagtgacatgatgcataaatttatatgggcgaccgacccgagaccaaaaaaatttgcatattaccatattatataaactgggttttgctgagacgccctgtcaaactacgattacgttaacccgccgagtaatcaatagggtaccggggcctaatgcccgactttcatagcgtggcccatatggcaacgccctgcgctgacgtactgacagctgccagggccccgaactcttgcaaactgacgccgtctcacacacaaacgtggccacacccccacacgccagtacgccacccacgccacttcactgcccttttggcccgaggccgagggcgtggatcgacgcctacgtgccgtctgccgccgccaccgccgtctgggaggatacggcacagtgcatactggattattaccgggcactttggttgagtggtgcaacttaaagcaggtccaatagcagattataaaa

SEQ ID NO: 31463 - DNA, 639 bp, Oryza sativa
ggagggggaagggaggctatctgctgctgcggtggccacaagtttccgccgacttggcgtgcgcgctcctgcagtagacgacaaacgttggcttgtgttttgtggggtcaagttggatgtgcgtcaatgttggatggctatcggcacgcaccgtacgtggtgcgtctttgagcacagtcgtaatgtggaatttttgtccattttctatgttttattttatgagagcctggtatttgctctaggaaaatgcttgtttcttgttactcatatttttagcttctattttttgagttgtgaaaaggttgatttctcaagtataaaaatttggagtagataatactagtgcctatgtattatggaggggaacataaaatacagggcatgtttactttgacgccattttcaaccttactaaattttggcattgccaaaattttagcatagttttcaaaattttggcaacttaccaaaattttggcatgatttcttatatagttacaaaaatttagcggcaaactaaatgtagccacttttttttgacaactttaccaaaatttggtaaggttgaaaatggcattaaagtgaacaggcccacaatagactcgtataaattctgacaatcaacatccaccgcaaatt

SEQ ID NO: 31464 - DNA, 733 bp, Oryza sativa
tttcagtcgccatatccacttcattgtcctgcatgttttgtgatggttatacttatatcttgataattcttgctgatatagggtttttttgttgcaaagtttattttacctttgtagtgaaatggctattttttgattgatacagctcttctattcttgctgttgtattctgccaaacaataagttcttgttaatcaatagtgcaaaatagcttaagtctaaacaatttgaagtcaatattttagctaaaatcacctcagcaaaaggtgtgatgtatttgttgttgtaaatctgatcaaattcttcatagctccagtgtgtagttgatatgtgttgctcatatgtcatatcctgctgctcttctagttctggagaaaatctactggttgttaagatcattgaattctgcaatatcaaaaaacagtagttagtactgatttaaatgactaattagggaattgttacataagtattcataattttttattcttacatcaaatgctggtgtccgaagtagacttgtaaagctttcttgtcctccctgcatattcatagtttacatatcaattcatttattattttctcttttttttgtcaggtatataatgtaagttgatatgcttactgtttgttgctgtatggtgacagttggactatgaattatttggtgtatgaggttagtgtagctcaactgtccttcctgcacagttatatgtttattagtttataactg

SEQ ID NO: 31465 - DNA, 517 bp, Oryza sativa
ctgcttgagggccgggagaccgagcgccgcgcgcagggtgttgatcttgccgccccacaccggcccgtcgccgagcggcacatcggaagagtcacgcggcaggctgacgagatcgatacggctgccatcagcgtggatgttggccacgatcagcatgtcggtgttcatcccggactcgccgagggcgacccgattcgcgaggaaatcgcgccccacgaacaggatggtgacattgaggtcgtccaccgtgaccgtcggcgtcgggctcggcgtggcggtgggaccgggcgacggggtcggccggcgcgtcggcctgggtgttggccgcggcgtcggtcgcggtgacggcgaggccgtggcgacagccaccggcgtcggctcagggtcaccgagcagcgcctgcgccccgagccagcccccgccggccacgagtgccacaaggagcgccgccgctccgctgagctgcggccatgatcggtccgcgacgaaggagcggatgcgttcggagatccccacg

SEQ ID NO: 31466 - DNA, 600 bp, Oryza sativa
tcaagtatacgcatactccgtctgtagtagtagtaaaaaaacacgagactaaaaaacactagtaataccatgaaaagtagagattggagagctttggaagctaatagttgtacaaaggagtggttcacgatgtcggcatgcgattttgcgtacgcagacagacaggcgcacgccctcgtcgacgcccaacctccccaagtttccgggggtttccacgtgagccgtccctccatcactggccgttgctacgcgcacatatcgtggaaaaaaaaaactgccaaagccacacaccctggcccggtacgctgcacagcacgactgcacccaacaaaatatcaggaggattactactgctgctcgtttccctgtctacagtacaacctcgtgcgcttcatcaattaattaactcgttaattttcactatctgaagggaaaaaaaaagcggttacctacaacgttgtgtgattggtgcgtttaccggttgcaagttgcctcgccgcacgggctcccgtcacgactcggacctggcccgatacaccgcacgccaggacagaggaggcgacgcgacctggtccgcacataccggctgcgcgcgcgcgc

SEQ ID NO: 31467 - DNA, 503 bp, Oryza sativa
caaattaatatccgtgcaattatgtgttgatacaatcatggtgggcagacgaagaaaaactcgttgtgatggctactagcacgtacgatagcttcactccatcgatttcagccaacgggaaagttgatcgatagcagaaaaaaaaattaagtcacaaaattgttactatatactagtatgagattatacagtttcatcctataacttttgtttcgctcgggttctaaacttaaggcctcactgcagctgaaaacatcgtaaaagtcgaagaagtgcgatgagatgcagcagatccattcatcggttcatcagtcatcatcatgtcacgaactctcgacgaaggccactgcgatagagctccacgccggcgttgtcctccctctttgtttttctcttagaaaaatgtttgacggttgacgccggcaaacttttctccattgatgcgtacatgctgattttgtaactgctgctatattccgaaatataattattttagttaaaca

SEQ ID NO: 31468 - DNA, 629 bp, Oryza sativa
ccctccgtatcattaaaaaaacgaatctagaattcgatgtgacacattttagtacaattaatctggagaggatagagaatatctatatccatatttattgtactagaatatatcatatctaatcattgtttttttatgaaatggagggagtaagtagcgcgatctaccacgtagcgtgtatcatacacatacaagtacatagcatgcacgtacgtaggcaaacatatatatagctcatttggacatttaaagcatatgaatgataaaacacaaaaacaaaaaaaaaactagtattttcaatttgataatatctatattgcaaaacatatggaaaaaatacacgaatgaccaattggatacaccataaaaaacacaaaaagaaagtgaggataaatagagactcaaagtaatttgccgttggtttctgtttgtctaaatgtgtgttaggaaacatatttgttggggtgtgggtgagcgtgatactatgtttatagtagtgtgtgtgcatctgtcgtataattgtgggaagaaaatcctaagaatttcatagcggcctataaggtccgtaactatgtttcaaatgatcaaagaggaacattttccatcgtattaaaaacctataaagttat

SEQ ID NO: 31469 - DNA, 638 bp, Oryza sativa
taaacgtgactacacagtagtagtagctgttttgtctaaaccagctatcactccatctaagagaagatactatccacttatatactttaaatgcaattttctcttaaactactcatccgatctataatccgattgcaccgttgtgttcgtaacaattaaatctttataacaagatcttacatgattatattttgatgaaaaattataaattactttagatttcactaaattacttcttagacatataaaagtaaattcaataaagtctaaaagtaatttacatatattatagaagtaacttataataaaaagatagtaactttaatgaatgcctctttttattggacgtgaagtcatatttttatccctacaacgaatttacttatagtgtcatgacaaacttacttccgttttgttttaagttacttttataatatatgtacattacttttagactttattgaatttacttttatactccctccgtttttaatagatgatgtcgttgactttttctcacatgtttgaccattcgtcttatttaaaaaatttacataattataatttattttgttatgaggtgttttatcactcatagtactttaagtgtgagttatatcttatacatttgcataaaa

SEQ ID NO: 31470 - DNA, 556 bp, Oryza sativa
atctagcagctatcttcttagctataaatttccttcctgatcttgtgcaaatattcaaaccacaacctagagctcatctccggttttagtcaccaaacaattgaatacaaattaattagtagtaaattaaaaatggccggctagctctttcaaagagtaattaacttgcttgttggtctaaacttccaaggagagatatagaatgaattctctctgcactagacaggactcgccatgcgtcacctacagcttgtctttttattaaaagacctatacctacgtgtacttgggccaccaattaactaaacccacaagcaacacaagatcccaagatgatgcaagcctagattaccagtagttccatctcatgcaattcgtagccaattagccagtaaatcttcgagaaaagatgatgccatctctcaattagcttgtttaattatgattggtttatttgatttcgtcaagactgctaactaaattaagccaattaaagagatgtagagggggtcaatatatgtgcagttttgtcagctatagatttgtcgagtagact

SEQ ID NO: 31471 - DNA, 624 bp, Oryza sativa
agcctgggttctgccattgtgtattttcgccttttcagtttagattcaatacatttcattatgtgctatggagagtttgcttggtctgaagttccgatgttatgaattaacagtcaaaggcttgccttcgctttcttttaatgcaaatctgctttgatatctgtaatcaagaaatacattttagtaaaaaacctttcttgtgcaaaggcttcaaatgttactatcttatactgaatgcaaaatagagtagacatgttccaacttgcaaccacctgcagaacaaaatctgtcaacttccaatagcatgatattcataaatatacaacaatgatttttccaaagtaatattatctcactttcatatctacaacagagtcttgtaaatccgcttatgatataatatgactctctcctcaactactaatatgcacatctgtctgaattacttgatgatttgctgatgcaatatttcctttgtgaaattctgcgaatatatcgatctcataaatatactgggttacttcctttgcaactacaatgaaaacattggtaatttgtgtgacaggtgacactgaccttcaacttggccgcaaatttggagtcactattcacttggagcacaaa

SEQ ID NO: 31472 - DNA, 613 bp, Oryza sativa
tttctaacatcacaaggattgtcatttgtcatagcctcataggtactcctacaatccaacatcacaaggactgtcggatgagcaatctgagattttctacagttctgaagaacgtactatgaatttctacagaacgatctgagattaacatcagcagggtatgcaaaaaatggtatgtactcatattaaccagtttgaacaagtccgctgtaacacatgttaagcgtcaatattgttcctccaatgcaaggtaatcaatttagcacgtagagataaattacacagccgtacgagagcaaacagcttcgtttgggtggaaactagaacgcctaaaaaggtagaaaccagaaaggcatcccaagttcccaacaacttatacagtaaagttggggctaaaagatcaaatcagttcttgattaaattaaatgtgattttacataagacatactgaacaagtcattgtcactactgctttaaagtccacgcctattcagaagggataatcctgataacatagtaaagacgatcaatgagtagaaagcttgtacacttactagtcatttctgactagttaggagttggtcatttagtctatttcatatataaaaagagc

SEQ ID NO: 31473 - DNA, 540 bp, Oryza sativa
acacatatcagatcccacaggaaaatgggaaggactctgcccgagacgcgtcaaaacattttaaattaataatgcttttaacgaaacggccggagccccggaacgtaggttgcgattatagctttgttcagagtattcttgtataagaattaatccaaatcagcgaattagtactaattgacttcatcattggttcttatccctgattatatgttctgtacatatcttatgctagctatatgtggtgatgcacatttatttgcatgcatgcatgcatggccggtatgaaacggctagggttgaaaaggttattatatatatatgtacatttagattaatttaatttcgtccaaatcagtggatcaaaggggttaatttggaattatactcctagctatagctagctaatagtataatctaccgataaagtaactgcctgtacaaaccttttttcctgcgtactgttagctagctgctcgatcggacaaattaatattttgacccataatgaagtgcgtacttacgtatgaattactatat

SEQ ID NO: 31474 - DNA, 912 bp, Oryza sativa
ttacatttgatgcagacactgtatatttgtgcggatttaaccgaacatttctcggacggcgtcgaaagcggtgtgcactgcaagattatttggcatgcacacatatgataaatgaaaaactactgtactactccgtttccagctggataagaaaaaagaagacttgaaggaagaaacatctctccaaacatttttttaagaaattatgagcatgttggaatttagcacgagagcttacggttgaaaccacacacattaccactgcactatcaagtgtatctcatccaactagctagatgattatacatagtagtatatggtcttccataacaagttaggtaaaaaatactaggccgacatcaaaatttgtctgcatagatgaaggaaacaacctccaattctaagtgtgccagggaataatactccctatatatagatgtattgcattgtgcttcgaaattaaaaaaacatattaattgttgaataaaaaacctatgcgagtaaaaacataagtgtgtttaaacgtgatcgtcaactccctagacgacaccatctcactagttcttcggtgttgtgccaacgatattgatctgtggtcccaccggtgtagtagtgtcatatgcaagcaacaactccacatttgtgcgctaaacctctcgctgtaattagcttctaaaatgccctctctctctctctctctctctctctctctctctctctctcctgtcccatgtaatctcctcttgttaatgtttttaccatatcaataaatgttcaggccggtgacaacacccgccgtagtttttatcaaaaaaaaatatgcaacggaggagacgtacatactacaacatattgtggtgtgccacatcagtttgagagaaaagaagagaacacgcaaattatatatacaaa

SEQ ID NO: 31475 - DNA, 1229 bp, Oryza sativa
cgcacgagggggaaaatgacctagctaattaaccggccggggtggatgctcgattagtggactagagatagacgctcgtttcatagtcctatatatggcgacatgtcgtgtatcacacatagcagctaggcggtcagttgcataattagctagtgttaattaagttgccatgtgcttaaatgtctgatattatatgtgtgtacatataaaatcaatcgagagaagcatacacatgcgatttttagatggtggaaaagaaatatttaattctatacgtaaaagaatgactgcaccaaagtactttgcatgacagaaccactaaaggtatgtacaattctcttagtgttgctaattaggaatatttgtcgatacgaaagagagagagaaagaggagagacaaaaacatcattgctttggtaacaacggctcaacaatgattcttagcctctataatatgaaacatggttgcatgagagtgaagaaatgaaaagaataattatttaaatacttttttagttaatgcaatggttagagtatttgttgtctcaactgttgtaaacatatactacctccatcctaaaatataacaacttttagttatgaatctggacacatagttgtccagattcatagctagaaatgcttatattttaggacggagtgagcaggatctaaataatattatattgccaaagagattatacttatctctaccattgaacgtgccctaataatatcattttcgcatatattgaatctggtgtattgacatattttagtatgttaaagattatacacatatgatctacaatggcgtctactttagaacatgggatacatagtatatatatagcaaaagtaaaaggtactttattattcacttttatatttttgttatattaagtattgctaagagcaagtttaatagtatagtagctctaaaaattgacatatcatctacagctaattatttaatagactacacatacaatagttttatataaatatatactaaaccattaatacttgagccaccttttgtacacacatcatcctgaagttcgtgctatatcctgaagttcgtgctatagttggctataaatctgtaacatgttttttctctctcctccatatgtgctaatagctactagcttatatatagccttctattgtacttgctctaatacgcttatggattgtttgactcctaatacgattccccctccccc

SEQ ID NO: 31476 - DNA, 666 bp, Oryza sativa
aatggagatccaaacatggtcatggaatcctatttatttttgaacttttagcagtttaaatacttgaagttagtatagcatattacaaaagtatattagttccacatcaaatatttagaagttttcatggtcaaaatgtgaataacgcttgtggcaacttaaccctgaaaaatatttgaaaaatactttcttcgttctaacaagaattaacttattatggctatatgcaaattcatagccataagttattactcttatcatctactatattattaggataaccttaaaattatgcaccacattcgctatagagcctaaaaatttccacattaatcattaaaaaaagagtccaggtagaaatataatttaaaaataactgaaattcagaattgaaaataagcaataatatttgaagaagagcccagatagaacacaatacaagattaaataaaattgagaatacaaaaataaataaattctaaattagaaaaggaaatagagagttcaagacttcgagtagtaatataattttgaaattaaataataaggaatattgaaatgaccatccattagaacacaacacgagtttaactaaattcaaaataaaaataaaataaattctgaaattagaaaaagagagtttaagtatgaataaaatttataaat

SEQ ID NO: 31477 - DNA, 542 bp, Oryza sativa
atccaagctatagtgtttggacccatctacttaaacgtggaacctacagcacttagcatgcatgtgctacacttaaacatttcagctctagcaatgtgcatggtttttataactaactcagtgcctagctaatctagagttaattataatggcatcagcaactagctagggtctttggatcagattgcattgcagaattaatccagagttaatttaatttgccagggtggagggcactgtcaaagtgcttggccaactgaaagctactaagtaggccaaaattcacacttgcagacacacatcatgcataaacattatcttaattactaggagtgaaacctgaaatgcatatgctggagctgaacaaaaaggtagtgtttttatctgaagacttatcaagtactctcccagccaatcaaaactcaccagttgagcacaaagcctttgtggaaaagatgagcaagcatagattagcttagctataccagaaaaaacaggctaagtctcaagtgaaaggcaaagtacagataccaataaagtgg

SEQ ID NO: 31478 - DNA, 512 bp, Oryza sativa
aggcccccctttgccggttcgcccgggggcgctgagtgaggttcttcgccctcgatctgaggaaagtcagcgggagaggaagtgcacaagacacgggcgacgtagacaggttcgggccgctgagaagcgtaacaccctactcctgtgttctggtggatctgtgcttgaaggaatacagagaaccggagagcgagagtgagttcaggctctcgcccctcttccccagagtcccaaccccctttctcctaggcttgggcctcctttttatctggtcaggggtcaccacatgggcctctagttgcctaagaagggaaacatgctttttacaatgagggctagtctacagccggaaatgacctctgacaagcagagcacacgcctcctgccccgctcgcccgctttcccggtggacgcccatttcaaccttcatttaatggccagcgacttccttgccatatttgcgctgaagcctggaatggatctgaccgggactgacataccaactccaggag

SEQ ID NO: 31479 - DNA, 573 bp, Oryza sativa
aataagtcctttgtatttatactagtacacagaaatagatactaccttcgtctaaaaatgttactgcctaatataaaatgagacatattaggtatgaatttggataagggttatccaaatctgtagtactatctctatattttaatgtatgacgcaattgattttttatctaacgtttgaccatttgtcttattcaaaaaatttatgtaattatcatttatttttattgtgacttgattcatcatcaaatgttctttaagcatgacataaacattttcatatttgcacagaaaatttgaataaaacgaatggtcaaacgttggtaaaaagtcaatggcgtcatacattaaaatacggatggagtactatacttggtgtactaacattttggtacaaagatagtatttttttttatggatgtaactgaagagaacacatgacatgtagcctaaaaatatacaacaccacaaggatgtttctgtaaaaagtaacacaacagagaagaaatgggtaaaaatggaaaaacgaaagtcgtccccaccaagctagcgtggccatcaaccaacccctttt

SEQ ID NO: 31480 - DNA, 532 bp, Oryza sativa
agggcgaattcgagctcggtacccagagatacctctagtgttgcattgcattggcgcccccctggccctgcatactcctgccatttcatgcagcattagctacacagatatatacactgctactgccactgcatgcacctctctcgctggctgcctcttgctgcagctagctgcatgccattgccatgcccttttaatttctttctttctctctttctcatcgatccatcgatcacctgtatgaatgccgtgcataatgcatcgatctgatgatgtgtgggggtgtcactggcatctgcatctgcattgccaaagtttttatatatatattcagagaactgatagatcgatctcctgggccccgtatacgcgcgtctccctcaccatgatccaagtatccaaccctctcgatctatcgctttatgcatcgtgtgtgtatatgtatgtatgatcgatcttgatcggaccacaaactaaactatagcatgcatagcagctgatagctgcagtcatctgcagcagggcaacgatg

SEQ ID NO: 31481 - DNA, 846 bp, Oryza sativa
cctttcattgaatagtgcttaggcacgtagctttcaggcgacagtttatttttatttttattttttgaaaactttcaggtgacagtttagggaatgaattaaacttcatatggttcaaaaatcaaaatgcagcaacaggacctaagaatccaaacatgcgagtgatgttgaattctgtacttgtaagaaactaagaatgatgcttcaacaggttgtcacacgcatacctcatgggtcagcatttgcatatgcttgctcttttttttttttaaaaaaaaactgggtgttttcatcattatgcgaatgggtgtcaaacccatgacttcacgcctgtgcacccctggagtccatctggaactcatcgaaggccctacctttccaaatgatattgtatgatacacgtggaagtgtttgctagcatcttccgtatacaaaaaaaaagcagcagttattaggagtatatggatggtaaatttggggagtaataaatttgaactgcgtgtccgagaaaatctagtgggatgataatttatagattaatgaatcatatatgtagtatgtagttcagtaatgactgtacaatggaaaattgatgagatcataattcacattccatatcttgtggcatatgattaagcaatccttcagagattttttggattaatgatcattaatattggaaaaacactttttttatgtataaattatgttttagaaagtttgtgtcaacatgaaagcttgtcgtgcagttttaaactcctgcatttcatgtctgttataactttttttttgtggtattcaaaatattgacttttgtcattattgttcctgttaatcaaggccttt

SEQ ID NO: 31482 - DNA, 523 bp, Oryza sativa
gaccgagtacacagagacggtccacgggtcgacggaagcggatcccgtgtgtcaaccgaggcgagtggccgacaaacggactccactagacaccacacgggttgcacacgaggaaacaacgcggttaccaagcgggcacactaacacggacactacacggacaagcgaacgactaccgataccgatacacgggtaccggggccgacaaccgcacaacgagcacgggcgacaccgaaaggacgaggacggggcagcgagggagagggacccttaccactacgcaacgaggcgagggaacgacaatgacgaacgggcgcggcggaggcggtcgggaacgacggagacgaacggcgaggggacggcttcggcggcgatccttggacgaaggcgagacgcggccggcacaaggcttgacgacgcggagccgaggacgaagacgacgacggggctgcagcggcacacttgacgaacgcggacgacggacgaaaacggcttgacggagggacgaacgccacgacgaccg

SEQ ID NO: 31483 - DNA, 545 bp, Oryza sativa
tttgcgtacggaaaaggtatgaacaatatgttttcttttaaggctataaaaaacagagtagaatatagatcccagtgtaatactgccaatatgaaatggcttgtatagtcaatcgctattagcggctaagtgggggtctatatatgattccaccaggcgacagaataacatttattgctcttccaagaaactgattaataaaatacaaaattggaagaagcgcaagtgctaagaaatccaacgtcattcaacggattaaagccgcaggagcaacttcctcgagcacctaaatcaacttacaattcatagttggatcaagcaaatcaacaagcacaaacaaattaataacggatggtaagcaatcaacaacttcaaagctcaaatcaccgacaaccagagtagttcgaaataataaccctttagcttaacttgtagatttgtagctgtatttctctagcttgatttcaacaagggcccacttgcacagttgcatgctctaaacagtagggattatctgttcaatttacttcatatacgtacacaaa

SEQ ID NO: 31484 - DNA, 592 bp, Oryza sativa
tgaatgattaagatttaagaggaggagagggcccaaatgaaatgccatgttaggtcaacaccgtaggttggcaatcgtccatgatctctggtggagctttgtctcacgattgcacagacgcaagtgctctagtccttgctcgagcacactaataatcctatcttaattctgaggtacagatcagattagcattacaaaacaatccacaattgatttagttcatataattggctgatgcaaaagaaaaaaaaacattcagacaacgaaaagaaggtaggttcatgtcaagattaagttacaatttaactgtaaacaatctccatgttgcagaattggaaacagaacaagtggagcagcgttatggttttctgcttttgtgctctgaatatgcttcgtatagtggttccgtgaaattcagaactactgttattcgccacttacgcactcaaattatcttgcaacttgtttacggccggataccgcgggcagtaactgaagatatgatacattaagtgatccaattggttaacgcaggcctgaatcgattataatgtttgattagatataaaacaccggctatgatggctaagct

SEQ ID NO: 31485 - DNA, 1302 bp, Oryza sativa
cagacatacgtgtcaacgacatgcagctgatgagcttagcaaattaaagatgacgtatgcatctgtacaagcatgcatgcaacacgtcaccttttttatcagctggaaatcgactaaaaatattaagagcactaattagtccaagcatattgctaatatattgatcttgcaagataagcatagttaagtgaaatgagttaggagatggctactccgttaatgggcaatggtctcggctctcaaacagaagcaagaaaatttctttttatggtaatgtccggcgaatccctgcatagagattctggtgggccccacacacctacgcacactccgaactcggttcgtctcggccacataagctataaaaaaaccggcctccacgtttcgggctctgattggacgaatcatccacccagtgagagctcgacacgtgtcctgcactctgtgccgtccgattggccgcctcagcgacagcagccacgaccatgaaacgttggcaaacgcagggaaagccacacatggcagccaataggatcaggctgtgctgctttactccaagggttttttttgttttgtttagtgcatgtgacaggggtttaattggtactattattttgttaattttgtaggcatcccctaaactaattaagattagctagtcaacatgtgcacagtaaagacactcagggaatggatgatgatagatcatcctaagatccgtatcacttatattaatcacaggttgcccacttttgggctttattttaactgatcatccaccagctgtcatgcgtggtcttattggtcccctcttccttcttccatcccttttatcccgcccctgaagaccgtattataagacaaaactgtcggtgatatattgcactctacgcatatattaattatcggtagttccgtgcgcacaagcttttcctaccatatatgctaggttcaccggttagagagtgctccaaaactagagtccatagattaaacaccattaatttgtgtgcctagcgtaataattaatttgttgcgacgacggactcttaccaaaaactcgcatcgcattcagatcgatacgagtggattatgctagtttaaactatacagggttaaccctattcgaagctaataaaatatgcaggttaattgtataatgccctacacaggtcattatgcagtcacttcacttagcaaagcatcatcatatataaactaatcgccatcagctgctataattgtgcgggatgcatgtacaaagcttttgataggatgtctccagacaagcaactagcttag

SEQ ID NO: 31486 - DNA, 1244 bp, Oryza sativa
tgcatgagttcgcgcgcgtggtcgacgacgacgacgacgatccggccacactactgcgcgagagcgagctagctactgtttactatggtaaaaaagaattaattacctactagctgcctacgtccgtagttgatccgtactaagatccctctccctggctaggtaattagcactagtagtacttaagtaaattaagtatttttagcttctgggacttggagagctgcatgtaagctgcctgtaactcctgttcttattgatatgcatgatttcagagagatcaatgaccatggacgccatgtaaatttttgtccccaccctatagcttgttccttgcaattttcagacgaaattaccaccgattctttggttgatctgtatctaattaaattggagtgtccgtgttttgttttctaattaaggaattataaggagacaagacaattaagcaagcaatctaattgggcgtgcatatatacacattagcaatgtaattaacccttttgtgtttgagtgctccctgagtcagttttcctctttcttttctgatgccaccaccttagactttgccccttgatatgttttactccattaattaatcatcattttttcaacatgcatggcttgtgtacaacaaattaagaagactaatcaagcactaagatctttttctagagttaaccccggcccccaaaatctgttacttttgcacgtaatcagttactgaaagctacccataacctaaattaatattacaacttacagtgagcagccagctagctagtgcaactctagaatttatatatttttgcagcgtactacacatgggtgaattagctctactaggttaacaattatcatagcaagttgagataattagatgcatgcatatgggtcattgcaattggaaggattatgcgtgcagcaccaagctagctagagataaatgttgaagagcgcaccagaggtgatgtaacaatcttgttccgtgtgcaacaacctagctaccatcaaaaaaataatatttttttatataaaaaatgtccatcacttgtgcatgcccaagttgtgtttcagcgatagattcatcatactgcactgttcatgaatactattcagttcagtcatacgtgtcaacgacatgcagctgatgagcttagcaaattaaagatgacgtatgcatctgtacaagcatgcatgcaacacgtcaccttttttatcagctggaaagtggctaaaaatat

SEQ ID NO: 31487 - DNA, 598 bp, Oryza sativa
taaatggttgcttgattaaatttatggttatgcattgcattgtctggcattggaagtgtgtgaaagctaaaggaaataagcatgcaccccttcaaaaataagatgcaatagctgttgggttcttcattcatattcggtgaagagatgcaaatcaaattttaaaaaaatcatcgatgttgagttactattatacattggtccaaaatacccgtgttttagtaacaatttgtaagctgctacttcctccttttaacatttctagatcatcacttaaaatatcttgtgaaagaaccatctagaggtgaatgtctcatgaagtggaaattctatcttatgatgatccaaatgtgttcgtttcttgctggcttaaaaacaaagtgtaacattaacttaatcagttctttttactagtacatcaaagtgaaaatggaaagaactagtccaagtgcagtactacctatgttccagaaaagctagagataacttgtggtgtgatattaccaataaggcaataaccaccaggtgatttgtctaatacatcacaaagatacgatatttgtcaaaagcttagttttgaccctgggttaaaagaccaaaa

SEQ ID NO: 31488 - DNA, 848 bp, Oryza sativa
tttgttgctcaatgagagcagtacaatggcagactattagccagttataaacatattttaatgagataaaagatgagagagaaaagcagcgggctataaatctgtagccagctgcaatacggactctaagacgcaatatgtgtatgacaggtgggatcatatactaatagtatagtaagtaattattgtatgaattggctatagattaattggagttagtagtaggctatactattaaacttgctctcaaaactgcaattgacattccatatgaccgcacatacacgtacaaaaagagaataaaaatatacatcagctagaagaacaaaataatttataaatctaaagtattcttgatggtatagcagtgaagttgtggctacatgaccctatccagcaaagttcaaatcggcgtacaattacacaagtgtattttcaatataaacgaatttagtgaggctagtaatttgccgctggttctcttttcttcctcttaggcatatgttagaggcacacttgttggtgcctactcctttcattccctaaaaaaccaatctagaattggatgtgacacatcttaatactataaatctggatatacatatattcagattcgtcgtactacattcggtcttagattcgttttatatgggaaagagggggtacatgtgtagtgtagtgatgtgtatatgcccgtgcatttttcgaaaaaataatgcataaatccaaccatttgttgagtggaagagtcgctgcttcttccatgttctaaccgacgccgtcgtcacacgcagcacatgtccactgatacgtacgcttcatcgatcgcccacggctaagcagccacc

SEQ ID NO: 31489 - DNA, 544 bp, Oryza sativa
actatagggcgaattcgagctcggtacccattgcgacctattgctcccagacttgcgagatatttcaccacttctagaatggaacaatgaagagaaaacctccaaatttttcattctttcaggcagcgtgttctattagcacgaataaacaagaaattgacccaattgatggccctaacaaagtcaacagctggattataccactaagattcgttctagttctggaccacataaacgagagagagagagaagtccaagccgcagaaccattacagtgtgcgtacacatctggccaagaaattcttgtgaaaacaaccaagcagcataggagccaccaaagcctgaaacgtcacattcgaacaggaaaaaaacacatccatgttcttgacaacccaaatgctaacctccatgaaacccaaatagatcccctgtaaactgtaaaaaaaaatccgctaaaaaatctgcaatttaacactgactgacgtgtacccagcgagtagaataaactgcatgctccaatccaacccagtcaagaagaactcct

SEQ ID NO: 31490 - DNA, 687 bp, Oryza sativa
gttaccaaaattcatgaaaaattaaaataaattaaaaatttcagctgaaataatatcgtattggaggggtccgaaatgacccgaatttccgaaattttgatcattccgaaatttccaaaataatttaggaaatttcagtccgaaatgtgaaaccctgcctccagcttctcgccgcttgcagccgccctccatcgccaacgggggagagggacgacgcaccacggggccgagccatcctcttcaacacttcaaaccatgaccgggtagaacagccgcagaaactcacaccatggcttaagctctgataaagagagcagatctgaagaaggaattggaggagagtgaaagggatttggacatgatggtcagtgtaagtggtgcacattttctcatgatctttttctcttgatttactctatagttctggcttatggatgatatttataccttatttcatctaccgatcagtcttgcatcatagtaaattatatagcgagtgaattgacagcctgctaatttgttccatgctgcaccctgcattttttttctcagctcatccattgtctgattgtttacatggaaggcttactctgttttggttgaaaaagcttagttgggagaatctgtcttttctttgtatgatataaaagtaacatactctttggacgtgctttttctgcatttttt

SEQ ID NO: 31491 - DNA, 657 bp, Oryza sativa
cacttgatttgggagaaataaaaaagaaaaaaaaaagaaaaaggggatcatctcactgccgcaaccctctctttaatcccggttggtgttactaaccaggactaaagatctatttttagtcccgggtatttgaaccgggactaaagatagcgatctttagtcccggattactacagagggttgcgaaccgtgactaaaaagcatttctccaccagtggcatcaccctttgcactcctaactgtgctcttcgtcttatcctactccgggcattccactgccactaccgcattcgctactgaggaggccaaggatgtcggatctgccgatcccagccttaccactgatggattcggctggctgtagtaagggcgcatgcggttcatagctcggatggcaacacgctcattgcagctcagaagctgacgacactcatctccaagtcgccttcccttcgtccaatcctggcttcgccccattgtcgttgccccggtgtcgcttctgtctcctccttcgctctcctgtgttctcatcgtctggagatgaggggcaagagatttggtgggtgggcaatggcaagggaaagagcggcagcctccccccccccccccttcggacagaagatgacgacgaccatgctagaggaggtggatctggtg

SEQ ID NO: 31492 - DNA, 1162 bp, Oryza sativa
gggggggggggtgttgagaatgacatgtggggcccatgtgggccacatcattttaattattttttttaactgacatgtgggatcatagttgtattattttccaaatcaaattaccacgtcaatgccacatcagatgaagaccgagtatatttagccacgtcagctaaaaccgccgtccaaactgccatgggacttatattgcactgattttgacagttgagggacgaaaatcggactcgttcataagttaagggacctcagatgaactttttccattcagtcttggggagtctaggggattatcggagtatatgggcctgtgaggtcacgtgctctggtgggcttttttctttttcaaaatgggcctgcgtaaggtttattgatttcatttcggccttttactaatttatgcccaacccaaaactttgtatgggtttcttttagatataagttcagttcaggtcccttagtttgtctatgaattcgattttcatctttgaacccaaaaaatagatatgatgggcccctcaactattaaaaccggtgcaacattagtctgaaggcactatagatggttgttttgtcctatgtcgcacttggactatggtcagcctacatggagcgccacataagcggtcaactctggtcaaacgcactttagaccaactatggttcactaaaacaagatcatcgatcttaatacgtaattgataagtctacggacctatatgatacatatgctcaagtttaagtatcgaccatgtattttactcttaaaattatttccataatcatgcaccagttaggaaaagcttcaacaagcaagcaagccgaacgtatatgcgccgtattttggacaggggagtcaaatcaaccacatcaccatgcatatttctacatatacactggtcattttttttgggtacatcggaaatcattttcaccggatttagcccagacaaccagtatcccaatgagtgattaattacttgtattatactcattgttgccttgttggctctttgaggtcagaaagggacaattgaaaggcctcgattgaacaaacgttaggacatgatgcgcttctatataaattcaaggaacaaaaaagcaagctaattaaggttttgtgttctgcataattaatccattaagtatagtg

SEQ ID NO: 31493 - DNA, 654 bp, Oryza sativa
aaatgatttatgcaaacaatattttggagcaaaagttagatagtagtatatgtctgccgacgacctcaacccaaaatattgttttgaggaactcttggattacagaacaaaatactgattccaaaatgatttatgcaaacaatattttggagcaaaaattttgtttctccaagaattcagagaaacaatcatacttttttaacacaaccatcacattggagatttcaaaacagcagagatgataggatctactctttccatgtcttcatccaaacttaattaagcttataattgtccttttatcaatttgcgaagaaagaatgaatgttgataagcagtcaatgcaaatgtcaattatatgaataatatctaaagtttagcatgccaactaaagcttgtaatatgccagtatgtttaaatgagagattgaaaatgtaggggagtatagtcgatatagactttcagtaaggcaagaagaaatgcaatgtcattatgttccaggataaaagggtcaacagaaagacatcatcatgatctcaagcctttgcccgcttcattaggaaaatactcagcagagtgtagaatcttttgagcttaatgaccaaaaatctgcatgaccacatggtaacgtaagtaaattcttttctactttca

SEQ ID NO: 31494 - DNA, 1284 bp, Oryza sativa
acccaatggttcacggggtaatttgtaatttttcctaaaattattttttcctatagtacgttagtaccccggccacctggagttgtcgattatataatcaaagtaaagatctgcatgtcaatacatcagcaaattaaggatttgattaacacaatttgatctttatttattgcaggaaattaagtcgatcccgatggatgcgagcacattgcaacttgcaagagatgtagcacatcaatcaatatgtcatcatttttctttttgcatggtactagtaagatgcaataattaactaacaattgtattatttgcacaccaaatatgtgagttgatgatgcccaattaagctggccaagttaaaatttgcatgtcgaccgatcgtaccgattctcatgccgcaaatttgcaatcttttatgaatatatgtacgtgcaactgggatgcatccgttccaaagacgacccatcaaatatatataccatgaccgtccaagtacaagctccattgtatccaagcatatgtgtattttcacgtgcatatgtataccgcgtataggaagtctatacatacgtacttcctccgtttcatattataagattttctagcattgcccacattcatatatatatgttaatgaatttagatatatatgtgtgactagattcattaatatatatatgaatgtgagtagtgttataaagtcttttaacctgaaacgaaggtagtatatattaattaacccctgatgtagatgtactatatagcgttctccatctgatttcaagttcaagtcattttaaacttgtgcgatatatagttcaaatgacttcttgctcttcatacgtatactgcattattgggaaagaatagtcattttttttcacaaggatgaataatcaaaaggaaattaagatgaaaaatgcaaagaagtttaaaatgacttgcattttggggaagttgagaaagctaaaacaacttacatcttaaatcggagggagtacgaattttagtttctgttttcctcaatagcagtgctgacgtcttgtttgtataaagctgagttaagcctgcctacaatctcctctgccttgactgtgaagccttcctctacctaaaatatttatggagtttatatatgagaaagaatgattatatgaaaagaatgatttattctgagcaatttcatttcagagaactaagtacaaagttttctttttaaaaaaggggcattttttgaattatatatatgtatgattgtttttgttttagcacacgatttttcca

SEQ ID NO: 31495 - DNA, 756 bp, Oryza sativa
taatgggctaggcccaattaaatcctaataaattccattggcccacattaagtgctatgggtaataataccaccttggaaatctaagtgaagaggtctcaacttaaatacggagctagtggagagtctctgttgaccggttgagatggtgcgcaaacaaccaggcggggcgaggcgaggcgaggcagacagcagctgctgctgcactctctcgttttgtaacggacggtaataaacacggagaattgatttcgtatcaataaacacgtcggttacggaattaaacgtcatgaattgattccgtcggatacggaattaaacgccgtgaattgattccgtattaacgagcacgtcggttacgaaattaaacaccgcggttgatgactccgaacgttactctcgcgctcgcatatatatactccacagcaaccagaaggacgaacgaagttcttcacgactcttgcacttcgagttcctcctcctctgttcctgagctgcagaatccttccccggttctgttcacctgcgcgcacagatgtacgggatgagcaggtgcctccggaactccgtccgcttgagaacttgcacgggtaggtgggcgatcaagtttttgggtagcgcttcaagcgcgactgctcttgttcttcgcggctactgctactgcatcggcaccttcaccaagatgtcaacggagattggagacaagaagatgaacaacatcaacggaggcaatactgcctcaaaatccagcggtggg

SEQ ID NO: 31496 - DNA, 721 bp, Oryza sativa
aaatggcttcatgtttccgaacttgccacatcaggaatcactaaaactaatatttgagttttaatttctcatatcatatactatatataataatatttatagcaataaaataatagttgtacgaaataaactaaatgcaaatgttgatctaatgatattgtttttaccaaatacagtttaatttatattatactccctccgttttataatataagtcattctagcatttctcacatttatattgatgctaatgaatctagacatatatatctatctagattcattaacatcattatgaatataagaaatactagaataacttacattatggaacggaggaagtattaggctaattgtcagttatatatttgaagacttaaatttcaaaatgtccgcccatcttatttagtggaaggagcaagtaaatgcataacttcccccattaaatttacatagatttaaattcttgtgcacatttattttcgctagaaattactccccccatcccaaaataagcgcaaccataagttttcgtgtccaattttaatcgtccatcttatttaaattttttttaaaaaaactaaaaatatgagtcacgcataaaatactattcatgttttataatctaataaaaatatcaattataaaaagattttaaataagacggatgattaaaattggatacgaaaacttatggttgtattttttttaatggagtacg

SEQ ID NO: 31497 - DNA, 510 bp, Oryza sativa
cctgcagcccaaaataaaaaagaaatgcaactaatattcataatatccagaatacccttaggaaaccctatccatccacccaaccttatccacatttctctctctttctccttcctccttcctgctcgctcgacttgtggcggcggtgctagggggcggcggcggcgactgagggggcggagggagggagcagcggcggcgacggctgaggggcgtggagggagggagcggcggcggttgaggtggcgccggtgcggcagctgaggggcgcggagggagagagggagggagggagcggcggcggctgaggcggcgccggcatgggatgagggaggcggcggctgcggcgctgagggggcggagggagggagcggcggtggcggctgaggggcgtggagggagaagatccatgccggctgaggggcggcggcggctgaggcggcaccggcgcgggatgagggaggcggtggtggaacctccggcgcacgcgcgcggaaggagggaggaggc

SEQ ID NO: 31498 - DNA, 555 bp, Oryza sativa
atcatggtacaagatgggctaatagctttatgtcgctgcttcaggcgcaacttctttttttttcttcgataatggaatccaatccggcctctacatcaaagatgtatccggggcaatgtgtgaacggtttgcaccagtgattggatgatccagttcaaatcttctagtcggatcaaggcatggtgaatttggggaaagagatggaattccatcgaaatggatgcatcaaaagatgccgcaggtacagatgagttgggaggcctttgttcctagtaaagctgtgggaagtggctttggatctttcctttatttagcactctggcttttgctttttgtggcactcttttgttcatggtccgcagcagcatacgtgttgatcatttctcaacgcgacagagacattcacaaatggaagaaggcaccatgaatttcatgcaaattcacgctgttggagtatgacatcactggtttttcttccttgtgaggacttgtgagtgacgacttcttagtgagcatgccctgcttgtttgttctgtttattcatcccaagaacat

SEQ ID NO: 31499 - DNA, 903 bp, Oryza sativa
aagcagtatgtctcttcaagaaaaacggaaacagtatatgttgagttgttgacacttgacaatgttcttccgcaaggaattaacttacaaaaaagtaatatagctctacacatttcaataagatgttatatatggaagatgcagcaagtccgcacctatcttttggcttctttagaatgtgagtttttttctaaaaaaaaaatagtcctgagcaaaatgcactatttattgtgaaacttatgcaaaaatttcagtgaaattcatggcaaactgttgcattccacaaggagtccataatggctaaaatgtgctccaacatctcaaaaaacacaaattcatcttgccattgattgaattacacatccgtgtccgaaaaaaaaaaaggtcaccatgccacctctcctaattaattaagctcagctcagcgctatctccctctctctcatcttggataacgctatttctctcatttctaatagccatattgttgcaatggcgccttctcgaatcgatcttgctctaaatcttgaactttaacctcagaccgattgatttctaaatatcaccatgattacagatctatcgatatatatagctacttagctagtactaatactttatgttacagataagattatctgtacacctattaatgatgctagaggctagtgatgcatgaaccgtggtgcgaatctaacagctagatattccattgatctcttgagtgttgttaaccaaaacccaaaacaaatgccaaaaacaacatgactcacatgagatgcataatataccatatggtaccatataagagcatcatcagcagtgacgttatgcgtgacggatgtgaccgattaaagcattcactaatctgtttttggaaagacacacgagatagtgtacaga

SEQ ID NO: 31500 - DNA, 660 bp, Oryza sativa
agctaattatgcaactgaccgcctagctgctatgtgtgatacacgacatgtcgccatatataggactatgaaacgagcgtctatctctagtccactaatcgagcatccaccccggccggttaattagctaggtcattttccccctcgtgcgaactgaaagactaaacgttttgatgtttgtatatataatttgcgtgttctcttcttttctctcaaactgatgtggcacaccacaatatgttgtagtatgtacgtctcctccgttgcatatttttttttgataaaaactacggcgggtgttgtcaccggcctgaacatttattgatatggtaaaaacattaacaagaggagattacatgggacaggagagagagagagagagagagagagagagagagagagagagggcattttagaagctaattacagcgagaggtttagcgcacaaatgtggagttgttgcttgcatatgacactactacaccggtgggaccacagatcaatatcgttggcacaacaccgaagaactagtgagatggtgtcgtctagggagttgacgatcacgtttaaacacacttatgtttttactcgcataggttttttattcaacaattaatatgtttttttaatttcgaagcacaatgcaatacatctatatat

SEQ ID NO: 31501 - DNA, 860 bp, Oryza sativa
cccacacctttcaatgtgcatcctacaaacatccaatttggtattttggttgtccaaatttgaaataaaaacaattggtgttttcttgggagtaattttgtcaaatttgattgaatttgatctagccggtgaccagatttgaatcataacattcgggtaggatgtccattcatttgggattgttttgctaaatgacaattgttgtacagagacattgttatgactttcatttagcagatggccctttggcatttgatttatttgtatgcatattttatacatcctttatattgcaaaagactaagataaattcagtcttagttagatagtatattccttaataaaaggatagctgctagtgtatttctcgaaagaaggacagtggctagccctttcagcctttgtaatgctaaagcagataagtcttcacttatgttcctccattatgccgaagaagctgaagtaactagattttttgctaacagcattcttaataggacatattcatggttaaaaagttttacggacttggtactactagaagtactagattattatttcgtgcttatagcttaggtttcattagagtatggcactgcaagtaaaaaaagatgaactttggtcatctcgatctttgtaatttacgccttcaaccattcatcaagttattgtgtgaggtagcaaaatttatcgaattagtcctgatctattaccatacactgtttgagttttggttagtatctactcttcattgatactatcatttatctgtaattgtctcagcatctcaatatcattgtgaacatatttttgttactctctttcacacaaatcattccattgtttccttgtttccatta

SEQ ID NO: 31502 - DNA, 830 bp, Oryza sativa
tgctaggtcgatatcttggcaattagtgtgaaatagtccctgacaagcaagtcactaatttctgggccagggcagctagctgaatgtcagcacggtatataccatggagtagtataacgacaagtagtttgttcgcttgatcagatgggccgtgcaccacctaattaaacccgattgagaccagccaggactactgctatctgatttttttacttgactttattcattttttcgatgtgattgccacattcattctatatgattttctagttacccggaacctcctgtccctgaactccggatgtttcgggctgcctgccaggaagttccgggccctgtttaaatttgaccgccgcgattatttttagtgtttttcagttaagcctactcaccctccccccctctctaggttacatcttcagcttttatgtctggcagcggtgagtacggtgtcagtgagcgtggatggctcttcctcctcgccccgactccatgcgactccgggatagtggtaacgttggccatctccttgctctagcggcatagcagggcttgggtcagccttcccctttcgaccatggcacgggagcaagcaggtgctctgcagcagagcaagaggacgaagctgggttgggagggtgaggtggtgcggcggtggagataggggcaggtacgtacttttatcgctatttctctctccatttcctcctaatataataaaataataccgcaggtgtccagcaaataattaccttttttttgcggtgtcctctagcagaaacacgttcttgtggtatcctctagcaaagagagccattgagtgttgagta

SEQ ID NO: 31503 - DNA, 608 bp, Oryza sativa
aaatttatcggaataaaaaacccctcaaactgataaatccaattgaataaattatctatgtttaaaagagtaaggttgttgataaatcctaatgcaggacaaaaaaatattcttatgtaattttagatttgcataacaaatatttttttaaaaaaaataatagccaaacacaatagtattcactatttagtgcttaaaaaaagaatccagggtatttcagtcacaaaatttctggtaattctgagaaaatttttggaaattccaagaaaatttctggaaagtttctgaccgattacgagttctgacggaaactgcccttatcatttccgattccgtttccgagaaaatatttccgaattcgtttccgtttccgaaaaattccgaccgacagattccgttttcgaaaataggtccaggatccggaaagtttccgtactgttttcacccctaactctatgtgctatatatagcctgctatatattgtagttggcaattttattgaacttgctctcatttgtactaatttatataggataccacatgtacatatacatgctccctccatcccaaaatacaatacgtatactccggttttttcttttttgca

SEQ ID NO: 31504 - DNA, 553 bp, Oryza sativa
aatatgactccattggtgtgtagtactagctttaggtgatcaaattgcaatattcattttacgctctagctatgacgcatgaattccgtgttcaaccaagggaaagaaagctccttgttgacgcaacctcctctatatgccatatcaccaccggagatccatcacccatcaataaatagaccatgaaccctagctacgatagtgaaatcgctgaaatctaagttggcatcttcgttaccacggccaattgatgcttgaatcattcaacccaccaatctagcaaccgattgaaatctctcctatgattttgagttgaaattgaggtttttgtgtatgaacgcaaggtgcctgagtggaaagatgggatgatcaaaatatggcaagatgtagaaaaaaggtagggacgaaaagaatgacatattagtgtacaaccattatgtggtatagtgatatatataaataaactccatgaatatgatatgaaaatatgtttacaaccacctcaaaacaatatattccgtcatcatattgtatagttcatgtaaaaagctgg

SEQ ID NO: 31505 - DNA, 568 bp, Oryza sativa
ccccttcgcatcaaaataatgcttgtgctgttaacgtcagtctacaaccaaagactagacactagtggaacgacagaattgagtccagctgagtctaccgagcaactagtatactgcaatactatgagtaaagacaatcgtgttgtttagtgcgggtcaagccatcacaagacaccgagattctaatataatcgatcacgaattgaacaaaaaagggaagaggtaaaaaagctgcacgagtaaagtaaagctggaaaagaagaagcatgatcagagcagtagctgctttttccatcttttgtttcctttctccctgaagattactaaactggtagtattactgtagtacgagtgagtatatatgcagaaaatctaagagaattgatctcaaagggaaatcaatcaagagaaaaaaaaccatctagtattaaacaggaaaggggagagaggattgaggatgggaggcgtgagtaggtgaccatgggaagccgcggggaagaacctggagaaagaggggggcttgcggtggaagcgctccggacggtgaagtcgtcgcccacccgcagct

SEQ ID NO: 31506 - DNA, 706 bp, Oryza sativa
ccaccctactccctcgtgcgggtcgccgcctcgttatattataaaccaataggtatatagttaatttaggctgtgttcttcccccaattttcccaactcatctctcttggttaccgcgcgcatgcttttcaaactgttaaacggtgtgttttttgaaaaaaaattctatacgaaggttgctttaaaaaatcatattaatctattttttcttttaaaaaatagccgatacttaattaatcatgcaataacacagctagttttatttttaaacttgtaatattcattcatttaaaataaaacgagtatcaaaagttctacgggaagcaaacataataggtttgtctatttgcacagaactttcgagcaaggacgaatagtcatacgtactaaaaaataactgcatcatattctaataacatttaaaaggcggtatagtacaacacatacttttcatttgctgatatatacatcagatgtacagctagtgtgagagttactccatccggttagaatgacatgacacgctgctacttctaatattatgcaattttataactgtgagcaggcaaccaacgagatcaagcgacacagattttatttgaaactagcaggtatagagttaatttacgctgtgttattccctagtttttccaactcatctctcccttttttcgggggtaccgagctcgaattcgccctatagtag

SEQ ID NO: 31507 - DNA, 501 bp, Oryza sativa
tcctcagtgctaagtgctataaggttgtctgtgattctttgttatgtgttgtgattctttatactacgtgtgtgtgtatatatgcacttgttttcctggtgatgctaaccgaataggacttggtataattcaaaccaagtcctattcggcccaaaaggatatggccagcggttctatttttttccttggaaacagacgggagtttgtttctttttttaaaatcgaaaagattcgtttttttcgcccttttttttaccgcgtcgacggaatcggatttaattttttttaccgtgtcacattttttttaccatgtcgcatataatcggattcgattttttccgctcttttttcatgaacggacgacggaaacacttctaatttcttagtagagattatccggctagctgcctaaatccgaaaaaaaaacaaaactagttaaagtagctatagttggatcatcaaaatccgaactcgatcgtgtcaatattggttaatcgacac

SEQ ID NO: 31508 - DNA, 556 bp, Oryza sativa
cacttttggctaagctggagcattattagccccaaaatataccattacagaagcatacagcgaaattaacgaattgaccgatccgtccggtcgcttgcttggtgtctgtagatatacagttttatttaaggagaccttgacctggccggccatggctctcatccctagtcaaggtcacctcgagcaagttcaataggagccaactactagctccaattcatctatagctaatctaatagctcattcatacaatagttatatactacactattaatatctggtcccatctgtcatgcatacattgtgtcttggattctgtgctacagctggctataaatctgtagcccgctgcccttctctctcctcatttatctctttaaaatatgtttgcagctagcttatagcctgctattatacctgctctcacgagccaacatttgctgcgacccaatggacctgggaacaaagaaatgtcagtgatgtcataccaaagcaattggcttgacgtcacatctttgaatgtaagcaggtgaggtcagtacgtatggcctccatt

SEQ ID NO: 31509 - DNA, 617 bp, Oryza sativa
aacaggttgtcacacgcatacctcatgggtcagcatttgcatatgcttgctctttttttttttaaaaaaaaactgggtgttttcatcattatgcgaatgggtgtcaaacccatgacttcacgcctgtgcacccctggagtccatctggaactcatcgaaggccctacctttccaaatgatattgtatgatacacgtggaagtgtttgctagcatcttccgtatacaaaaaaaaagcagcagttattaggagtatatggatggtaaatttggggagtaataaatttgaactgcgtgtccgagaaaatctagtgggatgataatttatagattaatgaatcatatatgtagtatgtagttcagtaatgactgtacaatggaaaattgatgagatcataattcacattccatatcttgtggcatatgattaagcaatccttcagagattttttggattaatgatcattaatattggaaaaacactttttttatgtataaattatgttttagaaaggtttgtgtcaacatgaaagcttgtcgtgcagttttaaactcctgcatttcatgtctgttataactttttttttgttgttattcaaaatattgacttttgtcatta

SEQ ID NO: 31510 - DNA, 680 bp, Oryza sativa
aaagttggaaaaatttatgtatagaaatatatatatataaaatatttgaattcaaattcaaatttgaatcggttatataaacttttgacttataaactttgggtctataaactttagatgtatagaaatactatatatagaaaatatttgaattcaaattcaaatttaaatcgggtatgtaaacttttgacttataaattttggatctataaactttaggtgtataaactttagatgtatagaaatactatatatagaaaatatttgaattcaaatttaaatttgaattggatataattcaaatttgaaacgggtatataaacttttgacttataaactttaggtctataaattttagatgtatagaaatactataaaaaatatttgaattcaaatttaaatttgaatcggatatataaacttttgatttataaattttggatctataaactttaggtgtataaactttaggtacataaatttactaaaatagaaaagtaatgcggtgccaaaaaagaaaacgtggagggagggagggggagaggtggtgatcgctaccgagagcgatctcggtagcgatccatcgcgcattagactttccgacatctagaatgcagtagcctttgtattagaatataatacctacggcccacccaaaccatgcatggaatgggtcatag

SEQ ID NO: 31511 - DNA, 687 bp, Oryza sativa
atgaaaaaattaataattgcttaaacttttaaataagatgaatggtcaaatatattttaaaaagtcaacggcgtcaaatatttagaaacggagggagcatatcaataagatcaatttgtttattttgaaacggaacgatgacgtattattagtgtgaagctgatcaaaagctggaggcaaagtcgtagcacgtacgtacttatcagtcagcagatcggagcaaatcctgccaattagagcagaggccactacaatcattcagcttggtttactaaactagatggtgaatctcgccatgaactaatttattcaaaatggataatcttgattgattggctggctgaaccaacgtttggcgacgcttgaatgaaatacgtactaaaaatatactggattctattctttttttagtaatagaagtgccaacttccggccaaacaatatggatttgattcgagagaaaatatattaatgacgaaatggtaggcggcactgagccgtacttattcagtctcatgcatagtaaaaaagccggaccggaggtcaacccgctctagtcgtcggttcaccggttcaccggtcgaaccaccggttttttatttattaatattatatttgatttgcattattttaaatatataatcatcacaaattagtgaaaatatgtataaataaactagtatatct

SEQ ID NO: 31512 - DNA, 636 bp, Oryza sativa
atggtaccaatatgcaaatccacttttttaaggatctagagctggagggtcgacctcttttggataagatagcatagggcatgccccgcccactcttaagactaggtacccgtagactagtttttactactcaaagaacttccctatgcaatggtgctttctagttcttatctgcacctacatttaggattaaccctattcttgataatggtcattccagagttgggtgggaatcgttgatagaaattttattttccctgaggtatgatagcgtctgaactaaagaaagggaatatggaaagtgaatgtggtaaaggataccaagagcactgaatgatttttaggcgtcttttctctaaaactctgatgaaatattgcataaaaacatattggcttagtagaaataataaacttattaataacaatctaattgaccggacctaaccgagatattataagattaaagataataagaaaaacttatttagctgatagatcaatttaaaacaacaatgtgattagaagaacatcaacttagtcagaatatcgaacctaaccgagaaagtcctagcttagctaatacgactcaaatcaacaatgtagttaaaggaatcaatatatcttataggcaatgct

SEQ ID NO: 31513 - DNA, 725 bp, Oryza sativa
cccgatatgcttgtgatgatgatagtgataatataagggttaattgtttgttttattttttttaagtgtcattgaactaattatcgataatcaacttctgttacaaactcctattaagctactgaaaatctgaaactaacatgacctgtagaaagaacaatccaactcatgtgacactttgctctccagacaactaatggaattagatagtttgcaattttcagttgttttcattgagaactgaacatctcagaggctctaagaactagtttgtgtcttgatctttgtactatggatatgcaactttttttaattagttacatgatgcaactttatctatggacagttttctgaatatttttcggtttttattctgaaccaagtgtgttttatcaaacatggttcatgcatcaagacaaggtgaagcaccacaaataaatactgttatgaaagcaacacaaagagtgattttgaaatattccaaatctgatagttaaacagaagaagttcattggtttcaaattagctcagaatcagggaggtaagtacttgaatctagagtttttcatctatttctgcacatacatagggcttcccaaatattcagcattgaatgaccccccttctcatctctcttcatcttcaacgatgcatgcatgcaattcctccctaaaggcaatggctccaacctctaccaccacgccagaaaggaaaaagaggacagt

SEQ ID NO: 31514 - DNA, 545 bp, Oryza sativa
ccctactgcaaggcaatgaatttgcaatcaaccggtggatgtagcttcagtagaacatgtcgcatagacgtactccaaaataaataaatctaaaacaaacataggatataacctaatacaacgaatctaaataaatcaaaataaacaaatctaaaatataatgttatataatcattacaataaatttgaacactcgttgtactaaattatctctcatctcatcctgggtttgtttatttcgggatataatgcatggagtatagttgctgactcccactgtccataaatataaatgaataaatggactctagtactatattttcaattcattcaatcattatatatatttagtatttactagtagccatgggcggatccaacgtgggtgcagggagactcaattcccctctacacccacaagacctatggatacccccgaaacacccctttcaattttttcaccatgaatgataaactaaaggtccctaaatggctagatattgaagaaactgtgtaaatgagccccctcaattttttttattcct

SEQ ID NO: 31515 - DNA, 675 bp, Oryza sativa
tgaatccgaacttccggaatcaaatcacacatctcctttcttggtttgcccattcttaccttctctcatattgtgcttgagcttgcttttacccaatctacttgtatgcttaattgatatagttcatgaccttatcttgcttaggtaccttgttttcacattttgattcatatacattttctttgtttgagctacaagttcataactattgttttattctgttatctgttgaacttttttgtttttccagaacttccaatcccacaccagaagttccgatttgaaccgaaagttcccatcattctaatatgctatgaagttgtgataatttttaggaacacctattcaccccctctagtccacatcaatttcttttgatagatgaaagtttatctagatcaagttgagtttaaggaggaatcgtgaagatcgcggcaatacaattttatattttcatagcatcattctaatatgctatgaagttgtgataatttttaggaacacctattcacccccctcaagtctacatcaaggtcttttcatagatgaaagtttattcagatcaagttgagctaaaggagaaatcgggaagaccgcggcaatacaattatatattttcttaagtatatctcttaaataggcatgatgagttattttccttttttttgttaggaa

SEQ ID NO: 31516 - DNA, 545 bp, Oryza sativa
cctgcagcccttctggtgttctgcatattgcttgcgattgtttccgctggatataaggactacgctaatatttaactttagaagttaattattttagtaaaactcacttagctgtcatctcctttgaacttccacttcaattcagattttagagccatggcctaccaaacaggccctacattttccagataggttccattgctcaatgtttttttggctcaaatttcttaatctcatcgttggcaggagcctttggcatgttctcagatttggtttgttatcaactgtgtattgtaggcaattttggtcatagcaacactgggtacaaacttgtactcaagcaagagttacaattgacaacatgagtacattgactagggcgtgcagtttttttagatggttagggcatgcagttgccactggtgcaacgtaatagttggagtctcctttgtaaatagaggatacgagattctgaatttttgtagcaaatagtcaatgattttttcacccttgtgtagatgagtggcattcgcatgttctgtatt

SEQ ID NO: 31517 - DNA, 2554 bp, Oryza sativa
catatgccatctataattgtttgaagatactaatcttttaactaaagttcttaggttgagaagagaatcatgcatgttaggtgttcctttttcgcctcccggaaagagtgaaaaattcctgctaagatgtcaccatagagcttaaatacatgaattcttattcctcccttcctcctgtacgtgcccaacccttgtcatttcgtgtatggcatcgtttcaaggtcttcattgtcatcgatgatggggatgttgggcctggtgtcaactgcaccaaggatgcccccaccgcatcgccttcgatgtccgctgtggttatatgaaatgggtgagatgcttcaatcactattcgatgatatattctacttaaattttacgttagttgccgatggtaatgtgtgcaagatctgatcggcacaatggtcggccgctcacatagaagatttgtttgccaggtttgaggagagcgactatgtacaactcataggccacagctcaagaacaatggttatgccgattttcaccaatcatgtattgatggtgttattgctgtctttaagctagtgttcaattagttttcttgctatccatgaagctatgatttgtaattcatggttgttcggcctgcacactttgtagtaatcggctttaacttctttgaagaaaagactatgatgatttccataatctaaaaaagacttcaatttggcacctattgaaaattttaacaagatttattactacctccgttccaaaatataacaacttttagctatgaatctgaacacacaattgtctagattcgtagctagaaatagttatattttggatggagggagtacctaccatatcctacccatgtacattggatacacataagctaggagtagtaacatatgtatcctcctacttgtgatttacttatgtgttagaaaaggctgttctctggcccaatttggaacaaataattagtcggaatattctagtaaattatttacatgattattgatataaattactccctacgatacatcccaagctatgaatctggttgaaatgattatattttgggacatatgtagtaagatattttcataaataaacttaaaaaataatttggaacaaaggaactaagcaatgcggtagaactcaccaattttttttggaaaaacatatttttagagttgtagagcagataatccacaacaacaacataataaagtagctgaaaagaacatggccttagcttgtttctagataatgggtaatgaacataaccgattagcatgaaaacaatactagaaaatgaacgcgccaataacaaaattttatacagtgaatcatgttaaatgctgttattttagacatatgctgtgggttctttagaaattagtttaattattttagacatatgttaagtgtcaagcatgagccgaaaacctccaatgttctgttataaaaatctagcagtgtcatagttaactcttatcgctaaaagaaataacttatgagttatatttttatatatgattctatgatgctgccttctatttatcatgggtgagcgatgccatataaccgaggcttctcgcaccattacccatggggcaggaccgcaggagcttttcgagaagcctcggctttatttcggactgtttttttttttcaaatagtttttttttcttctctgcattttttttctcgtagatatttcagttttatcttcaaagattaaggtgatacgtgaaccaataggctggtcaggaatcagccagcccgagaataattgatatgcggagagaaagcgaaatagatagtttagattaaccgaatgaatctaacaagtagatcatcaaagaccactcattcctagatgatagttctgagctcgatgagaaagcttcgggattcgggaatgatcatatcaaggctgctgcaaggaaagttgaagaactggcatgtattcatcctctaaccataaagtttgaggaaatccaaattcctcaatgttttcatctgtcctaattctcgatgcctccctttccgattggaactaatacctagattcattgtagaactcctagttctcaatcctcctggataatttctcaatgaattccgaagaaatggttagtttgttggtctaaaacatggacacatagtctaagaagttataatctaggaaggtgcattcctatttgctatgagtagtgcttgctgtatttagctagcctagaaggactttatatattactccatccgtttcaaaatatttgacaccgttgactttttagtacgtgtttgaccattcatcttattcaaaaaaatttaagtaattatttattcttttcatatcatttgattcattattaaatatattttcatgtacacatatagttttacatatttcacaaatttttttaataagacgaacggtcaaacatgctaaaaagttaacggtgttaaacattttgaaacggagggggtacaattactaagggaaatgaatcataaaacaaaacaattttaccctatccttgatagtaaaaaggacttg

SEQ ID NO: 31518 - DNA, 999 bp, Oryza sativa
tttcccaagtgactaataatcctcgaaggttttcacaatataattatagatcataaaaagaggaatatttcatatgtccagaaatttagcttattgtataatataaatcacgattattgatttcaatgtcatataagagtattattttgtaagccgcgctactatcccagaactcaggaacaaatcattcaatattgagatgaaaagcttcccgtgcacactccgtgcacaccaactagcaaatgtcacaaaaaattatacaaaaaattgggtatttactcctattatattacacatatatacaaagtatcatattcaaattcattatattttagtcataacaaaaaagtgaaaaatctccatcaaaaaaaagtgaaaaatctgaaaatctgacagttttaagggtaaaaaatgtcagaattttgtctttttttattacggctaaaatataatgaatttgaagataaaatttcacatgtaggtgtagtgctattcgaagtaagtgtacaattttttgtataatttttcgtgacatttgctagttggtgtgcacggagtgtgcacgggaaactagtgtgcataggatatgttccctacttataaatatttgcagagtacataggcagtacaaaggcaagagtgaaacaaacccattagcagaaccatttcattttttttattagcaagaatcttccccattctgttcagtaagatagcaaacagggatgcaacattggcaggcacacacaattctttgtgattttgagtgccatcttttgaattgataagacgaatagtaccaagaaaagaaacaagtttgttctacatgtgctatttatcataatcataactattataatgcaagtacaggaaacaagacttgatacaaatttatcagaagaaaaaggtcctgaaatacctcccctgaatgagctagtaactccaagcttctggcattcgaaaggctgcaaagcaaatcctggccactgaaagaattgg

SEQ ID NO: 31519 - DNA, 865 bp, Oryza sativa
gtcacttttgctcccgatcatttttcatgctaagttagaaagacaagtaaaaaacgtacataaaattattctcaaaattcaaaaattttttgactacactggtacagaaaatattttataggcggtattagcttgtttacaaaggcattttttgaaccacttgcaactaaggccctgtagaaatctaggttttgtgcatgcacatttgcataaccacctgcaaaaatcaattttcacaggtggctctcttaaggaactgcttgtgaaaatggatttccaattttttgattttgtacctgtagaaaaacccataaaaagtattttagtaggcaacttaaagaaaatcgtgcgcgaaaatcaattttttagacttccccttattagaactgcctatattacctagctagccataatctgttactacatccgtaccaaaatatatcaacttttagctataaatctagagagatatatacaaatcagacgctcaattttctcaaaaaaaaactaagcagttaaatattgttaaaaaatatcagtgattgaaatatttaaaaattttgtgaaatacactaaaggtatatgttgaaatatggctatcacgtataaaacattgagttttaaagattttgaaacatatgtttttctttttttaaatatataatcatgtgatatcttgttggaaagatttaattacaatgaataaaacattgtaattggatcgtacatcggataaatattttataaaaatatttaaagtgataagagataaagaaagaagctagcttgccgcatccttaaccgtactattatgcagtagtggtagttgtccgattttttttttatcccgagaactcgagcctaa

SEQ ID NO: 31520 - DNA, 570 bp, Oryza sativa
acagtttctttttgtggttttcacaagcaccacctaatctaaagaaggtttgggttgattaatgcgataaatttatggagtaaatgccccttagtgggtaccaactatatatatgatgaataagtagcttctttatccaacggttgttatctttgtactaatatgatttgatggtttaaaattgttgatgatgtggtttcttgcatgtcttactttatagaagtaaatgtcttttagtgggtaccagctatataggaagataaattcaataactcgaatgcacaatattatttcgtggtttcatatgctacacatatcatttaattattgaatggtcttgtgaaagtatttggtcacggtggggtttcattccctttttgaggcatatgataaaaatgatttagtcacagttggatttcattctattttcaagacataggtaagtgtataaaccaatttttttctagatgtaacttatttcttatatatttattaatatgtcatcaatttaatgaaaatgaaacctttataaaacttataccgggaatggcctaagatcagtcaacaaaa

SEQ ID NO: 31521 - DNA, 523 bp, Oryza sativa
cgaatggagtaaattaataacatatctgcatccctgaacataataagaccaatactatatatatatatatatatatatatatatatatatatatatatatatatatagtaaatttgtttggtgctccatggtgcccgggcaccattgttgaaattgagtatatacccaattcaaatgagcatgaaacttttttaattatttaggtattaatattaactactttactaactagttgaaagcaagtttgaactgaatttgaacttgtttttgttatattttgattctaggtatatagcatccatacatataattagttaggtatgtaatcatggattgtgaaataaagttaaatttgagttgttttgttgataggtataggtatgaatcgaattcttataactaggtatatactcacaatttgaaaaatttgaaaaatttgagtgattttgtgcatttgaaaccatggtgcccggacaccatggtgccccatatgagtgtcctatatatatatatatatatatat

SEQ ID NO: 31522 - DNA, 688 bp, Oryza sativa
attcctgcagcccctgaattgtatcaacttttggtgtaccttgcctcctgggacaaggattaatgcacgcacgtaaggaacgcccgttgggttatttccggtcgtgacaagttggtatcagagcccccttgaccctaggacaagccgtagatcccaagccttagcagtattttcgaaataaaaatcctctgttatttgtgaaaaccctctagtctttctctgtcttgctgcttcatttatctccaaaatctgacctttttaaagtgttgcttttctttttgtttgtagatggccggcagcgtcacccgtcgtggtttggacatgactggtttcgtcttggagctgcggggcatgtgcgttgtcctggggtatccacatggggtggactaccagggcaggccgcttccggagcaggagggtgacgatgcagagccccacgctgcttgggaggtcactgcagtgatcctcgctggctctcccgagcggacttcgttggcagtcaccgcgggtggagattctttccccgccacttgccagagcgccgctctcctcgccatcggcactcttcaccagcgctacccggacgagttgcagcactcgccctttcgctaccaccctcgccgcggaggagcccgcgactacgccacctttcgggatgctagctcggaggatgacgctaccatcatgc

SEQ ID NO: 31523 - DNA, 505 bp, Oryza sativa
cctgcagcccctctctctaatattgtgatgctaaataatgccagcttccgtaaacatccttaataatgcatgtgggaactgaattttgcatgcaaccatgttatctgaggatcaccaattgatttaattagactgtaaattaacttatataaatcatgttcgatcggatcgaagaaggaaagaggaagaaagaagcggagtagtttcatggctacttgttatatgcgttcctcaaattaaaaacaaataataagccaacaaatcaggaaagatatatgcatggcattagggaacaagcgtgcattacggacgaagaaacacacatgtagttagctaaaattcagtcgatttactctacagatggaataaattacttatttaccatgcattttattttttttccaaacctaccattttatcagatgtactagaactaattgtggtgtgttatattaaattaaatggacggttcatatctctccaagggtgctttaaacatacccaa

SEQ ID NO: 31524 - DNA, 670 bp, Oryza sativa
tttgaaatgagcccataatgacaaggaagaccattctaagcatggctaagctttatagtaacctagtgtcaccaaaactcatatataaagtggtatagccatattgttcctaaggttaggaatgaggaatatggatatatgtggagttaaggtgataatgcaaataataggagtttatctaacaagtttaacaaaattttaatttattagtgtacaatcgacatgcaagatttgcaaacattttcaataacctccaaaagataggttcaaagtgatcaaagagagggagatgggacttgccttgaatcaggaaaatgtcagcacctaaatcacttcttcaccgattaagcaatcatctatacaaagtacacgttatgcaattaaacaccgaaatatgcgaaaaatccaaaatgttctaaaatgcgtgatttgtgcacagagaataggtactggtataaaatgaatttaggtgaaagaatttctattttatctcattttatttgggagttatgaattttagaagtttcgtcggtatagtgtaggatttacttagttactattgtgaaatgctgttgtaaggtgattcttattaagtttatgtttgctggggtgaatatatttgttttctaagactaacacatttggtttcataatttttagagttaatatg

SEQ ID NO: 31525 - DNA, 716 bp, Oryza sativa
caattacggtcctcatatttctaatgtcattttataaccttatgggaaaatttttaagaaactatggcggtagtggaagaaataaattgttgtttccattaacttcctttgtcatccttgctaatagagtagtcctgaatttattatcttagcatgtgatttaataccatactttttgatatttttctttatattcaacctacaaaaatacatcaaataaagattaaaaaatgtatagccgatgcattcaaatttcgtacaccaccatgaggattgataatatggaaatgatgtttgatgtactagctccgatgttaaactctaaccatttttttcatactatacccttagcaactatcaaattaatatcatatgatatatattcaaatacaaatctattaacaccactgttgtggttctaaacatttatgttattagcttaatcatcagtaagaaattacaaaaagttgacacagtcattgcacacctcggatgaaatattctaaaacatgcaaaattcattgaattgatcgaagcaaaaaaaaaaggttcgcataggtgtaagtacaagactattataccttttacaatttaaaagtcattctttgaaggcacaatttaggtgaacgaattattttgtttgaagctaatctctttaatatatcatcacaacacaaccttatctttagttaatagcttacatatttttgttcctt

SEQ ID NO: 31526 - DNA, 2530 bp, Oryza sativa
cacgttgcagtgaattgaaatatcctttcgctatttgctaaatattgtttttatatagggtgaaacaacgcccaattttttttggaaactgttatttcatacgttgtagcaaaatgtttcacgaggtgatttggttgtgtttcaacttttttaaaatattgaaacattttttatctacttagtgaaacaattccgatctacttggtgaaacaatgcccgatttttgctaaaaaaatcgggcccccgatttgtaggtggccccctattttttctttacaaaactatgaatgaaagattcagaaggaaacagtccttgcttccttacatacccttcttaatcctgcgttacatatacctcacacatgcaaggccttaaaattaaccccacacttaggatatgtacaacaacactcaatagctggcacataatcggccaactagaccaataaaattttagaagaagataaggagaaaaatttcttcatgatgctggaaaagaaagaaaggataataaaattattttgtgggtaactgttagaacctttattgtctcaatttttagaagaagatagtctctacttaacatttgttgcctaggatttaatacttaactcgagtacttgcctgaacaagtataataagaaaaaaatggctagttataaggagatcgcgtagcatggccgagatatctggttaaaatcatttattgtctcaattgttaaaaaaagagagtttctagttgatatatctaggaattactgttaaactcaattgttatacctgctatacttgcccgaaccagtacaataacaatagagataatccaagaaatgccattgacaagcggctagatccaagaaataccatcaacaagtgtgagttccaagaaatgccatcgtacaaatgactttgtcccaaaaatgccatcgccgttacggttccgtccatcctgcgctgttaagtgctataggatgaacagtgtatttaacggcacgggatcgacgaaaccttaacggcgatggtatttttgggacaaagtcgtttacacgatgtcatttcttggaactcacatttgttgatggtatttcttggatttggacgcttgtcaatggcatttcttggattatctcataatgataaaagggctagttataaggaaaccacataacattgcatatctagctagagcctaaggagagagatgaggagagaaagggtgagttggctactaaatagtactcctaactaattgcacatgagctcgaagaaagtgaggtccaacgcaagtctctactattataaaaattgaagatgtttttgtcgatactttggtacgtcatccatgcatgagtcggtttttaagttcgtttgcttttggaaatatagatctgtatttgagtcaggttttaaattcgttcacttttggaaatactagaagtcatataagaaatctcttaaaaacacttgtatgctaacttgagatgatcggactcctaaatcctaattatagctcataattttctaaaaaaatatatatccaagcgaatcctcacagtgaaactattataaaaattgaagatgttttcgccggtactttggtatgtcatctacatatgagtcggttttgaagtttgctcgcttttggaaatacatatgtgtatttgagtcgggttttaagttcgttcgcttttgaaaatacaggagcagtcgtataagaaatctctttagaaaaaacttgcatgctaaattgagatgatcgaactcctaattgcagctcacgattttctagaaaaaaaatatccaaacgaattctcacaatgaattttgccttaactaaacctataataacagtaaaattaaaatagccttcacctgttacaatgcacgagcaatttttatagtaaataacaatgcgtaggatatagtagagtgtgaaaaaagggatttggctaaaagtctactccctttataaaaaaattcaaatgctaaggatgaatctagaaaaacaaattcaaatgctagggatgaatctggacacaagtcagagtcaccgctaacaaatactagcattacatacaggatatgggagtgtgtgtgaagtgatttggctgaaaatctattggtaaaatatgtttcatgattattgtgtcaatagctacctactatatgctctatttgtatgtgtatctttaaatgatgtggcacccattcatattaacacttgccttacaagttgatgatcgacttttttttttaataattttacatggcttctaatatttttctaaagacatactactccttccgggttgataatacttgtcgttttggacaagggtgaggtcaaattttaaatctctggttataaataattttaaaaatatttatctttgaaatatggtgactatatgtatagattagtcttaaaaaaatactccaataaaatcatatatttgttaacatttatatacatattataataaaaaataatggtgaaagttgtttttttaagaccgtgcccttgtccaaa

SEQ ID NO: 31527 - DNA, 667 bp, Oryza sativa
cgattggcgaaacagtggcagttcatttcattcccacaatattaattaaaatataaataaagtcgttttggaatttttcctaggtgcctcttttgtgtatgatgtccgcctatgttgttctctcatcatgagattctggtgaacaaaaacatcgagatgcttatgcaataattctaataagtgatgatacacctatacaaaatggcattaactgcaagatggttgtatacaagtagacatcgttcagttgtagtgcttttcttttgagatgccattctatcttggttcttcggtatatgctctaataaacatcatgagcaagtgttgttatcgtaaagcttattatagatatgtcaaataagcatgtacaagtggaaaggcgattagaagatatggtagctcaaactagctaatagtaaatcttaacaaggaattatagtccacactatgatttatatatctttttctatggtaagcatcattttattgattatggttgttgaaactctaatgcagaaaaaaaatttgaggctacagggagtacaataatattgcacttcttgtcatgtaggtactacaatatgcatcaattagtgcagcaacatcttattaaaaaaaagaagtgcataaacacaagtgaactcaaagcataaactatttatggatt

SEQ ID NO: 31528 - DNA, 677 bp, Oryza sativa
tactggattccaaaaaactctgttcacctggcctcacaggtttggacgtgactctgccactgatgactggcatgatgaggttcaatttagttacattatgtatgcttagaggaagtggccattcagcattgctgcctcacaggggtagggaattgtggaaaatcaaaatgaccatatctgaaagtcaatttgtgaatatgaaatggctgtaaggctgttacagatttagtatataatctggcaacagattaatatattgattgattgttaaaagagaagcgatgctatagatcacttcttggataactatatacacaacaaataacctcccaagaaagcttaaacatttttctttaggagtgtctactagaataaatgcacttgtaccttcagatatggcaggtacattagagctgccatagtacatgttcctccataatggtgctaacttcatccaaattctgcagaaaagctgtgaaattcttgcgcttcgtgctcagattttctacagtagccagcttaaagccttaagctaggcctttatattggtatacatttttttctggtgggggatatacattgtttgttaaccatataattcacaccctatctaaaataagttgatttgcggggtttgtaaactagattatatgataagacctaaatatatttggtga

SEQ ID NO: 31529 - DNA, 1194 bp, Oryza sativa
cttatctatggtgtcgaatatatattataatttttgaatgagagtaggcaaaagaatagtatttgattctaagacaagcacactaactataggtaaggagactttgggtggaaagagagttcctgagtttgagtcttataaaccacatgcgcatatattgcgtgaacaatcaagtgagttatgggaaccaaagtgtaacctcaaatagatgcatagtaaaatatgattttcttttttttttggttttttacgcctgtaagaaaagggtacacccctatatttgatgactctaaactagaatcggcaccaatgatacccttattagtgtcagttgtacaatcgacacgaatgactacccttctcattaattccactattatggtgccggttccaaaactagcctatgatgggtttggaatcagcacaaataagggtgtttgtactagtttattggatattctgatctagtgttaggtattcgtctcactcactagaacagatctaacatttatgatgaaattctaatgatgaccagctaaaatgtcattggtgaatgatatttttatagaaaatgtcataaaggttagcctcgagcgaggaattgaaatgagcataaaaaggtcatgacggatattctgatacaactgtagcgcaaacaagccagccacaatctaaatcaacatattacgggcccgtttggtatagctccagctccatccccatctttcctggagctagaactcaaccaaataattgtgtcatcggctaagcccaagggattagggatggaaacggtttgggtcaggcacgagtagagcaaaaccatgcccgatcgacccattgcccgatgctgcccgctagggttagcgggcaaaacttcatgcccatagccatgccctatgggtacttgtcggtctcacatgcataatatctcgatagatatataatttaataaagagaaacaaaatcaataagttgccaaattattagttgtcaacaataatttgaattgcataacaagttattaccagctagcatcacaaatgagccaagagaaaggatatgagaattaacgagaattaactattaagatatggaccaaaatctactaatgggtcatttggttgggggagtttttaggaaagattgggagtttagagagatggggctattaattattttgtttggttggaa

SEQ ID NO: 31530 - DNA, 925 bp, Oryza sativa
cagcccaacctgctagcctaaataacacatttgtcaaaacattaacgaataatcaataggttactcaaccttcagaagctactccactgagcaagttacatgttccatcattaagctagctcttaagccttacccatgaggacctaccatcatcctcctatgttttgaacaaaattccacatttctttattgataaccagtgttcaataggtgcatttcaaaaaggtactgctcaaacccactacacacaagaagcatgttagtgtatctaagcccacactagcttcattccatgctaaggattacctcgtgcacgaaatccttccctctttctgtttttgaaacacttccagagcttgttatacacagttttcatggttcctagagcttgaatttagcattcatgttccatccaaactattcgtaaatccatttcatactatactactagattttcttcttctgcattaaaattcatactaacttcagcactaaatgtccaccagaagagttatgggaagaacacttgattaaagcagtaaacacaacaatgctttcctcctgctgacacactgcgcatgcacactcggaggccattattttgcaaagctagcttagcttagctgtctcccactccaagccaacatcaccaataccaatcctatccagtcgagccaaagccgcacacacgcgccccacaccgcccacacgtgtaaaaccagagaagggacaaaactcaccgtcgggccccacgtgcagcctggggaggccgaggggaaccgggaggcacgcctcggcggcgtcgcgagctccttcatgccgtcgtcgtcgtcgtcctcctcctcctcctcctcggccacggggtacctcctggcggcgcccgcccctccgacgccgaggccgacggagtagagcgaggagaggt

SEQ ID NO: 31531 - DNA, 1826 bp, Oryza sativa
ccgccgccggcgccgctgctgctcgccgccgtctccgcagctggcgccgccaccgtgcaggcgtcgtcgctgggctccatcggaggaggagctagcggcaggtataataaagcggaggaggaggagagcgagcagcggagagggatgggcaagagagagagagaggggaatggggtttggtttgcgttgggagaggagggggtggaggtcgaggaggatgtgcttggtggagaggggcggtggtcaaatataaagctacagctccctccctccctctctcaaagctagtactactctctagtactgtacaagagaagatgaagcagagagagagtgtgactatgagcagcagtgcagtggtgtacagcagctagcatgcaacaggaggggattgaggtatggaaaggtcacttcaaatctcttgtgcgcgcatatacgtgatggatggatggatggatagatcgtgaatggatggatggattatggtatatatcaaatcgatgtgcctacgtttcaaagttggaataattaatgggactgcctacatagtagtatatgtcataaaccctttgaaacgtatacatgatttgagaaaacgtagaaattaaaaaacataagattttagtagaattgtatatttaaaccgaagattgcaaaatatgaaaaaaaaacatgggaataattgtttgaatataccacatgaaatatagacttagacgaaagttttcaataggtttgagctcttactaactttccttcaacataatctacatgcaatagcaaatccatagtagttttataggatttggaaagctagtaaaatcatttgtatcaaagggccaaataaaaaaaaatcttatagaatttgaatcctatgaaattcctccatacaaaaaatcttacagattcgtgtgatcccgacctaactctattttgcatgtgttgtcactatgatctgcccctttcctctgccgcctgatctccttgcctcctccgctgctattaccccaccatgccatgcccgagcagccctggcgaggtctgccagacctcctccttcaccatccatttccgcctctcctcctccttagttggcaactaagagcccccccttcccattcttcgtagtgtagtttctagcggaaaggaagtcatcaccatctcctaaccactcaatttgctttgtccttgccacctagccacccatcatcaagttgccacatcatacaacaatgcctttaaggccctcatacaaccatgcctttaaggccgacgccatctcgccggagctggagaaggagtgtaacagaattacttcataacacatataagtttaaatttggtttataaaaataaaaataaatatgactattaatttgaagttgcatatttatgaagagatatattttatataatagttttttgatgaatttttagtgtcatgaaaaatgagcgaacggacatcccctcggagagacacgaagattttcccaagcgtatagcgtagggagatggcattggcatgggaaacgaagtttaaaagtacttaattagtagtataatgaacataactataaaatcttaactcgttatatatcagattgtcgaaacccagatctctctaccatcaatccaaatttgatggctatgagtatttccacttggtcaaacactcaaagtgccagccaatgccggactcctcaatctgatggccagttgaatgctgcatgcatgccacccataataaacaaaatgtgttacactatatatatatatatatatatatataaagaaataatctaagcaaaacctaactctaaacaatg

SEQ ID NO: 31532 - DNA, 522 bp, Oryza sativa
ggattagcgcgagagaagggggggtatttataggggcccgtggagatggtgacgtggcggggaccacaggtgggctccgcctccgcgtggggacgagtgagggtttaattagcttgatgctcgagtattaataagttaactgagttagattctttggttaaatgttggttagagagtctaatagcaagttcaatagtatagcccactacccctattagctttaaatcatctatagctaatgtaacagccaatttatacaatagttgtttactatactattaatagatagtcctacctgtcatacacatattgcgtcttagagtccgtgctgtagctgaatacagatctgtagcccgttgctcttctctctcttcctttatctctttaaaatatgtttatagctggctcatagcctgctattgtacctgctctaagagcaaggataatagtatagctcacttcctagtattagcctatcttaaagccaatatatatataataaattagctataattttcttct

SEQ ID NO: 31533 - DNA, 504 bp, Oryza sativa
ggaaaagttgaaagtttgaagaaaaagtttggaactaaacaaggtgatagtgctccacaaaatcttataggtccaaacttacacattgatacacgaaaagaaaaacaaattcagcaaatgaatagtagtactatttatattcgaatttgtcttttttttatcattgtttagattgaatttgaacttggttttttcgcggagtgctagacgttactacactctacattgtcaatttttttaaaaaaataactatttgcattgaatttaaaagaaaatggtacacaagaagacatgtcctcaagagaatagaatccattactagaaaaaagtttaaatttcaacatctattagagcatctccagcggtctctccaaatgcctctccaagctaaattttagcaagtcaagcaaaaaggaatactccaatagagttgctaaccggatggctaagccattcgactggccaaacgttctcactgcctgggcaaatgtggagaggcaaact

SEQ ID NO: 31534 - DNA, 615 bp, Oryza sativa
  unsure (1)..(615): unsure at all n locations
gatttaaaccaaccccaaggcccaaccaagaaaacccgagacccgacaaaattgggattcagagtcatcagccgatctgatcattgccattgggccaatcagatcgncggtgtgtggccggtcagaccggccttccataggaaacctgatcttctcccaaatttggcaatgtttttctatttcgtgtctagatgtcaaatttaggcgttaacacatacccctgcctttttggcgaacttgtgagccgaaaagcataggacatgtggtcttagggcaataatttttatcggccatatgaggttctaagtgtttagtaaatcaatctctttgtaatatcctaacaaatcaataatttcttacgaacgattcacacaacttggtatagatatttccaactagataattactcaccgagcaccttgcacttagacccaacaaatggcgacttcaagatgtgaggtcgtacctatcatcgttcgtgtctcctaatttccttagaagcatattaacattttgcccccgagcaaaatcggctttgttgaatgcacgatttcgaaggtaagataaacattgtgttaacccctatagaatcatgtggaagagattcatctctaa

SEQ ID NO: 31535 - DNA, 600 bp, Oryza sativa
tgaggaaatgcttgaagtgaatttttcagagcatatcaaattaaaattttcaacaaaaataaactgtgccacgaccgcactgaccgttggatatccatcggccgaaagtggggccggttgagcccaccaggggttcggccgaaccgaccaggcaacggtcggatgcctaactttttgaggcaacagctagtgggtcccacatgtcattcttgaccgttgtgggcaccctataaaagccagccggccaagagagggaattccaccccatttcaacacattatcattccctctccaacagtttgctctcaagtttattcatgctttgatagttcctcaaattcaaatctttaattgcatatatacaagttgctttggcgaaactaaccgggtggtgaaactcttgataatactaaccatcgactagttagcctgttcttgttccatcggtcatgatgaggaggcgactgtctcctctggtcaggtatcacgctatccatcaagtcgtcatgacaaatctcgtactcattcatcagctgatgtatcgattgaagacaccgacgctcagagacaactgttgagcgacgctgaccttaacatgac

SEQ ID NO: 31536 - DNA, 555 bp, Oryza sativa
atggacgacgctgccccgacgcaggagaggacgcctcctctgccgccggtgtccgccgcctcctccaagagccggcaccgccgagcttccgccgcctgcacctgctgctcgccgaagccgtgcagcgccgcggagcccgacaccgcagaccacctccgcccacgaaatccaacaggtcagatctcgccttgctttggtagtttgcccgattgcttgttgttgcaatcccgtggtcctctgctgcttttatttggagaaattcgagtccaattcttaaccaaatcgaagaaactctttgttccccttccgtgtacgagttggtcaccggtttggctttttccatgcgtagccaggaaggactcgtaatccgagctatccgctgtgcctgcaaaaacccgagtcggtctcctgcgtaaatccggcccaaaacagaaccaaccagagcaccacgtctagtcatctccctgttgaaagcagccatcgaacgggtcagaccgccgcctgaagtgttcgatccaccgatcaaattccgttgatcgccgccgtgctctacct

SEQ ID NO: 31537 - DNA, 511 bp, Oryza sativa
agggcgaattcgagctcggtacccctatacatttgtcgacaaattttctcctaaaaatttgacagatgtaattatagtacaatcataatgtaattacactgtaacttgtatgtaattacactgtaacttgcatgtaattacactgtaacttgcatgtaactttcacgtaattttgaatcgttagatctattataagatttgttctagcgaggaagaaaaaaaaatcatagcacacatatatgtgaaaggatttgttcccacgacctccattttaccgaaataacatgttacggagagatttttgaaagttacatagaagttacagtgtaattacactgtgattatactataattacatttgtcaaatttttggaggagaatttatagacaaatatatagcaaaattgtttcacatctactaaagtttctgtgttgaattaattgatgcatgtaacttaataccacaaaagtacactgcgagatcgatcgtcacaatcgcattatggattgg

SEQ ID NO: 31538 - DNA, 763 bp, Oryza sativa
ctagctgtaaacatattttaatgagataaaagatgagagagaatagcagcgggctacagatctatagccagctgcagcgcagactccaagacgtaatgtgtgcatgacaggtgggaccatatattaataatatagtaagcaattattgtatgaattggctattagattgattatatatgaattagagatagtagcgggctatactattaaacttgctctaagcttgcatcatcatatgaagcgcgcacttctacaagtttgtggacatcgttgttgtgctctaaactcatgaaaaatttaatggtgcagagatcatgcttttgagttaatatggggaacctataaaatactcaaaaatgaaactagcacacatatatatatatatatatataatgtaaaaaaaacaacatgctactgatccaatcgtttataagttggtacaactaaggctgcaatccgttacaactgtagatcgagtaataacctagcatgattttttttcttaatctaaccattttctttaaaaaaaatccctgtttgggaagacaaaaaataagtgagaagatttctgcaccctccactactgtcctagttaattaatttaagaatattttcattatatgagtgggtaaagttatacctttacatgtgtaactatttcttaattaagcataagcaactagctataagagcaggtacaatagcaggctattagccagctgtaaacatattttaatgagataaaagatgagagagaagagca

SEQ ID NO: 31539 - DNA, 542 bp, Oryza sativa
ccggagcaccctcacagcatctctctttaatatgatcaaggcaaatgatttttgtcgattcaaagaaaggcaaacgacttttatctacgaaaatattcaatgcaagaaaccatgattattttctctcccaaaacatttaatatgagaaagcattccgttaatgttttatatattgtaaacgcaaccgaacgttacttaaaaaaaccactaacatcgaattaatttcaatttagggattcaagcatatgtcatcatataaagtactccctccatcccaaaatataacaactttcccttaagatttgtcctaaaatataacaacttcttcaccaacaattctctcgccaactaatcacaaccctccaccattcacttttcccacctatctccactactcatcctatcacaaccctcccaccactcacttctacctactttcttaataactgtgtccaactttaaaactttttatattctaggatggagggagtaaatcagtatatccataaactcgcaacgttaaatggggtaccgagctcgaa

SEQ ID NO: 31540 - DNA, 1790 bp, Oryza sativa
atatatataatttttagaaatcccgtcaaacactgccactatactactctacgactcgtccgccgcatactctttactgtcattgggattgaaaaaaatccaacataactatcattgaaattcattttttactttctatgagacccaccaaccatcgacggctctgtcattgtactccaatacgacacacctgttgtctctcatttttattgtaattgagatttttaaaatcaaatatgattatcattatttttttttactttctagaagttccgccaaccgccttaactgattgcttcatgagctgcccgtcgtcctttccttttaatcgacattaggattttctatttggtgttttattaatagtttttagatgtccatcaaccgccaccactctactcctatatagatgtgttacttgattaatctcgtcatgtgttttagatggtcttttctttcaatagtctttattttttatcactaattttagttattcataaattgtattccgagttgaaatattatctttcttttttaatttcagaatttattttatttttcatattgtgtttttttatatttttatttttattttcaatttcagttgtttcaaaattgtatttctacttgaactctcttcttaatttgcctaatttcagattttattttattttttattccaaactttaattaatctactattatgttcttatatatactgttatttcaatattacttatatttaattccgaatttcagttaattctaaattatatttctactagaactcttcttttcttttctttttttctaattttgattttttattttttattctgaattttaattaatctcgtattggattcttgtatgaactcttctttcaatatttcttattttcaattctgaattttatttatttttaaattgtattcctactttaactcttcttcttttttttgctaatttcggattttattttatttttattcggaattttgattaatctcgtattagattcctacgtggactcttctttcaatattgcttatttttaattccgaatttcagctatagttttagattgtatttctacttggactcttcttttctttttctctgattaatgtgtgaatttctagtctccacagcgaacatggtgcctcctttcaaggctgttttaataatataatagaagatagattgagggttcgcaaaatattcccaagatcgttaggtctcgtgctttcaacataaagaattggcagcttgaacatgtcagtttttcacttagatgcccgtagtcttacaatataggaaaaaatacaaattacccccctccctcccacccctcccgaattgtcgcggtcgtccgaattacctccctgaaccacaaaaccggacattcttcactcccaactatgcaaaccggacgaattacccccctcaacctaatccgtggtggttttggtctacgtggcatacgcgtggtggtccagtcagcattttatttattaagaaaatgtgggacccacctatcatacactactctctcttttccctctcactctctctctctcacttctctctctcactcttcctctctctcaccgtctcccgggtcaacagcgacgagggacacggagcggcggcggcggtgagtgacgcagagtggcggcggcggggatgaggagctgggcgcggcttcccccctccctctcggatggagctcggagcaggatgcgatccgaccgcctcgccatcgtcgccttctctggcatgccgcgcgg

SEQ ID NO: 31541 - DNA, 1576 bp, Oryza sativa
gaagcccattaaggcccatcgcaaaaaccagaagcccattaaagcatcagctaatcttcccggagaggcagagacggctccacggcctccgctcgctgtcttcccggagacgcctcctcctcctcgcttctcttcccctctatcgtcgggagctgcgaccggaggcgcgccacgtgtccctctcccctccccgccgatgagctgccgcgcggcgccgtgggggcgcccgtcgctccccggcggccggccctcccccggctcggcgcggcaacgcggtccattcggtgagattcacgagcttagctcgtcgcgcctactacttctctgtactttacgctgctgtggactgcggggatgtgttgtgatgctgggttagggtttacgtcggatgcttcaaatcttacagtagatggagcagttcccgcgcgcggatgtaccatttttagaacagaagttcaaaacattgggttttgatgtttctgaactactcacaagtgatttcccaaatatgaactcaaattgatttttgagccccagagtagttacataagttgcgggagcattcgtaggacagcaccatttgttggtcaaatgtatcgcagtttccagtgatttcatattccaatttgaaagggggtgattaggttaatgtatccgtcaatctaatgggttagcactttgttcctgacaggaggtttgaatgtatggaggaattcaatcctcaacaattcatggaggcttggtggtacgccaatgaagtttggactaccatctagattgttcagactcatggcttcaagtagctcaggagatggtggtttttcacggccttcatcaactgatgaagggccaatgccaatatactcttggccggataagcaggtgattctttactgtagatatccgtagttgagaaccccctgttatttggtggttttccttttcattttctttgcgagttggttttgttttatatgtttagttgttcgccaaattctctatttcatgatgaagcataattcagtatatggaaatcccaaggggacatacttcggtacacttgattcagagcttatgacatgcattaaaatacagtgtgtagatactcacggaatatagttcaatttattataactataaatcaattggcctatactgatggtgtcttaagtgcatgttttttgactcatgagttaatttttttcatatttttgttttgtctatgcatgccaggctgtgaggataaatgtttgaggaaaagttagatttacagcgtgcttatgctataaccactatatttgtataattgtattactgaatatgccctcttccttattttcagcgtccacgagtgtgcatcttgggtggtggatttggtggcctgtacactgctcttagattagaatctcttgtatggcccaatgataagaagcctcaggtaaaatgatcatgctcttatgctggaaattccatttagatttgcagagtgctatacctgtttttatatatcttgatacataacggtcatagtggtgttcgcaatttgacaattttatcagtgactcatgtgcactcg

SEQ ID NO: 31542 - DNA, 2363 bp, Oryza sativa
gcacataagttccttttttgaatagctgaatgaattaaatattgtaatgttaaaatgaatttaaaataatattgtaagaaattcatatatagaaaatttttagtaccgattacagctcgaaaaatatgcacattcatccgatccatctttaattaatcggaaaagttatcgtgcaagtattttgtgcttgccagggctctaaggagcagataaagaaaagttttggcgatagtgatatgttaatatgatactgtcaactataaacaatggtttagacagcgtggttttcatggactaattcgcttcttttataaaagctttgattggtgatgacacgggtgggaaatcgattaaaaatcagcaaagaaacggattgccactttctcatgctcctctgactcgcatgctcctagtgatcccaaatgccatgcctacttgattgcatagatgttttattatgcttgaagcatactggagtctggatgcacctttactttaagaaaaatcaatggctgaattattatatatacagttgctcaaaaggtattagaagagtttgtgagtgatcaataactggtatctttaattttcaagtggatttaattacgcctagcaaagagctgatcattttagactttatcgacattaaccacatcacaagttgcatctccttttattggggtgaaaatgaaacagtagtagtagatatcactgtgcagttgaaacggtaataggtcagctctttggctatcctctcgggtcaactggaaaatttctgaattttgacaaaatctcgaatgcgaacatcacaaaattcagtggcaagcatcgattcattgacatgcaaagattgaaaagttcagagtgtgaagactctgaagttcttgagcttgttgtgctaaataaaaatgtccactctaccttgtgtcgtaatttccagcttttctgtaatcctctgatgcatccttttttttattcagactacgagatcacaaaaaacttctgctagaaggcatctgggaaatgttatttaagtttgtggtttgaaaaagcaattgtttgtatttcagtgaacttcttggaaacgtttttttgcttgtttagactgaactctgaatatactacgtggcaaatattagagccaattgcatgctgatcaatttaatctgaggaaaaaaaaaagaagtatgcatgttgactaaacatttttatgttctagctgtcttacaagaacaggtattccttgtcctagaacgccactaacacggggtaaattcattgacgggtaagcttgtactgaaaacgctgacaaaatagaacgttctttaggcagttttgcagtaccatgccgctgacgaacgaagacctcttcaagagaatttcccttccgtggtttgatgcactctaaatataaactacaactctttctgaatttttctcattcactgtttcaaacaaattattaacctgaaaaaaatatcgtgaaaatttagaaagagttaattttcacgatattttttcagctggtggtgagcaagttgcttcaccatagcggtgagcaaaaagaacacgaacttgtcaagatcatgtctgtcccttcgccgtttgtcaggcaaggaaaatctgtagctactgatcatcctcaacagatgtctgctctcctaaacaccgaaaaaacgaatccaaattgctgcagaattaaattcgccggcgccgtgtctggcctttaatttgcttccttgcacgtagcagacgatttcgctcgagtcggcaaaggaaagttcttcgcgcgcctaactgaaaccaaccccatcgtcgtgaattcacgatcgcgtagtgcgtgtcgtgagcgtgtgaaacggcttagttttttcagctcggaaacggaccaatcgcctttgacgtgtcgttgtctgtctcgatctctctcttgtttggtgtttctgaacttgtgctccctgcattgacaagtctattttgactggaaagacgctaaccgctcgaggaagcatcaagcatggctgcatgggttgtgactagaatactagtatgaggagcataaaatatttatcatcggttttgcgaatatttgacgtgtgaagaaatcaacgacaattgcacatgcacacatacaaatcatgtcaaatactcgaccgattttgggggccttcatatcttcttacatgatttgtgctccatgacctctttcttctattatctaaaaaaaatgacctctttctctactccggtggtgaattaccatctgattaggttttgggtttaagtaggagagggttgtgaattgggttgatgggaggtgtttctcggcttaaagggatggcgaggaaatggtggcgtcacct

SEQ ID NO: 31543 - DNA, 1303 bp, Oryza sativa
ttgggttgaaaatgttactacttttttctataaacttagttaaactttaaacagtttgactttgaccaaaatcaaaacgtgttataacctaaaacggagggagtaggagtttctttcaaagagtacatgggcgataccacaagggaaagataagtttcatgtaggtgactatgcaagtaaaatcatttctcacataatttctcttgtgctcgatgtagctacattatcactatttcaaaggtgatcgtaaatagtatccaactattggagtataagtgaattgtccatctttcttcatcaacttaggctgttggagtataagtgaattgtctatttttcttcatcaatttagccacatgatcacaattaatcagtgcatataacttcatatggtatgaaagccacatatcttgagcttgttggacagttggagtatatattcattcctgcctttcctcatcagcaaacactctcactcatcagtttatactctcatgatctgcttgttagcttattaatagcagccaaaaatatttagcatttaattttggatgtgattttgggatgttttcgttgtagtttatttccaagcattgagttttaaaccgctaagaatagaaatataaatattttatctttgttggctcgtttatttttatatggattatcagttggagctcaaatgatcatatgcttaattttttggttgaattggttgctgtatgcaactcaatattaacaatattttagaagtaactataaaacatttttcctactgggtatcatcctcttctgcagcatgtagtgttttttcctggtaaaacaggcacgccgcagtccaataatttaagcatttgcgtggatgcacaatctaactttagaacaaacgtccgatatgctggactgcgacaatgatcaagcgcacattagcaaataattaaccatttgtcattttatatttcttctattatgtatagccatataaactatatctaaaaaaaattcacataaagtacatgtgtatgataatacggtcaagctcgagaaagagaaggaaaccaaacaccaaaaacaaaaatgttcggcacattttacatggtttcaactttcaaataagttttacaaaattatttccaagaaaagaaaaaataagaagaaaaatgaaaaaaccaccacctcttgtatggacaatggcgagcaatgaagctaccgatcgccatggatttccttcaccctttggtcccaagcttcgccatgccgccatggccgtggtaccacgagcttcctctgagccctctcgcca

SEQ ID NO: 31544 - DNA, 681 bp, Oryza sativa
gctagcagaattggacagttcggcctcaaaatttgatacctttgggtttagatttcggacattgccgattaggaagatcccctgagctgatattccgtgcgtgggctttagatcttcagagtgggatggcaattttgagctcaacgttgaggtctttggggaggaagagagtaacagcatgtaggtgtgcatccgaggatatggggctatggagggggtgaggtgagcgcgttttgcattcgatcttcacatactgttatgatccatatttgaacttacggggtgtacttctgctaagaatgcacatattgcgagatgagggcctttgtattatggattatatagtcttggatctaagtacgaatcttaggtctagtcttgcatgccgagtgcttggttggtgaattggaaggtttgcattatgtatttaatgtgtgcaatagatttcgaaaattaatgttttgggatctattgcacacattaaatacataatgatggttgatgaggaagctggatagttaccaattatcattaattattttctgagcttatggtagctcagctgatagtattatttatttcctatttggcattgtgtaagggctttacatcatttggggcgtttaaacaataggtgcctgcataaagataatgtattgcattcaatctgctttgcttttg

SEQ ID NO: 31545 - DNA, 699 bp, Oryza sativa
gttactgatcttgaatgacctcgtgtgtacagccaacaggaagcaaaccgaacaggcgagtccggacttgacgctggagttcggcggtggcgctgaagcaggagaacgcgttcgtgacggtgcagcagcggacgctgtgcctggcgatcgtggcgacaacggagcagcagccggtgtccatcctcgggaacctttgtcgccgccgactgcgcggggagcggcggccggcggaggagacgagcggcgggcaggcgcgctgcgggagcgggacggggagagcgaggacgccgccgccgtcgtcgtccatggccgcagatctcgcgcccgcgctgtcagcggcgtcgccggcgggagtatgtgattgcggggcagcggcgggcggagcaggcgatggcgggcggagcgggcacgacgacgaagacagcttcttcccgcgtcggcgccgccggccgcctctcccttctcaagcgtcgcagccgccgccgcctcccttatcccgtatcgtcgtcgccgccgcctcccgggcttctccgatggtccgacctccgaggtcgcacgcgccgccgctggacctcctccccaacgccagccgccctgcagagaggagagaaatgagagagatcaggaagggagagaagaggggaggagagagaagacctggcactctgacatgtggggctcacgtagatcccaagctga

SEQ ID NO: 31546 - DNA, 606 bp, Oryza sativa
ccccaatgacgatattgagaaagtgatcctacttcaaggaacccaaatatgccattggagaataattgtgacgaactagtgtagtggcaaagtagtctagtacagcagacatattaattagctgtgactgccagtaatcctatatatctgcaccactagcagcgattagtgctattttctcctgtgtaatgaaaccacatcatctatgttttacacagccggaggtctccatctagtaatacaataagattagctctagtcgtttctagcatgatcactgatcacattgttccatgtccagataaaatttttaccagtctggacaaatttagctgctataaaagttgggagttggtgctggtgggccatctaaccctctttcacctcactaaaaaaaaagccgcagaaagaaaacgttgctcttgttccaacaactccctctcttaaaaatttgaccagagtaccagacatggcatcatagctcacactcacggtgtaggatgagcattgcagggtcggtgcaatgctgacatagggtaaagctcagttgatgcagtggattactatgagattcaaactgtagcaaagcatgtgtattcaaactgt

SEQ ID NO: 31547 - DNA, 689 bp, Oryza sativa
aatgatctaatggcgtatattgatttgaccttccacttaactagcttgcagtataaaatctgaaagggtagacttgtctttctgtgtggtggtccggatccgatgccgccaagggctctcaccgcgccattagagcaggtacaatagcaggctattagccagttataaacatattttaatgagataaacgatgagagagaagagcagcaggctacagatttataaccagctagctgcaacacggactccaagacataatatatgtatgacaggtgggatcgtatattaatagtatagtaagcaactattgtatgaattggctattagattagctatagatgaattagagatagcagtgggctatactattgaactttgctcttatagcgctatcgggcgcattgcacgcacacggcgtggatgcgcgacgttccgcggcagcgtcgaagacaacttgaatggcacctgaccggctggtgtgcgggtcagcgggtgaactaaaatgtgcttgcatgcacaacaagccatagcaccaccatatgagaatgattaattttggtattgggttgtgttagtagtccaaactataaggtctatttcttatctgggctgcaaaagtgaaatgaaactggatttgtgtttgctactgtctctcacgagcgtaagttaaggggcttgttggatgccca

SEQ ID NO: 31548 - DNA, 637 bp, Oryza sativa
taagaaaaatgtgattgcattgccattaaaatacagtatgaacctagactatctgccatcggattgacagattgaacaaacatcattagaaatcttggttttatgaaaattataaaagccacagtaacagctgccacaactttgcaagattaacagccatcctcatgttgttgttgttgttgttgttgttgttgttgttgttgttgttgttgttgttgttgttgatgtagtccatgctgctcatctgctatcaccatagttagctgctgcgcctgcggcttctcagccgcaatagactgcataatcgaccgccgcaacacccgcctccgccatcgtcgtttttatttgtagctacctccataattgaccgcctcagcgcctacctaggcccaagctgcagtcgcctgctgctgctactgcccaagccgctgcaaacccgaccgctgttgcgcgtgcctccgcagtccgtcacccaagccgccaccgccgcctgctcgatttgctaccggctaaaatacatatcctgtaactcttccatcgccatcttgtaccttattatgaccgatctatccgataatttgctctcgatttaaaagaacaggtaataaggggatttgggatctaggtttcctcaaag

SEQ ID NO: 31549 - DNA, 668 bp, Oryza sativa
ttcgaagaatcatcaaagaggaaacttggactgagactgcagtagggagacgaatttgcgtacaaccattagttcgcaagaacaatcctggacgagatcgagatagagatagtcaggcagatagatatcggtagaatttccagatttctgaagaatgggtctcagaatcagaaactgcttggttctgattgttaacctatcaggtggttttcatgacagtgatgtgtcataataacaaagaacgggtgtactgacatcagttgttgacatactgtgagtctgtgatgactcggccaaaaaattaaaaacgattatcattggccgtttgttttaatttacgctggaaacagattaacagagcagtatttttcgggaacgcaggaaacagagcagtagagcaccatcaggcatcaacatcacaacgtcagctgcaaaattgaatagtggtttcgtctcacattacgtacaggtatatggcgatcagtcgatcacaaaaaaaaagcatattattttgaagtcgatagctcgcgcaacacataactaattaaagaacaaagcatggatcagtgtcgcagtaatccaaaagttgaaatcctcagacagagaaaaatgaaagcagacagagaattcacatgtcaagatcctgaggaactgagctcgacaaatct

SEQ ID NO: 31550 - DNA, 1258 bp, Oryza sativa
agggatttgatttgggaaggatttggattcgggattgaacttgacgatagatcggggatttgagatctgagatggcacagacactagacaacaagcaaagaacagatttcgcaattaggtttttttttaagagatagttttcccgctaggcgccacgatggaacgggcgctacattccgtctcccctctcctcctagagggtcttgtatttatacccataggtgtccccttgtccaagctagtagaactaaggaaaccatatggatacaatccgagtagtccttgtcgtttccatgtagaactctattcatccttccttatgcggaactcctcctatatccgaaggttgtttccgtagaagacatggtatgtggtgggtcctgccgagatttagtcaactactattaggtatatggtatccataactctgacacacatgttgaagaaagatgatactcgaatggaaaatcttgattgcctttttccctatatctcactacttttatgcaattcatattcaaaagtaatgggtatggatttccacgatgctactaacaaaataacaaataatatatcacattttgcttctgaataaagcatgtcgtttcagatgagctattatatattcgtattctttggttaagaactatataacttatttttattctacatatattaactagtagaatttcccgggcaattttttatgtagctatagattttatattcaaaatacaactggatttgacatgcaaatattgcttatattttcacaaatacagtagtagtatccaactatattgattagccgttataatctagatctatcattatcaaatagtgcatatttttcttcttttccttctactaagcgttaatttctggacctagagtaaaagtgtggtggttacttttcttcctatcttaataatatacgatagatacaacaatatagcgttgtcatgtgataaacattagagccgtaactagggcttgaaattagttgaatgggttataccataaggaacctaccaaccaatgactggtttttgttcaatttgttttactagtagtatttaattttataagtaacgaaaaaaatcaaattaaaccgtagctagttaacgtatatttagagttaaatttgttaatttcgttgcaagatatagaagttgaatttttacttgcatgtttgtggagtgatatatcacatgttaatacatcatctcaaattttttcaaatttttcataaccattt

SEQ ID NO: 31551 - DNA, 1273 bp, Oryza sativa
aaagtcaaactattttaaatttgaccaagtttgtaggaaaaagaacattttcaaccaaagacaaatttattatgaaaatatatatttaattatttatttgatgaaatcaatttagtattataaatattactatatttatctgtaaaattagccaaacttaaaacagtttgactttgattaaagtcaaaacgtattataacctgaaatggagggagtagaaaaaatagtaggcgtcgggaaacagtagtgggtgtgtgcttttaggtcttgatcgaaagtgcttcctcgtaggtaaaaccattcaatctgagcgtagctttattcgattgatctttctttttagttgttactaaaacaacttttgtagactcttcttaccttagactcttatgtgttgttcatattgatggcatttcaaaccacatcattttctttaaagttttagtaacaagatttattttggctacaatttaaacaacccctcagctctaaactgtatatgaatcgaattaggagaaactgtatatggattagataaccggtatagttggtctaacattttttttaagtctgaacaaaacccactataacatatcgtcaataatctatctattatattattaaaacagccttgaaaggaggcaccacgttcgctgtggaggctagaaattcccacattaatcgagaaaaagaagaaaagaatagtccaagtagaaataatatttaaaaatagctgaaattcggaattaaaaataagcaatatagaaagaagtttccaaataagaatccaatacgagattaatcaaaattcgaaataaaaataaaattaaatccaaaaatagaaaaggaaaggagaatccaagtaggaatacaatttaaaaatagctggaattcggaattaaaaataatgaatattgaaagaagtttccatataagaacccaatatgagattaatcaaaattcaaaataaaaaaaataaaatccaaaattagaaaaggaaatgagagtccaagtaggaatacaatttaaaaatagctgaaattcggtattaaaaataaggaatattaaaagaagagttcatataagaacccaatacgagattaattaaaatttggaataaaaataaataaatccaaaattagcaaaagaaaataaaataagagttcaagtaggaatacaatttaaaattagtttaaattcggaattaaaaataagcaatattgaacgaagaatccacgtaagaacccaatacgagattaattaaaatttagaa

SEQ ID NO: 31552 - DNA, 1372 bp, Oryza sativa
tatagttgtgtatagcttcggagtgtggctaaagtcaactactcttctgtttgcatgtcaccttgaccacctattatctttttctcatgtcttaattacacgcagaatgccgaatatgcaatataataattagatcatgctgcaatgcgaatatgcacttgttaatttgtgtgttttggttatctttgtcacgttttcttgttgacttgggtgcacgaatcaatttagctcagctctactttgaaaataggggattttatagccagctgaagtgcgatttactcagaaataaagaacttgtgtggatggtaagaactttcacatttaatttctagtacttgtgtacttatgttgaacttctttccataatctaaagaaccgctgtcaaggttgtcattattttaaggcgtgaagattggtggttcggctgagattaatttttggcggcacccgaaatgatataatacattagcgcatgtatcaagcgttaactattactccctccgtttctaaacatttcatgtcgtcgacttttttaaatatgtttgactgtttattttattaaaaaaatttaagtaattattaatttttttcctatcatttgattcattgttaaatatacttatatgtatacatatagttttacatatttcacaaaagtttttgaataagacgaacggtcaaatatgtgctaaaaaatcaacggtgtcaaacatttagaaacagagggagtataaatttaaaaatagctttatttgatttcttaaaaaaaacttttacatacaaaatttttacacaaaacacttggagaataaggaagtagccattcggaacagttaattgttacaatacatagtaatagtctgctaatatattgttctatgagtgattttccaggtgttgattaggtaccagaagttaaccatatttcttgtacaatataataatgtcttacttccttaatgaccgtaaaatttcttttgtcatgtactttagccttttttttatgatacataaaagttttgcgcatctttatattgagcattgggagaataccaattcaaaatataagagcaatattgatatggtctccgaattatcctttttaatagagggagtatggtctccctattccgtttgcttgtaatgtaaactcaagaattcctttaaccggtcgatcgggagagatcatcgaggttagttcgagttttctgcacctactattagaaatgtgttaaatcaggggtagttgaattttcgctttaaaactaaaggtcagaggcggcaccaagtggatcagttgcaaatcacatacttttttcgtcaaggcccctaccatattatccttacatgccaagggatgagatcacga

SEQ ID NO: 31553 - DNA, 1269 bp, Oryza sativa
  unsure (1)..(1269): unsure at all n locations
aattggttacaatgcaagaatcgaccttttgagattcaaaacatagcactgatatcgggatgtagattttaaaggatgtactcttgttttagcgccatatcgtctagaaaatcatcaaaaacatttagagagaatgacaaaatatataaatatgtggtatattatgtattccactaacatatgtaagtttaaatatgacttgcataaatataatacaaacacatcgttaattttttttacatgtacaagttaaatttaaatttggatgtttctgaagtgatatatcttcattgatctatactgttaatttgtactacctccatcccaaaatagctaaaaatacgtatattttgagatagatggagtatattgttaaaaggactttttaatgactttttcgatgacatgtaaaaaacgaggggacgttctcgagtgccaaatagactttccacttgtccaagtaatgaaccagtgaattaagtcttgcactaaacatgttggaaatgaaattcttngggggcatacattgtcagttgtcaaaactgttgaatcaatgtgatggttacttattcagaaanaaaacgaacggttccacatgaatgtactctttgtactttctagctgatttggttccacataaatccattcgatcaagtgccaataagtcaaacctgatctaatatgcaaataacttcgagcatgtattaggtgtactccatacatataaaatcatgacaacttaaaccaaaattcatataggagctgacatgtcagaagttattggccctatattttgataaggtacttcgttctctattcttctagataccatactatcttatgggtacattcaaggttaggttgtgcagcttaatcgaattaaacatcacacgacacacgtaccatacacgcagtgcagggagtacttcccctgttacatcgagattagctccttttgaaaagcacttcgatcgacggacaattattttgtcaatcaccatcagcaacctacatatatagtggtagtagtatagcaagctaggcatgcagtttaatttcgtcaatgtccattctgatataccttcaaagttcaccataatcatatcgctaagcggtaacatcacttcctgatatgctcgtcccttgttttcacctacagtacaatgaacctaggctttttattttttatgtatatataatatatgctcaacaatggctaagttgcgatgatcacttgacatggatcccaagatatatatctatccagta

SEQ ID NO: 31554 - DNA, 625 bp, Oryza sativa
tgggaagtagttatctagtgcacattatcatccagaagaccaattttaaacatataattacatattgcaacagttgcagttataacagattttttttctctatataattgtcaacaaccatagccagacgaagtgtacattacagattttgtactcaccagataaaataaacggtatactagtacttataaaatatcatttcaaagttacaataaaatgtaatatgcgaacatccatactgattcctgcagatcagaggatgtgtattctgaatagatcctttactgccagtgcccccttgcattgttccaattctttaagagaaaatcgagcatgatccggcataagttgaacacctttgtgctacggcgtttgtcaatcacagaagccgtacaagctgcggcaatggcccccggccggccactcgacgacgagtttaacttcactggtgagtggtcccctgaggacgcctaagcggcgaacccagaaaaatttatgttgggcgtaatatgaagggctaatgaattaatttggcaacggactagctgacattgtaatatccaaaaacaccgccgctgcttagcgcctcaaacatcaaataatggggtgtttcgtttgtgcaggg

SEQ ID NO: 31555 - DNA, 998 bp, Oryza sativa
gcctcccttctttattgtcattgagattttaaaatcgaacatgattatcattgcttttttttactttttggaagttccgaacctttaaaacttgaacttgtagtttcattttttataatttttagaagtcccatcaaacgatgccactatgcccctctatagcccgtccgccgccaactatttatcgtcattgtgattctaaaaatcgaacataactatcgttggaattcattttctattttctagaagtcccgtcaaccgttggcggctctgcaactatactcttaacaccgcgcccgctgcttctcctttttattgtcattgagattttaaaaatcgaataaaattatcaatggggattattttttttactttctagaagtcctggcaaccgccttacttatttgtttgcttcttggcctgcctgacgtccctccttttaatcgtcattaggattccatttggtgttttattaataattttatatgtcgtatcaaccgccaccactctactcctttataggcttgttacttaatttatctcgtcatgtgttttagatggtcttttctttcaatagtcttcatttttctcacaaattttagttatttataaattgtattcctaattgaaatcttatttttctttttctaatttcagaatttatttttaaaaaaaatttagttaataccttattgtgttcatttaatgattttattttttattttcaatttcagttgtttcaaaattgtattcctacttgaactctcttttaatttttctaattttggatattattttattttttattcgaaattttaattaatctcgtattgggttcttatatagattcttctttcaatattgcttatttaattccgaatttcagctaattttaaattgtattcctacttgaactcttattttattttcttttgctaatttcggatttatttatatttttattccgtattttaattaatctcgtattgggttcatat

SEQ ID NO: 31556 - DNA, 736 bp, Oryza sativa
tcttaaattactcatccgatttataatccgattacaccgttgtgttcgtaacaataaaatccgagttaatccgatttagagaagctttacaacaagatctcacatgattatattttgatgaaaaataacaaattacttttatgatatgtctaaattacttctagatttcactaagttacttcttagacatataaaagtaaattcagtaaagcttaaaagtaatttacatatattatagaagtaacttactgttaacagtgaaatttggtaagcccggagtagtcatcggcttagagttagcatcggcttcgaagtcctgagattagtcgatgagatttgtcaagtcgtcaattgtcggattcttgctatattcggttaagaaaattgaattacaacaaaaagaattaaagtaactttaatttagaactatatctagattcattaacatctatatgaatgtgggtaatgctaaaatgacttacattataaaacgggaggagtaactctctgtagtagaaattattatattgtgagtgagctgaaataagaaattatgtagagtaaattcacaagtaaagtgtagagaagatttataaagtccacaaaatatagaattaactaaaaacaataataaaaataatcaacttagagcattatgaatgtatagaagtaatttagtcaaatttaaaagtaacttatatacgtgataaaagtaactacgtatataataaaagta

SEQ ID NO: 31557 - DNA, 536 bp, Oryza sativa
gccgtgaccgatgcttcttgctgagttgcttgctatgtttgcttcttatacgtggacgtgttgtgtggatgtgtctttgttgcgtttactgtagccacaggtttttgtgtgtgtgtgttactaccacggctggactctccctgcaggcagcatccatcgctgttgcacttttgagcggtagttcttccttgcaatgcaggcgcgtctagattcattgcaaagttggactgatcttatttttcctgctattcgtgacgagacagatcagcacgacgcatacggcaaaaaaatggctgctctaattttggcattttagaagatgcgccgtgattttcaggagagagtgatgcgcgtggcgggctatttcttccattccagcagtagctagtaggcgccagatcattcgtgtgatatggcaaacgcaacagttcacacgtagccgactatccttctatggataaacacattgcctatatgcgacacggcgctaatgcagtatcaagttgccatggtggcatacttgcctttcccaaccc

SEQ ID NO: 31558 - DNA, 616 bp, Oryza sativa
cgattcaaacaaggttttcaagatgaagacagcaataggaatgctgaattgtcaaatgcagatggagcatcatcccttggagaggctgtggcatcataacttggacagaattgtaggtgtatatcgcatgtttgctgaacagattattaatatttctgaggcatgagaagctgtataaaggtgttcatatgccaagttatggctattttgctagattgcgatttccacttcgcgcaggcgttcaatctgttgaatctgccgataactagtggttcagttcatgaattttcagaaatttacttgacgatttgatctctgttcctgtaaggctgtaacctagcactagggcatgagaagttgtataaaggtgttcgtggtttttctgaaatctgcttgacgatttgttctctgttcctgtaacccatcactagcgtatgatgagtagtagtctcccgtgctcatagcttggaaagcctgagcctctcgccctctccctgagagtttacctgtagtacttgttaacgttttgataacatcttgcaatctagttctcctgtccctttttttttttcctgaaatgtaccagaaagttatcttgcattttcgttctttgggg

SEQ ID NO: 31559 - DNA, 767 bp, Oryza sativa
caaattaagaagcgattatatcccataaccaaataaacctggttgttcattagttttctcaaaatctcggtatatggcgatgattagttttcttgagactcgttagtttactcctatatactccatgcgagctgcgtcacatgcatgcagatgcaagtggagcgagcccccataatccttctagaaggtcttggtcattggacctgagccaaagaccaacaacactgacaggtgggaatcttttcggatcaacatgaggatgttagtactatattttggaggggcttcaggcttttcttttgtttttaaggtttttttaattcatggggcaatcttcttttggtgtttatatatagcaagttgatctttttatgtgtgatcatggacaatcggacataaacaatcgtgtcattcatcatcacgtacagtatgcattaatcgtacgtatagtactagtacagtagcagttacgattgcttcatctgtaaacaaaggtgtgctaggtgcattatggctgaagaaagcttgttacaactactaataacgaaatgacagcatggacatgctcaattagcaacctactacacgtacgttacacgacgtagcatcaagcaccactcatatatgtactaatacacccatgcgtgtcgtttcatcgtgacaccacactctctggcagtgtaaatccgcgagaagctcacaaaattctcacgcactgaatttaattaaatacataaacatcagcatggaaacgttctattttaaat

SEQ ID NO: 31560 - DNA, 1690 bp, Oryza sativa
actaatataatttttagaacaactttcctatagaaaatatttgcaaaacacatatcatttaaccgttcgagaaatgtgtctgtgaaaaacgagtgagtagaagatcccaacctacagagccaaatagtctaacagatgattggtagggtaagaattgttaacctttttaagtctatacaaggatgatgagtgtataaggagaaaaaaaagagcatcttacgaatgggaaaatatacatgcggtgtttaattgaatggaggacatgcatgcagcatttaatttcgtcgtgtcgttaataatagcgagagcaacccacgtacatgtatgcaaccaagtagcttacggtcgaagttttatttctccttggttttagtaataaaatatctaattattctaggagagagtaagtgggtcgctaaaatgctagactttgtaactctattcatacccttatcttttttagcggggaaatgtaaaatggatagcctcactgaatttgatgaaatatgcacgccattaacacccactagcttgcgtgttcaatctatgttctttctgacacgttcaggttgaagtatataggtcatgcgcatatttattttacacatcgaaaggccaattctagacgaacttggtttttttttttttttgaaacttagttgtctgcactataaactcgggagacgagcgtagacgaagagtacaagtgtagacgtacgttgtgatcaagtattgagtgtatttgagtagctagcaaataaccaagtatttggtcgatgatcaattcgctgttcccttggcaagagatatttaattaatcagctaactccacacaaaatgtcttaagcaactaagcaataagactgagtgactgactaactactactccgtactacttaatttaccaattggcatatagaataccgatgactcgacatggattgctccatattataacctgtacatgtgaccatccttacgtactgtacatacattagcatccgtatgtgatcatagtcgcagagatataaatcgtgacgtcgatagaaaacaaggcatcggtccatccatggccatcccctaactgtggcagacagctcatatagtgcctgcatgcacgagctacatctacatcaagtatagtagtattcttaactcatggtggtaatttgattttctttattaatatgaacatttttttatttggggagtttctaaatttcagttgttttaattttatttctggaatacgcaaatagcgtgtatatatctttatactagggttgataatttgttttttttattaacgtgaacattttaaatttggggagtttctaaatttcaactgttttaattcttttctataatttgtaaagcgcatacctttgtactagggttgagtacttgagtatatcgctttacacacttggctgtattcttttggaacccctccccaccacacggaaaacagagcgataaattaacacgtgcttaattaagtattagctataaaaatttgaaaaatggattgatatgatttttaaagcaactttcttatataaactttttcaaaacatgtgccgtttagcagtttgaaaagcgtgcatatgaaaaaatgatagagataggttgggaagccataagaaataacacagctcaagagcattagatatgtacagacagaacacaa

SEQ ID NO: 31561 - DNA, 1123 bp, Oryza sativa
ggaggcaacggcccgacagtgggaggtagacacgagttggaggtgaggcatcggcggccacatcgaagccacggagatggaggaggatgatgggttggccttgatgacgggggcaaaccagagcttatggttaggagacgatgattagtggtgacggatccaacggcgaggagctgccgaagacggggaagacaacgagacagggacacttgcgccgccgacttgggaagagaggtgggagggggagaaggcccgggatgaagggggagttgccggcacagttgacttcattcggccaaccggcaaggccgggctgcggcacatggggctgaggcagaggcatcgcatgcatgcaagcttgcgagtggcagcggttgcgctgggaatgacaatagaagaaatgaggggttagggttagaaatatggtgcacgattcttaatatgatccaatggtttaggatttgcatgatttgtaaggtgtttttccgtcaaatagcatataaacattctcaaaacaaaaggatgatatactatttttatttatactttatccatttttaaataacgacattttcctccaattcgtttgtttcaaaatatttttatcaccaccacacttttattagcagaattttaattttgaccctactctccgtagctatacttgtgaacataaatcaatcttcaccatagagcaaacttctaggtgcttctattttggatccatttcttgccctccacctccactttatccattctttaaaatcatctccaaataactaccaatgacaatttggttataaattttgttaccatgatctacgtgttttggtgaaaatttctacagtatgttattcgaaaacagagggagtactcaataattactactacctttatttgtaaatataaatatttctaggttattggacagatattaaggtagacaagaaaagatagaaatcccacaataaataaatgatggataggtagggtgtatgggtaggtgggagtgagagatgtgaagaaatttgaacgggaaataataatttataggacaagtagtatgtactccctagaatagtgtgctagatattcttatattttgaaaccagattcaaacgtt

SEQ ID NO: 31562 - DNA, 532 bp, Oryza sativa
tagtgttccaagtgaacatatttttatccaaatgtacatcaatatacacactttaaagtaaggcaagcaaattaattacagaaatgaaaacatcaacagccatcccaaaaggaaaacgccttcatatcagtatatccatcataacacactcaaagtcatgtctgaatataaaaaagtatctcatcaaatggatccaaaaaaacaccaaatttatcactcaaacagccaccacaacactctcggtgccacatatccgccaaggtagcactcctcgtggcaagattttttctcaaacgcacaaacaaccgctcgtggaatcacagacagggcaaattgccagcgataaaaccacacaaccatcggggagccatccacgaaggccccatttttctcaactaccacacgaacttaggtactaaccaacggaccttcctagatccctcccataataggatcccaactgaggggaatcgggcaaagaacttccttacctaagaccggagatggaattcgccgagctagacaccggcgg

SEQ ID NO: 31563 - DNA, 521 bp, Oryza sativa
agcaaataaagaagatgacataaggggtagcaactggtgtgaattttaaaaactatataattagaaacatgaggatgataaggtttggtctctcaaagtcttaagacaatgagatagctatttaataaattttaagtaaaatcatacttaaaaaaatatatgattttgtttgggtgctagccgcgcaattgggtgggccacccagctgatgggcatcaatcccagggatttccgtgagttttttatgccaaccaaaaacactaaccattcaaaaatcagagttttttttaccgctttgttagctgatatttgctcggtgctttggaccacaagaaacaacatgatatttagatcgaaattggtttatttcccaccaatattaactttacaaatcatttttaatttggtgcactgaaaagttctttatcgcgctgaggaggtcgagatgatagacctgatgactgataagatgaaaagggtgatctcactgctttgagagatcagagaactgggattggcta

SEQ ID NO: 31564 - DNA, 579 bp, Oryza sativa
atttttatttgtaacgtgaaccaaacacactcttaaatgggtgatgcaatgatgcatgtggagcaatttgcttccgtaaattctgaacaaaataattgcgtgtatgtgatcaagccacggtaacgtagaatacagggaaaggaaagtaggtgacgggcaaggggcagcaaatatctgtctgccatattgccttcgatgtgtcaggtcagcccgatgacacgtacgcatatgcacatacgatcgcgtacgacgcagttcaagaatcagcagttgatagagttgtttattttgataatattatattactatctagtgtaaaaagattacaaagattcaacaatataaatctatttgcttacttaatattagttttaatttttttatcgaaattgctacaaatagaattactgaggttgttcaaaaagtaattagcccaactcaaactttcatacctgagaaaaatatcatggaaatcttacaacaaaggctggaaaataattgataaaaacttagtagttaaatgattattacatatcatatcacgtttcttttggcaaggagatgaacataaaaagaaat

SEQ ID NO: 31565 - DNA, 727 bp, Oryza sativa
gatcaagaatcatgttgaggttctttttaccatcagaaatctttgcaaagaacttttcaaatagggaaaacctcctgagtaagaatagcacaatttttgcaagcatccaaaagacctttttgttttctacaagttgagcaagaaaacacctcatcttgtttaacaatttcctccatgtgtttaacacgccctaaagcatctttcaacttcatctcattcaaaacacactttgaacaatcttcagaaatcaaaacaccattgttttgttttgccttatttgcacatgaagcattcgccaaagaacttgcacaaaaagcaactttgtattttttcaaaacattctttgtcaaaatcaactcatcaacaacacaagcatgtaaagcaaacccaagagcaaaagaagattccaattttttagatttttcaatctcaaattctaattttttgcaattaacagaattgacatctcgcaaagcattaatttcagaaaataaaacttcacaagactgacaattatcatcatcaggaatcgaagattttaatctatcaatttcagcatttaaaatctcaatagtgtgatccttctcatcaagcacaatagaacatgtttaaagtttttttagcaaatttgtaagcagcaagttctaattgatcataactatgcttttcttcattatcatcatcagattcatcaacatgagaactttcattacgagcaataaaagct

SEQ ID NO: 31566 - DNA, 541 bp, Oryza sativa
gatcccccaaaaaaaagttaatgtatggtttatttttaaaatttattgaagaagtttactataaatttcaaaaaaaaaatcttcaataaattttaaaaataatggaaataaatcattatttttaaaatttataaatggctatttcccatcgcaagtttccctataaatctctaccagtttactataaatctccattatttcaataaatttatagaaatttatagggaaatggctattatttttaaaacatctctaccagttaccatgcatttcaaggaactccatgctcccctacagcctttcacggggcagctttcgttggtgagcgtagcacggtagcagcgccgcacgttgacagccagtgtgatgagtgggggtagcagcagcaactgcgtgggagtaatagtgcgagcaaggccggcgatgccgagacgaaaagcagggggaggaatcttaaatgaagcttctggcccaacgagcgtagctcggattttgagtctgggaaagcgtatgggtcacatagagagaaggagagaggggc

SEQ ID NO: 31567 - DNA, 656 bp, Oryza sativa
tatgaaggtagtgaagttagggtttagagtttttgattgtggtagggttggaggttggtaggggagggcaaagaagagggacatcgccatgcttaaagagatgtcggaggcaacggcccgacagtgggaggtagacacgagttggaggtgaggcatcggcggccacatcgaagccacggagatggaggaggatgatgggttggccttgatgacgggggcaaaccagagcttatggttaggagacgatgattagtggtgacggatccaacggcgaggagctgccgaagacggggaagacaacgagacagggacacttgcgccgccgacttgggaagagaggtgggagggggagaaggcccgggatgaagggggagttgccggcacagttgacttcattcggccaaccggcaaggccgggctgcggcacatggggctgaggcagaggcatcgcatgcatgcaagcttgcgagtggcagcggttgcgctgggaatgacaatagaagaaatgaggggttagggttagaaatatggtgcacgattcttaatatgatccaatggtttaggatttgcatgatttgtaaggtgtttttccgtcaaatagatataaacattctcaaaacaaaaggatgatatactatttttatttatactttata

SEQ ID NO: 31568 - DNA, 722 bp, Oryza sativa
tgcagtagttcatataggcgccctgtagattgagatggagggagtaactttatcatacggctcttatcctagcttgctgtcgtgaccaaagccaatgacaggttgactttccgttgaaacatgacaccgatctagtcccagggtgacattgaccttaggctccatgtgtccatgtcattgatccgtatatatcagactctccgagctgttccattacttcgtcgccgtgtctaactaaccacgttgcaccggcccgtggtatgtatggccaatcccctcacaagcaacgacggcgttttccaggaccatatctgatgggagatgtgctgcgagctcaggccaccgcgtcggcggaggaggtggccggcggcgtctggccctgcgagctcgacgaccacctcataggcgagctcctcggtgacgacggcctgttcgtcccggccgccgaacaccccaccctctactactcgttcggcgcggggtcatcagcagccgccgccgccgcgccgtgcaacgggggcggcagcgctgatcacgagcggcggccgcggccggcaccggcggtgagcagggatctgtgctcggtgtactcaggcccgacgatccgcgacatcgagaaggcgctgtcgtcgtcggcgtcgccccggccgccgtacccctccggccgccgctacagctctctgtatttgtaggtgcatgcacaattgtgcacacatgcatag

SEQ ID NO: 31569 - DNA, 707 bp, Oryza sativa
acgtatttcatctaaatcttcctgtttgcgctacgccatcccaagctcatgtggcagtatgtctaggacaatttgaggtagcttgtcgtgatgggcaatgaggaacgtaggtggtggaggcatgcaaacctgttgggagtaaggaattgcaggttgagatgcaattgcaaagatctggagctcaagctttagctttaatggtggtgtggtggtagctcgttgccgatggtagccaagaaaggatcaacctagtccattgtgaaacatattgtaagaatacctggtctcaagtgaaagcatgaggtagaccctggttcatagtgcaagttgggtaaaataaccttgcccaaagtgtaattcactctattttaaaacgaatggagtatatatgttgtttaaggataagacagtaatatcgttatttctccattttatatttgacagccttctttgtttattttacaacctttgtagattattttaaagatatattccctctatcctaaaaattattcaatccgatgtgtgtgtgtgtctatacacacatacatgctatctagatacatcttcacgattgatttttttcttttttgcaagaggagtagtccctccatccaaaataataacatcgcttttttaccatttcacacataccaatataaattaaaaaatatctttcactttatcaaatcctaatataatttcac

SEQ ID NO: 31570 - DNA, 686 bp, Oryza sativa
tactgaaggcaggactagaatacgcctaatggttcaacaagactaactgatagcaacataattatagccaatgaaaccttagtaacaagcaaaagcaaagcagattgaatgcaatacattatctttatgcaggcacctattgtttaaacgccccaaatgatgtaaagcccttacacaatgccaaataggaaataaataatactatcagctgagctaccataagctcagaaaataattaatgataattggtaactatccagcttcctcatcaaccatcattatgtatttaatgtgtgcaatagatcccaaaacattaattttcgaaatctattgcacacattaaatacataatgcaaaccttccaattcaccaaccaagcactcggcatgcaagactagacctaagattcgtacttagatccaagactatataatccataatacaaaggccctcatctcgcaatatgtgcattcttagcagaagtacaccccgtaagttcaaatatggatcataacagtatgtgaagatcgaatgcaaaacgcgctcacctcaccccctccatagccccatatcctcggatgcacacctacatgctgttactctcttcctccccaaagacctcaacgttgagctcaaaattgccatcccactctgaagatctaaagcccacgcacggaatatcagct

SEQ ID NO: 31571 - DNA, 564 bp, Oryza sativa
aacagacctggttgtttaaactactaattctaaactgcagagggtcagagagaaagatcgtacgaaacttgtactgctaatcatgcaataagcatgtgttaatgccaggacgattcactggggaaggaatcacaccgtgggcatgctgttgactagcggaataataccactgatttaagtagggtcatatattgatatatagcataactgctaactgccagttgctagtgcctcttcggctcttccagctgggagtcgaaacaaacaaaagagccgtcgttaagcacgtccaagtaattaaattagtacgtagtagtaatccctaagctaaaaatatggccagttgtagctgacagctaggagtaagagatgggcaagtagagagtatagagaggaaggagagaggaagcaatatgggagaacagtagtgaagcctcgaaccggctcggttcagtccaactcaaccacgtagaaacgtgcgggtttacacggtggcgaccgcttcaaatgtgcgggagctttgactggtccccagccagctcgcctataaacgcgcgcacgctc

SEQ ID NO: 31572 - DNA, 660 bp, Oryza sativa
attaactaaaacatattctggtgttttttttttggaaaaagaaaccaagaggcgtgtgtaataagctgcaatgttaagattggtgctgttatctagtagtatagtgtgttgtcctccctatgaagcatacctatataactttttgatgaaaaaagcataataatatatgactttgagagccagttaattttcacagaaggcatagaaggtgaaatatcaattcctaattggatcatgaaaggcttgctttaggaggtcatgcttcctgcttgtaaaaaacaacattatttgtcacctttcttatcttagatcaacttccgctgcattaccttgcatgcgcctttttatttgtgagcctttgaagctaaccatgcatggccctccaggtcaattctataaaacttcatcaaccttttcctctagttctttgtttctcaagaatttgttttttgggagattgttgtcggaacaaaaagaaaaaaggaaaaagaaaggaactaaatagtgccgttacgttgcttggagcttgtgtgcaagttgttgaagtggagccagaacattctttttttatgtttttttctatatatgattcatttcatccagtcatccaaatcaagtgaacagaaggctgttggccaagcggcttttccgatatggatt

SEQ ID NO: 31573 - DNA, 778 bp, Oryza sativa
aggatcgtcaccaccggcggatgggcaggcaacagcaccgacgaaggcgccgccacggggattcatctacattgacagcaacggtgatgacgacggcgacggccacggcgacggcgacggcggaagggcggcgaactacacgcgcggtgatggccggaacggaagggcgaatagctggattacggctctgaggaacgaggaacactaatgacgtgattagggtagagaatacgatacaagttcgtagggcactactggaatacggagggtatacgctaagaaaaaaaaatccaaattgctttacttttttccggtgctttaaaattggtgagaatacaggtggcatccatctaggatggtgcctcacgcgctgaggattggggctccgcacgagagaatttttttccaattcaggggtattggatgttgagtgttgagatcaataagctgccgcagtactatttatctagacgctggcagtcagagtcaagaccagacctgttgtaagccatcttcatctctgctctgctccaccggcagcctgaggagagtccaataaacctgtcacaaattcagattgcaacattttaaacatgccacacaattaaacgttatttggaacctcagaatcagtaatcctgcaatcgtttggaaacgcattaaagtatcaaactaaacagaattggtatgtggcagcactacggatctagcaggcaaactacaacctgttagcaacccacaatgtgccaaacaactccccgtcgcatacagatcatgc

SEQ ID NO: 31574 - DNA, 515 bp, Oryza sativa
ttcggccaacaggatgtagggttattatctgacaattcaggggcccgaacctgtataaaaatccttgtatctatcttttttaccttagtctgagatctatcctagtaccaacgatccccatactatgcaaataccggaatcgcgacatcaaacatcgacaatgtgagttatgtatccacatgtcaataagatcaaacagaggtgcagattgatgtcaaagtgtgaagagcagctagattgtcattaatttattattcccaaatttcatgacagtacaatttattctataatcaagcagtaattaacctcaatgattaactctaaacgggttatgttcaaggcttggaaccagtgtactttaattttaacagtatatggatgtgcatgtttagtgggttgagtaaagattctgccacactccaggagatatttgatgactgaaaaattcctagcatacggtggaagccgcacacacgtgtgtttggtggtttgcgttggtgactgcataggagtct

SEQ ID NO: 31575 - DNA, 588 bp, Oryza sativa
ggagctctttctggaagcaggtggaggggaacaaagagaggtgatggtgtgctttaaaaataagtgaatgcccctgctcacccacactgaaggacatcacagtgtcaggaaacttcacagcaaggcaaggcacagggaccccaggacccgcgctgtgccactggcccccttggtgccctcagggtaaagggagctgggaaacactctgtagaagggcaaagggcctgagaacacttggctgctggatggaaggagacgtcattatgagaagatgctgagaagtgcagatgagcaatgaggtccaccaagctggtcagtaatggatcatctactctggccgacgcttgcaagccattcatgagtgagcctgcatttcctgtgatatttagctcctaataaagtgatccccaggagctgacacattcctccaaagtatgcctcaagccaaacacaacctaattcatatgaaatgaataaatatttcattaaaaagaaatggattccaaccttcatgaagatgtctgcatgaacaatgaaggcttctagtaaatgcatcattggtaagaattccaaagatgattcctacat

SEQ ID NO: 31576 - DNA, 691 bp, Oryza sativa
ctggaagtatcagcaccaaaattcatctttgtggatcaggccatcgtcgatgatggagcagctgatcttctactccaactccaataccgtaaagtcagtgacctgcactgaaaaacaaataaatctagaagatgtaaaacagcatgctaaaatgtttaccagaaagagttgtgacttgttaggtacaaacgcagcagtacaattttattaattgcaacctaaatcctcctttacatcacagcagaataaataatcaatggcaatatattttgtccctctgaatcagaatgtgggtaaatgcactacccggtaataacccacacatatttactaacccacatatcatggttactgaaacatctagcattaatgttctgaattagatgaccatcctaaagatttcctatttttttttttggacaggctcccagtttgccccaaggactgcccaaactaaactgaaataccatcacatattctcaatttaaaatcagttccattcaatcatggacctagagctaaatctttcgaacttaaatatatttaaaactgaccttcgcgtgaacaagaatcacagaacaagagcagagcacataactaaggacttgattcaaacgcgtccattgcctgtaacacacagagagatgtagggttacatatatttaataaaaagctgtcaattgaacaccat

SEQ ID NO: 31577 - DNA, 1359 bp, Oryza sativa
tacagtagttcatcaacaactgaagcaaactgtcaatgctgcagactctcataagtcatagcatcccccctggcctacccgtgtacaagacaacactccaaaggaagattttgcacagctagaatcaacaaattggtaaagtaaaagctcccaatacctgccaaacctaaaaaaaaaagacattgaacaagcagtcacattatcatatggtgtactccaatatgctcttcttcgtcttatcttttatagagaaaaaggtatagcacaataattaaatgcactgtccaggtgaaaattccataggcttttctttggtatggaactagtattgatcaaggcctattagactgcaaattaaatagttgcaaacttcccatgtcgataggatcgaggaatagggtcaagaaacatgatacacaatggccttttacaaggtggggacgaaaatgcccccgtgttctaggccatgggatgacgtccttaggtctatcaaggttcgacctttgttcttgtgatatttttagctattggctactactcccgaagagctgataatactaatgggtttgaataaggacgcggtcttcgaaaaataaattttgaccaccattttctattataatatatatataatatcaataaatataaattttactaaagtactttttaacactaatctatacacattttgttaataatggaaatggattacactattctatacacatggttctatgtttatgacaaacattttcgaaattattcatactcaaatattttaaagtttggcgctgtctctgacggcagtagcctctcatccacatcctgcaacatgtcggtgtagtccccatggatccgcggccatcgccatccgccgtgatcagaaaaagcctccggcgaactgatgtcatcaaggaaaaagaaaataaatggcgtataacaaactgttgtgtgttcgttttgatcagctcgtgttgaccagatttccattgacggtatatatatgtttgtgctgattagagagagattaattagtacctgatccctaccatgttcatgtcgatcagtggtgataattggtcgatctctggccagttccgagctgacggtggtaatttttttactttggttgttttttgctttgctcgtgtatgtgctccggtttcttggatggtggtggagagaaagattacagcctttgccgtagcaggctgttcattgcactccccttgtgaaagggcatgtagcctagtagttgcaatgacttgagtagcagcctaaggtcctgagtttaaatctccataggagtgaatttcagattgggttatttgaggactaaattccatattcaataggcta

SEQ ID NO: 31578 - DNA, 580 bp, Oryza sativa
tgccccgcgcgttgcatagcaggtcattttgtcattttagaaccacaaaacatacttgcgcatatatatagtacgttagagatcatatcttatatttgataatggttaaggcataagaaatagtcaacaaatgaatatatttttgcaatcattgttcagtatattaaaacgtccgatcattgaatctttggacgtcaatttaacaataaaaaacaacagtaacaatatttagtaacgccatgagacttacggttccatctaagtatataaacagtctatgagattagccggatagcatacaccagttcaaaagaccaagaccaaagtattgcaaaatactccctccgtattttaatgtatgacgccgttgacttttcgaccaacgtttgaccattcgttttatttaaaattttcgtgcaaatatgaaagtatttatatcacactggtggagaaaccctttgtagtcccggttcgtaacccccctttagtcccggtttccaaaccgggagtaccaatccgggactaaagatcgagctgaccatttttttttttgcatggaataacccggagtaaagatcga

SEQ ID NO: 31579 - DNA, 648 bp, Oryza sativa
aatagattactcaccggataattgccacataccatctacttgattataggaaaaaattaaatattttgaggaataaacttaacaaatagcactataaccagaatggttatatatgccaggggaagtgactagttttcatgacacagcagtgcaacaacaggaaaaacagaaaatgagtaattcatactacttgagcagctgacatccaatctgcattattatctctccatgtgcatgcaaagttagacaacttgagcagcattcagaaatgtataccttgttcagtgttacatgaggcagtaatgttctgtaagatgtgtctatggtttagtataagaattctgagtgtgcaagacatgtcatatattcgtgaattattttttttttgctgagtgagatagagtttggaatcggataatatcatcggatgcccataaaaacaattgtattaaaaaatgctgagtaaaagaataactcttacgacaatcccgtgtcacccgttttctctttgccattgggtttggccattccagtccttagctgagatgtggaaactgctgaccctgcaaatacaatagtgtccgtgaacagaagcagaatacatataacctttagctcaattgttcatgtttctctgccatcagaatg

SEQ ID NO: 31580 - DNA, 720 bp, Oryza sativa
acagtggacgaaaatatacataaagagtttcaacattaaaaatgtggactcttttattttttgttatgaatctagacacctgtgtttgctgagatgtgacattcatgaatgcgtaatttgtgtattcataatatatgaaaatgaacctatgcgctgcatttttaattatcttaacaataatgaaacgctctgaatctggaatgaaggaaacatatattccatacattttaagattcttaacaagtccaaaaacaaataggcctatgctgatttttctgtcaaatgcatttcgcacatttgcaaattatgaaaaaacgaattatatcattttggtgcttacgtgaatatctacaaacatacaaattgcaaaaacactgcttatacagtatacacaaccaccctatccaaggttggtcaatacatgaacttatggaagaccctatttgggtttttaacacaaaatgcgcttgtataagccagctctgaaataaaaatgatgaacagtaaagtctaattgacatatgcttgagtaatggtggccgagttttgatttctcctttaaaaacaacaacaataatgcactataattctatacatacattcgcccactaacatggaatctgtgcatgtggtgtacgacaaacagatctgactagtaaaacgttacgaaaaaacactgctctgactatactgcatttaaaagcaacttatcaaacatgc

SEQ ID NO: 31581 - DNA, 710 bp, Oryza sativa
gaattctgcaatttgtaagtacagattagatcaaactcaatggtatattcgcgttgtaacttgtacaaataattcaaatgaggcgatgcattgataaatggagtgcaaacatagatgcaatagcttgtctgattgtagattatggttttggggaagctaaagcaaaggcagagataagcagatcaataaaaattcagctacttcagtttgttcagtactgagaagcagcttgcctcacactcacatgcatactactggtaagagattgttttggcatttggggcaaggcatgagcaatctggcagattgatagtacacaaaaacatgtgcaggaactttcaacaaacttctctatcaacctttattccattaaattaaatgcatgggacccatgacaaccctttccaaagatcaaattgcctgcatcatgtgtcatcactggcaattgcatctccatgtccatggagagcttgcaattgcgtagtagctgaggaaacatgtgattaaggcttatactgggtcttatttaatgctagatttatgagcacacagctgttcttgagtcttggccccttgttcagctattcattcagaagcagtcactgaagaatgttgttgagcttagactcactgatttataagcttcctgtttagcaagcagactcatcggtgttacattcagaaaataccggcacattccaacttggggg

SEQ ID NO: 31582 - DNA, 663 bp, Oryza sativa
tgtatccttccaatgtactttgcagttggacgtggcatccaaagctcgcataagagatgccttgtatcgattggccaattgtgttgagcataggcatcgcattgctagtacaacagagaccgttaaccaacttggagttatggaatcatcagcttcaaagaggtacaacggtttaatgtgatcttcaattatgtttaggacacttgaagtgatcgacagctgagtttttgtgaagtgtaattttctgacatgttcaaatcaaacaggtggagagaaattcagatgatgaaccctatggatcgctcagtggcacagctgcttctccagaaaccgctccaccataaatctccacctgattcggcgctcggcattggtccctgaattgtactgcaccgtgaaaaacacgtaggagtggctgctgatgcgatgtggttttttttactgcacatgtctgatcgattgagcattctaggtccggcaattttttttccctctcggttccggtacgcatgtatatacagtaatcactaaagagtacagacttactagatgaaatgtaatgtgatagcaacgctttgctgttcagagatgtgattctaaatagaaactacagtgttttttttttgttgtcttcagcatttacctgtgacttgtcagatgccc

SEQ ID NO: 31583 - DNA, 752 bp, Oryza sativa
tatacatataagtacagtatcttatgatatatattctgttttcttctgtcacattcatcgtcgatgctccaggaccagaaattaaaaggacatgcgaaggaataatgtatgtgaagtgaagatgcaacaaccgtcactctgaaagactgaaagtgggactctcaactgaagcgacggtttaacaactccggaaggaggcaatgttcgatcgatctttgtttaatcaatcaaattaagcttcattagtttagtttgagctagctggtcgtgagtgccaatcagaacttaactagaagtagcattttttttatgaaaaaagaaacataagaagatgagacttatgcatatttatttcgcagcgtgtgcagtcagctggatactccagatcgatgaaatcctaattggttgctactcgattggacattttggcagtttaataattaattatatagagagaataaatttgagtttgacatcaagtacttcatgctcttcatgtcttatcacaagttttaagaaataaaagaaacgtcagtgttaagctagttaattactagtgttgtcatttccttgatctgcagttgtatgcttgaggactagtacaactgcgttacattatagcactttagtacatccatttgttcctattgctggctagtcaaccaatgaaggccaggccttaatatgataattaacgaacatgttacaatgttaccatacattcggcatggtcagacaatcgctacgtgtaa

SEQ ID NO: 31584 - DNA, 628 bp, Oryza sativa
tggttcaatgaaaacaattcctccgcatacttgagaagatataccttttctataagaaagcttatcaataatgttaaaggttggattaataagattgaaaactcacctttataggtattcttgaatttttatttcatttttaagtataagtaaatgtgttagtcctccatggtggattatacctcataactaacaatatacaatgtatatacctctctatatctaattatctaaagctggctgctgtgctgcaagctgattggtggattcatcggccatcaacgttttgacacgtgtccattttctcggctgtgatgtatgtgcgcgcttggctgtggtgactctgggtgacgacgagccaatgctagctgggcctatacagcatgggccgatctgaccatttcagtaggaacaattttaacttagcacctcaatacttaatgtggagattatgggtaccccatacccacacggcatggttatccgactagttataggggataacttatatgtatggaatatgtaacagatcatgacttgggtattacgtttccttatatattacggaacagcctaaagtcctggtttgataatattgtaaagtagatttaggaaaccgataccgtat

SEQ ID NO: 31585 - DNA, 761 bp, Oryza sativa
tagtacctaagagaactttttattttttctaataaatcgaaaactttcaagttagattcgaaaactttcgacttaagatttaaactttaaaatcaaattttaaaacctttcaactcaaattttaaaattattttctacttgaatttaaattttacaataaaatttgaaaactttcaactcgatatttggaaactttcaactcagattagaatacttttaactcagatttgaaaactttcaactcgagatttggaaactttcaactcagatttgaatacttttaactcagatttgaaaactttcaactcgagattttaaatttgaattataaaaagtattttctaataaaaatatcttataatagaaatttggataactttcactacatcctaataagatgaaaaaaaagaaagaaagatcctatatatgcatgcatgcgtgtgtaatgcatgcgctgggtgtacgccatggcacatgcatgtgtgggaccaaggtgcatgcatgtgtgtgtaatgcatgggtggatgcaaaggtgcatgcatgcatgcgcagttggcctgccgcgggcgagcgagataagtatctggcgcgtcagcgcgaattagcgattccgcaaaggattaaaggatttatggcttaatgcatgtaggttttgaggaaagttagcatgaggttcaacctcttagtaaaaatcctttgagtctatctctctcatccgattcctgtatttttcctgtggtccaatcaaacgactattctta

SEQ ID NO: 31586 - DNA, 656 bp, Oryza sativa
accatgcgaaatcgacttcactgagagcatgatgctccaactgctgtatgcgcgggaggaggtgaagagaccgtcgatgcccaccacgctcctttgttttcttgcgcgccatttgagataagtaacaccaacctaggtcctggagtcttccttaaacaacatatgatattctacggataatatttctgctttaaattcatattccacatcatgaagtgaactatacaaggctcggaacattgatccaactgtacacttatctatacaaagaaaatgatttgtaacccaacatgtgaacaatcatgaagctcttggattaaaacaaaacaatgttgcatactatagaaaaatatatattaatgtacattgtgagcacaggtaccatttacagaatttgatgtgaatattactcaactaaaatggctatagtgacggctcatggagcggccgctgggcgatgccacggtccgataagaacagtgcgcggagtgataatttttctataaaaccctctgatttatgcgtaattagatctaagttcctcacaaacagcccttctgaaatgatatgttacataggggtacttatagaaaccatatatgctgtgccaatgacttacaatatcgggaatcctgatatgtataacgaagaagatt

SEQ ID NO: 31587 - DNA, 523 bp, Oryza sativa
tctctctaattagaatgtcacatgacatcttaggagcgtttgtagaagtgtagaaacgctattactcgtagtcgcaattaagttgtagtcaactattgtttgtagtggattggttgcatcctctactcacctatttttttgatgatcattgcgcacatggtattgtcatttatcttttgtgctcgataacagacatgctcattggatatcagttaatcattatgtgcactatgcacggataccgcataagaaatatgacttggcatttagtggatagtgacttatatataaaacttacatacatggcgatcaataaggatatacgattggtattttagtctaggattgaccaagtatattatatactacatattaagtgctttagtacctaagtaataaatttaaggtcgagttctaaagtgctatagattagctacttccttatttatagcgagcgcgtttcttaaactgctaaatagtgcattacacgttgcatgatttagaaatactttctatataaaag

SEQ ID NO: 31588 - DNA, 1869 bp, Oryza sativa
aagttgtcaagtggcgctctaatcaattagagaaattctatgaaaaaaaagacatctaactgttggttttaatttaatctcgtggacccattatttttaaccgtagatctattgtagaaaaaaatactttcttagatttatctttaaaaacggcacatctaggacgctcacgtacgtctgtacgtgtacgtacttaggccccacgcctccttttatttttttttctttctcattaataaataattaaacgaaattaataattctatcccataggtctaaaatatatatgtacgtacttcataagccagccccacgtctctccactccctcacatcagataaaaactaaattaataaatccagcccataattgtaaaatatatatattattttaagttctattctactatatatacatcatcgaaacatccataaaaaatcatgaacagatgaataatatacaatatataattgtatatcacttactaatatgcatagttaaatgagacttacattttcaaaaataaaaacacagcccgtaattgtaaaaaatatatgttattttaagttctattctactatacgtacatcatcgaaacatccatgaaaaaatctgaacaaatgaatagtatacaatatataattgtatatcacttactaatatgcaaagtaaaattagacttacattttcaaaaataaaaacaactccagtaattactgcctccctactataaaagatatatattgatatatcaaaataatataactaaatttatcatgaatgtatttttcatatattatgagttatctttatttatatattattagaaattaaagatcaaatatattcttttgacatcgcgtcgatgtcttttatatcctacttaggttgtgcgatccagctcattagaatgagcttatctagggcatacaaaatgatactggttattaacataggaattgaatattagatattaaaaaggaaaatgaatttattttttaaaaagaacttttatatagaaagtatttctaaatcatgcaacgtgtaatgcactatttagcagtttaagaaacgcgctcgctataaataaggaagtagctaatcctataagcactttagaactcgaccttaaatttattacttaggtactaaagcacttaatatgtagtatataatatacttggtcaatcctagactaaaataccaatcgtatatccttattgatcgccatgtatgtaagttttatatataagtcactatccactaaatgccaagtcatatttcttatgcggtatccgtgcatagtgcacataatgattaactgatatccaatgagcatgtctgttatcaagcacaaaagataaatgacaataccatgtgcgcaatgatcatcaaaaaaataggtgagtagaggatgcaaccaatccactacaaacaatagttgactacaactaaattgcgactacgagtaatagcgttcctacacttctacaaacgctcctaagatgtcatgtgacattctaattagagagaatccaagaaaatctattatctatctattatatactaaaagtctattaaactttatacaaatgctctcaagctaccacgtaggattccggattcctataaacattcataagtcgccacgtggctctctaataaattataaggaaaaaaaatccaaacaacaatttccacttaatcacggtggacccattattttttactattagatttatctaacagtgtaaaaacataaaaagctcactttccatcccttcacgtcacatactgtatcagcctccacgtatagatacgtatatatctttccttccctccgctcacatccttctcttttatccccta

SEQ ID NO: 31589 - DNA, 744 bp, Oryza sativa
ttcctgcagcccttttaaaaaataaattaatatgattttttaaaaacaactttcgtatgtaactttttttaaaattgtattgtttaatagtttaaaaatcgtgcgtacagaaaaacgggagaaaagtttgggtggtttcgacctttgaccagctagctgttagtctgttaatgcccacgccctgatcacaatgcgtgatagaatttctgacagacaacgacgcctatagaatacacaatgcgtgatagaatttcgcggctagcaggtcgtcgcacacccgacgaaaagtcccacaaaactgcacacgcatggtacgtacgtagaattagttagtactagtcagtaaggatcaggtttcccagaccgccggcggtaagcacgattatcacgcggtaaccgtaaaaaaccgtgtaaaatttatcaaaaattcaaattatttttcaaatttatttaaatttaagggggttatcgtggttttttattactgtaccccgcggtaagccggtaaccgatggtaatgtaaaccctggtaaggatagatcgagttgtactcggctcgagatcttctagaagttatagtgtactcacgagatctttcagatgtggtaagtttctggtgctgggtttaagttttcgcgtctacgcttacgcaaacgacaccacacgtacacacaccggccggcagaaaagtttatgagatttccatatatatatatatacagtacttgccaatctcggttggta

SEQ ID NO: 31590 - DNA, 544 bp, Oryza sativa
ccagtatattgaccttggagtgtatgctatctagattggaccatgcagtgttgttaccgattgatcaaggttgtcgttaggggttctaatccaaggcgctgttctgggaatgtgactaactgtcctctatagtgattaatatacaaagagacaaggggatgcctggcgcatttagatatgcatgtgcatttgtgcttcttcgttgagttattcgttacctaaatcagttaggatgctggcaattcatgcccaaatgatgattaccattaaaggatcagttttttgtcagttttgcaattgcaattccaacttctaaagctcattggttcattttgattctgcatcaccatttgtacaactgtggtatgatcctgtctgagcgtatgaattatggtgtagcttatctgcaagcgagtttgtgtaatgtcctattggaataggtcacaactcatttcctgcaagaaccaataaaatatcctattaattatttactgttctagatactgaagtttgttgccctgtatatatctgtgactcatatcac

SEQ ID NO: 31591 - DNA, 721 bp, Oryza sativa
ttcctgcagcccgtgcatatgcctgaccgattgatccgcacgcttcttgccttttgggggtaaaatttgtgcacaccatcggtgaatatattctacgtgttcaattcaaactgttgagaatctcatcgggttgatgatcagatcaaatggatatatatctgtttctgctttatatgagaatgagatagtgcatttggatagtaaagatgggcaataatgagctcatttttttactcagcgcacttctttttcctcaatataatatcaatactgatggtccattttctgctaaaagtatacctcagtagcatggccattaaaattttctttcctttgcaatggactatggcataaacataactgcatagctgcatatgcatgtcttatgaagtaattaaaaataactgatccagccatgaacaacaatgccttatgcgctgccataatttatgatccagcattagatctgagctaggaggtaatatctgaacatcacttctgctatttgatgaacatcatattttcatcatatatactttctttttccagatttcctggtatatattcacatatataaattgtgtagattttagtagatcttttcagttagagcatgaaaaatatcatggtttttagatggctgttgtaggtccaatgcttctcttacaacaaaagaaacctgctatatattcacatatataattgttatagcttcatgaag

SEQ ID NO: 31592 - DNA, 520 bp, Oryza sativa
aacgcataacatgaatgaatttatccccttattttgctatgcgaatgtaagatccaatttctaactgtcctacatgtatcaggggtgccaattggagctaccatgtcaaagaaagcctggctaaaaaatgttcccttcttttgcgctgcaccccctcaattggaacttggcaggcatcccaattgtgccaagatcttgattccatgcgagcgcattccctagtatctgtatagacatctaacacgaaagactaggcacacatcaatcaaagcactgagcagtatgaacaacccaagggccaaggccctccaacaccactgcatattacccatttttggaccaaaatctcaaccagcacattgcaattctttctagaattgaagcgattgactctagtagaacttttatccaacacagacacactgtaatcaaaatatctatacatcaaaggaagatcaccacaccaagtataggtgatagtatcattcaatccacaaagtgtaatctactattctgattt

SEQ ID NO: 31593 - DNA, 538 bp, Oryza sativa
tgacatggcatatccatatgatggttttggtggacctaaggactattctaggtcttatgacaaaggttaaggatttctttggaccatttaaaaggttagggactaaactgatcctacagagaaactttagggactaaagtagatattctctcttatattatattggaattacatgtgaattatactatatttatgtctaacaaattttatgaaaaaagatttgactagaccctatgtatcacctattacaaaattgaaaatgagttttctatttgttaaagaaagttctatctatatagaaagtttttttaagaaaatatgcactgtttagcggtttggaaaatatattaatggtaaataagaaagtagcaaaatcgaaataagggaaagaacacacccttaacaatatgtgattattatcgaaaagggtagtacacaaacgttcgtggttacctaatccagcgaataactcagaagggacacgcgaaacaggaggacacgccattttcttccgttttcatctttttcccttcttttt

SEQ ID NO: 31594 - DNA, 620 bp, Oryza sativa
tgccaactttgttccagtgagattttggtatgcatttagacttttagtaactgcataaccttgcctgatgttggtgtggatgctaacagtgtggcagtcagtgagcaatgttgattttgtactgataatgagttgccatgttttaacctgacaagatagcatgcataccaaaatccttgttcattagtagtagtgcagcactactaattgtaatctgtggtacaagtatactacttcatgcatcatgggattactccacctgttgtttcttcatttctggatcgttatatgtgagtgactgcaatgaatatattttttgacacatgtatttgaatactgattactctttatttccacctgtttaccctgttttagctagcgttcataattaagcttgtcatgatcctatttaaatacttcgtagctgcaccaacatcaatcatcagattcgttagcatatgatgaaactagctgggtggaccacgcaattacgcgggtggcacacatataaagttatatattttttaatataattttaattaaaatttattaaatagatatcttggtgtcttaaagatttgaaaagacaaaccttatcatcctcgtggttttaattttat

SEQ ID NO: 31595 - DNA, 532 bp, Oryza sativa
tatacgtgcacttaaacatatggacccattatttaaatcatcggatctattttttatcactggggactattattatcaaataatgcacggttttaaaataaactctacacttattatattgtgtacccattaaattaacaatttaaaatctatattaactaatttacattaaccctataaccggtggacccattatttaaatcatcggatctattgttaacaaataaagtgtccgaagttctcttttttggcccgctgcataatgcacatttgcatctttgcctttcgcacgtgtgacaaagtgtcatgtctgaggcatctaaggtgatcacgaccactgcagcgctaccgctttgccacatatcaaatcatatatggagatgattaattttgttaataacatgaaaagaaaattaaaggtgtgatgtagagagagaagaattaagcaccgtgggttgagtttttccaacatttagctctatttaaactgaaacccagagttgattacataataattatatcgtattgtgtt

SEQ ID NO: 31596 - DNA, 565 bp, Oryza sativa
gatcccccgttgtcagagtagcagtagcagcagtagactactagtaatagtagtagcacattgccgggtagtagacatggttactgttctagactgcagctgcaacaccaccagtgaccaacatgcctggagccatgcttgctttggcgccggccgctgcgcgcccaaacatgccggaatctgatcgagagctaattaagcgagagtttttttttcttcttttttggtggtctccttttcctcggcggcacaggggacggaatcgaacagctagcgtgtaaccaccacgagtccgtcgcagaggccaaccacagaaatcatcggaaaaaaatgggggtagtacgtggtgttggtggggtatgttcgcatgttcgcatgattgaccatcttagtttcagtttcttacggcctctacaccgtgtcgccgctacactctcggacgaatcatcaacgacgacgacgacgacttccgcttccactccaccagcctgagcaagaactccatcacctgcagaaacgggtcaaaaacgttttatatattctgtacgtgctgtgctcgtgtgta

SEQ ID NO: 31597 - DNA, 662 bp, Oryza sativa
  unsure (1)..(662): unsure at all n locations
tacccctttcttcttcctccaatccttcctctcttgagcaagccgggatcagtggaggaggagctgagcaggtcctaagtgcatgtccacaagctccttgtccatggcgcattgcacaaccgagaagtttcctccagtatcagaaaagcagcacactgaatcctacaaatgttgctcctcttcatcngatggcagattgngaaatttcgatttccccaaactggctgtgtagctcggcacacagcctgcagccatggcgctccgtcgccactgccgcttgaagagagagagagagagcatgcacgtctcctccacatcatcgggttggcgaagacaggcccaaccccatcgccggctacaccacctccatgaccacgaccatggagatgtcagaggccaccacgaacgtgctctccgccacctactggatgctcagcgaccctgtgcagcaccagtgtcacaaaccgtcgctcgtcgagcacccagtgtcacagaccgtcactcggcagtgtggcagccccagccactgcggcgagcagggagagcaggagacaggttgaccgccgggggcctcgaactgctgtcgtcaatgctccgagctgtagctcgccagccaccagatccagaggatgaacagaagagagagagggagaggagatgaa

SEQ ID NO: 31598 - DNA, 748 bp, Oryza sativa
tgtcatggccttgaagcagcacggtgtggtcattcatcagagcaaagtcattcataacaacgtgggtgacctgagaaaaaaatcgcttcatctttagtagtccagaaaagctactagaacattacagttcaacagtaagaaatttatagcagtaccaatctttctgtactagtagtatgatattttttctctgtactgttaaacggttagttattatttcttcaatttttcctgatgactctcatctagttcgcagatcagatgtagtagatcaaaatgaaagtcagcagcatcaactccagtccataccaactactgtactgaactatacagagtacatacgactccgtttccgtacatgaacttcaagcataattgttctcaaaaaaaaaaaaagaacttcaagcataacaagttaacaaccaaacaataaccataagttctttcttggagggccaatacccatattaattttgagcaagatcacaacaaaaatacaagatactacatcgattctactgatcaaacaagctggagaaacaaagcagtatatatgcatcatgcaacgagaaagctgaagaacacttacctcgtcgcaaggatcaaacccccatctcctccccacggacgcatgcattattgatccagccaaacaaacaagacagcagctcaaccaaggatcggagcgcagagatggcaagggagaagacgaagaagaagaagaaaaaaaagcactgtgcacggcaat

SEQ ID NO: 31599 - DNA, 905 bp, Oryza sativa
agtacttcatcaatgagtataaaacaactcataataaaataaattataattacgtaaattttttgaataagacgaatggtcaaacatgtgagaaaaaatcaacggcgtcatctattaaaaaacagaggaacagagggagtactattatacacccgggctgttcgcttgcagtcctgtccaccatcggcgccgtcgcgtactgtcgcctgcgcgtcaccgccgcctgctcaccgttccggcttccctcgcactcttctgtgccccccggccgtccgcttccctttgcccccgctcgacatcatgctccttttctacgcgcttcccgcacgtactgatgcttcacggtgaccgcgcgtggttgcagcccacgccgacgcagcgacgctgcctcgtgctcgccgacccactcacccacacaacgcgtgcggtcgccggagcaagccgacaccgtacgttagcccacccgcccaaacaacgctcgccgccgccacgcgattgccagccgacggatggactcagtgatggcgtcacaggcgcgcacacacacaaaaaaaaaaaaaaacctgcaaccaacactgcggtccacaccaaccaaccgccttcttttttcgttctcgaagcgtgccgcccacggggaacaccacacgccgagtcgacaatatataacccacgacacagccgcgcgcggcgcgcggcggcacaaaacgtgagcaccaaactgatcccctcctcgtctccacgctccgcttctcctccaagccaaattctgaaacaccaacccagatccttctctctctctctctctctctctctccggccatgtccgaggcggtagaatgaacagatatcggcggggaagcaggcgaagcacaagcactggtggacgaggaaccggaaatggatga

SEQ ID NO: 31600 - DNA, 693 bp, Oryza sativa
tagagaagctaatgcaaagggtggcattagctataatccttccatccatcaccatccaatggttgtggctagtcttcatctttcttatctccgttgctagaacgaatgtcctgtttcatgtttgattcgctgaatcaataccaagctcttcataaattttgatagggaagagaattgttgcaaagtctaaatgttcatggttctttgctcgtttgtagtactgacttgtggcaaaagccaaactaaagcttcataataacaattagttcataacaaggttgattgagggacaaagtacaaaaggcatttcacaaaggaaaataaaactataaccctgattaagtacaaaaggtatcttagggaggaagataacactataatccataaaccaaaatatgcagagtagcatcaagtccacctctcagatgagtgaaatgtcattacttttcaccaaatagactacctgcactggaatcattctgcacaatgtagcaataagtatatatcaatcatgaacaaaatatagttttctagataaaaattaagtataagttccagattaccataagtaattatgggtacgaagtaaagacgtcgaagttttcaaatacttcttcacttttgtggagcttttttgttcttgtccttgaaattgagacacatgggtaagatcttcttcctgtgaacaattct

SEQ ID NO: 31601 - DNA, 1815 bp, Oryza sativa
  unsure (1)..(1815): unsure at all n locations
aatagaaatcacaataaaataaataatcataatattattttttatgaaacaataatcagatgtaaattaataacggcgtatattaaaatcggagggagtactctctatttgaaagcacgagcttccgaatatgatctgtagctctatcctactcctctataaaaaaaaattcaaactggtccagattcatccctacagtttgattttttttacggagagacactactacaggaatgattttccttgacgggggtcattttagattgcaaacggcgtgtaagtagttgcgtctgcgaaaatcgtgctccattttcacgtgcgactctttaagatgactgcacaaaaaaaatcaattatcgcaggcgggccacttaataggtccgcatgcaaaaataggcttgttttcgcgtacggacctgttaagtcaccgcacacgaaaatagcctctcaacttttaatccgccgtcgctgccccacatgcacccactctcatcgctatctccttagatcccatctcacacctgctcctcccatctccctctccgcctcctcctcccatctccctatccgcctcctcctcccactcctccctctccctatccgccccctcctcccactcctcccatctcccagcgacggcggcagcatcggagcggattcgttgccggccgccgcagtgaggatggatccatcgcctgtgaccgcgaggggatccgtcgccggcgacagcggggacgacggcggcgggccttaggcaaggcggcgatgacgacggtggtgacggcgacgatggcggtgacgggtttcttgttttggttctgcgcatgtctctctgtgacgttgtgtgacgcacggctagncaaccaagcggctgcacacagatacgancgcatttatatgcacaagnaccaccttgcgatttccaagcacagcggctggaaagagtgtcgcatgactcgaccgcacagaaaaatcattattgccactagtgggagtatatgttagcagatttgtttcgagcctaatcaacttttattatagttcgtgtgtgcgcctggatcaattatttgtgaacctagagagaagcctgtgagccaaaagccctgaaaaccgctaaaagaagagcnctggaactctcatctctggcacgccgcgagccggtcgcgcacctgtcctagacgctttacctagtactactattgatcgagtcaatgatcgctctactagtactactattgatcgagtcaatgatcgctctactagtactactattgatcgagtcaatgtaacgatctgtttggtggcatatgatgtattcttgatcagcaaaacgtatgcttgagctgcaagccgatgtataatcaaggaaatgaaaaacaatgagttccacttgccatcttgggaccaacaatatcttttgatctctccgaaccagagactaccattaaattagacgagcttcagaatcttctagttcttccggcgaggtgaatggattaactcttttttttaaaaaaaatccagaaacatgaataccaagttcgtaaaacacgagagaatcgatccaccagccgaacgactgccatcttcatcagctataaaagagccgacaaatctaggtgctccgcacagtgatacagatcacttgcgccatcacaagtcgcaagccaaaaccatctcactgactagctcgagctcaccatggaattctcctcgagttcaacgtctctcttcctcctcctctctatcctgcctctcctctactttctttgccagcgccacgaccccaagaagcagcctcacgcccatgggctc

SEQ ID NO: 31602 - DNA, 686 bp, Oryza sativa
attcacttcatattttattagcttgttgccgcaccgtaaggttaaggcttctttttctctatggttcttatggtgtgcttgcacaatgcttaaggtgttgtactgtataacattaattgcttaaggctaactttttaccaacattgtggatgcccttaggaggcaaaagacatggaccttccaacaacgcacaaccacattgagtgccattgtagctaaaataaagagtaaattgcacttacggtgcaacaacttagcaggtgggtgtaatttagtacaataacttaaaaaatgaacgttctagtgcaacaacttggtaggaatgtgcaatttagtataagaactttataagtgatcgtataaatgcaacaacttgtaaggtaggtaggattttgatacaataaattaagaagttacgtgacaacttaattatttagagcatttttatataaattcaaatttttaagtacttattttaacaatatactagcatggaattatataaacatatttatatttttatcctaataactaataactaaaaatcaattaaactggattaagaaattattatatttcggttgataattgagaaggtgaagaaaacaaaaattttaaagataattggatgtaaattgtatgtgcaacataattcttaaagattaaattcatatataaggtaatat

SEQ ID NO: 31603 - DNA, 563 bp, Oryza sativa
  unsure (1)..(563): unsure at all n locations
ttaccttggcggccgagctcggaggagaagccagtgatggtgatgaacagcgagcagcagaactactccgccggcgacgaatgcgcactggaacggggaagcaggcggccaaagcggtcaagaaacaggatccaaacaatccagcccatcaaagaccaattagagcccatctcactctccttgatttacgaggcagtgcggcccgtgcagtttttacaagtcagttatactagccacttagtcatgcgttgcacgactttagatacctgtataaaaagttatatatttgggttataataagcaattatacttctntaggtttcaaattttgcgaaaggacttgataagacttgagcatacaaccggggaatgaaactgtgagctgctgttgcaagatttaaaatgagggcnctntgtgngcttagcagttctacgaatagacggagaatttaagctctgcttcatcaagtgaaagagaacaactaccacgtcaagaactcaactgaatcaactaaacacctcatgtcaggaatttaaggatactgaacatgtaccatgcctta

SEQ ID NO: 31604 - DNA, 707 bp, Oryza sativa
atagtcggcatgaccaagatgcccatatgtgttttggttacagtggcagacgagaatgctagatagcgatcagtcgcgcgcctccctccccgcgcgactggacacgtgtcgtgcgcggagagggggcggccgacgcgtcgcgagggaggaccggaggagcgagttttctttttttttttccgtttctgttcagttgttttttctttctccggttttttcgtttctgttcggcctggttttttttcagtttatcttctgtttggttcttttttcggtttttttaaagatatataaatacaaagtttgtattcatatgtatactaagtttgtattcgtacgtatagaaagtttatatacgcgtatacacttgtatagaaagtttatatacgtgtttgtatacgcgtatacaaactttctatatgcatatacaaagtttctatatgcaatacaaactttgtatatgcgtatatattgtttatgcattaaaacatattcataaaaattatatatatacgtatgtatatactatatagtatgtatacatacgtatatacatacgatgtatatagtacttacatacgagagagactagggggcgactgatcgcacgcgcgcggaggcgcgcggctgatcgcgtaccagcgcccccctgttcctggcccggcccagcagtgagcgcaaacgaagcggtggaaggccagcgacgc

SEQ ID NO: 31605 - DNA, 820 bp, Oryza sativa
acgagcgccctcggtccgtgctctcgctgacgctgcgtatgaagtggggcttgccgatgaaagtgaccatcaggaagtaaccaacaagagtgctctcgcgcctcggtggcctcgccttcccggacactcgatcaatgcgggcaagaatttgggacgtgtgtccatctcggtaggccgaatcggtgagcgggcttatgaaagaatccttttaagtcccttatgtttgttgctaacttgttttggcgttgatagattctggcactgctaatcttggattgtagcccaagatgagatgcctcccatacatcacagctctcacatggtactattgggaaaaagtttacttcagatccctcatctcattgtcgagtttcagaatcgtctctaaaccagaatatcagatataacgcatcactatttttgcaaaatcgggtcccaaagtagtgttgaggacggttttggataaaacaaaaattaaaataaataaataaaaaccacgaaaatgtaagtgaaacattatattcctccttgtatatcttcccatcctccggtttctctccctaccgccccatcctcaccggccggtcaccgccgctgcggccttcctgcagctgctaccactgaagatcatcgataatgcggcagatgtcgaggtcaagctcccattcacaggccttgatgtcgaggtcaagcgtcaaaagagtctcttgaggctcttgacaagcagagaaggaagtttttgtgggcggggggagaagccttgacgggtggaaaatgcaaaatcaacctggacccgaacctgcctacccactggttccgg

SEQ ID NO: 31606 - DNA, 789 bp, Oryza sativa
ataggttcataagtgttgaagttagatgcagtcgaaagaactttaggaatgtttgctgaaacgtgtctactgccgtgatgccaaaacagagatttttacttgtattaaatgaggtcacaaacacagagcccttccttagcttattatgcacaaccctttctcataaactttatatttctttgtcggtgtgtcctgagtaagtaaagtcctttgctttttcagtgactacaagtacttgttatcaataaaataatggaaaatgagtgatttattccacaatatatttgtatttgattctagtacatgagaagtttcctcttttcccccttttttggatgaaacatatttcagttttcagtcataaaaagatacaagtatggaactaatagtcacaatgcatttttaaaattcttatgctaaagcattcctatcatcatgcatatttgcaattgcatcttttgatacaactttcaacttttctgtcacattattccaatttcaaccaaacttccaagtttggttgaaattggaacgatgtgactgaaaagttgcgtgtgtatgaaaggtttgatccgatggaaagttggaagtttggaaaaaaaaactttgcaactaaacagggcctaacattgcataacttattatatgctctacttcttttctttgcagacctaagccgcaagtccttggagcaatatgtcccaggctgctcatcagtcaggctctctgacgtcaagatcttccggtcttgggaacggtcaatgaagctgacaacggaggcgttcgtca

SEQ ID NO: 31607 - DNA, 730 bp, Oryza sativa
atgctggtggtgccgctggacaccgtaatggccttgcatcctcatccttgggttcctgctggtaaccaggcagccctcgctcttgctggtggccattcgtcgagcaggagcggccagacgaagcccactggacaccagcggcagttcgcagcagtgcacgctcgatccggcgatgacgctctcataggaggacctagagtgaacgatccgacgcgacagggcctgatccggcgagacgcaaatgagtgggggatggacaggagggaggaggaggcaggggattaggagagactgaggccagggtaggagcttgtggggatgggaagaatggaagatgcggcggaggaggatgaagccgcggcggcagcttttctttttttcttttttttttaacgcgtggatgctgcctattcgcctacctctctcgactctgatcgaagactcctgaaatctcgtcttcaccttttgactaaagctatactgaggcctattcaaaatctaacggcatgggttcaatgtttgttgcatccaacggctaatattattccgatgacatggcgctttgtggtggtgaaaaactttagtattttcactactttagatttccaatcactaacaaacagcgaaacagaggtctgattagagatggcaattggcaacatgtcccataacccgagatcccataggtttttatattattattacgagtcacatttttaattctgatatc

SEQ ID NO: 31608 - DNA, 511 bp, Oryza sativa
ccgccgctgccgggcggcgaggaggagagcaggcgggagagtagggttctggacggcgggcggcggcgggggaggaggaggagggggtggcggcggcgctgcatggccgccggcgccgtagggtggaggcggggcaaagtgggttgggctcggtttcgttgccgtggatgggttcgagtcaaaatggcagaaacacttgagctcgagtcacatatggcccgtctgcaaaagtcgtgaacgaaacaggaatacgcctttcgttaatacgtttccatgcgacctaaggctgattgcaccaatgcaccaatctgggagttttttacccggtctctatatccaaccggatatatgcaccatttaaattagtaacttagcatctcaaataatccaatctgaaattcactcatatgaagatttaaactcaggatcgactactcgggttaatgcgtcatgctctaaatttgctttgcagtgttacttttctggggagaaaaatcacaatagacaagca

SEQ ID NO: 31609 - DNA, 673 bp, Oryza sativa
gtaagtgtggctacgaaatagttgatcacaaatgtggtatggttagctataatccatctgccatccaccgattggtcgagctcggaacgtaaaccacacacgcacggcgctggcgcggggcacatggaaccatagcacgattagcccggacagccgcccatactcatcgacgaaaacttcattaaattttaatatttttgattgataataaaatttttatacaaataatagttatagtgaagtttgcctaggcaaaaatatctttctagctctaccactgtaatgaagagagaggttcactttatatctatgtgcattgtctatttatgcagtgttttttaccgtaaaaggaaatgacacagttattctcactgttctactgctgtgaaagggcaacatgatccgaaaatttgttaatagacgagttgattttacacagcccttgctttcatctgtgctaacaaatcagagcttagcaggcctctagtcaataaacctggcccatgtcatactacctttacagtttcggcccgatctaacagtctggactttaattgtctaggcccagcccatggaaaatgcgaactttttcgagtagatttctggccatgttactaacatatacaaatcgatgtttcgttccgcagaaatagattagttgcaaatcatctct

SEQ ID NO: 31610 - DNA, 685 bp, Oryza sativa
tttagaactgtatttcatcacccattttgccaaaaagcaggccaaagttcttcatttggaaactgtgatattgagaactgatgtttagttcactaacacagaatttcagaacgcactcaagtttattttcatgagagattgcatggataaagaaaatatggcaactttaaacccagagaaatttgctagaacaaagtagatggttgattatatattttaagcttatgccgatcttactgttcactttcttaaacttctgaaatctgaactataaatgaacacttgcagggaggttcatcaatgaaagttgtcgattgcatactttgcctcaaagcataccacgaatggaagctctctggtgggattggcatatggcgctatggtggcattgtgaaaattgcatcctcaagtaagaggttgccttcatattcatccaggggaggaggttcagctgatctgaaccaacaaatgctggaatttgtgcaccttctgtctgaagtctcccttgaggaatctagagttggagaatctcagcattcacttttccagcaatttgtgcttcgagttgtgcgggcattccttcaggaatggggtgaagctgagggcttgcccttagatgatatggtaggtaagttctacttattattgtataatattcgctgaccacctgatttctttagtggtg

SEQ ID NO: 31611 - DNA, 649 bp, Oryza sativa
tagacgtctcacatgcaacaaagatattttttcgatatacaaggaaaacgcaaactctggaaattagttataagtctactattaaaacgtcaaagcacaaaaaaggcgcacggtttaaatgcgatcaactattttttttcacaaactagtaagcaaaagtttatacaaaatttaggaaatggagacttcagaactaaaatagagctttaaagtccgaagataagttccaaaaagagaaactttataattgaagaaatcgaactaaaagtaccaagttgaaaaaatcgtcacgcgagaaaccaaagtaaaattttcataaaccaggtatcaaagttcaaaccaagttaaggaagacaaacggtgataaccgaaaaatttggaaactccaaaaaggatatttgaagaatcaatgcaagaagaacgtttgaaaataacggaatccaactaaaactacaaaatttaaacttgtggatgaaaaaagaagcgtcaacgaagaaaccaataaatcggtcgaacaagcaaacaacagtgatcataaaatcaataggatgcaaccaaatgtagacgtctcacatgcaacaaagatattttttcgatatacaaggaaacgcaactctggaaattagttataagtctgggctgcaggaat

SEQ ID NO: 31612 - DNA, 924 bp, Oryza sativa
aaaggaggagtcctgtagggttttggtgcctaaaatcgacctggacctatggtgcttcctctaagacctgtctcatctttgccttatgtaatagaaaattatctacaaccgttagatggagatggatggccaagattagagctaatgccaccctctgcattagcttctgtaatgcagaggatctggatccgacatactccctttgtccccaaaagacttaaattttagagataaatatagacacatgttaaggtaatatttttttagtgaatcttctgatgaatgagataacttttgttttattatcaacgaggaaatggattttatatcttaaagtgtattcgctgaactcatcaaatctcactcatatctgaaatcagtccggaaaacctaatgcgcgaggcgaacacatttttccttttctgttcaccccgcggcctgcatgctcccacgctgaaaatgggcctatgggcctatgggcaaatatgatatttgttattgggagtacctatacatctttcgaaagatttttatgatcgtatcacacagatttttaatctttagattaaaatccgatagatataataaaaagcaaaaagcaattaagaaacaccataatggacactaaattaccatatcctcaagaaaaagaccaaatccaatacaaaatttaaaatttacatgtgaagattcaaaaattacagtgtaacttacaaaagttacagtgtaagtttcataaattacactgtaacttacaagaaaatgcactgtaaatttgagtgagaaaatcgagtgagagataagaaaaaatctttcgtgtgagatatagcaaaatcgtttgttatttgggagtacctatacatctttcgaaagatttttataatcgtatcacacagatttttaatctttgtattaaaatccgat

SEQ ID NO: 31613 - DNA, 669 bp, Oryza sativa
cggtggatctcgtgtaccgcggctggggcagggatgggagcagcagcagtagggagaagagaagagaagagaagagagaagagagaaaggagaagaaaataagatatgcagctgacatgtggaccccacatgctttgctaactaggatgtcacgtcagcgaaaccacccatatatactgcctagggaccttgagtgaacggttttgtatagtttaggggtggagatttctggttttgtggttaaggggcctaaaaaaatctcgctgttaagttgagaaacctccggtgaacttattccaaaaaaaagacaggttgaagcccatgggctggtttttctagcttgcagcgatgcacgctggttgccacatgcggatgtacaatacataggttgttgcaacgttcgcgggccgcgaacgtccacgtactagacgcccctcaaatcagtctctatcataagaaagaaaaatgaatttaggatatcgtaataagaaaaataaataaatttgactaaatataacccatggtgacgtatcgactatcaattaattaagcaaacggcttgcaacctctgattgccagctaaaaaaatccacgatatattcttgtcctaagtacagtgacttatgacctctaatcccaactacaggtctacagcgatcaaatcacttg

SEQ ID NO: 31614 - DNA, 682 bp, Oryza sativa
tttttgcctgtacttgggacgcacgaggagaaaaaagctgggttcgactagactatcacgcgtacaactgaactactccaataacatttgagctttcacaatgttgtcaaacatatgtaactacatgctttctcttcttataagatatatgctctcttgtatgatcctaattaagtgatttgccactctcacctaaggattggtatcctgtcccaaatccaaaagatctgcactttgggtattttggaactcaactgagtgactagcaaatcctggattgagtcctaattaaaatgcaaaccaagacataccttgaggcgaatcagatcgatgacaggccagggatatattacacgaatccgagaattgcaacatcggtcagatatggtgaggaccagacaggccgtgcaaatcccaaacagagaattaaaaacttcaaaccgatcatcatgttgcacaaacaaacaaacagagccaggcatcagagtgcgtcaccattgccgactgatcaaaaagctctctctctctctctttctcactctctctcgttagtcgtcacagctaagtagtagagtataaccgatggaggggtatggataggtgcgcacaacggaagtggcggatgacctgcgctccgattcagattataattagttaatttcaggcgaggagaaagatcgaa

SEQ ID NO: 31615 - DNA, 1201 bp, Oryza sativa
ttcctgcagccctcaaatgtaaaagtccaaactcaaaattaaaattatacaaaaatggaatgctgaatttatactggttccgtttttccaaacggatctcgaaaccgacaccaaacaaaaattcaccaaggtgtttaacacaactcggaacaggcgaaactgacgtgagagggggactcggactcaagataaagttggcgacaaaaggagatggcgccaaccggtcttcacgcgtggggagagtttggaaagtttggccttagatggaaactaaccaacctgattgatctagtctgcaaaacttcctccaaaaacagatctgttatcttttctctctcctcttcctcgcgcaagagaaacaagcacggccgaatacagacgacaaacccttgatgtaactcagcaactccaaaaccgaccgacaaaaacttctgaaaactagaaaaacgaaaccccgacaacaagatgattccgttttcctaggtcccgacgacaacaaaaacacggcgggggcgatgacagtggtatgaaacgtgaccagaactcgaaactctaaacgaactaaacgctaagaccagcaacacgactcgacaatgcaacacaaaactcaacaaagcaaaaactgataaaaacaatgcaatggcacaaaatggctaggtacaggatacaattttttttgtatggcaattttctggttatgggtagataaaactcaccgagcaacgaaagctctgataccacctgatgaaccctgagttcctctccccccttatctcttcccctcccctatataagccccactattcccactctttccctccatccccacctcctctcctcaactccacgccgccgcgccgtcgcatagagccgccgcgccgccgccacgaagccaccgcgccacgccgcgccttgcgccgacgtcgccaccgtcgccgtcgccaccgtcggtaagccgccgcccccccccccccctgcgtccatcgtcgtcgccgcccgggagagcaagaagccgagagagagagagggagaaaggagccgggagggagagaagagagggaaaaagaaagagaggagaagaaaaagggagagagagaggaaaaagagagagagagagaaaaagaaaagagagagagaaaggagaagaaaagaaaagagagagaaaggaaaagaaaagaaaagagagagagagaaaggagat

SEQ ID NO: 31616 - DNA, 2225 bp, Oryza sativa
cgagcgtgtcggctagaccatccgtctgcttgttcttcggaaccccaacttatcatttgtattaagttcctatttgcaatatcagattgcttttatcttgttcttgcttgtttcttcgatttgcttgcaggaatagggttgatctgcaccggccagatcaacaacccacgcagaggtgtattgatcgctaaggcgcaacacaacgtctcgtacggttgtagtcggatcgtcaacgtttttcccaaatcgtagttatcacaactcaccgaaagatcgggccaacaacagccttgagtgctgagaggaacttagggttcatcatactactaccattttatctctgttcccaacacatctctctcgcattccatacgcacgttttttaaattactaaacggtgcggtttttttaaaaaaattatatacaaaagttgtttaaaaaaattatattgatccatttttgaaaaaaaaggtaatacttaattaaaaaaaggtaatacttaattaatcatgcgctaatgaaccactccgtttttcgtgcgtagcagctatgttcccaactcttacaaacgaacacagccttgatacaacctctgcagccgaacaggcccaatgttttcgtgacaaacataagcaatcgctttgttgtaattgaaggagtgatttgaacagccgatggatctattccagatttccaggcataaccggttgaattcatgcccgacgattattggagtcggtagagaggaaggtcaagaaacctgatgtgctatgcttgtatcctggggcgcgcagccttcacccggccggtaaaagaaaaaatgttgcctagatcttcttgggtacaatatgcatgtcaataaattttgttagcttattcccatgaatgaactatcttgcttttctaccaagtactctatttccatttgttttaaatgcaatttctctctaccttgccaatccatccgtgctaaattaatggatcttgaatcaaatgcatcttaaatcgaaaagagtctagccagctctgttagtatcttttgtaccctttgaaaaagccacaaaatgttgtttccagcaaaacgtcaggaataaaaaattcacaaagccaatctttcctgggtgtagacttgggcctgcctataattctgaacccaacaagttgaaattgtgtgctccagtaatgggccggaatatgcagtccaataacgtccatccaaccacaagtctaagacaaatggcctttgtaaaatcagatgggccgtcaagcccatcttgtttgcaattcataccggaccatgtctttcttctctgcagcctcagcctctgctttctctcatgtcgttacacaccccaaccaactgaagctttgtccatatgagaaagccacctttcttagcttgatcactagcatgatcatgatcaatgtggtcatgatcgaactgtgaaagtcactacactacactaccaggatcctttgctattgctgatactactactgttcattttttttcccctcgattgcatgcacatgcttgcaactgaaggagaggtgagagagctacagggcataagcaagcttgggttaggtcagtgtctcagtgagtcagtcagatgatgcaatcatatgcaaggggagggagaggcaaaagcttggaataatcgatcatagggcgacaccatgagtagtatatttatccccttctcttcgctttcctttagctccaagcttttgtaccaaggctgtttggcacttactctccaggcgtatctgctccacatcatgatcatccctgatgtcacaactcaggccatcagaacatggtgccatgattctttcctatctagcttggagaacatggtcaatgtgtggatcatttcgtaatcctgtaattatccaagagctgaattaacccacaaattaagtacaacagcctgaactctgaagataggaagaaagaaagaacatgctattgctatcagatataggtttgattcagatggaagaagtggcaacgtagaaagagtagttgcatgggattaaagggtaaggaggattatattccagctatatgtacagagcaaaaggcccatcgaataaattcttcttgtacgatttggcctgaggaaagggatcgatgtgatcgaaagttaactcaatgcaggagcttgccggctccatcctagctaacaactgacagaaacaatagccaggacaggtccatc

SEQ ID NO: 31617 - DNA, 812 bp, Oryza sativa
acataataaatcatagatctgacaatattgtatagattggaaaaatagatatgataaattgtatataaaatattgcgtactttgtagatacatgccggatgtatgtacgaaattattagactaatttaaaaaattaatcttaaatacctcgttttgggtgtttgatgattattgcttgtggacagctacctggtaactttccatatgcatgtattggtcctattccgcgagacgtgcgtacagcgtacgcgtcatgcatgtcggagtactgtacgaaatccgatgcatgtcctcagctctacgtggcagagtccaaatcaagttgagcttgaggcttctcatgcatgtcggttgttgtctctccatggcaacgcacggtgtgcccggacagaggacctcggccatggcacaaagaaaaatggaccaatcaggaagctgattagtgtaattaattaggatgagattaaatcaaatacaaagagttggaacgacaaacccgatatcgtgttataggacgacgttctggctggtgagagtctccgtagttgaccggaccaggcgaagttttcgtgatcaacaatagcgaacagatatctcccgcaacgacgtctcgaggcttgagcgatcttgatggatcaaattgctgatgatgatggttccgatctcgtcgggagacgtactctggtcgggttggatctccccggtccgaagtcgtcgagtagctcgttggcggagaatccatctcttaaactcatctcgtcgaaatcctgaagcactaaaattcccctacctggcgtgccactgtcgacgtt

SEQ ID NO: 31618 - DNA, 650 bp, Oryza sativa
  unsure (1)..(650): unsure at all n locations
attcctgcagccccgagcagagagatattttcgccttgatctcgattacgcaccccgatcttttttatggtcgatctccaggctgtctctcagtctctcgcgtgttaatttggagtgagtacgtgtaaagccatttttttttntccgcggccttnaatggccaggctcgcagcggacgtccacatccacagcctcgatcgcgattcgcgcagcatgggttgtgtttggttggttttgcaagggtggcatgtgccgtgctagaatcggacattccgcaatgagaccgacgagagggagatcgctcgatcgatcgatcagtgaaaggtgctttagctagcatagcaagcgatagctaagcaggcacagtggttgcccgaccggttcggcgagatactactgtacaagtggatgatcgatcgagcagctcgcgggcgagacgaagctcgcgggcgagacgaacgacaagtgaagcggccgtggccactagctgtagcttttactagctcgttctcttcgtgatctcttttgggtgggaatcgaattttttgggaaaaaaaacccggttggggggggggggaaacgggaggaaggtccccatcgttttctctaatatagcattgctaaattttgtttttttagacttaatttta

SEQ ID NO: 31619 - DNA, 535 bp, Oryza sativa
  unsure (1)..(535): unsure at all n locations
attcctgcagccctggcgttggaagggaggcatggaataactgaattctggagcacgccaacatatgctctctcgctgcatgcatacggcgcgggcaattaactccaccccggggtcgcatgctgcatgcagngctagtanngcagtggcnacnaangnatacagtacagtacagtacattccaaccagctaactgtattcagaacgagagagagagagagagagaggggtgaggcagccggcaactgtaccctgccttttcccctcgactctctttctctctctcgcagcagcagcagcagccgcgttgccgtgtgcgcgtgttggtggctggctacctctccaactcacgcgcacacacacacatctcttttcctctcggtgcgatacgaagcgagagcgagagagagagagagaggaggcaaaggcaataaatggaagcttaggtgagcgcaggctccatggcggcgtggcagggcctctctgtcgcctcaccgtcttaactcgcggcagcgcagcgagctgagctgagctg

SEQ ID NO: 31620 - DNA, 1012 bp, Oryza sativa
atttaaaaatgagcaatcgatagaacacgaagcaatgaaacaacttaaccgatgaggattacttcgagaatgataaatattttggtgtccttgatcttaatgtcatttgcttagggtatatatgttcaaacttggatgaggagagtaatttagtaggatcatttttataaattctaaacaagtaaaaaaccaaaagctacaatgatgtttgtgaaaaaagctagaggggttaaagggattccacagcctctcgtacatagctccgccactgccctcgagggtgtggagagactccgttgttgggatgcatgaaataacgtcgtactcctcctactggtactcgatcaattcaagctgcatgcacgcctgctcgacgaaaattactctacgtgcggaatcaatgggcaaaattttagtcttggaacgaccataaatatcttcattgattttcaggttatattcggtgcagctgtattaaccccttctcacagtgcaccaatttttttaaaaaaaataaaatgtgaaatttaccattatttgtttggaaaatgcaacgctttatctatctgaaatgatgatgcatcgatatgctggagaccgaacatgcatttactacaactaagcagtgcatttactcaagccgccacggcgccggcgctgctgcttccccagtatatttcgcttcccaactgcagatacacctacgatttggttctgctaagattgtgtttagattcaaagtttggatacaaattacgaagtgaccaccagttctactcctatagtagcagcagtgcagcactcctgctactgttggatgcttgaaactgcaatccacggatgatcctggtcgacgtcagcgtagtaaatgcaccatctccttgattcgaacttttcaagttcgcagaacggtaaacgtacaaggcatgtgcatactagtatatacaccgtactcctccgtatgtactgtacgtcttgcacaccataaattaaattggaaaaaaaaggttta

SEQ ID NO: 31621 - DNA, 591 bp, Oryza sativa
  unsure (1)..(591): unsure at all n locations
accgaactgtaacacttccatcacctgatgttttggccaaaagcagtttcattacccacacgataaaaatggtattacttcatgcaaaagatgtatttagcccttcagatctgcatcaatgttggtgaactaatttatcaattttcaagtcaggtgggtaatggaactgtgttttgagtgagaatagtattttcttgtcagcgaaatgtcacagttcggtcctcttgggtattgcaaaatggagtacatatgacaacagtaaggtaagtttttttggctgctcnnnnnnnnnnnnnnnnnnnnncacgaacagtttgataaagcctattacggaatacttgtttgtttcaagtactggatatttgatgttacacacttgaactgaatctgtagcatgttattgtcttcaagacatcatactgcatagtctttatatccttagcagtagggactgtcgttattatgctgagttcagatctgtaccctggtgttcgtggactgaattttggatcccctcttgcagagttcatgtccaaggtcaaaactggaagctgaccgttggcaaaccaacatttactggaatttaagcag

SEQ ID NO: 31622 - DNA, 3650 bp, Oryza sativa
agtacctcttgcccattattacattttgttattctttatttggtggccatctcaaaaatgcttaagcagagttcccatcagtgaggccataaacaaattaaagctctgattaggattacccaaccaacccaccttatctaagcacaagctttctttcaccagggccttgtctttgagtctcaccaaacctgacagtgacacaagcaattaatcctggcctctgaaatatgtcaagttgcagatgacaccaattccttttgacaagttactccttatcatcccttcttccttcctgccccctaatgataggctaaggtcctatgctcagtagattatgtattatggattaccacaccacgcttcccgaacccctaatgaacggtactatatgttttacaaaaactttcttcatcaacagttttaagaaaaccttttcaaatcgacttatcaaccaatatttacttcattcatttgcatcctcaaataatatgatcataaactcaatttcagtttatcatccatcttatgctaagaacgcccttcaagagatcgtttacacaagaggagtgaaagaacatgtagttagtgattgcagtgagtagcaatctaagaccctagcttcgaatcttcgtaggagcaaatatcatattggattgtttgaggggctaaattttcaatttaaataactgtgtatattcggttggattagaggccgaataaaaattaaccatctctaaaaaaaatatttacaaaagaggtaaaaagcaagctactaattacttgttgctatcaaatggccaccactaggagtagtactagtgtactactagccctgttgcttgctctctctgcaatcctcctcggatttgttaatgattctgttcttttttttcatttcgcccttgtcatgccgtctgatcacgtgctgtgatggatgttaacaagctattgctcctgggccaccagctcgattttggctctgctatctgctgcattctcgctgtctccttcgtgacgcactcgatccccctctcgccggctagatttcttgggcagttgctacgctaccgcctcgctcgccgacgtgtgtgccgggcaaatcgaaaggcaaggatcccggcgagcgcactcccggatcggatggtgagatctctctggggcctttttgcagggcacacttggcatctgcttcttctgatgcggatgtttctcatgatattgcggtagctagatatgcaattgatagtgcagcgataaggggtgtatagtttcaacatcaaggtcctatatttaattccaacgcgctcacaatttcttctttaaaaaaatgtttggagggacatctcttcaaatctagtttttttgacgcatacatttctcagggtaaatatcggtacctcttctactctatcttccataaactagctacttgcctgtaaattctaacaggtcaggcatatataatgtatgtttggcagagctccaacttttaaatttagcttcgggagaccagctccactttcattttgtgaaagtgctccaactagctctactcccattttaggtagagttgaaactgttttactgtgagctggagctgtgccgaacagacccataaccagagagaaaaagttgttacttttcatgtacggacgcttaagcaccttgagatagtagagaatgactttgttttcaagaagtagaggtataaacatttctaacgtttaaaatttacaattcaccaccaacgccaacaaaatggatggaatcacttgaaagctcacgagttacggagagtactggaccgatccacctataaagcgcagttcctcggcttcattaacacgatcatttagaaaccttgctacccgctttgccgatacaccctggaaagtagaaacattcttttcacctcgtcatatacacaaggagaaactcatgtgagcaactcaagctgacaacgtgaaaacacaacaatgatggtccactagtggtgctactggccaaggtatattaaaaaaagggtccgcgctctcatcctactaacagtataggaaatatggaaggagaaaaaacatagagtgttttaacgcaaggggctcttggcaatagctaataggttgccaaaatcaaggagactaacatcctcatctttttgctaaggcttatacttatcaactaaaatttaaaatttaaatcttaaatttgaagttgattttgggtttttttatcgaaatttatttttcagcctttgctttttagatagttaagaacacgtatataaaggttttattcacaacttattttttatttgcaaatatgccgtttggcttattcaccgaataagcgaaacgattggactgtataacctaggacctagcatgagcaaaacgacttcggagctttttttttttgaaaggtttcggagcttattctttagctttgttctactttttttatagttctctttcacacgtatacaactcttctttttctcttattatatttaaaagtaaatttcataaaacttgaagtagtttaatcaatctatcacaaaactacaaatttttaataacatgtatcacaaaactacagatttaacatcataatttttttatataaaattacagatttaaggtatgatataaaaaaactacagatttaacgtcacttttatcacaaaaactacaacttctataacaccaatagtgctaagatataaactctaaactaaatctatagttttgtgatatgatgttttaaatctatagtttgtgataagtttggtgctaaatctgtagttttgtgatacatatctttaaatatgtagttctacgacagtttgatcaaagtatatgtagttttgtaaaatttactctatatttaattaatgaaattgtcacgatctagtacggttcgttcatttgtttttatttctagcatactacttcccaatccaaccggccactgttcatgattatctatatttacagatgtattgctaggcacgattttttttaatcaagtaaatttctagtgaatatcaccttaagtttaattttaaactcctaaaagtgtatatatccgtggatggaggaagtagatgccttctccttgaacaaattggaagtggtcgtattactgcattcaaagacatgtgttgaatgttctaaaaaaagacatgtgttgaaatgtcatagggcaattgttggatgagttagaatatatttatttagctcgagtctgatttgctgaacataataaattaataattaatagacttctaagagtgactttaaaaaataaggacagttgctccaaactagccctagttaagtcagaagggaagatggataagatgcaggtaaatgttcatttttggtatatccttttggcttgttctgcagaagatacaagcaagtacatgtcacagtattagttggaaatcaacaggctggctgttggatttgcagattaacttaaaagagactgtcacttgcgaagttggtatgactgcaattgccgctcttcgaccctctaaacggatgatgaggcaaatgaatgatcccgcgaatatatcctctaacataaagaaaaaaaaaacagataaaggccataaacaaactctgaaagaaaagtgttacaacatt

SEQ ID NO: 31623 - DNA, 693 bp, Oryza sativa
accaccgactgttctttcgttgttgttgggcgcctacatcttcactgctagctgacctgactgttgccgactggtttcttcacctccatggttatgcaacttcattacatttgattggtggcatctttactaccactgacatcttccgttacttctgatgagcaatttcgtcttcatgttggtcatttcatctccatgccgactgcgtcagttattgccaatagacaattttgactatgacagaaggacaagctatatgctcaggggctcatcaactcaagcgtgaggattatatctccaatttggacttgttccggatacattccacatggattcatagtcatgagtctattttctatgctcaaagactggaccaattattattccccgtaagggctatcaaccgaatacttgcgccagtcgggattcaattattatatttattttggagtatcccataagggataatcattcagatcagaagctattcatatgagctacacttggtctatattacccggaagatttattcttgggagcatgttacatgcgtcatcctttaaagggtgtcgaaggcatattttttggcctaggcctaatatgtctgcagcccatattttcaggtgtggcctgtcacgttcttttagggacttaggcactttttgcttaggccaaagtgcgcgtgatcaagtg

SEQ ID NO: 31624 - DNA, 701 bp, Oryza sativa
cacaccactcatcctttcttgtcatcatcaccggacgcatgtgatggcaggtgacaaatagcattcgtgttctttgcttgctctcgttgttctgttttcccttttaattattcattttgtcttcatcgatcattgttttgatggatttggcttttcttttaagatctcacattgttgtttgcttttcatttaaagtttcaccattattggttttacttgtgtcgtcagtccatcacttggttttatgcttttttttacttggttattcttatatgcaaattctgtatctctttgttcttcggggctaactctctaatggatatcaaagaaaattgaactgggtgtaatttgatatagcttgactttctatgcttgatgcaagcatcattaacaaacacggccactgaaagttggtttgcgagctgattggagcatggtagaagacctcctcagcataatttgtttctattgcttcatgactctctcctgagtgtatgtcttgtgtaatgcactctggtatgatggtttaaaattgggttggtgagacctcagattcttccttcttccttggatcttctcattttcttttgatagtatatcgttctttggggttttcttatataagagtacattggagatcgctaataagagtggtgactgggcggctctggcatacggagattttaacggctctatgaaaa

SEQ ID NO: 31625 - DNA, 692 bp, Oryza sativa
tattacgcttgttagtggcccgaacctgtataattatctttgtctcatcctctttgagggacccgacccccttgatagcttccaatcttcctagctgcttagctttcactcgctgcccccagccgaaacaacaaaggaggggcctcacggtcccctactcgaggagttcatcctccaacagctggcgcgctaggtagggggcgcgttcgtgttcacctgaggagcactcatcttcgtgcgccccaagttttgtccggtacatccatggcgggagtcatggacggcaagctggtggtgtgtggctgatgaggaggatcttgaccctcgtcaccaagcacgacctacttcgactccccctcgccgcaatcctaggcgaggggagggccgggataagtctggggactcggccatctcactgctggcaggcaagggaggacgctagaaagagtgcgctgccgcctcacgacgacggtggcacgcctcagggcgcacttctgcgccaccccttgtcgatccagagccagagacctcggtccggtgctggctggacgatgtggccaacctggtcaccaccgcacagcggcagcttgccgctggcggccggacaacggcggctggtatatcacgtagtacgattgccctctctttgtcgtcaagatggagagcacaccgggtggcggcagcttcccgcc

SEQ ID NO: 31626 - DNA, 1069 bp, Oryza sativa
cggtcggttccgtatttcctttgctgtacctgttattcggcatattgctcctagactccaccgacaatgtatttatgtcggcatttcttttgtcatttacggtggaaaataaaccagggattctagttcttacacttctgtcatgaaaaataacttatgcaaatgcctaacagtatttctttggtgggtagtactagatatatgagtaaaatgcatggagggtcacctaacttgtttaggtgtgtcatgtaggtcacttcactttcaaaatacacatataggtcactaatgtgaattaagcaagtcatttgcccatctaactatccacatgagcataccttgtacacatggcatgccacctataattgaaaaaaatgctctcggacatgtgcagaaaaccgcatgtgtatttttttttcctttctcacaaccctagcacttggagatacacgaaattagggaaaccaaatcatttcacttatgcttgttttgatgagttcttctagttctcagtcctttatcttgcttgccatcaaacatggtgacggcggctgcggcgacaagctatgaatgtaaatagcaatggaggcaaaatcctaggtggcagcaacgacaagcttaaacagagatggaggcgcaatcctaggagacagcggctgcggatacccagccaatttttttaatcctatgtggcacgctaggtgtacaaggtgtgctcacgtggatagttagatggctcaaatgtgcattttgaaagtagagtgacctatatgacacatctaaacaagttggatgactctccatgtattttgggtttgtagatgctttttgttgttcttgccccttttgtattgacagccaaataacatctttaggctttaactgcttgactaaattttttgtggtttttttctacctcttttctggtggcttagttgtcccttgtggtactattgtgtcatttcacgatgtcaggtagtcattgccttcacgcgctgtagttaactagtttttcaaatgctatttgtctcccccaaggccctaactttatgtgcaagtatatgtttag

SEQ ID NO: 31627 - DNA, 2153 bp, Oryza sativa
atgtttccgggcaagcagaggccgtggcttgcagtactagtgccagtgggtgcaaggtgatcaatcgatcctaggctcaatactctgaacggtagtctagctgccacggctgcagctagagtcgtcatccgaaaatctgaaaagaacggaccctgaatcaattccaccggcaatcgaccggcaaatgatcactatcgttgagtttaattacaaacgtcggggaatagcagtgaacgtaaccttcctatacggtttacaagagtatttatagaagataaaagaaaaaataactaacaggaaaaggcatcaagtcctactcgaaaattaatctgaatatagtgtagacctaaattcggatcacatatttaacaatcgctaccttgagacgaattttctcttatagcataaaaattatcaatcaccaaaatacctcatgtaggcaaaatcaccatgcgccaaatagtatgtagaattaaagtattagaaaagttttggatggattaatttgaacaaaatcatagcgaaatgattaatcacaagttaatgccaaaaaccgaacaatctctatctccactattataaaaattaaagatgtttttgctggtactttgtttggttgtttgtttgtttgccggtattataaaaatctctatcccatgtatttttgtttgtttgtttttacactaaaatgcgacataagcgacatgttaatgacacgtgggatgaagaccgggtcaacactcccacgtaggcgccacgtcagccaaaaccgcttccaataccactaagaaatatattttgcattggttttgatagttggaggagtcgatatacccggttttttgtttggaggttttaagtcatacttggaccatagttgagggagtcgaagtatactttttccacaagtctgttccctcgctcatctctttgggccatcttatatttctagaataagtctattctgcatccctattctcttttatcatgccctgaattaagtctgttttgaatccctcgaccatatttttctttcgtgctcattggttcgtgtcatgccgggccagtccaccatgccaaggcatcaacccagacacggcccaactatcgggctaggccggcatgggtcgacaccagtcatggcatgccatgcttagaccgggccaaatagccatgctatgggccgggccgtctagcctagcttcgggccttatggccatctatatgacgtgctagtctgccgcatcaagagtgaggcaacgtcaatgtgggtgcctacacacaagcgaggagttagggtctgtcctttagccttcccgtttaaaattttacaccgtgatggtactcatgaggaaattaaatttgaaaatataccgttcatatcttttttttcttaaaaatatcctagatgcaaatctttggacacaaatataccgttggtcttgctgaaccgttgtgcaaaattgacgtgggatgaagatgcagacagtcttgtagaggggcagcgtgagaccgcgcggtgtcgagcgacgagcgtgtcaaaccgcgagcattctcgtgcaacaagtctacgaaagtgtttcgaaaattaaaggcaaaatttgctcttggacactcgaaaaatatggtctttgctgaggaacaccataagaacgtgtatttgcttgaggacacttaaaaaacatggtaatttgttgatagatacttatacgtattattttataatttttcgctattacagagagagaattttcacaaaatgacacttttgcccctgagaccaatcttcgtcgacggggatcaaatccggtcgactcagcaccaaaaccggcctcgctgcccgtcgctttgtccacccccgccatcttccacagcagttcgtcacggtgtgttctccccggggcgacaactccatccattcattcacaacaaagagcagcagcaagtggaaagtcgtccgtctgcccatcgcgacggcgtccttgccaccgccgctcggcgcctcgtccttcaatcattcgtccgcgacccatcctcgatgtccaatgccacgagccgtcgccagcctgtgaagtaacagcaacaggagtagcatttttgtctctgtttatgaagcaacagcagctgcgaagccaacatcctcgccggcggca

SEQ ID NO: 31628 - DNA, 839 bp, Oryza sativa
agaatgtgttggtatttcttaacgacatactagaaatataattcccagcaatgatttacaaagtctgtcagggttatggataccacatacctaatagtagttgactaaatctcggcaggacccaccacataccatgtcttatacggaaataaccttcggatatggatagagttccggataaggaaagacaaccagagttacacaccagggatggtgttcctggtgcattcgcacacccaaaatccacttccattaaatggtgaatgagggggatccttcccgtgtcggcctgcgtcagccgacatgatttgatgggccccgcacaacagccgatactaagaggacttccacgttgtggtgcaagacacatatttaatatagggaatatttactcccttcactgggcggcacacccccgcgcatgtgagagaaccccttggagtataaaaggaggttcatgtccagtgaagagggggggtcgaagaacaaagagttggatcgcttagccctagtttgtacaccagaggttcagagatttggaaagctcagaaaaatcatcatacacaggagtagggtattacactttttagcggcctgaaccggtataattccctttgtctcatcctttttgaggggcccgatccccttgacagcttccaatcttcccagctccttagctttcactcgctgccctcggccgaaccaacaaaggaggggcctcacggtcccccgctcgaggagttcgtcctccgacaagcccaaacccagctccacatctctagtttattttatgatagtgctctagtcagctctgtacccattttaagtggagctgaaat

SEQ ID NO: 31629 - DNA, 1995 bp, Oryza sativa
atttctaaacatattttcggagaaagtggtaccgtatctcaatgtgcttggtccttgaatgttgaaccggattcttaacaatgttaattgcactgttgtcacaaaaaaaacactcaaagacaagcaaccatacaccttcacttgtggttttgaatttaaacttcaaaagcccaaaaggacatctctcataaagaggtacacacccatgggcaaatgggccggcaaagtgactctaagggactactccaaagggctccaaagggagcctactcaccctaacatccacctctctatttatagcccaagatggatgaaatccccctaagataatgtcaaaattgcccttggggcaaaacccatagctcagatgaaatctaggccatccgttgttccttctcctcaaaggaaatatctcagatgtccaaacgagccgaagcttctcatgcgcacgcactccagggtgaacccgtgattcgcgcgaacgcctcctcggccaatcaccgcacgcacttgcttgcatttgcatccttatctgtcacttggtcttgatttttcaatctcttcaaataaccaagtttgacttgcaatattatttgctttgtggagcaaaatcaaattttcaaaattttgcttgaagttgccaatgtttccatcaagggggagattgtgaaacaaattgtggttttgatttattgtgatggaaaattggcgagtgtcggaagtgcaagaaatgtgtgctgactaacacgagtaaggttgtgatatctatgcccgaacaacgggcgttttgtttacgtgtgtgtgcaggtgatcgaagtcaaccttggtcaatggcgaggaccgggactatgctcagggaggaacggaggtccgacgcagtcaagaggccatgtgacaaggtgggactgacgtcaggatccttggaggtctctctaggtcaacggcagatcgggactaaactcatggaagagttgaggtccagaagagtaaaggatgccagttgacacggttgagtacaaggcggtgcccgatgaacgaacaccgtgtcagtagtacttcgcaacgagattcacaaggtcaagtgtgcaagtgtctgagattcgcgaagagtaatgtacaatgctagacgatacatgcacttggacagcgtatgtgtactgtactcatgcaagcaagtgattgggttgcgcatatgtgcacgtggcccaatgccatgcacttgtgcatgagtctgatcgacttggcttggaggaggtcaagccaattaggctcttgcttgttgacccaagacggaggcggtaaggcgtccggctagcagccttgttggcagggaggccgaaccatgctggtccaggtgatggtccaagacgatagttgcagatgaggcctggctagatgcaagacgcagcgagggcatggaggcgaaagccgtacgggacatgcggttgtctcatactcgccgcacaagcgcataaggtcgcataggtggagcgcgcctcccagagacgcgtggtgaacgggtattcggcgagcggcaaagacgtggatcaacgacgaccaagtacgtgtggtgattggccaaggagcatacgcgcggatagcaggccccaccgtagattgctcgtgccggagaagcttcagccttcagctcatctcactggtaggtgggcctagctagcaaggtgcgcgggaggagtggttcgatgcatattttatgtggaaaatgggatctggagcgggcaacaacatggaggacatccgagttatttcctttgagaaggaacaacggatggcctagatttcatctgagctagggtttcacccagagggcaatttgaacattttcgtagtgggatttcgtcatcttcgactataatagaggggtggatgttagggaaagtagtgtccctttagagccccttggagtagtcccttaaaatctctttagtgtcccttctgcccatggatgtgtacttctttatgagagatagcctt

SEQ ID NO: 31630 - DNA, 672 bp, Oryza sativa
atcaaatggaagcatcagccatatccatatccaatccatccctctgccaatggagtagttgccctgcaatgcacatccacaggctcgatctcaaccattttcctcatcagaatgcctcagatagtagtagcaagtagtattacatattgtacatattgtgattgctcgagatcgtgttggtgtgatgatgagcgaaggggcgcggcggtggcagcatttatttgctgccggaaacggcatatccggcagcacaatgctttgctgcttctccagctgaattcgagagccctttcccctttcgtcgtattgatatttgacggccgatgcggcgatgccatattgccatggaagaaaaaaaagggaaaagaaaagagagggtgaaatgccaagaatccgagttagctttattccgattttggagatagatctcgcgtctttcctggacagcctacgtggaccctgtgttacgcgacgagaggccgctgctgcatgcgatgcccagcgtttgttctcttcttgtctgattttttctttgtaaaaatattttgcagtccagacagcacatagatagagagagaaaggtaggctgccatttgtgctgtgaacagttttgcagaatgcgatgccattgttctttcgcaccaaagaggaattgccacttgcgatctcagg

SEQ ID NO: 31631 - DNA, 2101 bp, Oryza sativa
ttcaagagattggcgttttttttttcaaatactaccattctttttccctactgctctagctggcctgtcgaaatcattcgtgacctgagttatcgttgaaagcttgatgccgtccgacagagacgtcgagctgcctctttttttctttttttttatgataatccaatggttttacatcgctctctgttaattttatgttttaatttcaagcggagtagcacagctcaaaagcttgtgttctgcgcggtggcgagacggagttgttttctggccggtcaccggctgcaagagattggcgttttctgatataccgcttttgtctcctgcttccagttggtcagtcgaaatgcttgatgcatccgacagagacatcgagctgtgtctcaagaatgaatcgggccccttttcctcttcttcccatgcggtttataaaataaatgctcgtggtccaagcgatgaaaaatgattttaaggtgatcctcactagttttaaaacatatgctctgatcatttaagaaaaatgaacaaagcaaaaaaagtaataattcacaaataaaacataaatatttgtgttattacggtttaaaagccaacgataaaaaaacagacttaaaaaaaaccctaaaattaaatctaattatgttcacaaaatttaaactttgagagaccaaggacctatttagtagggctctcaaactcataaatctaatttcaagttatggattggcccaaaccccacttcacctctttattcattttttgatcatcacaaccagctccactttctttccactgggactgaaaacgttaggtcgggtctgccctgagactaaacaaaaaaactctataatgttctttttaaaaaaagccttgaaatttagctgtgggcttaacaggaaaatttggctagttatctttcatcaattaccatcacctactagctgaataattaggagtatttttttttaaaaaaaataccacatcatgttctggttttgggggcattcttaactcaaaatcccaagttttataatttgcttcatgcaatcttacgttttagggcaaaatatttcttataacctttaggtccaagcctaaatcatccactttggctaatatttttcttttaaaactgtaaacaattgtatgagatattttgtcttcctccgtttcataatgtaagctttctagcattgcccatatacatatagatattaatgaatatgagcaatgctagaaagtcttacattgtgaaacggagggagtatataatataaatgtcagttgctttgcaactagcgttgatcatcgatggtttgataatttatgtgtatatttagcttattctcatgtcatgaattacgttaagttttttaataccacagtgcagaattgaggaaaagaagataaaatacacgagagggatgcatattttgagtcaactagtatgaatttatgtaaaaaataatcatatagtacctctattttttaatagatgacacggttaactttagaataatgtttgaccattcatcatcgggctaattcgatccatgccaccgcaactttgccaaattaaaaaaatactactactattcatcgtatcggctgggcgccactgcaattttgggaaattggatccataccactccgtcgcgttttccatccactcccgttgacgccgtctttccccgtccgaggactgagccagaggacaccaccactgactccggcttcggcgacgacaccgacgcaggcgcaagcggcggcggcggcggcggcggcttagggttctcgtggtggcgcaggcgcgagtgaaggccggaatcccgtgcggagcagcccccatgccatgacggcggttgaggacaccgcagggagcgatgcggctgctcctcgtcgcctcgccggtcgttcgctgcgaaaaggacctcgtcgtgcgcgtccttggccagggacgctgacgctgctggccggagacggtggcgcagccgcggcccactctgccgccttctccttggatgcctcggcttcctcaccacatgccccgacagcacgatggtcgccgagtcgacccgtgaggtggctttcgttgtcagcg

SEQ ID NO: 31632 - DNA, 1068 bp, Oryza sativa
tgaactgagagaacaatgtgtttttttaaatgctctataggaaagctattaaaaaatattaattcatttgttaagtttaaaataattaatagttaattaattatacataatagctcacctcgtttttcatatcttattaatcttctcctttcttcttcctcaaacaccccttaagtacgtaaccatatttattgagaccaaaatttcatatagactgcacaacttattttcatataatgttgttccaaaggctaaataatgaaccaaccccctctatattttaaaattttaatgtttcactaccatttcgaaaacactctttttcccaaaaaaaaaagattatagcatcccaaagaaaatatatatagtacaacatcccctcattaataaaattatagggggggtcattaaataatcggtattgaagggaatttttgtaaaattttaaccgagaggaggtagaagattaaaagtcaacttttttttagataaattttgaaccctagaaattgacttgttttgggagtaaggttagtttactttgaagtaactaaagtggaccgaccaaaatgaggtagtactactacctaattctgactatatttcaacatcattcattttttgaaaagtttagttcgacaattcgtctgtgtaacaaaccctctgtaattcaggacttgagtttccactaagcataaaaaatcagagctccatcggttgacctaataaactaaagcaaaagccaaaatttaaattttcaaacttgaatttaaagtttttttttggaaaaaattgaatttaaagttgattttaagatatttttaacgtaattttttccagtatagattttgtgtcactataaacaaatataaaagctttacctataaattaaattttatttcctaataaaccgttttgatttattagaatatacgggcgaccaagctctcagaaacaagcctggatagcaaacgtgtgccttgtggggatcaaaccctgggtgcacgcaccacgtccatttggataatcaaccccccaccgaccagagaaaaccaggtggaagtttgc

SEQ ID NO: 31633 - DNA, 2230 bp, Oryza sativa
catacattgacttatgtactaatgaccataaaactaatgtggcagagttctggtcttcaaagggattgtgttaatcaagagttcatgatagtttctcctttagtaaaaccaaatactactatatgataatttttagttttgttccatgccctgcgtggacccatcagccaatggagctcacgcttacatgatgtgtgatgtgtgctttgcttatgtggacattgtaatgttcatgagcaaatggctaggatcatatgttgggcagatcatctttaattgtgagaaattatttgcttggttccggtgatcctccacatatgcactattatttcttcatccacctaactatcattctcaaataatcagaatgaattcatggtacaagttcctttcttccttctgtaaatgcatggctcagatttaatgaccaaccttgcaaggctcaaaatcaaggactaccatgtcagcttttttacatgagcataagcagaagatgtacaccgatgcctccattgcatgaggtctacattagcaatagatgatctgtggcccactgtcactgactgttgtgtgttatggtttgctatgatgtgtgcatacttattgcctcatgtacagtatatacgcatggtgtttcacttactgtctatatatacttcaacacagcaagcatcatcaacagatcatgttctcaatctgaaacttttggagccttaggtctttgggatgagcgaggaagaggaagaaagaggtagtctaagagcagtgggaatgggaacatagaggaaaaatgagctctcagtgttcacttctggaagtggaggtggatatttgtctcagtatttttcccgatgcctcccattcctatcgttcttaggtgctccttcctcttcctttcagctcatagagatattttagttgagaaaaatatattaatgtttaggtttggatgatgagattgagagagtgggtcaggaagaggaagaatagagcacctaagagcagtgggcatgggaacatggaggaaagctcaaactcttctgtccctctaaaatagcggggtcgacttgttttgatgttttcccgatgcctcccaagcctattgtccttaggtactccttcctcttccctttggctcatataatctgcttggcagtagtatagatgatgaggtcttgaaggcaaattgggaagaggaagaaaaagagcacctaagagcattaggcatgggaacatggaggaaagcctcaaccattatttccctttaaaattaggggtcacaatatgttcctgtgttttcccaatacctcccatgcctattgttctcaggtgttcctttcctcttccttttggcttgcacgaagttatcaaagaggggaatcaaggatttgccagttgccacttgccagtttgccactacaaaagttgccatttgagaatatcctaacccagatagctcagtgaaaaaatctcaagtgtacccttttctcgactttttctaaacaaaaggcagcttcatggttcagtcagtctcagaatgaatcatgggcagaccctcattttgtctcgaaacattcataatgccgcatggcttttaccacttcaattctaacaaataaaatactaaattgagtgcgttctattcccaaaaaaaatgagtgctgcattcctatcactctagctcccacatgtttatcttccagctcctgtgctccactactgcatgagtacagtcaactgaacagagatgttaatttgccgttgagttttctcctaagaaggtgaccaacttgatctaatacgattccactaaatctaacctgacgtatgtacctacaaccaacaacttttccgtgaatttagaaacaaaaatacctcacgggtgggttggcaaaccatcaaacaaatcattttcacgagccaagcacagacacttgcattgattcgaaacacatcgcataaatcacaggatcgcattgcatcacagattctagttgcagaagagcacgagagatggagaagaggaactcacggaaccaactcgccgcaggtcctcggccggccgtagctgaagcgcctccaaccgtatcccccgcgcgcccccgctgccctcctcgcgcacggcgtgctcccctcgctctccgatccggcgagcggcgatgctatgtcggaagcggaagctcgcggtcgccgccgacgaagaggcccttcccttctctctttcccgaat

SEQ ID NO: 31634 - DNA, 615 bp, Oryza sativa
gattaatctcgtattgagttcttatatgaactcttcttttaatattccttatttttaattccgaatttcagctattttaaaattgtattcctacctggattatccttctctttttctaattttagattttattttatttatatttcgaattttgattattcttgtattgggtacttatatggaaacttctttcaatattgcttatttttaattctgaatttcagctatttttatattgtatttttatttagactctcttttctttctttttctttttctccgattaatgtgagaatttctagcccccacagcgaacgtggtgtctcctttcaaaactgttttaataatataatagatatgtttatagctagcttatagcctcctattttacctgctcttatagctgccgatagttggctgtacactcggtggctcgtgaagtcgtgccggaggccgtcccccgcgcatctgtgcgcggatcagcgtgcgccacgcgtggcgtgcgggtgggcggcacggcaccgagcaggatcgagctagagctagctggacgcgatcgcgatcgcgatgggaactcgtcgtgatgatgaggttttaagcgtcacacgcttttgg

SEQ ID NO: 31635 - DNA, 580 bp, Oryza sativa
cctgcagcccaatgtctatacaagattacagtaacacttttgatttgattactcagtgattcttaattctgcagtaacatcttacaagacaggtgggttttaccaaatgaaactatgcaaaacaccatcaatgaggtgataaagaaacagaaagtgggtgtcgtcgtatatccaacagaaagttttgcaatttatgataatgccctgagaaggcttactgaaatattttatgtttgagctcataatcccagagcataccacaaattgaaaatgggtaacttctgaaccaaatattgtaatactgacatttagaagcactaaagttcaacagaaattcactgatttaattgtggtatgataggctcatacatgcatagtaccattgttatgatcattctgtctttctctatttacttactataaaaatatatactatatcaagtgctgctaggtaattctgttatcaactcaaaccatgtgtttgctctttaaaggaaaagtaaaccactagtatggtcaacaagggaagtaagatatccagtgtggacagagactaaacgtaccaaagtgtactcaacac

SEQ ID NO: 31636 - DNA, 721 bp, Oryza sativa
cacttttgcatatctacgtcgtcgcatcgacatacttaagttgtcatactttaatacatcctgccgaattatcagatgggcatgctcaattttaaaactagagtaaagtacacattcgatccttgaacttgtacggttatgcatataagtctctaaactttcaaaatatatattcaggttctaaaacttgtcaaagtgtattttctgatctccaattaccacggtccctctgagatcctatatagtgctgacgtggcatgccacatagacgctgatgtggcatattcaccaattttacacggaccgacccattgaagcccactaaaaaagtcctccttttttctttttagagtaaattacacagacggtacaacaaattgacaggtgatatgctatgtcaacgcctatgtgatatgccacatcaacgtcgcataggatctagcttggatgagctgtggcaatttaggaccaaaatgacacaatttgacaagttataaaaaaattgtattttgagagtttagaaatctaaataacacaactgcacaagttttgggaccgaccatgcactttactcttaaaactattatatcaaacatactgatgtgccaatttcttagaactagtgcaatttaaatacaatgatactctctctattatgaaatatataagcacttctagctatctatatagaccaggtcagctttctcttagaagcgaattt

SEQ ID NO: 31637 - DNA, 2047 bp, Oryza sativa
  unsure (1)..(2047): unsure at all n locations
cttgaacttaattaatgtgcacaacttgctctagaagtttgcttttgatgcaatatcctctcatagatatgccatgtttttatcatcttagcaatagctttcggcacatccttttgaatgctcacgcttgattgttcatgggtgcatcaattatgttctttctatgctttatgtgttttaccactgcttttgtcccaggctactgagtgtgtttacgcataagtagtgctgaagatagcactgagactacctgtaacaggagctctaactggaaaacttgtttgagatttgatgacactgtttggcgccctcatcactcgctgactgataagattaggcgtaccatcgcgattgtgctatagttttcttcaaaaatccgaaaaggaataaaatgcaaatgtgatagagctaaaagcccatgttctatgttttattaccatcttgatactctcttgaactgggcattagcatggtatcatgggttcatttttgtttttgataatgttaatcttgcatatttatgcgttggattgcttactcttaagcttcttctgaatagcatgaaagcttgctagtgatataaccttgttgctcttgtcatgtttcatacttcttttgtatatgtctagctggtaacctccaaagttcactcaaattaaagtttgcaatgtctcattttttgcatttttgcatgtcatcattgccaaagggggagaaatattcagcnaaaatgcaccttcattgagaatttaanaattttgcttttagaaatctttggtgaaaaggggagttaggcacatagggggagcattcttgcatttgcatcatacattactcttcgcgaatcccgacacctgcacacttgaccttgtgaagcccgttgcgaagtcctcccaacattgtgtccgttcatcgtgcaccgcattgtattcaagcttgtcaaccggcatccctgatcgttctggacctcaactcctccctgagtttagtctcgatccgtcgttgaccccggttgacctctaaggatcctgacgtcaatcccaccttatcacatggcctcttgacctcaccggactgctcctccctgagcatagttctggtccttccattgaccaagattgaattcgatcacatgcacacacgtaacaaaactaccgtttttcgggcacaaatatcacatcctgacctatgttagtcaacacacacattttcttcacttttgacactctccattttcccatcacaatgaatcaaaaccacactttgtttcacagttgggggtctatttataaaataagttttgtaaaagagccacattgtcaaaaatctagaaggtctggaaccacgaaacagtacaaacttcgtatttctatggtagaaacatcaccctattagtaaatgtactgtgagttagaactctagaacctctgggaagctcttctcaccatcagtgcaattttgtcatttgtctattttgtttactaattgagcagttcacttggcattcagcatcagagcatgtttactcatgatgattgttttttatacttgcagaaaaaaactatctaattgaattgtcaatttatcccttgtttcacctttggatacttgttagtactgtctttttacggacccaattacctctatccatcatggacgtattaacaactgtttagtgactggaaatgcttggttatttgaatcatagaaatgcctaccaaattagcaagtttcatactaacaaatgatctgagcaaccctttggaacttcttcacaatccaatttagaaatgatctacacgctcaccatctttgatcttgaccgtccacgaagtttgtccacatatgcaccataatagtttcgtatgtgtagtttgcattgctcttgagctgtgcatagctgatgatggagagaatgcaccaatacgatgtttggtattcgccaaaagcacattgaaataagtgtgtttttgtttttaatttataattttctgcacacatcacatggttttactatccttcgaaaaaatacggctaaaccgtctct

SEQ ID NO: 31638 - DNA, 1486 bp, Oryza sativa
attcctgcagccctttcagacttgcaataccatttgaggaattaaggtttttgacatatcgcaatctgtctaaggaattaaggatgtagacattcagttatatgcaagttatatcttgaccttttattttataattgaatcatcgcattggctttttacactgacaactcgaaagacatgaaaatatggaatgaggtgctaggtcagacaaaaattttgttggggacgccatgttcaacagttaaacactccaacagttctgttgattttaattctagactctagactctagagtctagagctcaagaaatgaaaatcagataggatgttaaattgttgctgctgggtttgtttgtttgatctccctctcctattgttgtatggtcagcttaatgtcgagcttttcacttgtcttcctcaagatgaactttcaactttttctaataaccttatcagtagttaatctttttttttcagatgtatgaaatgttaattttctgatctaacatagagctcaatgagcagactggccttcactaatctcaaatgtttgttctggattcttttcactattttttttatttcttgtgtattacgacatgtggcttatgcacatgtgttatgccatcagtgtacacaaggaactggacaaataagtttggctcggtaattttcatagagtattttataatcatcgaaaactattaacttgggtttaaaaatacttctaggattgccagcatactatggcggcgcaatgtgtggtgggaaacctcacaatgctggttattctgcatcctgccacctgctggcataacagccatcaggagtttagtacctggtgactagacagcctgtcaacatggccacatgggcgtttgcaccatgaccccaggtcatgtggaatcacctgtttttatttacatatgtttaagaggacaggaagtgaggaaacttacagatttactgttgcttgggtttatttatggcatcatataaatatttaggctatttctatgaaaatacaatgtccttaaatactggtatataagtttagaacaatctctctctgatctttattggtaattgcgttctttcttatctttttttgtttatgcagttctctgaatactgaattttgtcaggttatttgcgtcgtatcatcctctcagagatttgccattttacaagctctccacaaagaacaccatattctcctcagtaagatcacaacctatatcctcttaaacatattgcgaaaatcgtgatattctgtgagctccatgttttgatgattgagataaacaaaggcttaaaattcatccccacgaaaaattatgggcctctatttattgttcattaccgtctcaagttgtcacaagattgtagcttcatttgtatttcattatatttgaattctgaccaggctgttagattgcaattctcctagatttttgaagattgaaattttggggggaaacatcaa

SEQ ID NO: 31639 - DNA, 3115 bp, Oryza sativa
atacaacacaatctaccaaatctaccaaatatacacagaaatatcacgagcgtagtttcataatttcattcacaaatcataaggcacatttggagtcttggagatggaacaatacctctaactctctgtgaatcgccgcctatgcgctgcaacctcaccgccggccatgcctgtcccctcgccgcacccttgcctgtctcgccggccgccgcaacctcccgcgcctgctttcctgccgcgccctgtgcaccgccgccggcctgccgccctgtgtgccgccgccgccgctaactccgaagggagaggtggagctagagccgccggatgccggaggggagactggagaggaggggaggggagatggtggcttggcggctggcaggcgcaggcgaagccagcgacaccgagatccagaggccagagcgcgcacagccgcctccgcctatttctatctcacgggaggggaggggatgtggggaggagagagactgagactgaggggatgtgcatgggctagggtttagtaacttttttagtgggttgggctttttgggccttctttgatctatattttgaagtttatatgtaccccggggccccgcgggtgaaattagtcccccgtcccctccccgcccaaatgcggggccctgtacctgacgcacccgcgggtcaaaaatcacacccacccctgcccccgtaagggcgggtccctgcaggggacttggccccgcgggggaaattgccatccctacccaacacccactataggtggccaaataggccaagccaccccatgccagccgaggcacgtatgaactgttcatggtcgaggaatgacccagccccgacccgttaggctatgctagcatgtaccacctagccgtgctatgctcggtgtcgatatttcttaatgacattactagaaatataattcctaataatggcgcataaatactcctggtatattatggttacagattttatccgcaagcgcatggatataccattgtagcatttcacccgagagtattccaagggtatcgtatctgtttatcccgtgggaagattataagggagagaaccatactaataatttatatattacttgtaataaccattgtctaagcaggggttaatataagcagagggtagagtgacacacaagcataagactactcactctcatattaaattatctgagctaagtggaaagaaaatagaaaaagaatctattcctatactttctaatatactctctccgtttcatattataagcctttctagcattgcccacattcatatagatgttaataaatccaaacacatataaatgcctagattcattaacatatatatgaatgtgggcaatgctagaaagtcttataatatgaaacggaggaagtacatattatacatacatcctcgctataagattaactctagctaataccctatttccgatgccctcttggtacttcgagaagccacccctgactgccgagtttcttacggcagcccgtcatgaccattcaaccggggctaaatacggaggaataccctccccaggaaattaacttaggattatatactcgcgcggaggaatacccatactgagctgtcactatcagcggcccaccgctcttccacagcatataaccccaaataatgatacccagtaatctagacaccacgcctaaactaccagatactactctaatatcatcgtcatggcatagagtaattgcataagcaaacattataccgcaccattgcatctcccagataagctagcagtataatcaacataacttagatataaagtaaagttggtatttatatactcagaaagtagcacaatactagagttgtatacagaagaatattctaaataaagtacaagtcttacaaaaagaagaaaggagagctgctagagccatatccgaactcttctgaagacttccggactcagacttctattctattcctactccactagcttgagaatattaaactaatcttgagagagtatgagagagcttgcttgaggtgtgtgttgaaatggaggatgagagggctttatatagcttgagaatgacagttatgacggttggaatggtcggtaataccctccaaccgtcattggggagtcatctcaaccgtccatcctagccctggatcaaacggtgccacggcgggttcggccgaaccaggggccagcccaaccagcccaagttttggctggcagcctcctttcttgatctctttcgcagacttgtgaattttgtcccaattcgacatgtcatttctgagttcttggcccattcatgcataagtctaattcccgacatcgtccaattgattgatcgtctgttttgatgttgattctcctccatttgtgttcattctctgcaagaggttagtaatcctagtgctagtgaaatatttattattctaacacaaatatgcattgcaagcataactagttctcctttattttggtagtattgacggtcaaaactgatcgctaacgaccatcaacacttgggccgccaccatggaccacgtgttggcaagatatcgttgtaacaagctgacatggcgcactgggtcgcgtggcatggtagcgagcggtggtggcaggcaccaagaatagagaagaggagacgacatagccttggctgttagtgtaggaatggagggcaggaagctttttggtggtgaccggcgagagtggagatcgtcgacgaggagtaagaggccacgggggcatggagcttacaggaagtggcggctgggcgacacaaccaagatgcccaatgttccacccagtccacagagcttgcttcaagctgccttgcagggcggtgttggcagtagaggatgcggctggtggcgtcagtgacagaggatgtgggcgttggaggcggcaggaaggatataggagttggcagtggtagcggacgatgtgagagttggtggcagtggtagcggactatgtgagagtcggtggcggtggcggaggatacgggaggtggcggcaagcaaaaccctaaccctagttgtatctatgactgaacttttttttagcaatcgtccgagccttatacgagctaat

SEQ ID NO: 31640 - DNA, 696 bp, Oryza sativa
gaattcctgcagcccgtttgaaatgtaagcaaacattttcttttcacaaactagaaagcataacttcatagaaaattatgggaaatgggatttcagaagtaaaaaaaagctttaaagtccagacgaaaattccaaaaagagaaagttggtaattgaagaaatcaaattgaaaatactaagttaaaattcaaggattaaaaaacaaccggtaagtgaggaaccacattaatgttttaaagtccagatagtatatccaaaccattaaagagaagaacgttcaaagataaagaaattcaactcaaacgattaatacaaaagaccttcgaagattattaaatccaactaaaaacataaagtttaaacgattaatacaaaagaccttcgaagattattaaatccaactaaaaacataaagtttaaacgaggacgggaaattaagcgtcgaggggcaaaaaagccgcaaggttgaaatgtgggcaaatgttttctttcagcaaactagtaagcataagttcaaacaaaattatgaaaattgtcatttctgaagtaaaataaagttttaaagtctaaagggaagttccaaaaagagagtttggtaattgaagaaatcaaactaaaaatacctagttgaaactcaaggatcaaaaaataaccggtatctaaggatccaaattccaaatagcagatcaaaaccat

SEQ ID NO: 31641 - DNA, 675 bp, Oryza sativa
agtctgacaccgtgaacgtactgtatagtttttaaaataaagaaagaaagaaagaaaattgctacatagtctgacaccgtgaacggttaaccgcttttgctcaaatctgaaaccgatcgtgcctgtcaagttctattgcgaacgtctttctctccgctcgtttgatcccttcgtgactttaggcctgtttgggaagatttagattatgagaagtttgatcccttcgtgactttaggcctgtttgggaagatttagattatgagaagtagctgtttggtagtttggtagccagcttctgaaaatctaaaaaagctctgaaactcagcttctccagcttctggcttcttagtttggtatcttagtttatttttcagaatctataactacagattctcagaagctgtgaactgtttggggcagcttctagcagaagcagcttttgggaaaaactgtagcggggagaagctccccaaacaaggccttagattctgagaagcagctgtttggtagccagcttttgagaatctggaaaagctctgaaacctaacttctccagcttctggcttcttagttcatttttcagaatctgtaactaccactggtggagaaaccatctttcgtcggtcgggctaattccacaatagtcccggttacaacaaagatctttagtcccgg

SEQ ID NO: 31642 - DNA, 682 bp, Oryza sativa
agtgtcgctgtgaatatcaaataaaattacattcacattttcatgtcgactattaaatgcttttggacatagacagttaaagctacaaatgtctcactgaacacattctgggatgatttacattgcatatcagagggagcaatgtttctttacgattccctgtgcttataaaaatggattggaagtcaatatccctgagtggagtggttttgtaagggaaaaaaccaaactgacccactctgtagcataaatgagtatgcatgtgtgcagatctgatttcttcaggtcatacctgaaaaactaaattaaagacatccataaaacaaatctgcatatgaactgttgcacctcatgtttcgttcgtatatatgctgtgcaccactgaaatatatatgtggtcacacttctattggatcttgactcttatgaaccttacgtgctatcaaacaagggaaaatttttaattatttttaaatcatatctattacaaaatattagtattaaactggggtttagggagtattagtttttcatctaacatatagccttctattctctgttcttttatggcttttagttgagacgaagggatgaactgtaaatccagtgattatttgctactggaatatactaatgtttccgttttgattaatagatgtcaatagaacggtattactagact

SEQ ID NO: 31643 - DNA, 570 bp, Oryza sativa
tttaaaatttaattcagaaatttagtagtacttaaattttcgatagtatattttgaatggaaactttacgtatagaaactctttacgtataaactttatgcacataaatattacatataaaaactttatgtatataaactttatttacgagagtttatatatttagttggaaagtacgatgaaaaatttgaatgtaatttcttttataaaataggaatgtaattttatacatgtacgtataaacagtatgtataaaaattatatatacatatgtatgtatatatatacatatgtatatgtatgtatatatatacatatgcatatatatatatatatacatatgtatatgtatatatatacatatgtatatgtatatatatatatatatatatatatatatatatatatatatatatatatatatatatatacatatgtatgtatatatatacatatgtacatatgtatctatatgtatatatacatatatatacatatagagggtgagactattctataccccctccctccctcccactatccccccttcctctcccgatctctcccgct

SEQ ID NO: 31644 - DNA, 917 bp, Oryza sativa
gggggcgttccagcccaacccagccccgccccgccccgttgtcatccctagtgttggggtggctagactggtgtggctacaggcagctgatctggagatgttgcatgaagagcacagggtttttacgtacccccgtcctcgcccacggtgctggattccccactaggcggacggacacagcaaaactttcatttatgctcatgccgccatcaaaattaacaatcgttgtagtttttctgtgaaaatatgatccagttcatctataaatattcctagattaatagaactaagccctgcaaaaaaaataataaaactaggaaaaatttactacaagacatccaaaaaaaagtgtaataagctaggggacaccataagaacatgtatttgctgtaagacatcgcaaaaatctggtaattagctgctggacacccgcgtcattattttattattttcggaggaataggaaagagaaacaatcattaaagacaagtttgcccttggctcaaatgaatctaatatgggccccacatccagcagcaccttcactgcaagcctcgccgtcgttggctcccgcacagccgccacattcctcgccacgacggcgaccgacgctgcccaaccgtgccggcacaacctctcctccagctctggcgccacctccgttgcatcgtgacggccttggcccttgcgcatgactgtgcagcgccgccccagccgaggtgccgcaccagcccacgctgtcgccggtgctctccctctccctcggtgtcggtgtcatggggccgggggtatcgtgactagaggcttgggtagccgcggtcacccacgtggcctgaccccctcgggggggtcgggcccgagggcgacatggccacccctccctctgtctccccgaggggtcgggccgctcccgtttc

SEQ ID NO: 31645 - DNA, 1135 bp, Oryza sativa
gtcagactatgtagcaattttctttctttctttctttattttaaaaactatacagtacgttcacggtgtcagactctgtagcaattttctttctttctttctttattttaaaaactatacagtagtgcaaatcagcatcagctggagctatcaatcaaagcaaccgataatcccgatttggtcactaatccccaactaccctctcacaacaccacatcttcatgcgagacctacattgggcccaccaacaccacatcacgcaatttgaatcctctgcattagaggagagaatgcagagggagctacagtgctctgcattagggtgtgttgtttgctgttggattcacatccaacggcctaaaacaaatcgctacagtaggtctaaacagcaaatgggaacagtaatcaggcaaacagtagaaagattactgtttacaaattattttgctacagtaccgaaacactgtttggtccattaattcactgtagcagactcagaatactgtagctgcagttcttctctgctgtactgtagaggacctggatcctcacatcacggcatcacgccatttttcacaccacagctgctgcccatgaatgcccattgcaagcgaatcattcatcagacgaccagctacttcctccgtaaaaattttcacaatagttaaggaaagtaaataaagggtggctgtgatgggttaagatgacaagatattaaatggttgtgatcggctgaaataagaaacggtaactactccctccattcctaaatataagaaattttattttggttcaaatttgttgtactaggatacgtcaaattcaaccaaaatcctagacaatcaacatcaacaaagaacagaagcataagaaagtaaaccaggagaggcagtgaaacagatgtacacaaactgaaacaaagaacaaaatgtatgtaaatatattgttcttgcactgtatcagttccacattgaagtgaagattaaaacagagatgccttacaccgatctgaaggcaacagcagagggcactgggcaatgagagagccagcagaataataagatatgatcaagagcagtgcaatgaacaaggctgactagaaactaacctgacaaattcaatgaaaccacctaag

SEQ ID NO: 31646 - DNA, 630 bp, Oryza sativa
ccgggactaaagatcgtaactttagtaccaaccgggactaaagatcccggcgatttttagccccggttcataacaccaaccgggactaaagtcccacccctatatatatgtcttcttcctcctccagcccgagcaagcttcaaaatttcttcaaaaaagaggggaggtcatgccaaaatttctagtgaatttattttggtgattatatacaaatcgaaggtgcctaaaaggttagcaacttcatcctccaatgttttttttttcatattacatttggagctatgttttgcacacttttttgtctccaaaattttgttgttagttgatgagagagaaaatttgtgtggggaaaaaagaatatatagaaatttagtttatttgctaaagaaggttttataaaatagttgagaaggaaaatatagtgaaagataatcttcaataatagaaaacaaactaaaatgaaaaattaaaataagtacaacacattaatattagttttaaactttataaatagtaaatatataattatttggtgtaatatttcataatttttgtatgaataatgatatgtcattattgtgtgactgttgaaagagtttgtaattattttataattattgtatgactgtc

SEQ ID NO: 31647 - DNA, 552 bp, Oryza sativa
taataatcaggtttgtttcttgatcctaaaccatagctggaacgaatttgggtggcctaaactaatcaaaatcggcgccgaaagctagaaaccaaccaaaacccaaagactgaacacatccaaatccagcacataaacacaaacaaacaaaaaataaaaacaaatcagcacagaatcacctccccctctcacaccacatgtccccaaaccttttaaattaaagctgagcaaagaactaaactaaagaagaagagagacaactctgaagcaaagcacatcacatgctgcaccacaacccaaaaaacaaaaaagaggaatcactccgaatcaaccccctccaacacaagaacaactcacagatcggctcagacccgcagaacccatcaccacaaaaccgcacaggaaatcatcaaatcaaaacaacaaccaagaaaacgaaaagaaagaatcacatcaacaagaagagaagagagacgcaccgcagcagcagcagcagcagcgacctcgggggtaggtgggtggcgccgtggcggagagaagagaagagaagag

SEQ ID NO: 31648 - DNA, 803 bp, Oryza sativa
tacatattaacctatcatgtcaatttttttgaaaatttttcataactatttagatgacatgtaagaaacggatggacgtctacccgagtgtttaaaacagtttcccctataaatgtctcaaactctcacccatatgattggaggcaaatacagtaagcaaatactaaaatgataaaagaaggttcagatgcacgagtttcacctgccagaagaagaggacaatcttgctgggcaaaactggacccaaccagttcaaacttcaaagcaagattggttttgcgataataagaaaaccggtttcattgtgatgtccagactctagcggttgttcccggcgaacagttcaagtcaataccatcctgattctcgcgcgccgagactttagaatataactccccaggtccagcgcaatacagtatatgtagctaagctgccggctgctgcatgcgaagaattctcactcgccggccattttttcgcaatgcccaatcgtttcctcgcggcggcatctccgcgctcatcgtccgcgtcgcgtcggtctccgcgtgcgtgcaggtgcattccgggcagacgagacgactctgtcctagcctcctcagccgcgagccaaaattcagaaaaatccgcaacaattaggccctgagccatacacgctcgtacgatcgagttaccgccggcggctggcgtgccagacagacggtagtagtatctcatattctcacgtctcacgatcgcaagtgtcaactgtcaaggcagcgaagtcaagcgagacgctgaattattccccggatttgtcagcctgt

SEQ ID NO: 31649 - DNA, 576 bp, Oryza sativa
tatgtcacatccaaccaaaatatcttatatttagggatggagggagtatatccatattagattattccattttggtcacaataccgtactgtcggtcagaaaatccgaatcttcctgagaagccggacatggatgaaccgatcatcgatgaactggtacgactattcagcaggcagcacgggcgaggaatatgcatagtggacaggacggtgacgttgaagcgaacaccgtaatagtagtagcagcccaagtgctcaacgtgctaaacgcttatacgcacggctcgatcgatcacaggagagacgtcgctcgcttccttagttgcccggcctgccgcgcggcacgagattgaattgactgccgcgtcgtagtcgggcgccggccggcccggccgtcggtgtcaccggtcacccacctctccgcgacgaggcgtccgcacgtcgtcgtcttgcttgctctcggtggcggcggctagcggctgtctcgtcgaccagtatccacaactcgcgctgcgcaggcgaggccgtgagggggaattgcccgcagaaactctggtgtttgttgaatcgcacgcgg

SEQ ID NO: 31650 - DNA, 596 bp, Oryza sativa
tccaaacttttaatttaaacacagcctagctagcaccgattggggttagcctgaagtactcactcccaccattttaaattactactcccttcgtaccaaattataagtatttttagaagagtgaagttaaactttttaaatttaactattagtagaaaaaagtaaaaaaaatcaatcatataaatttaatgttgctagatttataattaaataaattattataatatataactctttttacttaaaacatattacttttgtagatattatcggttaaagtagtatcgttttatttaaaaatgatcatattttaggacgggtgttttaagtttatcttaagttaaaatatgtttatctttgctcattaatttttaaaaatccgtgttttttaataacttcatctaggagtaaagccacagcgatgcttcagtcagtgtgagcgtcattggctccaaactttcattcattcaatcaatttacagaatggggtccatcaaggtcgtcaaggaattaaaagataagattgggagcacaacaaacaaagttgggcacatcaatagtggaaatgtggaacgtagaaacctccacagaaaact

SEQ ID NO: 31651 - DNA, 642 bp, Oryza sativa
tgtttttaatccagaagttctcttgactcctgagataaggaactccactgcagttttaaaatgatgaatccttaccaagctgtcaatcactattgaaatatctgtttcgtaagctgatatctagcatcagaagaaacattatcttccattgtatactgccaaatggcttccatgcatactcatgggggaaggcataagatcattgcagaatctcccctgcaagtcatatgtgattgcacttcttgatcttgccagtacatgatatagataataagataaagtgggaaacagctgcctctagaacataagctctcatcaacaattacaatttcagcaacggtttgctcttctactgctagcttccgcttagaagcaatggacgtgagacggatgctcttgaaatcatcatcaatctggccacactttctactgccatcacccaatggaacaccttaggaagggtttctcccagctcaaaatatattggcaggaaagtctttcaggctgcagagtaatagccagattccttaaccagaggcataaaggaggataaggaccctgcatcatgcacattgctttgcaaagttacataaaatcaacagttccagtgccaaaacacaagtaatagatgcaatcatgaaa

SEQ ID NO: 31652 - DNA, 630 bp, Oryza sativa
ccagcgtcgcatccggcgacgggttggggtggtcgggggattggggggtaggaggaggaggggcctatgctgttccccgggcttagagtgatggccggggaggtcgcggcttggcggtggaaggggtcgtcgacggcgacggcgagggaaaccgtgtaggcggcgggctgcgccggtggagacggggaaggcgcagttgcgcagctaatcgatcggcgaggggagggagagagagagagagagagagagagagagagagttcactgttctagaggtagaagatgcacagaacccgttggatcttagaaccaacggcccaaattttggctgagatcttgcgaagaaaacaaacaagtagcagcttaatttgttttgtaagatattagtattatgtaagatatagtgactaaagtacttccacttttgaaactttgtcctagatatgctatagtaggctgcctgatttctctgttcagacagatgtttatgtttctaatctgatttctctgtacaggctgcgattgttctcggcatggaagatctcaaggatgaatgctacaataggatgctgcaagatcatcagatgggaccacagcaagtgaagctgtttttgcagaatgtgctgggaca

SEQ ID NO: 31653 - DNA, 681 bp, Oryza sativa
ttcctgcccccctgggttgtctacgtctagatactagatatacagttttagcttgatgcacactggtagtagcaattctgagagaagtttggagtaattctgagagaagttttgccaggtgctcctgtgaacagtactaattgagagaaactattatagtgtatcatattaccatcgaagaacatgagttaattggtcataaaatcattgtgcatttcgaatactagcaaggttatatatgtcttactccatatccattagcaaggttattccgtcccaaaataagtgcagttttgtattggttatgtttaacatttgatagttcatcttattcaaaaaaaattatgattaattttttattgttattagatgataaaacatgaatagtgattatttttttataaattttataaataagacggacggttaaacgttggatacggatattcatggctgcacttattttggaagggtggtagtagtaatcaaggtgataataatgactagtaattcttgtcgagagatactcaattccaatgtcatcacgccgttcgaaaatttaaattctataaaactactcaagtttcttcgtgcaaaattttttacaatgtttatgtgaaatgttattatcacaagacgataatcttgagaataccaaagtatgaagaacaaaaattgaat

SEQ ID NO: 31654 - DNA, 702 bp, Oryza sativa
ccaacaattatggtttgaaacgtcgaggctttcatggacgtgcctccgcctgatgggacgagtctggtgtagcccgcacgatgccgacatcagctttctgctgttcgaagcagaccgaacggctgacctcatcggtcgtgagttgccaggcggagccagccagtacctgtagtgcgctgcgtaacgcaatcgggccgagtcggtaatgggctgcaggcagaggccgagtgaaaagtgtctttactggttcggtggtagggcagagcgaataacccgagcgctgcagcacgtaatgcatcgcctcctctaccgagggattaaggttggacggtatgctcacatcaattatttgagcgagaagatcacgttgctccgtagtgggctctgtgctcaccagggtatagcgaccataacggatctccgccggatggtttgcttcggccgggctccttgataattgggtccgattgagccactgtcgatctttggattagtcggcaatggggtggaaatttgcgcgctgcaggcactcaaaaaaaacagcaggcagacaggcgtaaaaaaacgctccatgaaaaaacctcatgtcagattcagtacagaacctgacatgaggtgaaggatcgattcagtgagaaatccgatttatggcaggtcgtgttaacgctaaatactttgcactgcatcataggggtgcaggaa

SEQ ID NO: 31655 - DNA, 631 bp, Oryza sativa
tcagctcgtagcgggatagccgacggatattgcgccgatagcgcaacacctcccatgcttgtcgcaggcggatcaggccgaatagggtataggccagcgccgcaaccagcccgatctcgggtgacagggccacagcccagggcgagtacacgcacagtactgcggcagcgatgcaaattgctaccgtgtaaagctccaccgcgggacggagcttggactccatcgcatgctcggccatgaccttactcactgctccaatgatgtggcagtgatcaagacagggtaatgctcaatctgcaggcgggtggcgatgtcgttaccgttgaccggtaggatggtgacactaggagcggctgctcggatccgagccaaggctccggtatcggccacttcgacggcaaggccagccgcgccgatttcctgcagctcagtcgcgcgttgacgcaaccaagccagtgattgggtatcctcacccaccaggaaaaatggccgtaagcccggcatgtttagggcgcgagacgtgatttggccggggctcaagagggagctgcgaacgggtaatatccaggtttcatcggcaaatgtggacaagtccgtatgcatggcgcgaccaggctggagattgttgttt

SEQ ID NO: 31656 - DNA, 575 bp, Oryza sativa
tcctgcagccccaatttatccaaataaacaattcctataaaaaaaatttaaccacccaatgatcaaatttaaccaagctacaccacatctttcgttgttttgttctgtacatatccaagaacatccaaacaacaagtttgaatgtttaacccatataattaaatttgcaaaagtgaaaataaaactatattattgcaattcagtgaagggaagtaaaggagaaatctagccagactggtggaaacaagataattattgctgttcccggcaaagactcaaatagtaatagcttagaacaggttggcaagtggcaatataattaatttcctatattctggaaaaaaacaaaaagtagcacaaagtattgtaaaatgcaaatagagataataaagtaaggaagataagctattccatgccacacaggaaaagagcaatttccagggcaaaagagttgatttatgcgcaactattatataagcgagataggagggcgtatagtcttttaaggaggaaataaacacccaaatttcgagctaaagaggtcccaaacctgggttgggggggggggggggggt

SEQ ID NO: 31657 - DNA, 584 bp, Oryza sativa
gaatcagtttagcgtggagagccggagtcatcaactgctgagaggaggatgcacgggcggcgatgcgcttgatcgatgaagtgaaggtgcattttaatttgatgacgtcaaccattttaatcaccatggcgagtatatttgttcggatttatctcgaattcagcatatgtatagatagataaacaccggtggagaaaccatcttttgtcggtcggccgatttccacaatagtcccggatgcaataaaaaccggggctaaagatgatctttagtcccggttcaaaagggaaacgggtatatttgatctttagtcccggtttgtgttaccaaccgggactaaagatcatctttagtcccggttcgaatgttgtcaggacctgtcaggcccccccgggatctttagtcccggttggtatcttaactttagtcccggttgatattaccaaccgggactaaagatcccggtgatctttagccccggttggtgttaccaaccgggactaaagatcttaactttagtcccggttggtgataccaaccgggactaatgatcccggagatctttagcccctgatggtgctacc

SEQ ID NO: 31658 - DNA, 561 bp, Oryza sativa
ttagtgtttcttatcttacgctagtttccaacgttatttttaaaaccacaatcgacatagattttctaaaagttatatttacaaattgtttcccttcattcatttttaagctgtagctcaaacgagagaaaatttcttctataatgattaaggccccgttattttccacccattagctaatatattacgaacatgttttccaagccactaaacaacatgattcttttagaagaactttccatgtaaaaattacttaaaaatttaaacaaatctatttttaaaatttatgatatcaatacttgattgattatgtgttaattgaatttcttctctggcaagtaggccaaacctttcaaacgaacagagctgcatgtttctctgcatctgcatgtcctgttttcctgattccagaccacacgggcttgctctgtgtttggtaggtcgttgggagctgagttttgctgacaaaatgctacttacatcgttctcatccgatcaagtgcgtgccttgcaagttgcaacaaagcttattactagatccaaccatttcgctgccagcac

SEQ ID NO: 31659 - DNA, 656 bp, Oryza sativa
ttctgctagtacgttcgtctagttacgctaagcgcgggtattatattgctcccctccacactctctcccatctttgtactactatatatagggaaggagggagagtgagtgattcatatatgacctcttcaaaccaaaccaaaccaagccaaagccatgcataaggcatccatatttcattttattaattagtttcttcaccgccctttgcgcgcctatttttgtcatcaataacaaaagttgcagacagttccatggataaggacgtgttctatgattttttttatttgtatttcagagattttctgagactagatgcctatccagaaggaataaaaaaacgtccaaacaaaacttcttccagaacctggctgagagtatcgttatatataacattgcattttttttctcatccgttgggtcgtcttgagatttgtgccatgtgagaaaaaaaaaccactaagcaggtacctcttttttttttgaaaactcaatataatattatagattaaagacagagttcacatgaagtaaatccatgatacatcgtccgaaaataaaagatctcaaaagcaattttccttatgaaaaggaagggaaacttgactacgaaaaacaagcaggtacctgaagctaggatttaaaccctcatcgtc

SEQ ID NO: 31660 - DNA, 659 bp, Oryza sativa
ttgtataacctgatttctgtttctgtttgctgcatttgcaattcgctctgttggacacagaaaaaatgtatcgcacaattagaagaaaaatattttgtgctccaacagcaactactgaaagtatggtgtgctcataagtcaagaggcatgtacctgaggtagacagactatctgctcgaccagtaagtgttctttttgactgatcaatttcaggagcttcttcagcttcatcatctgatatgacaactcgaacacgctttctaccagaatggttgctaaatgatttacttacaacttcttcagggctcccatccatgtcacatgactcatcaacattcttcggactactatgtatcttagatgctttggtcttagatgacttacttttatgaacaagtgaggcaagaacaacatcatcatcaaattcctcagaaatattatttgcaatattcccatcattgtcctctgtattgaggatattatcagatacattgccatcttcactttcagtttctgagcaatagtcactaactgtatcccttgcttcatgttgatcagacattctcttcaggctgtctatttcttgctgcagtttcctgaagttatagaatatattttagaacaggttttaataagtactttctttgtgcagagtatgt

SEQ ID NO: 31661 - DNA, 621 bp, Oryza sativa
cacttacaaaattcatttttggcagggtttttgtgtaagtagaagcactgtgacgaccgacgaagtggctacacatgctttcatgtgggtatgcgtgctagaccacatcttagatcgaaaagatcagtcggcgaatacgtcgaagtttcgttcgtttcctgctgctgttgatcgatgcagcattaaacaatgagcaaaaacagtggcaaattgggctggatttcatactcatactatattcatcgttttgagaaaataaaacatgtacaaattagtattacctccgttctaaaatataacaatctatgactgaaaggatcataccctagtactacacgatcttaagttactgtattttagaatggagagaatactataattgtagagatttgctgcaaacagtgcctactatctctctcttaaaaaagtactattgttgaaaacattactactctctccgttttacaatgtaagattttctagcattgtatacattcatatagatgctaataaatctagacactattatatatatatatatatatatatatatatatatatatatatatatatatatatatatatatatatatatatatatatatatatatatatatatat

SEQ ID NO: 31662 - DNA, 643 bp, Oryza sativa
tgtgtgcctgttgtctcatttgatctgccatttcagcgcagttattatttttcctatctgcatttaagcaattctattatgtacatgtttgtgcatctgctgtgtgttctcctttcctttaacctctcaccatcttaactatatttagccattgaatggacttggctatgagcctctcaatggcatctcctccctcctcctttcttgctcttttcatttgccacttctctgttctcgtgtgttagttttcatgcacaggaaagactaatgctttggattttggagaaggtgaaggaggaagagacagaggaggcaggatgctgcagcgggcggcgagcaatgcgtattcatggtggtgggcgagccacatccgcaccaagcagtccaaatggcttgatagccatctccaaggtgaccgtccaatatataatcttgatcttttttatcatatatttgatttctgtgagttatgtatgtacttatatgggagatttgttggtttgttcaatcctagaagttcttcaatggggagaataacgaaattattctaagccttccatccatgtgattcttgatatgaggctacagatattcttatttggagtagcacgagatctcacatctctaaattaatacacataac

SEQ ID NO: 31663 - DNA, 704 bp, Oryza sativa
atattttactgctaagggcggcagttgcttaatcctatctgctgggacggcagttgcgtgcaaacgctttattctgaagatgattgtgacaccaaagtgtttgcccaatcttgtgacggtgagtcggtgaccttagcataagattaatcataaaaatcataaggtgttggtggatggtcgaacatatccatccacggtgtggagagaacactactttcaatttggcaatcatagtctccgatagggaccctacactgtaatttactagtttttttttactaacatgtaattaactagtaatagatcgattgtttgtttatctagagatgagtatacataccgatcatgagtggcattgatcgtttgtgctgggtgtcagcaagctgcacggtccttctgtagctgtagcaaatcatctgttctgtgtgtgtggatcggggctggctggtgccagtgtagctagcattaccgatcagacttattgtatctattataattcaactaaattttatttagttaaattagaatgaatgaattgtcagcgggtcgatttgtgttatccctatatttactgacattttgttgtctctcgctgctgtattggctgatccaagtaaaacttttttctttaagaaaaaaacacttcgccaaccttaaatttatgtgtaataatgtaatatagaaaaaaaatgggctgcaggaat

SEQ ID NO: 31664 - DNA, 621 bp, Oryza sativa
aaaaaacagttgttatctagaggcgtctataaatcggacgctgcacgaagtagttcggaattgtttaactacgtagattaaaaaaatgtttcaatcgttttaaaagttgaaacacaacaaaatcaccactcatgaaacattttgctgcaacgtatgaatcaatgttttttttttgtcttttttaagttgttttaccatatataaaaataatgtttcatcaaatagcgaaaggatgtttcaattcaccgcaacatttgatctatacataatgaaacatcacgagtataattgctgaaacattgttggtggaacaaaaaatgaaacggattttcttaatagagcgttttcgtaatatgtgggtgatttgttgcaatggcgtatgtggtggggaacgtggtggggacggcacggaggtgcgcgcggaggcgcaagaagcggcgggcgcacgatttttctggcgctgatcgagcgcccaatcgctaacattttccgttatttattgcaaaataaaaaaaattagcccatgcatgtcaattttcataatgtaaaatttctgtgcacaatagtttatacgaagaaccgggcggactttaatattattctttcccttcattttttaat

SEQ ID NO: 31665 - DNA, 644 bp, Oryza sativa
atgtggtgtttaatgagcacccttttccatttgccgagtcatcctccaagacacttgctacttaccttcgtcaacggcgcccatcgaccgagcggtgacctcccattgtcggctccacatgccgcctgcctctcccagacggaagaacgactcaatttacacttccaatcataaatccaaataatatatggtgtcttatttgttgaaatgccccaaaattgggggaggtctaatgcgcgaaatgtatgtatcgccgtgtgaacacgtatggcacgccgacaacatgtgtgtcggaaagctcatgcatgtgcgtagggaatccacatgcctttttctttttcaacctttttcaccaccataccatcccataacaaaatgtgaaaaaaacgaaaaggaaaaaaaggagataatattagagagaggaatggagcaacaacagaattgagaagacataagcatgcaattgatatactaaaatgcatgaatgttgagatggatgcatgcatgtctttctctcaacaaaataagtaaatgtatatccacatgaacaaactgagacactgagaactaattaggtaaaaaaaaacctgagaaacgttgagaactaattacagcagcggtacggcgcgtgtgcctaaattatg

SEQ ID NO: 31666 - DNA, 710 bp, Oryza sativa
ttttttactttctttatctactttgctttacttaacgatgatctggaaccgtctctacttaacttttgcgcatccccaaacctctttttttttcttctactggagtaaactatttcaaatctgttttttgcgcgcgcctgctcttcactactactgagatctatctatctcgtatattcgatatggtttaactaagaacaagcatatataacctgcaagatctaccgagacatgaaaagtgagatttttttttgaagtgaagtggattataaactctcgaatagtcgagagatatcccctcgttgcttacattacactcaaagagttaacaaaaaaataattctttttgagaagatgtattagcatctgatatatcactccacaaatatgcatcttaaattcaacttctacgtgtcgcaacaaaaaattaaattaaactacaactagttaacacatattcacaggcatattgttttttcggtgtgacatgtaaagtgaattttaagttgcatgtttgtggagtgatatatcacatgttaatacattttcttatttttttaactatttaagtggcatgcaaataatgatggaacatccccttgagagtttagaatagttcccttttttttgttttctcatttctcgcaagtagggttaaacttttcggtttagtcgatttgatcggatgtcaccgaaagggctgcaggaat

SEQ ID NO: 31667 - DNA, 522 bp, Oryza sativa
gtgctggcagcgaaatggttggatctagtaataagctttgttgcaacttgcaaggcacgcacttgatcggatgagaacgatgtaagtagcattttgtcagcaaaactcagctcccaacgacctaccaaacacagagcaagcccgtgtggtctggaatcaggaaaacaggacatgcagatgcagagaaacatgcagctctgttcgtttgaaaggtttggcctacttgccagagaagaaattcaattaacacataatcaatcaagtattgatatcataaattttaaaaatagatttgtttaaatttttaagtaatttttacatggaaagttcttctaaaagaatcatgttgtttagtggcttggaaaacatgttcgtaatatattagctaatgggtggaaaataacggggccttaatcattatagaagaaattttctctcgtttgagctacagcttaaaaatgaatgaagggaaacaatttgtaaatataacttttagaaaatctatgtcgattgtggttttaa

SEQ ID NO: 31668 - DNA, 730 bp, Oryza sativa
gattttttttcacgtcaaaaaaaatccccagagacttttttcacacactaaaatgcagcatccatattttttttaacacgatgagttttaacatttgagattttgtttttaacacactgaagatcagatttttttttaattttaatcatactgaagtctaatatttgagttttttttaaaacacactgaagtttagcaccacccaaaataaattacactgaattttaagatttgagatttttttttctagactctgaaggtcagattttttttatcacacttaagtttactatttgagattttttttaacatactgaaggttagcaccatccaacaaatacacactaaagcttagcacgattcaagaacagaaaaaaaagagatttttcttatcacactgaagtttaatgtttgagaactttttttaacacactgaaggttagcaccataaaaaaaacacactaactaaaaggttggcacgactcaaaaatagaaaacactaatgccttgctcgtttaatccacaaaagagagagattgacaaaaaataattccatgccacgaaaaatatggactaaatcctcttcaaatcccctattagagggattaatgaagaaggcctaaaggttagcacgtttcaaaaacaaaaatgtttgagattttttttatcacactgaagtttaatactcctatttgatatttttttgtaacacgcacatactaaaaaaaaa

SEQ ID NO: 31669 - DNA, 649 bp, Oryza sativa
tcgccaattctattcattcatatgttttgtccaaaagttgaattcccctataggaaaaagaaaaggagtcccagcatgctaggtgcttagtattttttacaggacctggattcttactccgattttgcccctcaacactgttttcttttatatttgtcttctctacattcctctctaccaacactgtcattatgcatcaccctcatttccattgatcctcagttttcaacatgcatatttcaagctcaaggtttttcgaagtgttactgcgattgttgactatgtagaccatgcttcgtaaaatataaattgttgtctgtagagaggaaaatggacaatagacaaagaggccaactaagctaaagttcagcaagggagataaaaggcattatagtatgatctgctgagggcaagactttgcttttcttttagttcaaagcttaattaacctaaccaacagtaaagattcaatagtgaggaaatttagtctaatatgaggacagatcaaactgagatatcacacctcaatacattagcactatttattgtacttataagttatttcgacacagattaaaaagcatacatattcagatgatatatttgactcacatcaaaaaaatgaacataagcatataagaaagccata

SEQ ID NO: 31670 - DNA, 793 bp, Oryza sativa
agctccacatgattttcatttttcaacaagctcactgtaaaacttttcatgtcaagatctgtgcattctcattggacaactatatgaagaaaaacaattgtggattcaaatgtatacttgactcacatgcaaaacaaaagaagcaaagccactataagctattcaaaacagtgataacaactttctcaagtacctttacatagactaaaagtgagactctttatatctttgatcataatgatggtatgctggtttattagcagaataattattttccataaatgaatatatggatacaggcaacctttttttttctcgaaaacgcaggagagctgcatttcatttcattaaggggaagaaaaaacaatacaaaaacacaacacaaagaaaaaaccaaagtaggagtgcccaagccctcctaccaagacccacacacactagacaacccggggagcttagttgcctagattagccgtcccactaaggagcttttgaaggcgagaagctccagcgacaccccaaagatggccctcattttctatcacttacaagaccgtcactactctaggatacaggcaacctgtaattggaatcttaaagcttgtctattattatctcaaataagtcagaaaataccaagttcaaaattgtaaacacaatgcatgttcactctgcaaatttgcatatgattgagagcttatcaggtagtattgcattacttatttttgttttaatctgaattatcatattatagctaattctagattaatagtttatcaacaccaagaggaca

SEQ ID NO: 31671 - DNA, 605 bp, Oryza sativa
tatggaaaacctcgtggagatgcttcttgtcgcggggccaatcgtcgtcgtcgggttggggttggggatcgtcgttggcggcggcgctggaggcgaggctggtgcccctctcggcggcgtagccgctgctgctggggctgggtggagccacgtcggcgtcttcgaggtcgtccttccaggcggaggcggaggtgctgatgctccctaccctggagacggcagtgaggtagccctcgtcgtcgtcgtcgtcgtagtcgtcgtggatctcgaagtcgggagggaggtgagaggtgcggagggagagggaggcgagcctcttctccggcggcggggagtcggggggaccaggggggctagggttattggtgggaggatccatatccatggggggccttcccgacgcgatgccgatgcctcttcttcttcttccttgctcgctcgctcccctcccctgtagagaatgtactctattcgattcgatcgtgtctttgctgggttgggtcgcctccgtcggtcggattcgatggaacgagaccggttgttggctccctttggctacactacacacagtttctctcccttccctggatctcttctcctctaca

SEQ ID NO: 31672 - DNA, 1645 bp, Oryza sativa
tacatgcagtgtttctgtacatgtttcttgtatttattttttttagatgaaaggcttttgacagcccagctttactgaaaagcataaaatgttgttttgacaaccaaaacaaacaactaaaagggagtcacactagattgacagaaaagttacagcctattctcacgcctttgttttggtcttgtcagctcccgccggcttcagttgcattctgcatcattctttggatgatggcaagcagtgagcgacatgtaacgacgttgttgtgttatacagacgaccatgctgtactagtagcatccgacccagtgttgtaaaagtcggccgaccatacggccgtatatacggaaacgccggccaaaccgttccgtttcagcatgtcgaaacggtgtttgaaaatgcgaccaaatctggacattttgtttgcttaatcacctttttttataattattagattagacctattatgtgtcacaattaagttatattggaacctgttttaaatggttagcaacccacaagagttggtcaacccttccggctatatgcgtaacaaaagttactgtttgtttcagtataatcaaatggtgatgcaagcatattatctcattttgataatatatgttaaagtatgtctataaccataagaaattatcaaatatatcgttattgggcctgtttggctgccggggttgcagcagccgcagccaaccggaatagtccggcaagctctaagatagcaggggctacagcagccgcagctgcagtcccagtttgccgaacaggcccattagtgtgaacgccaaaattccgtttaatcctgattaattatccgtaattcgattaatcgcttaacggtactcattccatttcaccaccgtttttcatcttttataacactgatccaaccacgtttcatccatcaaccctctctccaaccactatttcccatcttttataacgctgatccaactactactcatctatcaaaccttacaatcagcttatctctacggggataagaacgtcttttataacacttatctaaccaggaaaataatagttatgtcttttataagactgatccaactacttctcatacaccaatccttacaatcagcttggaaaacaatagttatgcgtcttttataacaccgatccaactacttctcatccatcaatccttacaatcagcttatctgagataggaaaacaatagtaatccttactatcatcttcctccaaccatcttttcccgccttttataacactgatccaactacttctcaattcttacaatcagcttatctctatggagataggaatccatcaattctcacaatcaggttatctctatggagataggaaaacaacagttatgcgtgttttataaaactgatccaactacttttcatacatcaattcttacaattagttgtcttttataacactgatccaactatttttcattcatcaatccttacaatcagcttatctctatggagataggaatccattaattcttacaatcagcttctctctatggagatattgatcagcttatctctatggagataggaaaacaatagttatgcgtcttttataagactgatccaactacttctcattcatcaatccttacaat

SEQ ID NO: 31673 - DNA, 2525 bp, Oryza sativa
atactattgaggtggtttactattaatttagttatcgctgacatgtacatgtttatagataacaccttactttatcattgcgggtgctctagcaagtatggacggcgaggtggagttggcccaaaataatggcaagtgtggtgtgggttggctctttgtagtaggtgtatgtttggtcgagtcgagcgtgtgagaatcgtgtaccacgttggttctttaaaaaaaagacggtggtggaccggtgcgtgtccccattgaacgaattccaaaagaaaaggacaagggcaaaaaagcaaacaggctagtagtatttacgttttttgtcctacggcaaaatcaacacacaacaaggcctattagctcagctggttagagcgtcgtgctaataacgcgaaggtcgcaggttcgagacctgcatgggccagttttattttttgttgcgatttttcttccactctgtatccataaaataaataaagttagtttttctttaacaaattttgagattttttttaacacgcatttaaggtcaggttccaaaatcccccaaaaccaaagcatattatctatctattatattattaaaattgctttcaaaggaggcaccacgttcgctgtgggggctagaaattctcacattaatcgaagaaaaagaaaaaaaaaagaaaaggagagtccaagtagaagtacaatttaaaaatagctgaaattcgaaattaaaaataagcaatattgaaagaagtttccatataagaacccaatacgagattaatcaaaattcgaaataaaaataaaataaaattaaaaattagaaaagaaaaggagagtccaagtagaaatacaatttaaaaatagctgaaattcagaattaaaaataagcaatattgaatgaaatttctatataagaacccaatacgagattaatcaaaattcgaaataaaataaaataaaatccataattagaaaaggaaaggagagtacaagtagtaatacaatttaaaaatagttaaaattcggaattaaaaataagaaatattaaaagaagagtccatataagaacccaatgcgagattaattcaaattcagaataaaaataataatatttccgaaattagcaaaagaaaataaagaaaagtttaactagggatacaaattaaaattagctaaaattcggaattaaaaataagcaatattgaaagaagaatccatataagaacccaatacgagattaattaaaattttaaataaaaatataataatatacaaaattataaaaattaaaagagagttcaagtaggaatacaattttgaaagaactgaaattgaaaataaaaaataaaaacattaaaagaacacaatacggtattaactattttttttaaaaaaatctgaaattagaaaaaaaaagatttcaattaggaataaaatttataaataactaaaatttgtgataaaaataaagactattgaaagaaaagaccatctaaaacacatgacgagataaattaagtaacatgcctataaaggagtagagttggtggcggttgatacggcatataaaaattgttaataaaacatcaaatgaatcctaatggcgattaaaaggtgggacgtcaggcaggccgtgaagcaaacaagtaaagcggttgccggaacttctagaaagtaagaaaaaaaccacattgataatcatattcgaattttaaaatctcaatgaaaataaaaaggagaagcagcgggcggggtgtataagagtatagttgcagagccgccgacggttgacgggacttctagaaaataaaaaatgaattgcaacagtagttatgctcgattttttaaatcacaatgacaataaagagtaggcggcggacgggctgtagggggtatagtggcatcgtttgatgggacttctaaaaattataaaaaataaaactacaagtctaatttttaaaggttcggaacttctaaaaataacaaaataactaatgataatcatattcgattttaaaatcacaatgacaataaagaagggaggcagcgggcgagccgtagaggagtacaatggcgggacttctagaaagtaaaaatgaacccaaacgataattatgttcgatttttaaaatctcaatgataataaagagaagagatagtggacgggccgtagaggagcataatggcaacgtttgacgggacatctaggaatcataaaaacgaaacccaacgtgaaaataaactctaaaaattataaaatccaatttttaaaggttccaagaagaatgaatagaaatagtgatagatcgagcaaacaaataaaggagataacataaggcgtaacaactggtgtgacttttaaaaactatataattagaaacacggggatgataaagtttgttttttcaaagtcttaacaatgagatagctatttaataaattttaagtaaaatcatactttaaaaaatatatgtttttttttggtgctagccgcgcaattgcgcgtagaagtacaatttaaaaatagccgaaat

SEQ ID NO: 31674 - DNA, 2261 bp, Oryza sativa
cgacttataatattaaatggagggagtagtattttgtactgccatggatatatggagtaattaattaaactgatgaacaagctggcagtgaaatgatttcgactgtatgtatgcgtatataagtttttctgaattacagtacagggcttaaattcagtttcttgacgcaacatactaccagatgcatctgtttgtatgtgaagaaggcagatagttagctagtcgccttgctgtacagggtgaaaggtcattgtactcttgtttttaacatgacacctagctagctaagctaatatccttccattgcacacacatggcctggatgaatgaatgaatgtaataaaccaagtagctaatgcatgtgatggccagttttcattttaaacataagacgcgtatcgatcaatcgatcacagcaggcataagcagagtagttgcatctaagatccaacttctaaggactcttaataatactcatactggtcatcagttttactttattaattgttgctgctttgactcacgaaaggacgattaaaagaaaatactgatattatagtatggatgcgacgatgacgtagctgctctacgtgttaatgactagcaatttcgtttttcgtcagcgggcgatagatcaacaagtgcagaaatactagaacaatgcaagttgacagtatatacgcagtcatgacagttacaagttaacctattagtaattggagtagcttgcttgatcttcattcttcgcctgcagccttttggatcgctttcagaggtttcagagtttgagactgaatctttgatggtgtaggtgatagatgctgcccggcgacaggttaggcaatcagcattcgacatgcatgtaattatcattgaattgtatagttgaaagtaacacaagctgctagcagtaccagctaatttcagctgattatatgggctcatttacagtctggactatatatactcatttttagtccggatagtgaactctgaacatgcatataaatgaagaaggggggaaaaaatactgactagagttttataccgttctttttctccagaaattaagaccttgctttagtagttctgttgtgtagtattcatatatagttagatccaattactcaagatacgttgagacatcatctataaaagaagagcactgttatttctaatcgtagccgatggatcacttgtatgtttaatcgtagccataataaaaaatatagttgtatgttaaccgttctatattgattgcagattaatatgtatctttaattttatactgttttcaagtgtttttaattagaaggtttataaggtcgggacttagaaggaaactgtccctgtagcgtctttgggtgcagtgctgtttagagagaggatggacaatgttgtttggttcgagatattagccttcagtaataggagtagcaatattagtaggagtaaaaaaaaaaaatactccgatgacttgaacagggacggacctatgatcggcctaaggaccgagccagcccatgaagacttagaccttgtatgctgtttacattaggcctattgggccgaacgagacgacgtatgatcatgttttgggcctcctttttggagaagggaaggcccacatatagatgtggtggtcgtcttgttggtggtgacaggtcctaacctagtaaccctacactgtcacaaaattcacaatcgatcgagggatcccaggcgacggagctccggcgagctccggcgggcgtcggcgtcggcgtcggcggcagttagggcgaggctatctagggcatcagagatccgggatggcggtccaggtccaggagtcgaagcgggtggggaggcagctgccccctcaccggccaccgcgatccgtctccctcgccgcttccatttccttctcctccgcccgcaagcctcccgagccgctccgccgcgccgtcgccgactgcctctctcctcccgctccccacacccacacccatgccccgccacccgccgcttcctctgcccccgccgaggcctccagaaccctccgggtaataataacaactactccccctctctctctctctctctctccacccttcttcttacttttaatcttctgctgttcctgctgccaggattatatcgccaacccatcaaccatcgatatggctacaatgtcctcatcgaccatgctcttgctgaaagagatcgtaggtatgctttcacccttcttcctttccttttttatttaatttaatgcttct

SEQ ID NO: 31675 - DNA, 669 bp, Oryza sativa
atactgatagcatatgccatatgtacacttctagttgtgttgtcattgtcgcattttgttatattttggcaatgtggtagggtaattatttttttaaagaaaatcggatttagacaatttgcaaacatgattatgatctttctaaaacactaatagcatatgccatatggacacttctagttgtgttgtattgatctataaatgtaagaaaatatttaaggaaaatttggtagcattcttattttaaagtcttgaagcaattttaaggccttgatgtataatataaaatcattttttccttctgagtttgcatgttcagtcattccaagtattactgagcagtcaggtagtcaacctgtacataattatgatacattataccaattgtgccttgtagagttcaaattcacaggttgaaaatagacggcgcctcttgcaagcacaggaatctgaacttttggtgagatatcatgctgctatgtatattatatttagatttaacagttaccatcatccactcacggtttcatttcaattcatgattatttatttttcttgtttatatcaattattaccagttacattatgaattttattctgtgtttctgaaatccacattaccatacaaggtctgttgtagattgatattaatggtttattttcctcttg

SEQ ID NO: 31676 - DNA, 500 bp, Oryza sativa
atgctcccgacaacgccaacaagcaaagtctaagcaatcatatgcacgctagctagcggatatctcgcatcatctctttcctcataattttgcagttagtgatcgatccatccagagggaaaaagaagggattaattaatcatataaaacagtttagttaatatatgaaagaactttccggccgattagttgattctttgcagttaatccctcgtgccgacacgtcgacgtctgacaagccatatgatctaaccggcctttcttgtttgggctaaatatgattgttcatgtcgattgccagcctagcagaaacggatcatcatctgggtgattgttaattttttgcattatggattaaagagtagtcgctagctaggtagctagctagtatgctagtgtgacacaaggtttaatcaatttatttaggtaatctggggtcaattaatctccaattcattgcggaagcaggtccatatcatgcataacgttgacgtctgaca

SEQ ID NO: 31677 - DNA, 534 bp, Oryza sativa
acccgtcaaaaaaaataatctcaagctgctagtgcttaatcaagctccacacctagctagcaccaccaacatttcattattattccctcttaaacaaaatcgtcctcctagctagcatgagccggccactataccaatctagctagctctcgtagctagccggctagctacagatacattgcaaactaaataatgcatacaatcaatcaatgacgatgtggtgaccacatgcacatatggatgtctagcgcgccgtatagctctagctagctcccaaatcaagtcccactcccacctcgatcaatcgtgtttcgcacccatgaatctctctgtgacgaccgctcgctcaaacctgcaaaattgctagccgcaccacgacgtgcctacacagaaaccatgaattaatgcagcatatatgcatgcatggttgggtgctccaccggcccacccactctcctcccctctaccccatgctgcaccaccaccaccgccattgatcaccactacttggatgatcacttatcaatcgagtac

SEQ ID NO: 31678 - DNA, 755 bp, Oryza sativa
ggacaaaacaagagtaagaacggaacggagctgcttttgaatctacctgtcgcgcacgaggataggcataacagtgtggaactacagtttgattatctgtagatcgatcaatccaagttgggtccaaactccttgggcgcaatatagtcgcatgccctacccccatcaaatcaccgatagtgtatgccggccaccgcttttaccttcgttgcaaacacgacacgttgagtaatataaatatttaatatttagagttaggttggtcaaacttttgaaattccaatcatcaattttatatcatatataatagattttataaaatataacaagtttatgataacagtatatttcacaaaactacatatattttgatcaaattatcataaaactacagatttaaagtggagtatcgtaaaactatagatttaataacaaaattatcacaaaacaacatattttagagttaaatcctcagcattagtgttatgtttgagttaatcatgcaagttttatgattaaattatcactaaatttgtagttttatgataattatatgataatctgtagtttcacaaaactacagattcagtgataatctaataaataaatagtacgttttatgatactccactttatatttgtagctatgcgagtcatttagtgttaaatctgtagtttgtgataatttagtcaaagtatctataatttggtgaaatttactcttataataagtattctttttatcttactaaccg

SEQ ID NO: 31679 - DNA, 3736 bp, Oryza sativa
attatccgtggccgtcgcagttttgcagtgagtaaagtgatcgatcgatatggccctctctagatagctaggaggaatctttgcatccatggccacggcggccattgcagataatgttcaagatggcccatgagtagtgcaaaaggcacaaaagatgataatcatgatactagatcacttggtaattgtcccacactacgcatccacactgattcgatccaaaattccaaatgtgcaccgatttgcaaggtaaatttaatcacaccaccttcaaaactttctccagtttctttcagaactgatccaatttctctggagagaatctattctataccactaagtttgttcaagttcaatgatttgtcatcgacattatctctttctataatataccggtgactttatcaactattttacaatacgttattgggttgaaccttattttcaaaaatagccttagagatatacaatattaacagttgatttatctcatccgaagtttcaaaaaactatgaattttttttgtggcctccttacacaacatgggagtttgtatacaagtttcaatttttttttctgcatatttagtttttagaaaaaatatttttatgtggtatatgagagagaatttgcttatacaggacataatagcataaaaatatcttatgtagtgtatgaaagatgatttatattaaaaacaataataaaaaagtattttataacatataacaaataagttatatttttgagtaaatttcacaaaactacaggtattttgtataatttatcacataactacaaatttaagagcttgttttacaaaactacaggttcggtgtctccgtttatcacaaagctacaggtattgtgtacaatctatcacaaaactacatatttaagaacttgtttcacaaaactatagatttagtgtattcgtttatcacagaactacacatttagtgtctccatttatcacaaaactacatatttagtgtctccattatcacaaaactacattttttaataatgctaaaacctgtagatttgtgataatgaagatactaaacttgtagttttgtgataaacgaagacattgaatctgtagttttgtgaaacaagttcttaaatctgtagttttgtagttttgtgatatattgtgcaaaatatctgcagttttgtgataaacgaagatattgaatctgtagttttgtgaaacaagttcttaaatctgtagttttgtgatagattgtgcgaagtatacgtagttttataaaatttactctatatttttttaataaaaaatagaaataaaaaaatagaaatgtaaaaaacttgcaaaattgtgtaaggaggccacataaaagttttcatatttttgaaactttaaattagataaatcaattattaaccttgtatgtgtataagggtattgttcttaagtattataaaataattgataaagttatcggtatattatagaaagcggcaatctcgatggcaaatcgttgaattctaataaattcagtggtatagaatagattctctcatttctctgggattcctttgttcaaagggaagttggtttagaatgtgcaatatgcgttattacattctcagagcttttatctttgctctttagtttatcagccacaaccaaaatttaaattttaaatcttactttttatatttggttttagtgttttgtcatcatagtttcttttccaacgttatcttttaagttgttaaaagtacatgtatataaaaatcttacctacattttttttattttttacgttaatacacgttgccgtttataatagatggaacgatgggactcatgcagtatgcctgccagattaatgattggtcatcaatttttcaactttcaagtgcgtacggcacgcatatatgttcagttgtacattcaaccttgcaccgtggaacataagactttgaattttgtctaaacccgactactagaatatcttcacctaatagtattatatcttcagttgctttacctaacaaaacatcgcttggaacatggtacgtcggtgcatgcagcaatacttacgtttcgccatgaacagtctggcctcatctttatcttctatatatgaattcaacatccaaggaaaagtatatcctttgagtccttgatgattttggaacatccaaggtaaagtataatcttggtggttttcacgagaaaaaaaaaagccttaattggtggtttcaactgatataagtttcgatttcttgacgcactgggaaagttggaaatgaccataattttattatcagttatactgccacgaatatttttcatcacggatagccaccaagaaaatggacttttccctcgttctcgttggcaggttttcctcgttggtcgaccgacaaaacttgttaccttggtgatttttattccatctttggtgggttgtgcctctcaataaaatttgggattctggtaatgacataagtgggtgtaatatgttgtgtcaaatgccccgtgtttgttcgttaaaaaaaaattgacaagtgccaatttcacccgatggcgttgaaaccagggttgccaaaattttggtcatttcggtgaccccccgatacaatattaattcggccaaaatttttgaatttttgaattttttttcatgaatttgggtaatatttgttcaaattcaactaaattttgttcaaaattttggaaatttcggacctaaatttttgaaatttcggtgacccccgatcaacaaccctaaacggatagagtgaaccctggttgaaacttgaataacatgtggtgatttttctttgatttttcgctacggattatttgctcgtgcttcttaaaaatatgatttctaaaaaataacctttttctatttcattgtctatactgtctattctaacttattaaagttttttttttaaaaaaacactaatttactgtgtttaatcaaatgaataatctgtgtttatgaaaaaaaaactgcatcaaacagggggaaggaatgaatgatgggtttttccaagattcgtggatcaggacgtttgttgggctcgaagaccaacactggctattattgggctttcttctgcatctcggtggcgaatcgggcgaaatgaaggcctgccaaaattatcgtcccgtttgcgatcattcaactccccaatcaccaaacaagctgcgaatctgcgataggatgaaatgaaaaccttcccgccaccgccacacgcgcgcccacccccctctcgatctccgctcccgccgcggccggcgcctcctccgcgcccatgccacgacgacgcctcctctccgcgcacctcatcggcggccgccgagcgcgacctctcccgcggccgcaccaccgaccggcgcgctgaggctgttcggcgaaatgcctgtggcggaccggaatgccgtctcttggacggcggccattggcgtgctcatgcgggccgggagggtgtgtcgcatgctgcaatgccacgatttctgtgtactgcagcagcggtcgtgcccacgatgcttttatgcattatttgaggggatgccgaggaagaacgtgatctcttggattgcgatgatcagcggcgggtatgatcaaaatggttaaagcaagaatgccctctccttgtttagtcagatgtgggctacgggaaggatgaagcccacgccaagcaccttggcatgtgccaatgtgccagacatattgcttggtttgca

SEQ ID NO: 31680 - DNA, 701 bp, Oryza sativa
tttccatcttgattagacatcaagtgcatgcagacggagatgagatctatggccggcgccttattagccgatcattcctactgaattggctgatcgaacggctttttcacaaaacgtagggaaaccttttttttttgaagggtgagacggttgagccactgatcaagtgatcatctcacgatctgtggtagtacgtcgttggtgcagtactactacactgtgcacttgcaataatcaacacaatggatgggaaggatgagataatggtggccaagttaaaggcacggttggcaagctgtgccggctgttgcatgctctgttcatgagataaccatcgttatcatccgtggcttttaatttgttgatatcaatgtgctcgtgcgtgtatagtgtagttgtcctcccatcttcctgttgactgctgagcataatcatttcatatcacaaaagtagttcacataaacgacggcaatctgcacaacgataggctctacgctcttgtaacactaaaatcaacacttacaagatttagatcatatacgtgcgtactatcgtatgtacatcggttgtcccttatatgaatataattacatatatgtggatgtgtttttagttgaatttaagtgaggcgtgatttactgctacttttcatcctttttaacgtcatatcttggagaggaggaggcggatcaggcagaggc

SEQ ID NO: 31681 - DNA, 2439 bp, Oryza sativa
atcgacccaaaatagaactagatgatctttagtcccggttggttccatgtcagaccgtgtcaggcgcctaggatctttagtcccggtctaactttagttccggttggtgttactaaccgggaataaaaatcaacacgtactatataatctctattacttatcctcttctctcgtccacgcaacaaactttatctctttctttctttcttcctctctaactcctgccttatctctttcttctttcctctctttttttttggatcgagcgagatcgagggccggccgggcggcgggcggcggccggtgcggcggcacggagggccgcggggcggcggccggcacggagggccacgcggcggcagcctgcgcggcagcgggtggcggcgcgcagggcggcacggcgccgcgcggcggtggccggctggcgtggagaggaggcgacagcggtcggccgagcggcgcctttgtggtttttttcttttttttttagaatttatgatttattgcatgattctgtgatgtatttgatttgtgtgcgatgtgaacttgtgatgtatttgcgatgaattttgtagaacttgtgatgtaatttgatttgtgtaattttttttaggatttgcgatgtatttgatttatgtgtataagtaacttaaagatttgtgatgtggatttgggatgttaatttgatttgggatttggggatatgcatgccacttgattcaggagaaaataaaaaagagaaaaaaaaggaaagaggaccatctatactgctgttattccctctttagtcccggttggtaactccaaccgggactaaagatcccttcaatgtcttctcgcaatccttctacccattttctgttcaatggtttcaatacaataaaaaaagaaaccatgatactgaactgaatcaatggcatttcccagctttgtttttgaactttggtggtggcgatgaagtgttgtagccttgtagcacccttggatgcactccatgctctttcttatatttattgctcataaatgggcatggccaaacctgagatttccttcccaagactgattttatctttatttatagtcgtacgtagcttcttgttcttactctcaatcgcttgagtcggtctaagaacaaaccactaaatggtgcttgattctccttagtcgcaggttgataaagacgaaagtccacactcgatccttaaccaaacaacaagaagaggtgaatttcacatgtttttagcattattggaaaaagaacctaagggtgcaagagaaggttacaacaaagggtttgatctctatctttagtcccggttggagttaccaaccgggactaaagatcgatctttagtcctggttatttcacccgggactaaagattgcgatctttagtcccggattcgtagtcccggttggataaccgggactaaagggggtttacgaaccgggactaaaaaagcacttctccaccagtgtcttcatcccaaaatataatactccatccgtttcatattataagtcgtttgactcttctaattttgataagtttatagaaaaatatattagtatttttatcccaaaacaaacatatgaaaatatattcaatgctggattaaatgaaactaatttgatattttagatgatcttaatttttttctataaagtcaaataatttataatatgaaaaagatggagtaatttgtaacttaaaaattaatactccctcgatttcataataaatctacttattcttttctattattaaatttgattaaatttattaaaaaattagcaacatctaaaatattaaattagtttcattaaatctaacattaaatatattctaataatacatttattttgcgttgaaaatactactataattttttaataaacttgatcaaacttttaaaaaattaactagcagaaaaaaaatcaaacgactcaatactaccattgacgacgaaggtatagtaccgttgcgctctgcaaatcgcgcgagatggtcgtgagtcgtgacaggtgacgagagtgcggcgtcgcgcgctcatggttgtggtcttgtggatggtggatggtcctaccgcttgtgctccctggccgcgacgcctccggtggacggagccatatgcatgcgtgcgcggtggctggatgagttcactggctctctctcccatggatccaggaggataggaacggctgcgtgccgtgtctcctaacccaatctcgacctaatcattgggctcccgttttgctggcagccgttcgatcggcgatggacacagccacgggttgcgctggaccgtccgatcccgctccaccgtaaatctggatggatcgatatatatgttcgctgccgattcctatatccctccaccgtctcctgacactgatttttttttcttttaacccatacaaattatgggctgcaggaat

SEQ ID NO: 31682 - DNA, 2150 bp, Oryza sativa
attccgtggtcagaatgtgtgtgtcaacatactcaaggaatatatattcaggagactatttgggcctgggcccaaaaccttagaactcctttgaattaaaggaattttgtaaaaaaaatatatggaggaatagaatccacaggaaaaaaaaacaatcctttgagagagcttttgaatagtagtctttgatttctttcatgttttggaggatttctaccaagaggttcaactatatgtttacaattcctttgaaagtttcaatgtactttctctcttcctctctcggtatattctctctcaataaatcaacatataatcttcattttctgtatttttcttgtgagatttacaaacaacaccactttgaataattcatgtgattttgttctcgtaagattcaatgagccacaacattttaaacctgtgttttttctattcccgtgtttttggattcatgcatttcaatgtagccctatgatggtagtatttactagggttttatgggtgaggataggaaatgggtagtgggcggtgagaacggctataaatagaagttgggggtagcggttgatctatggtgggcaatggacatgagcgggtggtgaggcggtgccactgttagagtcaagatagaagtgcaaaaaggttaagtagggaagtggcaaaccatagaagatttggacgattggtgttggtgtgtgggagggggggggggttgatagggggggtcccaacaccgccatctgtgatctcttgatttgggcatgagcacgtcggggagagagagagagaggaggagaagataagatcacaatgcaatgtagttgtatcaattctggatcaatctagatcattttaaaattattgtaattttcaggtgactgagaaattaacaatcccgtgtattaagatcaaatcacaccccaaaattgacatcatgccacaaccatccgtactggaccattgttgcatctagctatagctgacaaaaacaggaggaacacatgcaaacccccttctttttgggatgaagtaagtagtacttcagtaacatgatttgcaaagagagacatccctccaaatatttttttaaaagaaattatgtgtttgttaagtattgaacacatgatcttagattgaaatcacacatcccttatcattgcaccgtcaaggacatctctccagctcccatctctctgctgcgtggaaatgccacggaaccaacagctagccaatcgacatttccctcggtcagatcgaaagatatgatcatggcacatacgtataccgatcggtgtccggttgttctgcgacttggattgatgagtgatatcattgcagaaagaatgatctgatggcaactggatctacgacttcccatatatgcaggctgctgtgccctagcagtattacaacatgatcaaggagtgacaaggaccactttaattgtggaaacacctggtgacaggaaaatattgttacaccaaccaacaaaatctacgtgcatgacgaaatgggatcgatcagtccagcttgtagctgcaagaatgatcttgcaaatgtcaatccaggaccactggatttcgtagcatcgtgttccacttcggtgcatgctctcctgggaaaaatagcaaatacagaattattacatctggctcaccggcatgtggcaatagagtacaactctatcatttgctttggaacttatcagtcatatataaccaaaattaaattctaaaatttagcttttaattttttattgtgatttatttttatattggcttttaagcgacaggaatacatataacatagttttatctataaattactttttgtttttagtaatcattatggcttattatcagttatagggataagacggggactaaaaattttctggatccgcactggcacactacactgacccaaattaagcagagagaatatgatggctactattgttagctacactactacagtaattagtgctgctgtgctggcagcagccaacaaaccagatcgatcgaacacgacgtgcatcctcagtcaatcagttacccgcggccggttgcatcatcgctcgcggtgaccgtgcatcggccgatcatttgatcgagcacatccatgtgcacgagcgcgatgcacgctcc

SEQ ID NO: 31683 - DNA, 651 bp, Oryza sativa
aaagcagacagatatttggtgctgagacaagtatggtgtatttccctctaacataagaaagctcctttcatcctaagtggattgaaatttatgttatgatgatgttgcctctgatatccaaatagtatgtgaacaaactatacagattaacaagatacacatattgcagaagtctcttgatcttccgtgttcattatactcaaattaacatgttaactcaaaactacatgagtaacataattctcccaaaaaaaaattgatgacataatttttttattaacctcttgctaaaaaatggtcaatgctctctactaaccttgcttgaaaaaaacagataaggacattgttgacccagcgaaaggaacagaaaaaaaatccttcgttatcttaatggaggcaaagaaattctaggcaagcaccattgttgcttgtgtaggttgattgtgatgctaacaaagggaatggggacttcattgtcaagaaaggagatacatattcttctcatttttaagaaagtaaaatagtaaagggagatcattatctaaaaatgtaagagaggcactgaactgtttgtttaacaaaatattattgtaaaaaaccctccccaggaaatcaggataaaaagttatagagtttctgcatatattcgtt

SEQ ID NO: 31684 - DNA, 677 bp, Oryza sativa
gttccccatctaaccaaatcttattcacaaaagcatcaccaattaacatagaagcatcatagttcgcaattataacatacgaatcacaaattaacattcactatcagaacaaacgccatcgcagtccacgccgtcaccgccggtaaccgccgccgcgaccgccctccgcgccgccggatctaggaagagggaggggagacgccgccgcctccaccctcctcgccgtcatcgccggtagccgccaccgcgaccgccctccgcgccgccccggatctgggaggagggaggagagacaccgccgcctccaccctcctcgctgtcaccactagtagccaccgccgcgaccgccctctgcatccgtgtaagttcaagtgctttaatttggtttcggtgattaatgacaaatctaattatatgagactaacgtttttatgagcctttctttgactagtctcatttggatatggaagtaaaaatgatgagaggtatgtattaaacttcacatattctaacttggtctctcttgtggatccaaaatatagtatgagcttcctatttgatctttattgattatgtgcatatgcgttccttcatatccatatgtatgcacatcttgagggggagcttattctatattttgtttattataaaatttctatcttgagggctgcaggaat

SEQ ID NO: 31685 - DNA, 668 bp, Oryza sativa
ctctcaaaaataatgcacgtcgtcaataaactctttggaccgccggtcagcgtacatccattgccaatccatctacatgacatgaaaaaaaaatcgtacacaaataattattcttacaataatgacagtcatacaataattataaaataattacaaactctttcaacagtcatacaataataacatatcattattcatacaaaaattataaaatattacaccaaataattcttatttactatttctaaagttttaaactaatattaatgtgttgtacttcttttaattttcattttagtttgttttctattatttaagattaactttcactatattttccttctcaactattttataaaaccttctttagcaaataaactaaatttctatatattctttattccccacacaaattttctctctcatcaacttacaactaaattttggagacataaaaatgtgcaaaacatagctccaaatgtaatatgacaaaaaaaaacattggaggatgaagttgctaaccttttaggcacctccgatttgtatataatcaccaaaataaattcactagaaattttggcatgacctcccctcttttttgaagaaattttgaagcttgctcggacagctggaggaggaagaagacatatatatatataggggtggga

SEQ ID NO: 31686 - DNA, 547 bp, Oryza sativa
gggaggaggaggaggggagaggaaggaggagaggggaggtgaggaggaggaggagaaggaaggggaggggaagagacacgtctcgagggagaggaggagacgcagatgactaggcgtgtagatatcgagaagataagaggcggggaggcgcgcgcgtgcgacccgacgcgctttttcggattcttagtcccggttggtagcaccaaccgggactgaagatcaaaaagtttcggtgggtttgttaaccgggactaaaaatgatatttagtcccggtttctattcaaactgtgactaatactgtttttcaccacccagcaaagatcaattttcagaaaagaaattgcaatttttacttgaaaattttacttcaattttctataaaattgaaaaaaagtttccgattcaccaaactagttcttatctatatctgaaggaataaaaaagtactagaattcttaatttttcaaaaattttctcactaaaacaataaaaaaaaagaatagcggtgcatggttagcggtgaggagatggtcgggctgcaggaat

SEQ ID NO: 31687 - DNA, 676 bp, Oryza sativa
tttaccaaagggcttaggcgttcacttgtttcggacttatcgaaacatcacaatagtttgtcaaactcgattcatatgtaccgagatatttcactctaatattttgttacaaattactcttatattttgtgacaaattacatgatcatcacagcagttctcattgggattacctaatttgaattgctccaaattttgacgtactagcattacaatgtccaacagcccaacacatcccattgggtatgtgcatcctgactaacatcatactccactccatttcctccaatagctagcacatcatttgaatgcttaaaccatgcatggtatgcctcaactcagcctcagttattgcagagaggcagtgcccgcttattgcgggctaagccctggtgactatgcggtggaagggttgtaagttcgcagcgttggtggtggtggtggtggtggtcagcagcggtgccaagaggggtaggggaggtggtgctggtagagcaggtcaacgataatggcttggaggcgacggcttgctgacaagataggctatgatggtagctcaacagagtcttccagcgacgacgcctatggcggcaatgactcttcggcaagataagctatgacagtttgacagttgttgtggtttaaaatgacaacgacgtgttaatggcagtcttctg

SEQ ID NO: 31688 - DNA, 706 bp, Oryza sativa
attcctgcagccgcattagcagtgcgtcgcttgtatttgccgttcctcatgtgccacgtagatcaagaatgtgttaagctacatgttccacagtgcaagttgcttgtaccaccggtaccatctttttttacttttcaactctccctctctcctctcttttttttattccccaccggaggaactgaggctgccgggggacgaagacgagtggcgacggaggcacctgatggcccaagtggcgacaccgatgccaagcggccctagcggtgccagcgccggtggcaaatcgagggcagcgcgcggcgcgagtggcgccgggcggcccgagcggcgacgacgatgccgggcggccctagccgtccctacctattctttgctcgcctcagcacctccacactagcgctcctctccgcccgcgctgctcttcctccccttccgtcggtgcccctctaccccggtgcatctccctctcctctctctctcttgcgctcctctctccgatggcggcggagaagaggaggacgatggtgcctcttcggcggcagcggagaggaggaggatgatgtccagcttagatctgggagatgggccgacgagcccagcaccgcggagaggaggaggaggacgagcttgaggaggcccttgccggcaaggcggggtcgagggcagtaggatgagccggtgagcttatccggcccggtggccc

SEQ ID NO: 31689 - DNA, 649 bp, Oryza sativa
tcctctcccctcccctcacctcacctcctctccctggccgccggccggaggcggctactgggcggtggcggcacaccccgacgcggtggtgcgcggcgtgtgctcgcccgatggcagctcccctccctccctcccagatctagccggagggggaggggggaggccggtagcggcgcggggtggatagcggcggggcgcggcgtgtgctcgcctagcgatggctcccctccctccctcccagatctggccagaggggggagggggaggccagtggccagcggcgcaggttggacggcggcggggcgcgtccgtgcggcggcatgcagcggcggattgtaggatcaaggaggccgactagagggggggtgaataggcggttttaaaacttaatggcacttaaacaaaactaacctaagttgctaggcaaggtgaggtgcaaggttaactaagtaactaagttaagttttgcaaacctaagtgatatgggctcaaatatgtctctatgaatgtaaatagcacaaatgtaaatgcaacaaataaatgagacaagagacaaggaatttttcaccgaggttcggaaactcgccggtttcctaatccccgttgaggcgagcccaactccaccgctcaaccacgaagcaaccgcacg

SEQ ID NO: 31690 - DNA, 711 bp, Oryza sativa
taatattgatacgtctcgtgtcggtaatgatatttatgaaccactggaattaatgtggttggtttgtgtaacatttgtttttattctctctctccaaacattgatatatatccattttcgtcaattcagtttaaatagaagatctagttacttgtgttccaaggttgtgtaccatatttccctgtctgaattttgatgcatacgcgtcgggtgactagaactttcgtactactaattaattatcgatcaactagtaacatttttcaaaacatcatttgattgatcctggatttttggatgactcagtccgatggccagacacctttcttcaacctctcttttttctccatttgctctatcttcttatctaccatcaattgagctttatactaaccctgtacgtttcacttacctattgtctcctcaaccactactgattctttcctcgatgatggcaagcaccaaagaagttagggcattggggtgttgcagctaaagtacatatacatggaggccttgagcagtcggtaaactagtggcggtcagcgatgaagacgatacaatgtggagaggtgaggtggtgccaccggagctatgagtaaagaggaccggatgtaggcggtgttggcggcatatgaaattcaaagcaacttaaggagtatatattaggccatgttcttttctccaacaaaaactggatacaattttggg

SEQ ID NO: 31691 - DNA, 659 bp, Oryza sativa
aagttttgagaaatattttgttgtacgatcgtagatatacgattctcttgtttgtttttgacgaaaatatgattctcttgtcaatccagaccaaaggttcgaattcatttagacaggtgcaccaagaaataatcgtgttacttatgctatggaaggacagaatgaaaacaagatgcaagcttgtattgtcagtatcaataaaaaagagaatgataatttgttcattatctactttgggtgatgcggtcattggtttttataatttgacatacttcaaatttactgattgatttcattattttgcaaatacatccaagcatgctgtgcttgtgcttgctatattgcctatatatgcaatcttctgcttaaaaaaaaacagttggctactacacttcctgtacgtgggatgttttccttaaaatatttaattgaagcaaatgtcagcttggcagaatttgcgttattaaaaatatggtgatgtttcctatcatgtcttcagtcttatatctacattactagctatttctttgaaaacttcggcaaagaaccagtttactgaagcattctttccagtttacattcctggtcctcttttgttgagaaaatcgccttgatttcctttgtagattcctcttgaccatgtctcttaatatgctgta

SEQ ID NO: 31692 - DNA, 753 bp, Oryza sativa
tgacctttgcttggaaggcagaaaggtgaactatttttttttctcaatacatgatcctacctgaataactgatacttgagtcattgcttgaagtatgtgatatgtactttggtttgctgtattaaatttagtttgttacacaagtttgatgttcgttctgatgtacgttttaactggttcgacaatattattcattgtgaataaaattgttattttgtacttccagttccatacttccatcgctaactattgtgaaaataattaggtacattatggtcatttttcccccttaaaaattcctttgtgcccaatgccacgagcccatgatacatatgagacaggaattaccctgctgtgcacgatcaatttattattaattcttatctcttttagttgcatgatgctataagttttaacttgcacagaaattatttgatttaacaccaaagcattccactgtagagaaacatagggttgactctgcacggggatttaagtagtgttgagattgaattacttttgcacaacttcacatgtttatcccttgattttacctaccagttgatgttatatttagatctgttaccttatgtataatagcccatattcttcaacctcgttgaagttcccgtgcttttctgtaatgcaatatttgaatgtctaataattaaatagttgatacatttggacgatgtgtgtataactggacatttacagatgcaggcatgcacacaagtagttttttacatgctt

SEQ ID NO: 31693 - DNA, 719 bp, Oryza sativa
tattgtattttttatttgcagaattgctcgaccctaatccaccggctcctccgctactcgcgcgttgcggccgaccacccgcttcatgttctccctcaacggcgttgggctcgtcttcttcacattcgcccggccacctcgccctcccctgtgcctcccgccgccatgctgctgcccttcctaaacgcttctatctcaccgacaggagtcaccctcgagaacgcccgtcccaatacagacttgccaaatccattgaacccggggagaaagaagagggacggcactggccatcggcccggatcaggagaagggaggggcgctagctagcggaggaggagaggaggcggcgtgtgcgagtgagcggtggcgccgtgccggatcctccgccacctgcgcatcacggccgatgacgccacggcgaaccacccgctcgtgtcctttatttatactccttccatttagaacaccaaagaactggttaaaattacctgcaattggtgctaaattaaggcacgtgttgagatgttttcagcaaagaaaatcaagcagtgtcttccctaggatcactggttctctttagatctttcgttgaacttgtagagaggaaaatacccaagtaggatgcatgcatgcctgcctgcaggcgagtaccaaaatcaccgagcctatactaagggatactggatggtgatgcaaatgagcaaagggctgcaggaatt

SEQ ID NO: 31694 - DNA, 668 bp, Oryza sativa
ttgtcagcttgtagagtttctagtttatttcttaaaagcaaattcaaaatctgaattgctcggggaagatgaagtttttgggagaaactacagctgtacaagatctaatatataggaggcggcagccacaggaggcatacgttacgttgcatgtctcgatcgatcggccggtttaattcgtcagcgaccaaacattcttggcgacgatattatggactattgggccataaagcgcatacgcatgcacgtcgtttccttgctagccaggaggatgaaagccgcaagcgcgcgtaccagtttatcatgcatggactgatcgcttgcaacttgatcaacggatgaccgtttggtatatctatctaatcatcaatagcatattatttgtatgtagaagttatatatgtcgcatatgcatgcatttcatgtcatgtatcttcgttttttaatatatgatagtaccgttgactttttaatcaatatttaaccattcattttatttaaaattttaaataagacgaatgaccaaattaacgtataaaaagataatagcgtcatatattaaaaaataggggagtaattattgaaaagattagcataaatatgtaaaattataataaaattatatgttaagattatagtttatttgataataaaacaagtcacaataa

SEQ ID NO: 31695 - DNA, 695 bp, Oryza sativa
ccgcggtggcggccgctctagaactagtggatcccccattcgggattagtccctaagcctcacaagcaccgtctattataagaaaagaattaagaggagcagtaggacaactatttcttctatcaccaattttaaacctaagagagggctccatcgatctctaaaaccggtgatctcgaagccaaacataagtgcataaacactagtccataaagaaagaaaccgggagaagattgaagtggcttcagtggcatctcaaaacggttatagatcaaatttcacataagcaagaagtgatcatgttaggctaagattcaatttatataattagagacaacattgtggtatcagagcagaaacttagccattatgttcccatcattccgtttagatgccatatatgcctatgtcttgatgtaaattatcagtaaatgaagcaattagcttcggattaactcaggaaaaggagtttcgggataaagcaaaattttccagcaattcaattcagcaagtttgggaagattgggataaactagaatgaaattcccaagttttcccaaactcgtgaacctacgaccgaaaatccccaagttttcaaatggaacttgaaagaatactatatgcgtctattgaagaataaaactatataccaatatacgtctcatggaaaataatggactagctatacaactcta

SEQ ID NO: 31696 - DNA, 683 bp, Oryza sativa
caactaatttgagattatctccacgagtttggttgaattggacgcgggatcggggtggcgtcacgtgttggctggctctggctcgactggagcttgaagaagctactgtagtgatagggacataatcagacttctgctgggacttcttttcgtaggcccgattgaaggaggacgcaaactaatagaaatgaaacaacagagaaacatagaagagatataagggaggaaatctgcacttttccatattcagccaaacctaaaagagaggattttgattcctttttccaattaaataattgctgaagtgatctttcattttcatgtttctaaaacccagttgtatcccatgtgtgttggcaggaagaaaacagttcggtttgctggttgatatgggattatgatttggattaaatctaattctaattacaaagatagagcttatatttgataaatctacatcattatatttaaacatggaccaaaacttattctagatccactatgatcaacggtgtatatttttctttcaattaatctgttgatttctaagccacaaatgtgaataaatttttctttattactgtaataaaataatttataaatgtatgggaaaaaacacacatatatatagtgcttctacatggaaagaaaacatatgttacactaagtatgaaaaaaaatgt

SEQ ID NO: 31697 - DNA, 713 bp, Oryza sativa
attcctgcagccctgccgactcaaatcaccacgaatcgatcaatccatcgatgggatctaattagggtgttctagcggggtagggaggggaagcgcgcgggtggcgcttacgctgcagaggaaaccagcgggtagcaacgctgcctgacgaggagacaacgatatcgtcgtgggctggaatttctatggacgaagacgaaagtacccctcactaatgaggattagactgttaacccacttttaatctcagccacttatgtgctttgattttcgtgcaatttttttttaagaagtatagaagcacatctcttataaaaattgaagatatttttattaatactttggtacatcattcgtgtatgaatcggtttttaagttcgtttgatttaaaaatacatatttgtatttaagtcgggttttaaattcgtttgcttttggaaatacggaaagagttgtataagatactagtatctctttaaaaatatcgcatgctaacttgattgagatgatcggactcctaattgcagctcatgattttttagaaaaaatatatatccaagcgaatttctacagtgaatatcatcttaactcaacctaccatataacaataataacattaaaataacattcacccgttgtaacgcacgggcatttttttcctagtcaatacaaagctaaaagactaaaacaatcgtactttatcaaatcgcaca

SEQ ID NO: 31698 - DNA, 723 bp, Oryza sativa
atatagataaaaacgattaattacacaatttgcatggaaatcgcgagacgaatcttttgagcctaattaatctatgattagacagaagtgctacagtaactcacatggactaatgactgattaattatgcttaataaattcgtctcgcagtttccaggcaagttatgaaaatagtttttttagtgaacagctaatttagcccctcaagtttcaccaaaggctcaatttggctttttaggtttcattgtgtccatatagatcctctaaatatttgtttttgcttgaaatcattcttaggcccacttaatataccatatggctatttctagtcaacatttatgctagaaaatgtctcttttacccttaatttgtatataactatatggctatttctagtcaacatttatgctagaaaatgtctcttttatccttaatttgtatataactatatacactagaaaagataaaaccaagatgaataaataacattattgcatatatactttccattatttcaatatgtgcacataaattttaagcctaatagctatggtacaaacttgcaagtacataatttattttcgttttacataaataactatgcattatctattaaaaaaaattcagtgcacgtaattttttctcttatatatgtgaatgaagggggtataactgtcatttatcaagacagttattggttatgcttagccaggctgcaggaat

SEQ ID NO: 31699 - DNA, 664 bp, Oryza sativa
tgttcgatatctgctagcttgtattgacacttaatgtacaacattatttactcaaatgttctgagtttatggtatattattctttttctatgttatcgccatcttgccattttgctttccttattccttgtgaagttctgcatgatccactaacaaccggatatattggtacacttggaagttgtcccgctttgccatgcctgttgtataaactgagaattgtacttgaaatttcgcaagaagatatatgtctattacataaagtgttttttattttgtaactcttttgattggtatttgagaagtgggaagcaaacaaagtgtgcatgcactcgagttgtaaaaatccaccaactccctaaggtttgaagtgtgcaggtcatcaggctaagaaagtgtgactagacatgactaaacctttgcatgtctaggttagacacgaaccaaatggccattgtatttttttttttgaaaaaaaaaagacctttgtattgtatgttagcgacaacagtagggaacctctgtagcttattacaatttagatacctgttcatcagccatggatggatggattatcaacaggagtcccacaaggattgagtagcctaatttaactgaagcaagacactgtacatggtgccaaatgaggaattgttgttttgca

SEQ ID NO: 31700 - DNA, 708 bp, Oryza sativa
ttcctgcagccccaactgaaaagaactccataggattcagattggcctcatttggaatggaaagaaatgtttttttttgttgagatgagactaaatccaacagaaatcctataaaattcatgaaatatcttttcgtgaataacagttggatgaatgtagcaacctaatacaaagattagacatcacctgtctaatattatactccagtttgctaatggagctctctgcttataacttttctgtgctatgatattccaacgcattatttctgtgaaggaggggctgcgctggccgaagatgcaatgatgcaggagtgcgattaagttgcgtcagcggcaagggattattatccctttctatatccggcggcggcgcgctcccggccggttggaggcggccatggacagcctgctacgccacgaaagcatcattatatctgcccagatgattcatacacatatatgatctcaaaaggcgatcgatgtgcgcacgtacatacaggtcacaactggtcatcctacgatagatatgccgtgcaacatgcgttgctcggagcacttcaattaagatagagggaacaaatgttataagaaagattttcatcggtagtcgactgttgagaaaagatgtgcattctatgtataaacacaagctactgaactgaaagccgagtgccaaaccggttattggtattattcatgatcattc

SEQ ID NO: 31701 - DNA, 705 bp, Oryza sativa
aactatatgttctgtaacagtatatgttcaatagtaagaaactatatttcacagctacgataaagaaatgtgcagttgtatatgttgtgtacaactgagagttacactgttattagttaatagttattatcaacaataaatatgtcacacagttaagaagatgggcagcattgaaaatatcaaaagtaaaaaaaaaaaggcatggtatactgaattttgtaccatttgacgtatgctacctaactctgttttaataatcatatatttccttcctctatctgtttttagctggtgccttgctcctggctaaatgataatgacaaggatgcaacaagttgttgcacatttgggtttcctcaaggaaactgaaattaaaagatgttcggttgcattgatccttttgttgaattggtgctgccaaaaaggcatggttttctatcatcattcggatggttagttctgccaaacagtttaaatttgtagtattgaaaaggttgcaccacacatgatttacttgctcaatcttcaggttcaggtcagcagatgggtcagagggagacgtctgtcctactagcttatttggtcagtatgaaatggcggcttaaagtttcagacacttcagctcaaattcttctgatatggtacatgtgtacaaccagctgttacactgtcttcagagacttgtatttccagggctgcaggaat

SEQ ID NO: 31702 - DNA, 674 bp, Oryza sativa
cagtactattcaaaatctaatgaatgattggaaggaggatgaatactggtacaaatgaagatctacagttagtggatgcttttttatgcaggaaaaactaacggaatagaagtttttgataattacaacatccatttcactacagaatagactcatatttagggggcctagcaagtaatcacattagagcgatgagctatggcatgattagataggccttgccgcccagagcagcatacacaagatcaacaggcatagatgcagccattaaagttcacaaagaatcagttaaggcaagtctagccatagcatcccctataagaacctgtaatcttaggactaacatgaaataaatctacttgacgtgcctgcaaacaattcaatgtaactacaaagaatcacaatatgagcaattgtagcatcttaggttgcatgaactaattaacacatagcagagactaaaaactggggcgcttgcactatatgatagaatcatcaatgtccacttacaaagaaagcagcgcgtcaccaacagtctatgctatcattaatactcacataaacctatacataagaggggtttaagcacaagggtgggggtttaaacatatgggtttaagaagcttcacagctttaccctttttacttgagctttctgatttcaggtcaaaaat

SEQ ID NO: 31703 - DNA, 672 bp, Oryza sativa
caccaaagctaagaatcctagcattcctactactattaacaactatttcctggggccgttgatttgattaaataaaactagaaaaagatactcctctagtacaacttattgttgcgttgcgtggtgtaggtgcgtgggtcgcctggcgtgtaatcttgagtgacagtgccatcctatatacggcttggcttattagtgtgcctgcctgcctatcatgcttagacgcaacagggatcgacttgcaaactaaactagccagtggcttatgcagcaccagagactcgccatctaatttggaactcgatcgacccggaattaataaacaagtcgtcatctcctacgctacgctctctgcatgcttcctatcatatatacggctgcatatatacgggatttgaaggattttgcatcacgtaagtcgctcaagccctgctgcacgtaactattgtaatttcaagagtaaatttcacaaaactacatgttttatggtccaagttgcagaaaaccacccacactttgacacttagcgtttaagtatatatattttgatagtatagtttcacaaaaccacactatcaatgaatagatttacccgtgatatgacatggctgttctacttaggacaaagacgtggcatcctattaccagccatcgcacgaaattaataggatg

SEQ ID NO: 31704 - DNA, 558 bp, Oryza sativa
acagaatctagctagcaacagatcagatattatctatattggttgaagcagctcttgtctgagagcatgtcactgcgtcacatactcgcatgtattgtcgatcgatcgattgcaagaagccaagaactggtaaaaacggagtagaaatgaatgcctgactacagcctgagtaaccccctatttgtcccagctgtttggtgtgtgatactatatgtgtacttgaaagttctatctttccaagaattaatgaagctgcgaataccactgaccacataacgatctgataattaccttgctgggcactttgcctgttctgttcatgctgcaccataactgaaaagatatcacacaaaagcagcagaagaatgttatgacagtgctgagtgcttgcctcacaaactcgtcacccttacgatcgaaatcatgagctaattaaaacaagtccagcgacaaagcatgttgatctctactattattcttaatttggtactagtacaaaatgtgacgtataattttcctgaaccatatatgtatgcaacaataatctaattaacacgc

SEQ ID NO: 31705 - DNA, 1869 bp, Oryza sativa
atgtttgatcactcatcttatttaaaaaattatgtaattatatttttttattgtgacttaatttatcatcaaatattattttagtatgattaaatatttttatattggcaaaaaattaaataagatgaaagatcaaatattgataaaaagacaatgttatcatatattaaaaaatagatataatatagaggaccagaagaaggaaccatatagaccagcaggatacaaaggcaaattaattaaaaagcagaagaggaaacaaaagctaagtaatctgaactctgcaagaagtatatatcgatttcaaccttgaatcatgaaatcagaatcggatacttgacaacccaaactgctagtttcatattctacaagcaaattacccatgatatgccatgtgatgaaaaactaaaccgttttgtcatatttttaagtagacaattatggttttcgttttcctatttttgtgggttttttttcctaattggttggttttctaggaaaccttcggttctttctagagggatgggggcagcatcggtttcctagcagacatttgggtcgagaaaaagaagggtaacatggaaaggatgactagtagagatatgaaaaaaacattatagtttctatggcgcgacggtgattctaaaatttacatttgggtgaagaaaaagaagcgtagaatggagaggataacgactctccttttaatgtagtagagatatgaaaaaaataacaatacttgctatagtttctaaggcatgatgatgatttcaaaatgcgagttttattggcatctacagtaacatatgtactctacgagatcccctaactttagagtcattaacatataagaccatagctagcaaaatagacccgcatgttagtaacttagtaacttctggagaaggagggagccaagcatgaacattactagctatccttaattgatattgcggccggaggggatggcataactacctttaatcgaaattgtggtcatcaatgatttatttgcaagccttaggaacatgaccatgagcaccaacctagttagtttttttagaaacagcaggcgctcacaacgtgcgcacattcatcctatggtaccgactctatggcttcagcgataatggaattggtatggtcactagcccaataaacaaccaagtcacgtgtcaaaacaactgatatatatgtgtcatggatagatttttggattggggggagctgagggacggtttgaggttgaaatccagaaccttatcttttaggctaaaaagaatctattgctaccaaaacaaattttggagttaatttaagggcatttcaatgtagtttttttctatgttggtttttaagtcgctaacaacatatctgtaaaagtattatgcccatattatttttatagctaagaaattgttttgacatatatatagttagctcttggccaacgatagggctagctgccatactttctacagagttttggaggaggcaataaatatactttccaaaaataatcactacaatctatctagcagatgtgatgatagtggtgttgattaagaactaactgcccatcaatgtcatctggagtagcttttcttggcgggggactaaaatagtaagattttatctgtcctaaaatatttcaaaccgaatacaacttgatatttatataattacgaatatcagaattaattagtaaatcaagaaaaatgtttaaatatgtttatataaaaaataatagttatgtaacgcacagatagtggttaattgaatagtataataaatagcttacacagactttctccgtcccaagatataagcgttattaggttctgacacggtctaccagatgctactttg

SEQ ID NO: 31706 - DNA, 1355 bp, Oryza sativa
ttaaattaatgaacacctgatagatacaaagctgctaatctagctagccgacgtcatatgttaaatcattcacacacacaaataaaaggagacgtgcattccaaaagggtcgcggtctggaacgtgcatgtggggctacttcgtggtgtgacccagtgatgccttctctcccgtcctccataatatcactcacaattttaaggcatgtcaccttcaattcgaacataagaataaattattctcaattcatttataaagtgacttaaattttatagaattattgtaaaatacttatatagatgtgtttttcaattaaaaacctcgttttttttgtcaagaacatttgatgatggtgccgcatctttggcatgaaatatttttgactggaggtagtgattaatttcgggattcatgtaaataggtcaatgcggctagctagtacaattgctagctaataaaaatttgaagtattccatccgtttctaaatataattcgttctaggttgttcagcaaatattaagggtgaggggaaagattttcttttagttatcccattgatcaaattttaaatattgaatattaatattctcctcgtaagcatctcattggttaaaaatgcttgaattcctcaacattaaaatcagtatatcagaattactcatattacatataaaatctaaatcatagaaatgcttaagattggaaggacaataagacaattaaggggatgaggtgaggacggaatcgggcgttgccatcgcaggcgagaggccactatctagctagccttctagtactaaaaagctaagctagaggttgaagctgtgacctgtgagtgcccaccagctgcatgctgagattcccactatctatccaacgccacttcttcttcttcttcttctttctcggcacaaattcatcagttcatctctctccctcacacacagttctcacgttgtacacttgctctgcaacacgcctttctatttgattcgattttatttctcatatatatttgtattatcagcattaggtctgcttaatggaagtagtaaaatttaactcccagtgtgactgatcaaataaattaatagagctatatatatctatcaaataaataaatattggctagctaaatcaagaatatgtccggccagggcccagacggccgcgggaagaagggagactctcaattctggttttggtctcaattctggttttggtcggcatgctggctggtttccaaatctaatcatcattcactactgaacatattgcattgtcccatcatataagggtttttgaagagatatgacacatctaataccataaatataatctagacagataacct

SEQ ID NO: 31707 - DNA, 746 bp, Oryza sativa
tgttatatggttatatatatatatatatatatatatatatatatacatatatatatatatatatatatatatatatatataatatatctccaagcgaactcctacagtgaatttcatcttaactaaaccatataacaatatattatatatatatatctccaagcgaactcctacaatgaatttcatcttaactaaactatataacaataataagaacaataataagattaaaatagacttcacctgttgcaacgcacatgtattttttctagtcttagaaaaaatctaaaccaatgatttattgtagaacaaccaataaaatcattagtacattatagaaaaaacaatatcaatctcgttaattgaccatataagagctcgatggatgggaacacttcccataagaagatttttcttctcgttagccgttacgacgagaagatcaagtactaactttttccccatcccatattcattttaacttttgcttattccaattccttaagcatttctattacatttttatcgttttcttggtgaagctagctagggcagctacgtgtatgtatgtatacacggtgccatttgaagtgaccagacaaatatgtcttgctagctggctaaaatagttgcctggtttaatttggaatgaaaaggccacaggatatgctagctaacttaggtgataatgatatgcattgctgctatatcacaccgtacaagaaaagagagaaaaaaagatagtt

SEQ ID NO: 31708 - DNA, 606 bp, Oryza sativa
tagcctctctcaatggggaggggaggggaagattgcagaagagaggaagcagtgcgcgaggcaataacaaagtgtgtgtgtggagtgtggctggcaagtaattaaaagtgagtatatatggatgcatttgcaagtagtgctatgcctctctcttgtttttttgtttttttttgggtacatctacgactacaagcatgtagtatgttgatggtgcagtacatgtcaacttacaggtccctgtcatcaagcctgacggcgtccaaaggggcctggtaactactacttgtattgcatcaccaacatgattttttttaatttaataatactaacatgggttctattaagtatcaccgtagcattaacaccagcaaattactagtgcatacatcatactacgatataaaattacggaatcccattacatgctcatgttggtaccatgtacttcctccgattactagtacatctctattactaacatactggagtacatatacttcgatataccactagtaacaactatataatgcataataccatctcatctcagttctacatatgactaataatactgagtagtaatcacattcacatgagacaaacttt

SEQ ID NO: 31709 - DNA, 1880 bp, Oryza sativa
atttaatttgacatccctaggtccttttttctgatggattcaccacttcttcagagtgacagagtgtggttcttatgtttcatgcagcgaagtcatgtgaagtgcacatgatggccgacaaggttattgcttattacatggaccaagacaatttgatcaagctattcaaagtaatcagaagagaattcaaatcgtcgtcctctacttttaagaaccctttgttgccaatagatacccacagctgacaaccggagctatatgttgtgagcaaagacatgtttaatctgcacaagttgatgccctgtctttgtttacacttcctcattctcttctcatgctgtaatgacttcacattcaatggcagtatctgctcctcgattatgaatggtggcatgagtgtctggcgccgattcactgacaccaatgacaactacaacgccgccgccaattacatagtgctgacaaagtgtcaattgcctaccacttccagcccaccaatatctttcgacgatatgaaatatggaaaccaaaagcctgttgatcctaccacatagaatctcatattataaattacaggttgtatagagaggcttttatacaggtatacaaagtcgcgcaacgcgcgacaaaggtggctagtaggaaatgaaaaaaataatatttacaatagatagcctaaaaaataataaaataataaaataataataataagaaaacaatagatagcctaaaattgattccccataatgaaaagtgggccctcactttaactaccaatagagaaaattagtttttctgctccctctatgcgcgcactgcgtggccagctcctccttcatctcgcatttttttctccgtgcgcgcacgagagaacgattgggaacaaaaaaaaatcgctcccttgaagtggggaacgagatatctggagttgggaatctggattattaggagacatgttagggattctattggatgcgatttttgaccaaaattttctaaatctgaggatgggaatagaataaagaactattggtcatgctcaagctctaaagtcattcctaacactccatgttatctagtgtctgtagcattaaatacattatcacgtaagaaaaaatatgatgtgacaagagagttaatgagaacggaggtaaaaagatgaaagaaccatttctcatgcaagaaaccatctctacacaagaaccaagaatatgtggataaaagaagagagaaaagaggtgattggatgagaatttaatttgaagacaccattcattggatatatatatatatagtgtctatacatagtgtccaactattcatgttttataagctaataacaataaaaatactaatcataaacaaatttaaataagacgaacgattaaagttggccaaggaaactcatggttgcgtttattttgggacagatagagtaaagaatataatgttgttgcccctgttacatttaaaaattagactgtgataacatcaaatttccttttgaacactacacattgtcacgatatagcgttcaatggttagccccaagtcctaacacacaccaggagggctggacagcacatggctagcaaatgagataactgcagtcagcggttttctggaaaaacaaaaatgatagaacaaaatcattgcctagctctgattcagcattccatgtgttatattaaccgtgtactgctgtttgatctcacaagcatcaattagtcgattgtaacgcactaacaggaaatataatttgtaattgtgaccttcaacaaccctaattgaagaaaagagctagttctttcttcccatcagaaattggtttgattccactcacacaatccagacttatgagctaccagtggtctcaaagg

SEQ ID NO: 31710 - DNA, 567 bp, Oryza sativa
ttcgcactcgcaaaacctccttccctgaattgaaggtacaaccaatttcatgtgttttataattttataatgggaaacctgtttagattgttgagttttcagattatttagaatggggtgcctgtttagattgcagcataggtaaaataataataataaaaaaatactcaattcagttctaaccccttgatgtattatttcagttgaagttcagcttctaaaaacgtatatcacctctctaaacatggtgtgtactaaaactaatgagaaatgcttcctcttgattgagcagatattcattgtgaaacagctctataaaccatgtttcttctatcatcagaacacaaggctgaatgaaaaatgcctgagtgagcattcctctgaatatttctgaatttggcgatatcatttctgggttgttctgagtgaattttcaatataatcattttttttattttagtcatgattgatttgcacactagcgtcgtcatctggcaggagaacaagccacccattcaaaaatcggcgttggccaaccagccgcttctcttcttgggaccccttgct

SEQ ID NO: 31711 - DNA, 582 bp, Oryza sativa
ggaggagggcgaccgaatgccgtctctcactgttgaagctcgccggctcaatggggaaagcgacagagaagaagaggccgtggccgaggacgatccgtggaaggggacaactgatataggttgatccagctcattccatagccgaggagttcgctgatgttgccttgaacagccagcgaggagaggggagatctgatgagccaaggccgaatctagccgccccgccgctgctctgcctggctgcgtgaggaagccaaggtccgcggcgacctccgtgaggacgaacgcgccgctcggctcggctccgcgaggatgagcgcgccacggctcgtcttggctccacaaggaagacgaggtccgcggcaacctctacgaggacgatcgcaccgccgctcagctcggagctccttgtccgccacagcaaggggaaggaggcgtcggttggggtttgcagaggtgcacactactacgaaaaccatttttcatggcggctattttagatttttgctagcgaaatttacggccgccacaaagcaaaggccagtgaagatcaagatcttcgctagcggttattgaccgcca

SEQ ID NO: 31712 - DNA, 2824 bp, Oryza sativa
aaaggagataagaggtaagtttcttcagctaggtttgaagtgcatgctaactgttctcctcatgcagcgatgcctgaacatttagcacgctctcttcgctgtaaagaccagtgcagcatgcatcgttgtaaagtaagcagccattgtgtcctaattacaagtttattaagttgtgatcagagcatgatccttgtttaactacactaatgccatctgaaccaagcacacaagatcacggatcatagcctctagtacagttttcctgatgtcttttctctctctcttttcttctctttcttttcattcgttttgtcaagagacaagaggattggacatgagtatgccttttgatagtgtgcattccactaaccataccaactaacactagctagctagatcattctttaagcagactggactacaaaattcagacatgatctttctgaacaatgggagataatgttttgcattcttgcagtgctactgctgacaatctttgggagcagggaagccaatggaatcagctaagatagaactgaatgctcttgaccctcttacagtacatgttaggtgttgtccccacttaatccattaatttcaatcttcacttgtttaacctttactgtttgtaccacctgtagttgctttgacaagttctatttcacagtggcttaacacatggcctgagcttggctggactctgctgattggcttgagtttgtgcctgaacacaagctttgtctgtagttacctacatttggagtactagtgtactacatatgcaggtaaaagtaaactaactcttacttacagggttcagatcaagctgtaattaacgaagtgattaaagctaggagtactagttttgcagttacagttgaactcacctagaaagcttgcaaaggtagcgggcatttcatctaaaaaagcagcaacctcaacaactttgggccagctccctgcatttgcatgccagcagtgaacaatcatggtacatgtttcagttggcagagagagaaagatgagctcttgaagactgaacctttttttggccttcactttggatactgttgagcatttgacccttttgttaatacctaaccaccatctctctggcttctgctgtttgcaattacaaccttaagatctggagtagaaagcaatgcatttgccccgaaaaggagggtggtccattttggtagattatcatgttaaatacaatctcatgtgatctcaaatgtaggagtaggattgttatctttttaacagcaggaatctgattagcagtgtcacttgcatgaggagtgactaaactacggaggagtgcaagtgcctggggtcaaaatacacatgcaacttcactcaggtgacagaaagatgaccacctgtttagctaaaatataattaaagtagggaggagaaagtgaggctgagcatcttttcctaaaaagaatcatgaaaatagtatgaaatttatttactctgtattaaaatgcagctttgaaatatgatacaaactttagtgaaataaagttcagatccataacaattcctgatgcttagctgaactgaatacaactgaataaaagaatacaactgaactattttgcgatgaaatgctactggttggatttgatggaatagcaactgaatacacagaatatatatccaagaaccaaatgtcatggtaatttcctgatgaaaattaccattgctccaggcaatagtctcctagacaaatgtttcagccatgtgttctcctggtccaaagactgaatagtgcatgtacttactgttgatgagcagagcagcagcgttggttgatacggataaatacagttgtgaactaccaatcaatcacatgatctgctgagatcaaaccctgctgatatttacctaaactgactgctttactgaagattgaaagtgtttttactgcaatgttgagtacaatacagctatgaattagtatcaatcaatcacatgatatgatgagatcaaatctttctgatagttagttagttagttagttagttacctatacctgactgcattacagcagattaattgcaaagtgtttttactgcaatgttgagtacaaaatgatcacagtttaggagcttggtcaagggaatctactactattacacgagtagctactactacagtatctcaagttttagctgtcgagtggcagtgacaattgaaggtaggggccaccatgggaggcaggggtgggtccacataacagaatggatactctacctctacctctgtgtgcctgggatgccatgtgaggagcaccaagtagtaggacgtcagtctagcatatttcttcagatcaagtgatcaaccactctgctgactgctctcaccagggatcaacatttatgggcgatttcaagtccccaaccatcgccaattcatcgccacacgtcaatgcaggtccatggaaacaaaacacactagcgagatttattgtacgtttgcatgcattatatcgctaaaaattaggagtatatacataatttcttctcttgagcatggatggatatgaactgaatgccatgttgtactagttgagttgagcttgagcaggttagctcatgaacagttcgtggtcatgaatgaggtagtatgatactataggtaaactagccaattttttttttgataaaggaagcttttattaatctcagacgattacatcaagttgatagaaccatactaagaaaactcccggcctctgcataactaggatgcacacagccaaaacacacaaacccacaaaagagtttgtaacaagagaaggaaagcagtaaaa

SEQ ID NO: 31713 - DNA, 3443 bp, Oryza sativa
agacaagactatgtcaaaattcaaattcataactagagttgatttagtttaggacggagggtgattcttcgcatgcggttgatcaactggcccccgagggaccggtttttgtaggcacggtcaattatggtccgcctgcaatctattggggtgatcgtctaggaaaaccatttgtgtagtagtgtatgcagcagtgtctgggatcatgattttgcttcgttacggattgaggtcgcgaagtgaatcggactaaacccacagactgacaacgtaaacgttttcaatttttaagtatggtatgatatgatgatagatatagatgcagggtcttcgtttttgtgctgtcactttatgtcacaggctcacagcaatagtcttctctgtaattgaagcagggcttccacatgatgttcatgcagccggccactcgaccaacttaaagcctcagtagctcagtggtataagcatcaggaggttgccgttgcacatgtgaactgtagcatttcagatttgtgcagattgttttttttagggaaattactaccagtcaattgcctagtaagttatatattaataaaccaaaatattaacttgtgcaacttgttgtcgtctttacttttagccacaattagttattctatcttctgatgacaaatgcagttatgcactcgagaaattttaaatatctacccattcttgcagactgaacaatttcaaatatgtgtaacttgggatctttccttttaaacccttctctaaataagacacattttttttcttttataccagaggtaagtaaggccctgctttcacggaaggcaaacatgtatagtgtttttttatgctgtggataccagctacatgccagaccgaaaacagagaagggctcacaccatctaccaaaaacttcagaacccttaagataagcatacttagggttctacatcctggggcaaaccccgagatactccaggctataagcaagacaccaataactgacatacaactattggaattaacttcattagcgaacaaaaggtcgagatcactgcagattgtctacagcttgatgcagcaagatttcggcatttccagcattattccaagttcatcaggattcaaaagcaccttccaatataccgagaaaatgacgcaaaaaagaaaatcacagttagagggctggaaaggagcttggttttaaatatcataccattgcgcacaattgcacaaacaaaagaagccaacaaacagcagaaaacaacatcattttaagttttaaccctattcttcctagcaccagcccccgattgcctcaatgaagtagtagtgtttagaacctcacggcggaaaatttcatccacaagcattgcaacaaatataatacaccaaacaaattgtgcaatggagcaacagaaaagcattcacggttttcagttatgtgatttttctcataattttcaagaaaataagacgatcgtgcttacaattttcaatcgttcgaaattcttgcagcatggaaagatgacggctaatccctgcatgaagaacaggtattctgttcaatgaatactgctatctccttttcttaagttttggtgagttaagtaagtatttcaggtttgtttcagacctcgccctgtttgtttctcagaaagaagcagatggtaaataaatggtaatcaattggcaagggggcacagagaggcctggggcatttagggcttgggaaccaggcttaaccctataaaattattgagatttcatcaaaataccatcaaaattgttgaatctacagaatgattagctagaagagttagctcagccctacgcttgatctattcctagcttcaccgcctgttggttggtgcttggttttttgcccaccttgcactcatgatttattttgtgcctactaaagagcaaggctaataatacagaagacttgttagctatataagattctttgcagccttctcttagcccacacatataatagttagctatttacaactaatacagggctcacttgtctctctcacagaatttgttggttcttgcgtccaatcgagatataagtttacagcccgcttctcctctctctcggtctctcctctcctctctcctccacctcagcatttagccgacttacatcctcctattatacttactctaagcattatgaagcttttgccttccttcaatatgaaacctcactatggttgttcgatgaatccaatcaagcttttttgcactgttttccttttttgtctaatttaacttcaccaattaaaacccaatatttttgttggcggcattgagcttagttcttcctttcaagaactaaatatcaatgaggactggtatctcttcaggtcagatttttagatggttcatgtttttttccaaatccagctgataattggttgtgctatgtgctgaataacacaagggttgatacaaatttgcaggaaaaaaactctagctagcaggtaattgaccaatcaccttgatgttattttcaaacctataatgtggtgtaaaatttagttttctcataaataaatcattccatcgcatatctgccttttatttgatgaaaattataacctaccattgatttcagtcaaacttttgttattgtgtacttccctttgggttttttcttttggagcaaactgttggatccagtggatcattctggtaaatggtagtcatattgtgcttttacttgcagttgcatgcttgcatttgcccttgcatatgattgcatagataattttcttttgaacactacacatttagggatttcagttttcttagttgtgacaaattataataacgaatggactgaattgtatgttttgcaagctcttttcagttctactgttggctagtacgtgttggcgcatctactaagtgaaaggttaatctcacgacgtcaggaggatgtgccacgttatacaaacgttattagccgtcgatgctaacagtgaaataatgtgtaccgttggatatagtggcaaatagtaaaaacaaagtgcatgcatcttcatgagacttctagacttccagtagaagcctctcagtccacaatgagaagcccgatctgagaaagcccaagaaagaaggtgaggggaaggagaaaactaaagaaagattgaaaaaaaaatatgatttaaattatccagacttatgtacgtataatacattgaaaaaagttctaagaagcactctataatgttgataattttcaatgaaatacaatgagaaaaggagcgagtatgagattagcatttgtgctatttcttaagtctagataaaagggtcatgcaataatagagatggccggaaagtgggctcaagttgcagggaacaagatggttattcatactccaatttttaagtcaaaattttgttggcacaaaaccaactagtgtctttgg

SEQ ID NO: 31714 - DNA, 2422 bp, Oryza sativa
ctgactttacgtcataggagcgcgctctatggccggtggcgcgagagaagaaggggtacaactactacgtactggtacgaattcttaaaggtctcaactctcaacgttagactttcttttttctttttacgtgtaattctcaaatgagtacaactactgctggtactataattctgttccacgacgtactccctcactctatccattaatataagcatatgtttggtaattctcagcacacgttactgtgtcaccataccgtttgaaaaccgttggccgctgataaaatttggtcaagttctgttataactgtaaagttcagtttgggtttttttttttaacttgaccggaaaactaggcgatttatgttctcaagcaagctcggaaagtccggttttcataaaaacaaaccgatgttcatcggttttgtaaactttgttccgaacattaaagtcgtttttaatctcaacattaatcttcactaaaacaccaacattgattatattgcggactaaaaagagtatcacagaaaattgtcacattcaatctaacctgcatagagaagtaggagtaattcttccgtcccaaaatataagcattttataaaattttttaatggtatctaacaagctagagagataaaactaaatagggacatttattcttttacctgagaaatggggatgttcgtttattggttgagaaaagtaggtactatgtactaagaactataagttttgaacgtagcgaggagtatattttgggacggagtacatgtttatttactgatatatttaagggagtaccccataaaactcccacctttaaactaacatgcataaacaagtaaagagtagttccgtccaaaaaatacagggactagtgaagttttttttttacaagaagtacgagagtggtaaaattaaaaggggatatttattcttttacctgataaatgacctatgtttaatattgttgagagaataataagaaagtaggtagagaaattgaggtaagaaaatatacggagaagttctatatttacaccatattagtagcggtgttatggtatactcacctacccgataagagggagaccaccatctatcttatggaccatcactgttaacctaaattctactgcagtgagaatctatttgctttatgtgtattttttagtgtttatcctactatcatcattaatcagagggtgacaatttagttttcatcagtttacctaatataattagaatccgctatgatgtataggtattttgttagttgtatgataaattttgaatgcaaccaggagtactccctccatcacattttaaatatagctgtaagtttctagattcaatatttaatcgttcatcttatttaaaacttttttatggttgtatttttattataaataatattttatacatgacttatatttttattttttttcgaaagaaaatcaaataaaacgaatggtgaaacgttgaatacgaaaacccatgttgacagcagcggatccacctcccgggcaagtcgggcagccgcgcgggctccgctattaccgtcaccactattgatagctattgacacccataaaaattaatcgatcaccgaaaaatactatgggcttaatgatgatgctggctccaccactgtacgttgaatacgaaacccacaactactcttgaaatgagacggagggaggtttttttttttttgggaacagtactcctttccaagctgccgactgccgttgccgattttgagggctgggccggatatggctgactgactgacaatgttacgtgacgtcccaaagcaggcaggccaaaaaaaaaaaaaaccgacggttcgtcaacccgtcctctcctcctccatacaaaaatgctacggacacgtctccctcattctttctccgctttaatttccccgacgaaatcgagcccaactacaactatccatccatttcttccactagacatctcaccttgcttcctcgccactctcacttcctctccacgagcaagaggagcaagaagaacgaggtcaggtcaggtcagctcagctcactgccatgatcactgtactccagttctttgcttcttcctcttctctcttttgattagcttttctgaattttcagtgaagtgtgacctgccggctgtcgaagaattgcggcgccatggatgcgggtgcaactgcaaggtcgtcgtcgtcgtcggcgatgatgatgaaccagaagaagcccttgctgtaatcaagatttttcgttttctttttcctttttctttttgatcttgtgttctgtgttgctatggttcttgatcgatgtaaagattggaggatttcgttctgtttgcttgcgtggcgtagctcggatggcgagctggtggagctcctgtggcaggacgggggcgtc

SEQ ID NO: 31715 - DNA, 1316 bp, Oryza sativa
cattaacatctatatgtatgtgggtaatgctagaaagtcttatattgtgaaacggagggagtagaaaagaagtagtacttcatttttcatgccatctttctttctattttctgtacttttttttattggtcctatccacctcatccccccaaccatactgtgtatgttcctcgaagaaaaagtgtgtgatcatgctaaatccttccaatacaagatacagtctgatccaagcatgggacatgatcaatcaaaaaatgatgaaaaccccccaataaggcccaataatatcaccttttatcaccagaagtcacttcttctgttctcatgttgtttgatagatactctccttttagtagaatacacgaattgtaatctttcaacaacagaaaggtactgccatcatatatacaggcccaattaggagtagtgatcagtagggtttagtttaggaccagctattgtaatgcatctactgcatttggggacaaaataagtactcctagctatcaatagagtgattaatgattgctctaccatatcaatacaaacacaagccctacacttatatgcacccgtgcctgcacaggaaagaaagatgcaaatctgttggttttccagatgcttcagtctagaatcctaactgtccatcctggcaactgaagactatgtgtttgctgggctcataaagatcaatgctcacgatgttcttcattgtgtggaaaatttgctgccttgtgtctcctctattttgccttggtagcaaaagatcagatggtcagtagtgttgcttgtacctaaaaggctgcagctggtcatctcattccataagacaaaaatggaaatagtaactcccatcaacagtgtgaaagaatcatagaactgactagggcaccatttgaaacggcttttaggcttagctacttactcattttctataagcacgtttttatgaattactaaacaatatttttttgcaaaaacctttctatatacaagtttattaaaaaatcatataattttattttacaagtttaaaattattaatagttaattaattatgtgctaatgatatatctcgttttacatgcggagctcagcttagaagttgtttggaaggctgcctaggcatagcatggctctttttgttggaccagctgagtggttcatgcccatcatccaattttagcccaagaaaactgggccagcccatggaataagtttctggctcaaatcgacgaggaatagtgctacatctgatttgcttacattgtaccatttgttgggtagagacgtagagtgatactacatctgtccca

SEQ ID NO: 31716 - DNA, 668 bp, Oryza sativa
gccccatgtacagtgccagctgtggctcttcctgtggttgcatagtgcccctctccactttattccatcttgcaatgatgtgtgtgtgcatgtgtttgtctgtgctacttaccaccaccatgcatgtgcatggagacgccctatagcttagctagggtttaggtgaaacttgaaagctcatcatgcatgcatgcatgcagattaattagtgcattgacacaagtgtacattggatgtgggcttacataattaggttaattaattactcatggtttattgcttggagtatatatttagttatagggatgtgtagccacactgactagtatgattctatgaagaggagaggaggtgtgggctagtggctgcactatataagtagggataggcctcccttctcatcatgcaaacatgcaccatttcacagcattagcacaacaaacacaccatgctctatcctccatgtatccatattcctctctctctcactctcggagcacacgagcacgagccgcggctggtgtgagatggtgagtctaactagggtttgatcgatcccatcccttccccccatccacctatcgccgccggctccgacctcgccatgccccgctccgtcgtcgtctagggttagctcgatcgctagctcgatcacaaccagctacaac

SEQ ID NO: 31717 - DNA, 3664 bp, Oryza sativa
aggaggagagaaaaaaaagaaaagaaagagaagggtggagaaatagaataaaaacaacatagaaattagagggagattaaggaggattagaaaatttaaaataattagaaattaattatagattaattaaaatgtaggatttcaaaatattactataattataggttatttttggtaatctctataagtaatcaattcgcggtaggaaattagatttatttaaagaattaaacaattaggttgaattcttaggaatgtacttctaaatcacaaaatgacttaggttaaaagacccaacaattcgaataaagtggtttcgcaaactttgtagtcaatatagaaagatcgattcgcgttcgactttttgagttatttggattttaattgaattctaattgaattcaaatcatttcctcgcacgtaattttagagcccgagggagttgcggatccgagcgagggtcaagacccgcaggactacgagcaaggcaagtcatcactattccttgaacatgttgatcccaattgcgaaattattttgtttacaaataaaattgcatgcaatgatgaacatcatacttgtgattatgccatgccttgattattgtttaccccttatgtcttcgtaaccatgtttacgtatgagtccttagtcaattatgacaattgcttagaaatgctattctagaatcatgcatactcatatttatcaaatgctatatgcttgggcaattacctttgggaaggtaattgagatgcggcatgtggagacatgagcgccacattgccatgatgttgataacatgatttgtgaaaagggaaataaaattaaacaactgttttcgactggggcggacggaggatttgggtggtgtccggaaaatgctagtgccgtccccggttaattaaggaccgagccatgaagttaagcatgaaacgacccccgtacaaccgcacttctcgtatgggtatagacctagcggagtagatagctgagcggaggcagtatccatgcatagtggtttcttgatgtgtgaggcaggggcactacagtggggcagccattggtaggaccgcgaggcgggtgtctactgtggtgtcgccatcggtaggactgccatgtgagaatctaaacataattataacttaatgcatgtgtgagtcttcccttcctgggtacgccagaactcctctcactgctagaaaccgtgtacgcctagagtgcatgaggatgtaaagttcatggagcgggcactgccaatgcgaggttatcaaaaagctttgccgtgacgcgtctcatgtgttggaacgaggctcatgtgttgggcagttgtggagtgcgggtaaagtgtacatccactgcagtgtgagtaaaccaaatctattcgaatagccgtgctcgcggttattgagcaccgggacgtgtattacacttggctagactctaaattcttaacttgtgtgggatgagatagtgcatgatgatttttatactgatggagccacttcctgagaggagggaagatggacgtcctcagaaaaccatgacgactcaatggcgggaagctatccttgggattacaatggatggtggacagaactgtcattgtttaacatgaacactaaaactaaaatttggtcagtttatgctaggtcttaggcttgtgaaaagaattacaaaacttgctttgcgcaaaagaaccatagccattccttgaatacccctatcatgtgcattgttgctgtggtggcttgctgagtacggttggtactcacccttgcaatatataaacttaatcagaggccggagatgaagcttcggaggatccctatgcctattaccaggagggtgatgaagacgatggcgctcagtaggtcttagttacggtcgttgcctgtggcaatggcgtgccgctgccttaactccgctgccttatctacttctgcttttggaatgtattccggaccgctcggtccgatgatctaagactatgcctgcgggcttatgatgtaataattcgcactagactctcgtgtatgtgcatttggtatttcagctataaactcatgtgtaccagactacttgatccagggaaatggtactatttacatgattgattcctgttataaaaacgggggtccacacagggagatgcaacgttgtcgtcgaagaacaggagtagtcgcgtttgaagcactacccaaaaacttgatcgcccgcctacccgtgtagacggagttccggaggcacctgctcgtcctgtacacctgtgcgcgcaggtgaacagaaccgggaaaggattatgtagctcaggataatacggaatcaattcgcgttttatttcggagcagacggagttccagaggcacctgctcatctcgtacacatgtgtgcggaggtgaacagaaccgggaaatgattctgtagctcaggataatacggaatcaattcacggcgttttattccggagcggacagagttccagaggtacctgctcatcccatacagataatacggaatcaattcgcgttttatttcggagcggacggagttccggaggcacctgctcgtctcgtacacatgtgtgcggaggtgaacagaaccgggaaaggattctatagctcaagataatacggaatcaattcacagcgttttattccggagcggacggagttccggaggcacctgctcgtcccgtacacatgtgcgcataggtgaacagaaccaggaaagtattctgcagctcaggataatacggaatcaattcatggtgttttattccgtaaccgacggagtttcggaggcacctgctcgtcgtcccgtacacatgcgcgcaattcatggcgttttatcccgtaaccgacggagttacggaggcacctgctcatcgtcccctacacatgcgcgcgcaggtgaacaaaaccgagaaaggattctatagctcaggataatacagaatcaattcatggcgttttattccgtaaccgacggaacgttttatttcgtaaccgacggaatcaattcacgacgtgcaagtgaatagaaccgggaaaggattatgcagctcaggataatacgaaatcaattcacggcgttgtgcaggtgaacagaaccaggcgagcgcagcctgcctcgcctcgcctcgcgcgtgcatgtgtgtagctgtccgcccaccatctcaattggtcaatagagactctcaactagccccgtatttaaattgagacctcttcacttagatttccaagatggtattattacccatagcacttactgtaggccaatgaaatttattatgatttaattggcctagcccattaatctaacacaaaaaaaatccataattaatgaaaaattatattggcagacgagtaggtgatggagtattaaaggaataaaatttcttgatttacaggcagatggtaggcaagaaaatagaagttgattcattttttaagacacaattcaaacttcggaaattggtttattttgggataaagtcatgttgactcatgagtcagacggagtaaaaacgatcggaattggtagcatctattcgaaaacgacagtcgatcggtcggcaatggaccatattcatcatttgaactattcgttgtcgatattaatatgatatagaaagaaattagaaaaaaacaaaatttat

SEQ ID NO: 31718 - DNA, 984 bp, Oryza sativa
ggagcggcatcggtgacgacaggagcagcggaagcggcgataggaggcaggagccgatgcggcagtggtggagggaggcaccgcgcggaaggggaaggaggcggcgatgaaggcggagaaaattgcgtggtggaggttgggaggaaatcacgtgattttgtttctgtatccgagtcgtggtatcccagtgtgggcaaggcgatggtgggaggtgggaccgtgggagtgccgtgggacgctgtgggtggggtatagttgatttgtcaagggttggaatggtgaactcctcctttttttttattagtatagattaaacgagtaatcgaattgtatttgcgtcctggtaataccatctgattgaagtggcaagtgattaattttttttccatcatattttacttgtctgtaaactacggttacaagctaactgttcgatgtcttggtgcatttctgttcaaaatgggaatgtactactacttaaatcactcttgtgtgccttccgctaaaaaaaagatatctttgagctttgaactttgttagaatccatttttcactccgaactacaattgttttgtttgaaatagagataattatcgcaattcataatcttattgtgcatattaaaaacaccatggcatatggtttaggatgttatatatctaattttggtatgaaaccccttctatctctctccccgcgtcgctctcgcgcgggcggctcggggggcgaaaaaaccctagccgcccgcgcctcttctccatccccgctcctcagccgccgctggagctcgccggcggcgaagccggcagcgagcagggaaggcggcggcgaggcctttttctttgtggtgtttacttcctcggtgtgaagtggacgggacgaagacgacgaagtcccccaccggcacggtccgaggcggcggcgaggtggggagaggcggcggatccggcgcccccaaggccggatccggccatcccccacctg

SEQ ID NO: 31719 - DNA, 902 bp, Oryza sativa
ataatcatgtgagatcttgttgtaaaggtttaattattacaaacacaacggtgtaatcggatcgtagattggatgagtagtttaagagaaaattgtatttgaagtatagttagataatatctcttatagatagagtggtagctggtttagacaaccagctaccactagctgtgtagtcacgttcatttagctaagtcgtactatatgagaaatcactagaagctttttggtttttgtttttttgattatctttgctccctctctctttgtaccatgtgtctaagaggaggccctagtaacctctggaaattcctatacatttatcccattgtttttttaatgtatatgtaacttttgattcaatggctattattcaaactctctactcaatggttgatatatttttgatgatttgacgtattctcatataaaaaagattgctgctttcactatataagataagataagaaaagattggatacaatacagtaaccgggctcatgattggatgcaataattataacagtaggtatccctaccaagtaaaaaagttgacaaaaatcaagatgatttttggtataagttcctttttcttaatgttcatcatggtgaccgtgtgtagttacccggctaatcgtggatacaataatccttctcagtgattagactagaagcgtgcatattccaactttctgaggatgaaaaaaagttcgcttttggaacttaacgtcccaatcgaacataacgtgcattttttttttgtcaagtgcaaagtttgtaaacgacggctaatataagcatcactagggttaaacagcagctgttagaaattttttctattggatataaaatggggcttttattaaggtgcaaaaaacgaaaatgactccatcctgccatcg

SEQ ID NO: 31720 - DNA, 515 bp, Oryza sativa
tctctctgtccacgagtatagatatttgcatccgtacgtctatctatttctgcctttcgcttttgagtatcggtagacgtgatgttcgaagcacttctcaaacactagtaaagcaccctgatgaagatggacaaagaatattgctcgattgcgggatcagtatagtacgtgaaacagtcacttactcgtacatgtccttccatttctagctgtgtctcacatgaggagtactcgccaggtttcaagtcactctttttctaccttctccgtgggatctcagggacacacacgtacgcatctcgtcatcgtcggatcgtccccccagtacaccatatccatgtgcatgcctcctagtatctccgaacaaagttccagttctacccaaggcaatgccgcaggcgactgaccggacactagatctgccgatcgaccgatccagcaaggcgcgcatgcagccggaggtgtgcgcgcgcggctgactgcgcctctacgcgattccgcgggaaatcatggtg

SEQ ID NO: 31721 - DNA, 1230 bp, Oryza sativa
tagggggtatccagtaacttggttcaaaaattttttttatctatagtttatctattttcatcatgtatataccccgtcagtttaaatataggcaccgtaccaagctaaatttgattcaaaccagagtaaagcaagtgagtggaacaccccttcattttgttctagctccgcccctggcaatgctgtcttgcaattaggcttgttctcggttaatctctctctgaggattaaaggaaaactagagaaaattaatttcataactatcgagatgttggaattaatccttctcaatcttcttcaatctctttcttaagggaattaaccgaagtgggcaatatttgtagaccgcaggcataaaacaacacttcattgcagctcttcttgctgtcctggagaacacaaggacaaggtggggcaagcagattacacattattcagtacttagggcatgctgttaacatgatgccagggtttatgtactggaaattcggctttgattgacttgattggagcccacaactcatgttggaaaataaataacggtaacagctgtcatttattcaaaacaactccttgttttatgtggacttatgttcatcctaagctccctttgtctaaaacatgcacgcgtcaagtgataaaatctacacaagtagaagaaatggcacattgtatccagaagtcagcttgcacaccttaatgtttcaaatttccaataattattcaaaggtgtttcaaccccaatgatatgttcctaattttttaattcactatcttgtggaaaatctgacaaaggacgatctaatctacggctatagggtacgtcagttaggtccaatccgttcaatggacgtccttttttattctcttctccaagatcacgttgccctgggacatcatgatctgttcatcattaacaaaccaacacaatcattgtgtggcaataagatgaattagttaggttaagggaagcttttcatatggccgcattgaacattctgtgcctactcaagtctaaagccgtaaacttactcttaccatgctggcctcgtgcaaactttacaacgcacaggcacagcaatcctaaagcaatcgatccatactgtttagtcttacaaaaaaatgattcatatatactcttggaaaataatggatcatttttgtttgaagccaaaatatgctctggctcgttaaatagtacattgtctatgtctagtttgctaaaaaaaa

SEQ ID NO: 31722 - DNA, 501 bp, Oryza sativa
ctggatgattgaaaagttagactaataggatgaattttcaaatttgtagcttttagcttagtgacttgcaaaagaaaccggccattagttactgaactagtcatgattgctagacagcaaatgcctttttagtgtatgctaattacgcatgatgctccagtcaggtgctatagtgatggtttagcttgagttcataaatatttgcatatttgggacaattgcttatttaaccctattttaaagtctaactaccaatttgaccctactttttctagtttgcttattttgaccttgcttttcaaaaatgaatatcccgtctgaccctgtttccactgcaccgttaaggtttcattttaaataagaaaataaatatatttacttttcataatgaccaaaataccctcaaagaaaccctatccattcagatccggtctcctctcatatcccgtctctcttctggtgagtggcggcggcgacggtggggcccagaggaagggatcc

SEQ ID NO: 31723 - DNA, 631 bp, Oryza sativa
catatcataaaagtaatttatgatttttcatcaaaatataatcatgtgagatcttgttgtaaaggtttaatttattacaaacacaacggtgtaatcggatcgtagattggatgagtagtttaagagaaaattgtatttgaagtatagttagataatatctcttatagatagagtggtagctggtttagacaaaccagctaccactagctgtgtagtcacgttcatttagctaagtcgtactatatgagaaatcactagaagctttttggtttttgtttttttgattatctttgctccctctctctttgtaccatgtgtctaagaggaggccctagtaacctctggaaattcctatacatttatcccattgtttttttaatgtatatgtaacttttgattcaatggctattattcaaactctctactcaatggttgatatatttttgatgatttgacgtattctcatataaaaaagattgctgctttcactatataagataagataagaaaagattggatacaatacagtaaccgggctcatgattggatgcaataattataacagtaggtatccctaccaagtaaaaaagttgacaaaaatcaagatgatttttggtataagttccttttt

SEQ ID NO: 31724 - DNA, 680 bp, Oryza sativa
atgggcattccaaatcgatctcgcaacaagattaagtcatcatggatgcatgccaattgccaggcacaagaagcttaattaggttctttccattctcaatttgatcagtaattaatggccatcacgggagacgatacgagtgatcatctcttgctttttttctctcgctattatgttcacatagtatgacgtaggcgaaacacacgtgccatggcatgcgtgatactgctttaggactatgtacacatttttgaattttttgaattacattccgtatttctccgttttttgaattttttttggctactatgtacacatttgatgggcgcggcttgaagccgcgcgtattcatctagttggcatcagggatacaaatgtgcagcccatatcaagccaaattgtgcaagagaggggcaagactggcatactcaacgtgtatctaagaacagatggattcaatctggaaggcaaacgaattcaagtgaaacgggtatgtagtgttacatgtacatggcaaatcagccctgatgtttctgcattgtttccagttactttccaaacgaatgagcacacatgcacgcacatattgcatatacaattctttccaacaagcaatgattatttggggcaccatgataagccttggtacaccttctacaggatctttccctttcctgtcg

SEQ ID NO: 31725 - DNA, 563 bp, Oryza sativa
ttttagtcccggttaaaaactttttgatctgtagtcccggttggtaacaccaaccaggactaaagatcatttttagtcccggttcaaaaaattgtccggacgagtcagggccccaattatctttagtcccggttggtataaacaaccgggactaaaaatagatttttagtcccggttgtttataccaaccgggactaaactttaccccaagccgcgcgcctgtcagtccacagtcgtcgtcatcaatcttatccccctgccccttcctctccccctctttgcattaaattaacagccagcctagatatctccatcgtctcagaagtctcccctctcctatccccttcttcctcccccttcacctctcctccccctccccgcctcatcctctctaggtgaccaagtccgagcggcggcggctggcgtggccggccgcgcggagggcgggcgggcgggcggcggccgagtccgagcggcggcggcggttggcgcgccgggccgcgcggagggcgggcgggcggcggccaagtccgagcggcggcggcggctggcgcgccgggccg

SEQ ID NO: 31726 - DNA, 6324 bp, Oryza sativa
agcatcaagggcgcccgcgccgtcctcaacttccccggcctcgcccctgccctcccgcgcccggcctccctcgccccccgcaacgtccacggcgccaccgccctcgccgccgtcatgcaccaccacaaacacccctcctcctccacctccacctcctcgccgccggctgctcctccgccggacgaacaccaccctcgccacgagccgcagcagcctgagtcgagcagggaggatgaccagcagcagcagccggcggcggcggcggcggcgcagatggcggtggccgagctggtgttcgacgagctggcgccgctgtgggtggaggacgtggtggagttcgggacgtcggatcattgctggacggcgtacgatgcgcttgaccccatcggcttccagcctctcctctgggagtactaggctgctgcttgtaaaacagcttcctcttcttttcttttcttttctttttttggttttgttttttgtgtggattttttcccctagtgctgcttaaaatgtggcttgttttttttcttctctctttcaatcttgatttgagttggatttggagtttgtgtgatatatgcgatggaattagttcgagatgcgtgcacattttgtcccaggaaaaatgcaatgcttaactcgaagcagaagctcaatattgtggttgagactgaaccaaaatcaatctaaaatttgagggttgaaaatttagacttctgcgaaagttcgagggatgtaaaagaagaaaaatgtcaccgtattatctatttttgaacgagaggtttaagctatatatataagcactttgtttactctgagcaatgggatgtaattttcatgaaagcaagcagtgcatatatcgactaaacgagtccagaacttcagataaaaacatatgctagattttctagaaactgacggctcatggcttttgcttgcgtaacagcacctatggtaaaatagtctttctgaattaatcgcaaaaattaaaaaaaaaatctttctgaattctgacaagtcagaagaaataaatatttttgctggctcgatcgcacaaatacctgcacatcttgccattgtgatcactttcactatgcgtaacataagtcatcgatttttttttcgaacacgcaaaagaattacacatcaatatattaaaagaaatcagagttttggttacactacgcaaacgaccagaaggctattgccaggggacatgaaaaaaatggaaggaaaaagaatgtaaaagaaaatttcattaccatgaattccttgaaagcaatttcaaggaccttactactgtaatacttatcagaactgactactactaccactacttaaactttgaccactaatagcttttaaactgccagattatggcgatttaaacaatgcatagttgcaatgatgtttatcaaaatttacctgcaatttaaactgtatcaatcgctcagcaatcgaaccttacctaaatactaataattgactctgcagctgggacctgcagaaacctagcttgggaattaactaagcatggtgtcccatggcaacgccgatcaattcattaatctgtacaactcagagatcctattgagattcgatgaatgcaatgtgaatcgtcagagaagttaattagctgtgaataaaatctaaagaaactgatcctcttacagggtgttagctccacgtacgaaaaaatagagtaaattgggtgcagtgcatgtatgtgtgtgtttgtctgtcttagccggccgctggtcgctgaacctgaacctgaactagctgtctgaatatttctgtcgcctgaatctgtctgaatgatcatctgatgatctgatccgacggtccagagctcgagccaggccaaatgtgtgcaacagattcaatggctggagcccccatcaagattcaagaggtagggacggctgcattcactggcgttgtcatgtcactcagaaaaatatccatcttgacccgggtaatttctcttcggttttcagggttacaaatctcttttggttttgttgaaatataagcacttctaaaatttttcagagagattatttgagaagataagtgaaactaaatgagaaatgatcagtgacggagccagcacagttgtaaaactcaaacgactagtggtgtttttgggtgactggccgatttttatagatgactaatgataatagagacggcagcggcggagcctgggtggcagcccgacctatccgggagttgccttcactgctggaaatgattgcaattggttaaaacaagagagtagtcggaggaattactatatatagtttgaaataaaatttgaacactaaaatttgctatagtttgggatgaagtatttttcatttctccctttaatttcctataggaattgtgtcttcaggttgaaattaagcacatgcagtgcattttagtgagattagagatttgcggctgaaccctgactcttttgagcgttcgtgtgcaatcacgttttctgtgtaatcgtaaaaaaagtataatgcaaaaattttacagcaactttgtaggattttccaacgaacttatcaaattacttctgcaatagccaagaaaaaaccctgcgttcttgaagctgtatatggtacatgatcatcatagccaactttcttgatctggataatttgtatccaaggttaagcagagtgtgacaactaccaggggcatatcttagataccacaattttgcaaagatttctggaagaatatatacaaatacagtgataggccaacaacatgatggtcctgatgaggaaacagtctgattagctacatacaaatcgccatgtgtgttctcctcctgtcctgagacagtgagacaccagagattcagaaggagacggctaatgacagttttgatggattattacatgcaagccacacacctgtgctgaatgtatgcatcattatatcctgcttagacaattctaatacccctgcaggagttactcctatatatatcactcagagacagtgtatgtgattgacattagagatgacacctgtgcacacgtgtcagctcgtgatagactggctggagattaccctgagattctggacatgaatgccactaactgtaatgcctcctggcgtgttgatgtgtgtgcttgttaattagtgcaacagttgcaatgtgggttgccataagcatcgatttggggaattaataatccatgaggttgatataaactatatggattaacgatggatgttggctgtgtgcaattgtgcagagtgtttgattacgagtcaactttgttcagttcagatcatatttcactggtggagaaaccatctttagtcggtccaccagatttcacaatagtcccgattgtattaaaaaccgggactaaaaacatatttagtcccggtttgaaagctctgaggaattttttaccaaccgggactaaagatctatttatagtcccggttagtaacaccaaccgggaaaaaagatcggttgatgttatcaaccgggactaaagatctatttttagtcccggttggtaacaccaaccggaaaaaaagtcgacataagcggggtggttgcacacggatcggatcaatacaatctcatcatctccttttttaactcatctcctcatagagtcacccttatctcttcctctccctcctcccttcctctcctcctctccacctccctcctccccacctccctctgcaacggcggggcacggagggccggcccgcgcagcggcgcggcgagcggagggccgggcgaggcggcgcggcggcgtgcaggcgcactggcggctggaggcggcgggcggcgcggcggcggccggcgaggcggcgggccgttcgtcttctttctttctttttttttgagaatctgtgattcggatctgagatgatttgtgtgtgatgtatttgatgtgtgtgtgatgtgaatatgtgatgtatttgcaatgaattttgtagaagttgtgatgtaatttttttaagattttgtgatgtattcacagatattgatttgagaatttggagactattcgggcatgattgatttaggattttgggatcggatagagtgaatcaatatattaaaacccatgaagaaaagcatagaataaagtagcagccggatctagcctctttagtcccggttggtgtcaccaaccgggactaaagatagagtatctttagtcccggttggtaacaccaaccgggattaaaaatggatttttactcccgattttttcaccagggactaaagatagcgatcttgagtcccggatttgtagtcccggttggaaaaccgagactataggggggttacgaaccgggagtaaaaactccttctccacaagtgtttggaatatatgtgtgcattttactattttgggtaggataattaagaattagttcaaagttataatttagcacatacttgtggtaacgatatatttgttcaaaattatcactgatatgtgcaaatttttcacaaaatgctgctagttaacttgtaatattgtagggattgtgcttgtttagaaacaataatcaatttgacctattttacttaattaacataaataatgaatttctagttcaacgttatgtgcgttttaaaacaagctgaccaaaataaaactaattaaaacgctataataatgttgattattgaaatgcactgttttcttaaataaatggccctactctaatcaacatgtacatgctgatgtacttctattaaaaaaatagtacacaataacttttaaacgctaaccacatgataatattatatgtagctaattaactactccattcgtattttaatatataacgctgttgatattttgagatatgtttgaccatttatcttattcaaaaaatttatgtaattattatttattttattgtgacttgatttatcatcaaatgttctttaagcatcacataaatatttttatatttacacaaaaattttgaataaaacaaatggtcaaaatgtcaacggtgttatacattaaaatacgaatggagtagttaattaagataagttaaataatgttggtacaatgctacagtatgtccaccctcgtgcaagtatgtatacagagctagctacgtactaccaattaatattagtgttcatcagtatattaattagtcctttaagcacgtagcttgtcttcaagatacgagacaaaagatctcttagcttacagccattaattgtcacactcaacccaaatatatatacttatactactacacataatacttcctccgtttcacaatgtaaatcattctagtatttcccacattaatattgatattaataaatctaaatagatatatatgtctagattaattaacatcaatattaatatgagaaatgttagaatgacttacattgtgaaacagagagagtattatttacaatcttacatagattaattaagctaattaataagctgttgatgttcttaaactcgttgaaacttaattattattttcccttaatttgcccccagttgtaggataattcatgcatcattgttcatgatgaattgatgcgtgacctcgtcaaatgataattagttggcgccctggatgccggacatgtggtgtaattagccgcagtttcgctgcagggccatcaagaacaatgtcaacgttaaattaatcaccttgatttaatactgatagagcacacggccattttgctttgatcaatataggtgttattatgtgtgtagctgcatgtggttcgtctttaatttcctctctaaatcgaatgggcagaactactgccacatccggtttcgaagaaaaaatcgccctgatgaatcaattcaagttttttttctttgaataaggggacttttctttgttttttagcagcggctcaaatagatgttttctttgtttttttacctaacttcacagtcacttaagagggtgtaggtttgatccaaaggcagaaattgattcaactagaatgttatcaaattcatagtgcagaaattattcaaccactagaacatttttttcggacgggatttcgttttgtcctgacgggtttttttttccgttagagcgaacccggttttcagtgctgaattgtttacttttccccatctccctggtattatttgtgtttttactcaatattttctaaactctctatatatgtgtaatttttatagaatttgtacaattgtcaaggtgttacacgattattttcgtgagtcttataccctgtttagatgtgactaaaacttttaagtccctatcacatcggatgtttagacacta

SEQ ID NO: 31727 - DNA, 6548 bp, Oryza sativa
aaaccgggagtataggggggttaccaactgggaggaaaaacactttctccactagtggttaaacgataatttagaaataaataagtggttccatttcaaagcatgattttatctaatttcttttctatgtgatgattcaattctctgatgctgctggagacagacaggatcagaaatggaagtttgggcaagaaaaccccggcagctaagccagcctaagtttacgtacgtggaacagtatccatgcatcgtgtttgatgattgattcttttaattatcattgcggatttggctcactccgaacgaaatccatccaaattataaactcgtggagaggtagacatgcaggcctgcagttgcaggacacatcgatcgatcggcctgattaaaatccgagacaatgtcaagcgattagtactactccatgtcccatcaattttgatcctgacgaactaatcaacttctcttattacggttaacaaaatcatcaacttatacctttgtccttttcactgtgcgttatttgcaaaacaaatccgagacaagctcaagcaatcgatccatgtaggagtttctggcgccaattaagagaaaaatactgaagtagccgacttgagatagcggaaaaattcaaagattatggataatccgatttctttttctaatagctatttgaggctatggacgactgaattaactactgcaaaggtaattaaaattgttgctttagaaagaaacttgctgggtggcccgcgcaattgcgcggctagcacccatataaaattatatattttttaatatgattttacttaaaaattattaaatagttatctcgttgtcttaagattttgaaagaccaaaccttatcatcctcgtcttatcattctcgtgtttctaattttatagtttttaaaagtcacaccagtggctaccccttacttctgtcatattattctttgttagcttgctcgatctatcaccgtttctattcattcttagaaacctttaaaaattggaagtctttttaaaaattggatgttaagacttatagtttttagagtttattgtcctgttgggcttcttttgtataatttccagaaagcctgtcaaacgttgtcattatactcctctacgaccgtccactgcatcttctctttattgtcattgctattttaaaaatcgaacataattatcgtttaggttcatttttctaccttatagaagtttcgccaaaacgttagcgactttgtcactgtactcctctatgactccctgttgccgctcttctttattgtcattgagattttaaaatcaaatatgattatcattagggtttatttttttactttttagaagcccgaaccattaaaaatttgaccttatagtttttagagtttattgtcgcattgggttcatgttttttataatttttagaaatcccgtcaaacgctgccgtcctttacgacccgtccgccgcgtactctttagtgtcattgggattgtaaaaatcgaacataacttttattgaaatttatttttcaatttctagaagacccaccaacaattggcggctctgttattgtactcctatacgacccgcttgctgcctctcatttttattgtaattgagatttcaaaaatcaaatatgattatcattagggtttattttttttactttctagaagttcctgccaaccgccttgaccgattggttcacgatctatttgtcatccttccttttaatcgtcattaggattctatttggtgttttattaatagtttttagaagtctcatcaaccgccaccactctgctcctctatcggcatgttacttaattaatctcgtcatgtgttttagattgtcttttttttcaatagttttattttctttatcaccaatattagttatttataaattgtatttcttgttgaaatcttatttttctttttctaatttcagaatttattttatttttcgtattgtgttcttctgatattttttattttttattttcaatttcagttgtttcaaaattgtattcctactttaactctctttttaatttgcctaatttcggatttttattttattctttattctaaattttaattaatctactattgggttcttataaatactcttatttcgatattgcttatatttaattccgaatttcagttaattttaaattgtattcctactttgaactcttctattcttttttataatttgatttttttattttttattctgaattttaattaatctcgtagtggattcttgtatggatttttcttttaatattccttatttgtaattccaaattttagttatttttaaattatattcctacttgggctcttcattttttctaattttggtttttattttatttttatttcgattttgattaatctcgtgttgggttcttatatggactcatctttcaatattgcttactccgtttgaatcttaagaacatgtcaatatatttttgccaatcactttgcattgcttaatatatttatcatattttattcagtcatagatggacggggaattctgtaattagttttgtattctaattatctattcggctccaacacataatatatgcatgcaacgtgcatgtccgattcctcatcaatgaaaatattgtaattacttctcagtttcctattaggactgaataagttaagcttagagcagtagtttctattcatattcatattcttcaaattaatctacaccgttaaaatctagtcagtttgtgatctaacggtttaatattttttgttttttctctgattaatgtgagaatttctagcccccatagcgaacgtggtgtctcctttcaaagttgttttaataatataatagattccaaaaaaaattaaaatagagcaaatgaaaatccgaatccattcatgtagagtcttttgttgctttagaaaagaacatgtccttttttcactccattcatgtagagtcttttgttttttcactgcagtaaaaagacaagagggagaagaactgaagaaaaagaaagaaagaaagaaagaacagctaggtgaacaggtgacaggtgaatcactttactctgaatcctggaacacgaagaggtgctaggctgcatcgatcagagacgcaaacccaggcagcaacgtaaattagcctgcgaggcgtacgtggctgccttgcccgcatgcgtgcaaactgtatgtgcctctaaaattaactgaccgggttgaagagcatgcaggcatgtgcagcccgggcaggcaaagtacagagcctctcgagtctcgatctccaggcagaaacagggagagagagagagagatgcaatgcaaccatgcaagtgaagtgactgaaatctgcatcctcttgatcgattgattactctgcaattatattatagtccattgtttgggtgtgtttaattagtttcacgctaaaattgaaagtttgaagaaaaaagttgaaagtttatgtgtgtagaaaagttttgatgtgatgaaaaagttgaaagtttgaagaaaaagttgggaactaaacaacggctttgttccaagcaaggagcattgcaagctcatctcgtctgactgtctgacgaagagagaaaaaatagatttgatttttaagctgaagatgcatgttagtagtatgaaattggaacaggaggtgtttgtgtgtgtatatgtgcaaatccaatttggctggatttatattacatttggatatatgatcttgtattttggggtggtttggttggtagctctgcaatgattgcagtcgaggttgatctgggagctgaacttgaatgggatgcaggtgttgtctcatttgggaagccatgcatgcatgagcaaagctgatgatgagatgataccactcaccatcatttagaagattatcattattattactattaaataatctgatctgattggatagtatgcaaggcatatataggttttcaactaaaattgcagtaaaataatgtattcttttcgtctccattgacacctgtaatttggagtgatgtgctcctgtctcctgtatctatatactcctatctgtaacctgttcagaaatatagttaattaggtgctccacttgttaatacatccgaataaggcaagtatgcagatgatgtttttggactactgtattgtaccagtctcaagtacaggtatagatgattccagagaaaaggtatgtcatgtctgtactctgtaccctgttcaaattacgtcatggaaattcagaaagattagtgttttccatttgaatattgttgtcacttgcctaaggccaagccaaatggctgtatgcctgtatttgtacatacagttggataatgttcatggtgtgttagtttgggactagtgaaaaatgaatccccattccccatataatttcaagcaataattaagaattactctattttataaaaaaaataagttcgtgttcgatcatgacatcatttatgtctaccgtacacccaattttctgatggaggtagcaactggcaatataaatggatgcgatatgaatgtggtcgggatggcaggagcagggtgctagcatgcttgtgccgggccaactacaaataaatactcctcggatcacaaatacttgcttgttagttctcacctaaaaatttactattactatacatccgtcataaatataatagattttgataatgtaattttgggatttttgaagtaaaaatttttcgattttgttaccatattgggttgcatcacatgactagtttacccaaaaagataagtaaggatggacaatttatttctatttgttgctctaatttttttcctctccttaattatcccacctttattttatctctaatcgatcgaaaatggttcactttactccgtaataatatttctcttttccctctctttattgaagttgtcttttaagactcaaatatttggagctatggattacataccactatcaaaattatttttcatgatcatttgcttgaaatatttctcttttttccttctttatacaagttgtattttaagcagaaaatttttagatatggattacaccataatcaaaattatttttcatgatcatttgcttgaaatatttctgtttttcccttctttatacgagttgtattttaagcaacaaatttttagatatggattacaccataatcaaaattatttttcatgaccatttgcttgatatttaaaattagtcttagactcttaggtgcttcgaactcatggaaacagtgacaaaaattataaaaaatgttaagacgtaataagttgtaatgcatctatcagcctaacataattccagtgcaaaatatggcttttatatatagagaaagaaaataccgttggagagttaatgcaaccgttttaaatagtttacggtataaaataaactgaaaaatggtttaggtggttaaccgttccggtgaaatagtaaaatagacatttcacttattttttattaaatatggaaaaataatactatattagtaaagaatggagatggatatttttcactcatctcacatatacaaacacaaaagtaaaaaggctagaatattcctattttatcaaatcccaatgtaacaattctcactctatctactcgcaatattattattctctactttcacaaactctgttgcaactattacggtaaaactgaatttatttttgggacagatgaaatgagttaaaaatgaacttaatatagagcctgtttggcacagctccagctccagctccagctccacccctcctggagctggagctcagccaaacagttttagctccaccaaaactggaagtggagctgggtggagctctctcacaaaataaactagagttgtgaagctccacaactctacttcagacttaactcttggagttaaatttaggagttagagctatcccatcgaacggaggaaggaagtaagtgttggaactgattaatggcgtttgtaattattctagatggagaggggtgtgtgtgtgtgtggcatggcagggcatggatccctcctcctcgccccagagacgcgccatccatgaccaatgatccccacacgcccaataatggccatgcactcatgccacccccgagcgcgcgccatcgcgtcgcgcgccatcgccatggtcgcgtcgcgtctctcctctccccgcttgcactgcagctcacgcgtcgcttttgaccatccccgccacgctgccccctcttcccgcgcgccctctctctacttatacctcccctcctcatctcgctagctacctacccacctccgcgtcgtcgtcgtcgtcgtcgagcgctcgatcgatcgccatggcagccagcgagcagagctccgagtcgtcgtcgacggcgtccacgtcgtcgtgcggcaagaaacagcaggtggccgggaagaggaagcgcgaggacgtcggcggcggcggggagcaggcggcggctgttgcttacaggggggtgaggatgagggcgtgggggaagtgggtgccg

SEQ ID NO: 31728 - DNA, 645 bp, Oryza sativa
atcccccatggtttataattcatcagtcatcacagaacagcaacacacatcagtccatcagtacagtacttagttcaatcacaaaacagctacttgcatttgatgattcgatccatcgtaaatctgcagcacaaaagaaatcaaatcgatttaggctcgtcggctcgtcgctaggctgctgggactgctgaggcgaggcgtcgtcggctcgtcggtgtggctgtggcgtcgtcgtcagtggttgtagcggcggcgaaacagcgggatggcgccgtggctgcgagacggccgcgaaacggcgggacagcgccgcaagatagtggcggtatgagacggcgaaaacggtgggggcgaggtcgcgaggagccgaggacggcagagaagcggtggcgcgggcaccgggcggtgggcgctggcggtgcgcggagcgcgatgctccgccgccggctcacggtctcgcgaagtcgtgtgcctgtctctctcctctctagggttagccactatttgggttgggctggaaacttagggatgagttatagactattgattctatgggtctttttaacttcggaaattccgacaaattttccagaatttttccgaccgattccgagtttcgacggaaactgctattatcatattcaa

SEQ ID NO: 31729 - DNA, 850 bp, Oryza sativa
ttagccaaatggtagtactaggcttgacagcaaggtgtgacatgcatagccattatccagtcaccaatatccccattgtgtttacttatgcttacccttctaagccaaaatttaaattttaaaatttaatttcagagttgattttaagggtttgtcatcgtaatttattttacactatttgcttttgaacgctaacgacaagtatacagaacatttatcataaataagattttcttacctataagcgatatggataagcataagtgaaacaatcgaactgcaaaactactttgcgtgagagatgatcacgagcacttcgatgccaaacttcacaacgctgccgactataaatcatcgtatatcactaactttgtgttcatatatcgaagaaatatctatttctaaaaaagtgcctattttcaaaactatacttaaaaaatttaaaatctaaatcttttcatgtatttggattaggggctaaaattttagtccatgtcacatcggatgtttgacactaattagaagtactaaatagagactaatgataaaacccattccataacctagactaattcacgagacgaatctattgagcctaattaatctagtgatactacagtaaacatgtgctaattataaattaattaggattaaaaaatttgcctcgtgaattagctcttatttatataattagttttattattagtctatatttaatatttttaatatattagtcccgatatccaaacaccacctttaaaaaaaaactacggaggaactgggatagttgatgcgcaccggggcacgcacgcgccgtgcgttgggcgtgtggcgcaaccccacgcaccgg

SEQ ID NO: 31730 - DNA, 3653 bp, Oryza sativa
ttacaccaagtataacggaattgtttcactaagtagatcgaaaatgttttagtcgtttaaatcgggcgttgtttcaccttatataaaaacaatgtttcagtaaatagcgaaagaatgtttcagttcaccacaacattagatctatacatagtgaaatattgtgagtacactaggtgaaacattttatgtgaaacaacaaataaaacgaattcccttaatagagtatttccaaaatatgtggttgatttgttgcaacgttgtgcgtggtggggacacgtggcaggagcgacgcagtggtggggacacatgcatgggcgcgggcacgggcgggaagcgcggcgcgtggaggtatcacccgattgtttggcgcacggatcgggcgctcgggttcaagcatttttggatattttatcaaatatcggacgcccgcccatccttggcgtctggcacattcgtcaggatgagcatcgtatgccgtttgcatgttggcttgtggcgcatgcatggcgtatgtcacatgcatgtatttttctactttctctctcttttcctttttctaaaatatgtgttcaatatataatctattacaccattttattcgtcataattagatctttataacaagatctcacatggatatattttgataaaaatatttattaaaaaatcaaacttatgttgcaccgtctaaaaaaagtttcaccacttgtgcagatgcgtcaacctagttcataaaatattccagagatgcaacatataaaaagtattgactgcaacggtaattatcactgcatgaaacattatgtcccaattagtgaaacattgaaaaaaaatcatatgatacaatacatttgcaaatatttgattttgttaaaatatttttgtatttagcttgcatcgaattgtaatcgctgaaacataaaatttttttttgctgaaacatataaaaaataatgtgcaacattgctaatgcattagtgaaacattaataaatacttgttggaacatacattaacaatgtgtgcaacatttaaaaagtaaaaaaaaggtcatcagaatatagtcatgtgaaatcttgttataaagatttaactataacaaatccaacgatataattagtttgaaatttagataaatagtttgagagaaaaaatcattttaagtttaaaatatgcttgcatgcacgttcagacttaccatgcatttggattgaggcgtccgattttttcttccgtgtcggacggctaatggtaagcattatcggaaagaagaagtacacggtgtgcccacatagaataggatggctcattatcttgatgaagcaacgcaaaaagtatcgaacgacagccacagaactgatcacattgccaggaaaaatataagtatgtaaacaagcattagagcatgttgaaaaacattaaaaatatatttttaaacgattttacatgaatatataagttggaaagaattgataaaaatatatcatcaccgctgaacgaagatacgaacacgtgacggcgcgtgagttcgctccctcccccacacacacaaaaaaaaaagaacaagttcgcactacgtgcatggaactaaatgcatgtgtccaaacgtagaggagcaatagcacaatacagagaggaggcaaaccctaaattatttttgcgtgtgttgcatagaggtgttgactcggttcatatggagatatcaggatgcgtgatcagaagacatgcacgatctccataagtcataactaaaccagataagccgtgcagtaccatgggtcgacatcgacatgtagcgcccaaatgtagaggagtgatagcgcaatatagaggaggaggcaaactttagattgttttcgtgtgtgttgcatataggtgttgactcggttcatatggagatatcagaatgcgagattagaacacatgcacgatccccaaaagtcataaaaccaaactagataagccgtgcagtatcaggtgtcgacatcgatgtgcagcgcccaaatgtagagtagcgatagcgtaatacagaggaggaggcaaactttatcttgttttgcgcatgtattgcgtagagacgacaactcaaatcatatggaaatatcaagatgtgtgattagaatgcctgcacatgatctccataagtcgtaatgtaggtgtaaggcgagtgagcgcatacacacgtgttcctctaattctctccattatacatggctcaagtcactaggagagccctttccattttaaagagatctctcctagaatgagtaaggtaaggtaatactaaaagttcacatgtctctcttcctgtgaggcattcctttgtgattttcatataaattacacctcatatggactttattccatactataattccaatatttttttatatgagcaaacttactttgctaaaaactataagagctcactactaattgtcagtgtgcatgcccttatttacaatctttcttccatgacagaattgatgtatcggtgtaactagagctgcgattttatcgtgttggttttccactcaaaatcattgcaaaagaatctctagttctactgttctagttgatacgttgtgagaatgtccccctgataatccacgagacaataacatgtagaccatggtaattacatggtgatatactcacactgcacccccaatagacgtggtaggctaacccgtccgttggaagagaagacgagttttctactgctgcacatacactagtacacacaccctatcctatatatcattgtcacaaatatgatctcctctcctctcatcggtccaaccaaatgaagtacccaactaccatgcaacacacaactagctaggagcctaattaaatcacatgcatggctaaaagcaaaagtagtagcccatggggtttgtgtcatgtgcggcctaattaacatcacacatgagccataagcatatcatcagtcaaagctgagatggtaggtgctcagatagctcagctgtccgacgcatgggaggaatagtacgtgggtacgttcgcgagacagcaagagtagtaactaaatactagagtattagaaaagaggaattttaccatactagctacaacaagatgggaggtcctaaatgagtacgggtggatagacaaagctcaaatcttgtggctcggatcaactcgtagcgagcacgattggctcagatcgattcgaacttgtagtcttaatgagttaaatcaaattaggctttcagcttgtgagcttaacaagatagctcgcgaactgctcaattagcttgttagtgcttatattaactaatatttagtcatctaattacattgtgaattctttattagttagtgtgtgttactatatttatatatgacaaaatgataaatttgaaattataaaggagggataaatatgttcacaagcctaactagcctagcagccagctcgcaagatgaattgcgctagactttagcttgttaaagttaacgagtcaagcagagctggctcgttaagacaatgagttcaaaagagacgagcctgagttgtctcgttatacacccttataaataaggatggttgatccacttaattggacgctcccccgctgctcctctcccgtcacgcaagagcacaatgcctcccactcctttctctca

SEQ ID NO: 31731 - DNA, 1180 bp, Oryza sativa
tttgtagaactagcatagtggctcgcgcagattgcgcggctagtatcattatattttctctcatataatagtatatatgttttctcattatattattcaaatatattaaaatgataacataattttaaattttgcaataactttacaaaactactaatgtgtaatattcatattatattttatatacatgttagttattaattacttttaatatcaaattttagttatttgtaaattatatatattcctatatggactctagactcgtcttttaatatttctttttttttaattctgaattttctgtaaattgtatttctatatagactctatgctcttcttccaatattatttatttttatttttgaatttttattttttctaattgtattcttatgtggactctaaactcatctttcaacattctttaatttttaatttcgaatttcagttacttctaaattgtattcctatattgactttaaactattcttccaatatttttcttaatttagaattttagttatttgtaaattatatgtttatacggactctaaaatctacttttaattttattatgtttattccaaattttagttagttttaaatttcaatatggactctatactcaacttctaatatatatttttaattccgaatttatatgtttttcttaattgtatttctatatggactctagtctcctcttctaatattccttattttttaattccgaatttcaactatttctaaattgtatttctatatggactctagtctccttttctaatattccttatttttttaattccaaatttcagctatttctaaattgtatttctacatggactctgctttttttttctccgattaatgtgagaatttataagccatgagagcgaacgtggaggctcatttttctattcctttaataatataatagatatgatcaacggattagattaatttgtaataccagtatagtgcattgtagtgtggcttaaagaaaatctaaaatgacctgtgtataatggaacctatataacatgttcacttctttttttttcttttttttttgaggagaacgacggcaggagatctgccggaattttattagagggagaaaataaagtgcttacagtccagagaaaatatgagagacttgcaccgaaacaaatta

SEQ ID NO: 31732 - DNA, 672 bp, Oryza sativa
aactagggcggtagccctactcctggtcctaaatattcattgaaatttttttttagaacttcaaaaactagaagataaaggcaaaattatataaattcaactgattgagctttaggtttggaaaattttggctccaccactggataagatgtatcgagtaaaatataccgttcgctttaagggcatagtgtagagaaaaatgagacttaaagacaacgacaactacatcattttcctattcttttgctcatatcatcccatgttattccccgttagctcttagcccctactctcttctctcccatgcgtcagatccatcgtgagtcggtgaaccaatatcgatacattgagtcattgaaggagtgctgacacggtgacacagaatccatccaagttagaacaatgggagaaaataacataaaacactgaagtgaggtaagacgcggtctacaaggagaagcagcaatgtgaaggtattttttgagaggagagactcttaatatttgtgttaggttatctatttgaatttttggattggtgtgaatggaatttgagctttttatgagtcatattaggctacctttcctccttctcctatccatatcctaatcactattagtcacataaattaaggcgttacctcgcttattgtttaattacccctataaggca

SEQ ID NO: 31733 - DNA, 613 bp, Oryza sativa
aggcacttttcacccttttgccaaaccaggctccctttgcttttttttttcttcttccttgatgtgcttttgattttgatccgtcaggctaagtgcgctgtagagtgtggtactacttggtagtagtagtacctagctagctagattccacacatcaacttccaatttgtggaagatttaaagaaaaaagggggattgcattatttggaaagcttataattagctgaaatgtgctaggacagaaaaggataggagtcttgaaagtgtaattagtgtgaagttgagaaggaaaatggcgttcattcttcttttgtaaaacaagtcagaaattaattatggccatcattcttgattccatcagttggctaagattatttcaggtcattccatgctatatgcaatatttgtaatagttgattttccactattttttagaaaaaaagtagagtgaaaaaataatcttagccatccaataagcaaaatggcatataagaaaaaaaacaatataagtaaaacttttatgtatgtgttattcctggtttaaaaaccaatgctaaaaaaatgaattacgatgaaaaaaccaaaatcgactacaacattaaattttaaaatt

SEQ ID NO: 31734 - DNA, 525 bp, Oryza sativa
aggcactgttgtcctctgcatgcccattgcccccacagccgcctcccaatgcccattgcacagagacagcattgttgcccctcatgcaccggcgtgatcgtcatcctgcgcacatacaggccatgataattaatcatggtatgctgctccaaatctgaaatatggtatagcccttctgtcctaagatccttgtctcaccgccgccaccgtggatgaggccaacaccaaacaacacaaggaacctcttggcaccagaagctcagctcctccatttcctaggtccagctgatggaattaatgccatggctcagccagaggagtgtatccatatattgctggatgctagaaaagagggaaataaatcatgcccattaaccttaaccttggtttatcgatgctgcctacactacttgcagatacttttgttgagcggagctaatgcagttatacagaaaagcggaccttcaaaatgatcttttttttttgacagaggaaaatgaatccaggagagagaagggtacataa

SEQ ID NO: 31735 - DNA, 504 bp, Oryza sativa
taataaattataggttttaagtacgtgctcaatctgtcttcacatgtttaaaaagctttgttggatttggttggcaagtattgcatttttatacaatacaatacaatgtctcgtgtacggtttttggcaaagaagacagggtttatgctagacacattgccggctgcctaattgaaataattatgagccatagttaaaaaattatggatgtgggaggtctccagcttggatataaataattttatcccttccattatataattatgtaagtttattactctgattgtatggatgagtttggttcgtacaggtgttcattatataattcttgagttgacatatatgattttttaaggagcaaaaatggcacatttgtcaggctagagtagcccacattttgctatggatttttttttgggtcatatagtgttattttctgacatttttgcgtcttttttcatagttgatttgctcaaacagacgtgctgtaatacaaattttgaa

SEQ ID NO: 31736 - DNA, 1383 bp, Oryza sativa
agatgtcataaaggaaaaaaaaagaagaatgtgtacaagatcagctccatcgagtagttttttctttctttctttgtggctctgagattttcctcaaattgtgcatatgagcagcaaccacccttggcgagtttgtcaaagaattcacgcggccgcagcaccgcttcacgccatctcgctaaattttttgaaagtatttttttactaatgatgtataaggcaatcatgtttccttaaaaaaagcaatcacgagcgcatatataaacgtgtgctcacccatcatataaatacacatacacacacctaccctaaaagaaaaaatatttgtctccaaaaaaaggaaaaagtatgtgcttagtatttgctagaaaaaacatatacacatatcatcgaaaatgccgcatagaaccacattatatctttttaattatgtcattctcatctatataatgttaataattaggacaaataattttgacaatatagattattccatcgtatattacccatgaacatacataggtaaatcagatatataataaaagaaaaaacaaaacaaaaaatatattagtttatatgtttgcgaacgatggtgagagatcagattatatataaccgggacaattcgtaccgttcttattgtttaagggtgtaattcgactttttccttaaaagtcttccacataaggatttataataaaaaattaatcaacactaaacttcctacaaacgctcctaagcctccacgtggcattctataaatgctcctaagccgccacgtggcatcctataaattagagaaattcttaaaaggacacaacgtataaccgttgatttttattaaattttgtggaccattatttgtaaccattagatttattagaaaaaaacatatccttatccctaggcccacctcggcctgttggcaattgcatgtacgtacgtacgtacgtctgctcaacccccccccccctaattctttcacccattttttcacctattttttcttctattttcattcttttagaaaagcaaaaattgtatgccaaacaattaagcaaatgcagcatctaaattataatgctaatatttgatctgcttatgtctttagatattttacattttaaaactcatgtcctctttaattcaactgtaaagagagaaatgtcacattaatttgggctacattttctgacttttgcgtgtcatttaagcaattttaaaactataaaaattaatgatatatatttttgtcatcgtatataacttgataataattaaattatatctaataaaagtaaaatgaacagatctatgagtaatattaaaaaaatagcccccccccccaacattgtaacatagtaaaaagtacgcatcttataa

SEQ ID NO: 31737 - DNA, 2676 bp, Oryza sativa
tcttgattttgattatcttcgtgtgcgtgtgcatgcagcacgtgtggaggtctccccggaggtacatgcgggcggcggtggaggagaagcggggatcgccggcgccggcgccgctgccggacggcgccctggggctgcagcccggcggcgtcgagggtgcggctgcggcggcgaggacgacggaggaagaggccgccggagccggagccgcgatggcgccgttcccggcggccgcggacgtcggcgggaaagatgatggtgattccggcgacggcggcggcagcgatggcgcagcggacgacgccggcgtcgactacgcgccgcccaagacgcatcctccgtctcacaactgaaatctagtcgatcgtctcttcatacgacgaattcgaagatcgatgcatgacgacgataagttcccccatgcaagcagcaataatgcatgtcgtaaagtatatattattcgatctttgtctcagttaattagctagcattatgtcctaatctgttttttctttctttctagttagatttctctttgttctttcgtacgttcttcatgaaatattttgcaagagttgccgtaaacaatctctctccctctatctgtttaatttgtgccatggttcaaaattccggaccgaaattttggaattttttttgttgtattggactcgatattatttgggctgaattttttaaagtttttcgattttttttatttggcaatattttgttcaaatttgaccaaatcccaatacaaacaccgaaaacgaaagattgaatcctgatttgttgatcgtatgcgtattgtgttcttcattgtgtggagtcatatactccatgagaaaaaatgaatttaggcaaaccttagtaagaatgaagagcaaaaaggaaaaaaaagtatataaaattttctctacatcccaaaataaattaacttttggtcgttcgtgtgctgagaagttagcttattttggggcggagaagtaactaagtagtaattgggaaattgggaaagtgtttttacaactaggattgggatgacaataatcttgcagaggtctctgggatggatgaagttgatgaattgactgagaagttgatgatgattggccatgaaaggggctagctagctagtaggatccaggagctaagccaagctaagctagggttttgaaaactagaagccttgggaatgttggagaagacaagcatagctaagctaagctagttttacccccttcattgcgacatgcgtgtttgaatgagctatacaacactactagaaaaagcatttttgcaggcggacaaaactaattttcgcaggcgggagagaggtccgcctgcaccacaatgactgcgaaaatcatccatctttgcagtcggggcaacggcccgcctgcgaaaatagaagaaacgaacaaaaaaaaaaacgccagcctacaccaggagccgccgccggcggcctcccccctccctcctctggccagatctgggagggaggggggaggggagccgccgccgccgcctagcctgggtcgtcgccgctccacgccgtcggcgccgccgccaacctcctcggccgcgccgcctcgcctcctcgccgctgccgccccttgccgccacatgccgccgggagctgccgccggggagagtacaagtgaggggaggggagaggaggagaggggaggggaggggccggtggtgaggagaggtgtggaggggaggactgaggacttagaaaaaattgccgcccgcgtgtatttatattaagtctattttcgcagtcggacttagaaaaatgattttcgcagtcgccccttaagtgctccgcctgcgaagcgccgcttaagtggtatatttcaccccgatttatatttcataggcagtcatttggctctaaggattatgtccgcctgcgaaaatgagaccccccacgtcaggaaaaatgctttttctagtagtgcaaccctctggttagtggttacaatgcattcagagatgcatggcaagttaaattcgttgcagacttccatggactagctagctatagctagtactatactagcttcattccaattttccaattcaccattatattcgtagttatctccactagtaatttttttttcacaaattactggtgaaacagagaggtgtgagagctagctgatgtgaaataaagcagacagcaaggctttatataagcaattccaaaactcttgtttgtgaaggcaattttctgaagaatgtggtatttactttatttttttccctaaactaacttacatactaccaatatatatattctgctttctttaattttcttgaaacaaaaagaaaaaaaaaggtgagttgcagagttagccatgcatgctctgatgagaaaatctcaggctctttgatgcgcaacaaacctgagaggtttagccaagctgataactttcctttagtcatgcccagtgttcaatatttcgttttcagcatttgtatgggagggtgccgatatactgaaatctcggaaattttggttcgaatttttgagcaaaatattgcaaagttcagaaaaaaaataaaaaacctttaaaatttcaattgaaataatatcgtatcgggaggaggggggggggttggttccggtacaaccgaattttgaacccgggtcatgactcatga

SEQ ID NO: 31738 - DNA, 8774 bp, Oryza sativa
ctagagtcgacctgcaggcatgcaagcttaattaattactcgctccgttttctaatagttacggttgttacttttgaacgatcattcgtcttatttaaattttttatataaatatataaggtataaatcatgctcaaaatacttttagacataaaataatttaaaagataaattataattagataactttttaataaaataaatcgttaaacgtgtgataaaagttaacggtgttaccttttataaaacggacgagggagtaacacatttttgcacaaccaaagccggacgagaacgagtgttgttgctaccagctgacgtcatgagaacgacaaattaaaattcgattaccgtgtgctagggccctgtgtgctagcacacatgttcaatcctaagggccggatacaacgactgttttggatatgctcgtacgcattcatgaaatatgctgctccctctttacatttagggctttttttcatgggactaatccactagtccttccatatattctagtttttttagtctctaagaatctaatctaaatataggtgactaaaagggactaaaagtgtatattgggactaaaatccattaatccctctttacttataagatctaaagcggcagcctttctcttctctctccctcagtccacatgactttagtctttttagtccctggattcaaatggggactacagtttttagtccaaggactaaagtatacagggactaaataatccaaacgggaccttaatttatgtatgatgatgtttagttcatttaaagagagtatatatgctctttggtcatagatatttaatgttaggataaagttttattaaacttgtgaaagattgatctctaattttatattagaataaattttgaaattccaataaatttatgatataacttcccgagccaaatctcaacatgtccataaaaagaatttaagcatctaatgcatcaaagtttaaaaggttgacagaatctttctctatgcgtcaaatatttataactaaaaagagtattagcgctttctaaccagactttgcttaatggttaaaccttttccagttggttaatttgaatttatatatacggatctatatttcaaagtgatttcaaataaaggattggctactattaaaaaaaagaggagactttggagggataagacatccctccaaagtccaaacattttttaagaagaaattgtgagcgtccacccttgaccctaccttgaaccctaaaccttaaattgttgagtcgctgtcggttgccttagttcattagaggcactgaagctagaggagaacgagctctcgcacgaattgtgaagcattccctaatgtaagaaaactacaagattatagctagcctccacctttttttttttgttaaatgtgatgtagcaattccgtctaaatgatgttggtggctgttaagttgcaactaagaatacaaatcacaagaaatcaacggtcaggattaatagtgatttttttaaaagaaaaaaaaacgtcctacagaagaatttaaggacggtcaacctaaagctttgacctttcttgttttgagaggagggttaaatttgggcttgtaacaggcctttcctaactagtcaggttaccaaattgggcttgggcctggccacgcactggtgatttacattagggcccgttcaataggtctttacctggcccattaaaggcccatgacagacgtgtcttcctatctgaaaagaagattgtttgtttttagaactgaaaagaagattgtcacttagcccaaaagttattgcttatcacccaacgttctaatacttaaataaaaaaatatatttaagatatccatgtcaataatgaaaatatccatgtgaatattaacatggcatcccctcggtctcttcattttctctttagataatggataaaccccgacatttgctctaacagaatctatagccattcttgctctccatcatataatgtataaaattaaagtttcagaaagaaaacacaacatacaatttcacctatgcctcaaattatatgtatactcaaattatcttttggtgtatccgaataatgtgttctctagccaaattataatacttggtcaaaactaatgaacatcttttttttcatctaggccataacacagttggtactagtttgtgtacttgtgagattgcaaatatagataggagtatatatgaatatataatcttggttgtctttgaatacacaaagcctagttaattagacacgtggcataaattgattggttatgtatgacaatacgagtccctgaacgactacaaatacctatgcgaaatctccaaaccgcgtcacattccaaccccaaccacgcctcggatcaaaataagaccagaaaaaaaaaaaccctcaaaaatccctgtagaaaaaagagtcgatgactcaaaaagagagtagagaagaagaagccgagagatcatgcgctgctcttgcatggtctgtctcctcctcttcttcctcctccacctctccgtctgccacgccaccagccgcaaccaccgccgcctcttcgccgccgctccggccgcttcgccgtcgacggcggcgctgtacggcgacgacgacattaccgccgccatggtaagcatgagtggagaagtgttcttggttaataaattaattagttggattcttgattttgattatcttcgtgtgcgtgtgcatgcagcacgtgtggaggtctccccggaggtacatgcgggcggcggcggaggagcagcggggatcgccggcgccggcgccgctgccggacggcgccctggggctgcagcccggcggcgtcgagggcgcggcggcggaggcgaggacgacggaggaagaggccgccggagccggagccgcgatggcgccgttcccggcggcggcggacgtcggcgggaaagatgatgacgattccggcggcggcgatggcgcggcggacgacgccggcgtcgactacgcgccgcccaagacgcatcctccgtctcacaattaaaacttagtcgatcgatcgtctcttgatacgaagaagaagctagacgtacgacgacgaattcgaagatcgatgcatgaggacgataagttccatgcatgtcgtaaagtatatattcgatcgtgtctcaattaattagctagctttatattttgcaagagttgtcgtaaacaatctctctctctctctctctctctgtgtgtgtgtgtgtttaatttgttgatcgtacgtgttgtgttcttcattgtgtggagtcctatactccatgagaaataatgaattttggcaaaccttaggaagaatgaaagcaaaaaggaaaaaaaatatatagatttttctcctacataatcattctatcccaaaacaaattaacttatgactgtttgtgtgccgataggttaacttattttgggacggagaagtaactaaggccgtgtttagttccaaagttttttttcaaacttccaacttttctacacacgcaaacttccaatttttccgtcacatcgttccaatttcaaccaaacttccaattttggtgtgaactaaacacagtcgaagtagtaattgggaaattggaaaaagtgtttttctaaatacaactaggatggggatgatactaatcttgcaggtctcatggatggatatgaagttgatgaattgactgaagttgatgatgattggccatgaaaggggctagctagctggagtagtaggatccaggagctaagccaagctaagctagggttttgaaaactagaagccttgggaatgttggagaagacaagcatagctaacctaagctagttttacccccttcgttgcgacatgcgtgtttgaatgagctatataaccctctggttagagcaggtacaatagcaggctataagccagttgcaaatatattttaaggagataaatcaggagagagaagaacagcgggctacagatttgtagccagctgtagcacggactccaagacgcagtgtgtctatgacaggtgggactagatattaatagtgtaggttgtaactattgtatgaatgagctattagattggctatatataaattggagccagtagttggctatactattaaacttgctcttagtggttacaatgcattcagagatgcatggcaagttaaagaagttgcagacttccatggactagctagctatagctagtatagtagcttcattccaattttccaattcaccattaagtatattcgtagttatctccactggtaatttttttcactaattactgtgaaatagagaggtgtaagctaatgtgaaagaaaacaagcaatgttgtggctttatataacactggtggagagatggtttgtagtcccggttggcaacccctttgtagtcccggatttccaaccgggactacgaatcccggttggtgttaccaaccgggactaaagatagcagcacagtcccggttggtcaccattttttttcttttttttattttcattgtttctttccaaatagttgctgcttcccaaatctccccaaatatcccaaaatcaaagtatcatccccaaatcaatgaatcattcacatcacaaattctcaaaaaactacaactcaaattcttaaagaaatacatcacagatccaaacatcaaatacatcacacatcatatacatcacagatccaaacatcacagatccaatgaatcacaagtttttagatccaaatgtatcaaaaatttgggaaaaaaaaaagaaaattgtgcttccgcagaggagagggcgccgccggccgccagctcccgccatcgccgcgctacctgccgctgcggcccgcggccgcgctccctgccgcccacggcccgccgccagcgccgccgccgcccgggcacgctctggtagaggaggaggaggagaggggaaggagaaaggggagaagagaagactctgtggcataatgccagatctgatctgaggttgttgtttatgagagctagggagtagagagagagaggggaaggggatggaacgataagatcgagactctgtgccgcgcacgggaggttatatttttagtcccggttgtttataccaaccgggactaaagataattagggcctgaattcgacccggtgactttttgaaccgggactaaagataccaaccgggactaaagatcaacatttttttaaccaggacttaaaaatcgtttttagtcccggtttttaatggaaccgggactattgtggaatttggtggaccgaccaaagatggtttctccaccagtgtaagcaattccaattaaaactcttgtttgtgaaggcatttttctgaagaatgtggtgtttactttattttttttccctaaactaacttacatactatcaatatatatattcagctttctttaatttccttggaaacgaaaagaaaaattaaggtgagttgcagagttagcaatgcatgctctgatgagaaaatctcaggcgctttgatgtgcagcaaacctgagaggtttagccaagctgataactttcctttagtcatgactcatgactgaggtagctaggagtgcttgtaatcttcaacggttttcttgcacatgtaagagcttcgatcagcttcagactgcagttcccccccctgtccctgcacttttacttgtacttgatcatagaagaaaaaaagcagagtggttattttgtactatgtcgttatatcaggacatagtaattagctctcggtgagagtaattatttcgagttcttttttggttaactgtgtttaggcgttgatagtacgtaggaaataaattgcaatgtggtttctcaattagaaggttctattagccagaagggttaagaagctttcctctccagctttccttgtcgtgtttaaggaaaacaaggaaaactcaggaaacttacatttgcggatacacggcaaactgattttatcacagttatatagattttatcacagttatatactatctccgtcgaaaaaaaaaagaacaatttcagctatcatctaaacatgataattcttgctatgcacatagacatgcataccactttcttttacaaaggtaatatatataacacatcctatctagaagactaaaacaatatataaggcatgctgtgaaccatgcaaaaacctctcacgggctgcatattagtaaaacggttataatcatacagttgagacgattttagacatgtagtttgcattacatgtttagtagtttatctccttcttcctcacatctcatgtgcacggtgacctctcgcatctctctcaatcacaacccattgccacccctcaaccatggcatcatcctttccctattagcattggcttcatctctttcacgccgatcttaccacccaccttcccttgtcatctattgcctcaatgaccttagtctcttgtctatagatgaccctctcttagggatatggtgccatggtggataggtttctgatggccttaaccagctcaatcttattgtcactacatctccatcaattttatccctcttaatccatccaatccacgatcctgctagacccaacgtttctataaactttggcccactagatccatacgagttgcagttaacgacacaatgatgaggtttacgtaaaacttgaactcatcaaccttgcacatatacaacctatacatagtcaccacaaacaactctagccaccggaactagatgagtcatggttgaggacgtgagcaccatggtaatattgtattggtgttatctctacagccatagatcgaactaatgttcagtccgtgtcatgctgcctcacctttgttagtaaggttaacaaatatgtttgtcttggactttcttatccctcaatttcgtttgaatcgataaaataaaaactgtattgctgtccaatatttgtatagggtaacattaattataccctcatgggtaatgccactatataaagtatatgctgtagagcacctattttttaagataataaaatcggattatatctctggcctctgcctcattgccaacaagtttcagaataaaaaaagggaaaaaaatgcaaatgtacaacatctctcttttttttaaacacctctttgtttccttcgttgaaagaaaaaaaaagatgtgtcctgttggaagaaaaatgcaaatgttaagacacagcactgcacaaaaagacaaaacggtccttccgcattgaccgtaccagacccacacaagctcctcgtgatctctgatctccaccgtccactccccatccaacggccgaaacccaaactcaccccaccgtagtcggtttccccaccttccgtgcaccgagttcaccaacaccctactccccaactcccgtacaccgcgcccacgggtccacgcgccccgcgcaccggctcacgatagcgcacccggcgcacgatacgtctataaatacgcccctaccccccttccccttccggaaccggatcctctaacgtaattcattctacgtcagagggacgttcaaccacggatcgtcgttccttgcgcatccgacggcaaccaccgtttcagtccgtccccgcctcagaccccacaagcgcgatgtctctgcttgctctccggcccattcgttgatagcggcagcggcgccgcgccggccagccacccggaagctcaggcagccgtgcgctgccgccggcggggaggtcggactggaacgcagtgctaccgccgtccgccggcgaggtcgagggcgaggactccgcaccgcctcggtgtctgctgttggtcccatcgcccagcaactgctgtttctcggaaccatcgccggcgaggttggattggaatcgatctgtagtctatcgaacttgcatcatcaggttgccttttctcatggaagaggcagctggttgaaattcttgctaaggcattcgtgctgtcattagcttgtcccagaaactaccaagtaacctgaagaaataaaatcagagctgaaaccagaactttgccaacagattcatatagaatgcggcatagcaagtctgcaattgcaataaaaaattaccaaaaaagatggtttttctccttgaagaagagatcaatcgagtgcagatgttaaccaaggaaagaaatctcatggcacgaactgaagagaagatgagtaatttttctgttctttttgttccccgtgtagctcaccgaggacggttccgagaaacaccgacagcaaacaccgaggcgggcggagtcctcgccctcgacctcgccggcggacggcggtagcactgcgttccagtccgtcctccccgccggcggcagcacacggctgcctgagctttcgggtggccgaccggcgcggcgccgctgcccctatcagcgaatgggccggagagcaagcagagacatcgcgcttgtggggtctaaaggcggggacggcctgaaacggtggttgccgtcagatgcgcaaggaacgacgatccgtggttgaacgttcctctgacgtagaatgaattacgtcagaggatccggttcctccccttcccctttcctcagacgaacccttcttcctctccgcgatttcccctcacctcgcggaggcggcgaggcgatctgcgcgcgatcccattcgattcgccccgaattagccgccaaaaacactcgctgctgctctgctcactgggggggtggagcccacgcgggtgggcgaggcccggtggtgctcgcggcgggtggggggagggggcg

SEQ ID NO: 31739 - DNA, 505 bp, Oryza sativa
taaccctttttaaaccttattttacaaataaataccacaaaattctcccaccttccaaaataccacaatgaaaccctattccttccagaaaaaagcacaaatcttaacaaaattgacgcgagggagacaacgctactttccaaagaccaagttgcccctcagcccttttgttcaacctgtcgtatcttccccctttcttctcatacttcaccaattttctcttcgagccttaagtccacatctatggcaatgacgcagggaaaagcaggcacaaatccacctagaggcctcaattttttctcccaaactctagagcttgagctgcataaaaagaaaaaaaaaacagtggctctccctcttcttactcctgtgcagtggttcttgttctttcggtgactcctaaactagtttcttctgcaaggtgatgcttggggatgggtttctagcgccgacccatggatgcttcagtcaatttttagggcttggggatggatttatggtgccg

SEQ ID NO: 31740 - DNA, 607 bp, Oryza sativa
accccagctgtgaagaaaatcaaagaatacttgctgactttcctttttgcatctagatcataatatgccacaccaattgtcatgatgaagtaaccaaacaagggctttgagatcccagatttagctgctgatgatgaccctaatagtatctttgcaatgtcgtctttctgcagcccataccaaagtctaaagaaaggatgtatttcctttctgacctcttgctttggttgcttagagtttagttgttccaatttgttctgttgtccctgctttggagagagctgcctgtcgtacacttcatcaatttcatcttctatgacattatcagaagagctgtttaatcaaccgaaatgtaaaaattagtactaattcttttttgagcgaagtaatcctactggcatatagtattattatattcactaaactttgtgccattgattttatatgttttcattaagttttgtaattctagatctttttaatagtgagacttagctgatgatttcaaaccattcactttcagcttgcacaatctgcaggaaaggatcctttcggtacccaacatgcatgcgctatttttatcaatggtaagcataaactattggtg

SEQ ID NO: 31741 - DNA, 1243 bp, Oryza sativa
tcattttcaccggatatgtccccaatagcttcagctgcagactgcagttccccctgtccctgcacttttacttgatcacagaagaaaagagcagagtggttatcttgtactaggtatcaggacacagtaattgactctcggtgagagtataattatttggagctctttttttggctaaccgtgttttggcgttgataagtaaaagaaaatactgaaagtaggaaaaaaaattgcaatgtggcttctcaattagcagcttctcttagccaagaagggttcaagaagctttccttgtcgtgtttaaggaaaactcaggaggcttacattttcggatacaaggaaaactaattttatcaaagttatatactatctccgtcgaaaaaaaattaagctatcatctaaacatgacaattcttgctatggacatagacatgcataccactttttttttttacacaaaggcatacatataacacatcctatctaaaagtctagaacactatataatgcatggtgtgaaccatgcaaaaacctctaaagtgctgcataaaatggttataatcatacagttgagagttgagacaatattgaactaacaatgaattcgcatttcatgtttagttgtttatatccttcctcccatctcatacgcgcggtaacctctcacatctctctcaaccacaaccccattgccctccccctccccccacacacacacaaccatgggcatcatacttttcccattagcattggcttcatctctttcatgccgatcttatcaacccatcttcccctttgtcatctgttgctctcgatgactttagtctcttgtctagatgactctttcttgggacatggtgtcatggtagccagctttctgatggcctcaatcagctcagtcttactatcactatatctccactgattttatctctcttgatgattcatccaatccacaatcctatttgccagacctatcgttcctataaatttgggccactagatccatatgagttgcagttaatgacacaatgacgaggtttacataaaacgtgagctcatcaacctcacagatatgcaacctctagtcaccacaaacaattctagccatcagagctagatgagtcatggttgaggacgcgagcaccacagtgacatcattgatcataccggtgcagtctctatagccgtagaccggaccaatgttcaatccgtgtcactgcctcacctttgttagcaaggt

SEQ ID NO: 31742 - DNA, 558 bp, Oryza sativa
ccgccgcgtgtggcatgcacgtacgcatgccgtacgtgcagctcgtgcatcgcagccggtgcccgggacggcggcgccggctctggttctgggttacacttgagtcttttcgtaaggccatcaacaaaacagtctcgatagctagttgattatactaccttatttcttttaaataaataaataaataacacagttgattttcgataaatgtttcatcatttatcttattcaaaaaattaatgtaattaccattaattttgtcatgagtggttttatcacaaaagcattttaagcataatttacattttatacattcgcaaaaaaaaattcaataagatgaaaatagtcgaacatgtgttaaaaagttaaatgtatgatgtatcatatattaaaaaaagagagtgagtaagtaacttgtgactaaaaaaaattatatatgcagtcttatattagctacttaaaacccgatgaaaaaataaactatatgaaattcgaattttagctatgactgataagctaaagggtaaacgattgagctaagagtagggctgcaggaat

SEQ ID NO: 31743 - DNA, 750 bp, Oryza sativa
attcctgcagcccttacttgtcgttctagacgatctcaaactaaactagtggttatgccagattacattgctactctgattaattatagcctagtcatcttccaaaacaaacattaaaattcccaaagccaaattacattgctacactctataagtactctcgaaagtgagaacgataagtattttgattaaaattttaaatgctagactgacaagtaaattaaaacggagagagtactaagaagaaaagggggctgctaatagcaacaacaacgtcacaaaacactgcatatttggatgctacccaacaacagaacaaaaaggactgacaacaactaaatgaatgcagaaacttacacgactattgttctaacagctaaacagtgtatcagtgaagaaattatcgtgagcatgtgcgctacacacgttcaagcaaaaaagtaataggaaagaaacaaattattttctgagttgaccaatagagataatatagtttgatataacatgataacaggagagatcacaggcttttgaaagtggaaattttatttactcaattatgttccattgtttaatttaattagatgtatgaatagatgattgagtaatcatgattggttcttgattattgtttataataataaactcagttgacaaactttaagtactattttttgtaaagcttcgttcacaaattctatcgaggaatttgacgagactccttggaaattaggatccgtttgagctgtt

SEQ ID NO: 31744 - DNA, 746 bp, Oryza sativa
tactggaccgtgtgccaccctctgcaaacgtggcatgacacgtcggacatgaagtgcaacaagccagtgccacattgacacatcagcacacgacaaatggtgtttagttgcaggttcaggtgctaatgtccactcaaaagagggagagagagaaggaaagaggggattaatcattatctttgtcatgagggtttagtggatcaatcctcattttgtctgggatcttgggagtttataattagttggtgtagcatgcatggattgatgctccatggccttgcctctgctgtgatatgtcggccttgatgctcactcctgattggttgttgatttgggggctacatttctctctgccacagaacttgctcttcaagggaacaaaccacaatctgaaaagactcattttgcaaatgaaaatgttcactcatgtcaatcatctctaatactatgtaggagtactatatttttgtgggagtatttatgccatattctagtgggttcactttaacaaatttatattggtttacacatccatctccaaaggccttagcccttaggtgtgctgattataaccaagagcagaacaacactttctcatgaaacttgttttctcgtactacatatatgtggtaattatggttcattgagaataatatgatttacttgaaatataaccattgcggaggtcaaaagttattttctattattaaaaaaatgatataggttcgatcaggggctgcaggaat

SEQ ID NO: 31745 - DNA, 1123 bp, Oryza sativa
tttgtaatatttatttacgctttttaattcgtagtttattttgaaatatttagttttgaattattaagagtcccatcgattgacctaataagctaaaataaaagccaaaatttatatttctggatttgattctaaagttgattttaaaagtaatttatttttagcattggcttttaagccactatgaacaaatatataaaagttttacctataaattaaattttattcttttattcctaaataaaccgttttgacttattaggtaatatgagcaaccgatgaggctctaaattatttttttaagttacttataagcaatgtgaatatgataggtaaaccttttatatatatttttaagttacttataaaccaaatgatatggctgatcagccagccgctgtcagcattccaaacgtgtctgtgttcttatcacagttttcccaactcctctctctcgttatccacgcgcacgcttttcaaactactaaatggtgtattttttagaaaaattttctatacaaaagttgttttaaaaaaatcatattgatttatttttttttaaaaaaatagctaatacttaattaatcacgactgcttcgtttttcgtaccagagagggagagttcccaaccagaaggtgcgaacacacccaaatcagtgccacgagatacacataatttttataaagataccgagaggataaaagcgtagtcacgagtataaaccaacgttttgacttgataaccatacgcacgcaatagtgcacgtatgatgatccaacgccatcaacctttttctattttttcccccctttctttccagataccgttacactacaccctggttgatgatactatattctactagttgtgtcatatgtcaccacatagctagtactattaatactgtgttggtaggctctatatttttattgtttgcaatcctggtacgctttgaagtgtattttagatattgtttttgaaagacttgaaagacattataaaaagaaataaatttggtgtcaaatcgttgagcaagagtaaacttatgagcatagaatagattatctctcaaataaaaataaaatcttgggtgtacggagtatatcgataccttccaaacta

SEQ ID NO: 31746 - DNA, 645 bp, Oryza sativa
ccatgtaatgtgatagcctatccaacacatttccagataggatgctgactctatgattttctaactgcattattggttactaacttatgtaccattggagttaataataatacctggttcaacggcagtcaaagcttaattgattggtgatctacatcacattcacatgctctctgtagtcatatttgatccaaaaaaaaattgccgcatatcatctgcaccaatcagcactcatatttcccttaaaaatagcatgcatattagaactatatagcttgtagccatcatattataagacataatgacaactggtaccatggcttcctttcttttgcttgaccttatctaatcatcttttattttcttgtaagggtatacgtagattctatcattcatgttattgtcaggtggctgatttaaaactattaactgtatgcactttattatatgtgcatcatgttgtttgttaaaattgttctctgctttttattaaacgaaaggcatttggggctattttattcttggagaaagactagcccaatttaggtaaaaccgtgtttgcattgtaggatttctgcaagaattttgttcaaatctgtcccgtatcggttagtgttacagcatcacaaacagggctgcaggaat

SEQ ID NO: 31747 - DNA, 673 bp, Oryza sativa
aaattttgtacaaatttgtttgtagtaattaatttagcataatagtaagtagctattagtttcgctatttaaatttgtttgtactaattaatttagcataacagtaagtactagttaaatttggaaatctcagagaatttaaatttgttcatacgacatattgttaatatacaatttatttttgtactaattagtttgtactaatttgagtaatttaaaatgtggacgataacacttttttttacattagaggtttgaaacgatggccaatagtactcctaagaggatatgtgaatttgtcaaggattttaaataacatgttggagggtatgttaacatttttttttaaaaaaaagtggaggatatgtttgccttctccattttttttagtcaacatgttgatgaaataaggaagtcaattagtgcactacttgataataacatatcaaattttgtacaaatttgtttgtagtaattaatttagcataatagtaagtagtcattagtttcgctatttaaatttgtttgtactaattaatttagcataacagtaagtactagttaaatttggaaatctcagagaatttaaatttgttcatacgacatattgttaatatacaatttatttttgtactaattagtttgtactaatttgagtaatttaaaatgtgga

SEQ ID NO: 31748 - DNA, 527 bp, Oryza sativa
agatttagaaattatagaatcaaatttatatgggaaacaaactaaaatcgggataaataggaaaatacactgttcattatggcgtaggtgttcgatgcggtccctagccttccccctcctctcccacctctgcccctagccgcgcgccgagccccgcgccgcgccgcgccgtcccgtcgccgcgtcaccgtcccatcgccgctgctgcgccgtcgccatcgtcgctgccgcgccgcgcgccgtcgcgtcgcctcgagccccgccccgcgccgcgccgctgccgcctgccgggccgcgcgccgcgcgccgtcgcctcgccgcgcgcccgtcccatctcccctgctgcgcgcgcctcgcgccccgagccaccgcgcgccgtcacttcgccgctgccgcgccgcgccacgccgccatcccgtcgccccgcgcgcccacgcgccccgtcaccgcccgtcgcgtcgcccgcccatcgcttcgccgccccgagccgagcgccgtcgtgtcgcccgtcccgtcgccgcgcgccc

SEQ ID NO: 31749 - DNA, 513 bp, Oryza sativa
aattcctgcagcccattatatgagataaaggttcatagggataagtgtgtaaatgtgattatatgagcgcttagggcaagttttataataggggtagttgtcacatttaattttatctatgcaagataagaggtgatatatacaatacaccacattttcactactctagcatactaatctaaataattttattttatttgtttgtctaatctctttttcttttctaaataattttattttatttgtttgtctaatctctttttctttcatctctttttttcttggggtttgtacgaaggttgtcccttgtacgaggggatggctcacattttcttttcttatttatttcttcaccttatcacctattcgagggaaatttaactatttgcaactagtaggtttggcttgttcaaatgctctccttagatttcttagatttctcagtgaacaaggcacaagtgcaaaacttgaaatgcaagaacgatcacattttcagtccaaaagatctgaata

SEQ ID NO: 31750 - DNA, 694 bp, Oryza sativa
aattcctgcagcccagtcttggatgcctttttgagggaggagaaccaatctttatcaccggtcatgtgccgcgaacaaccggaatccacgatccacacgttctccttccttgccatcaaagcctacacacaagcagatgtcgaagcctcagtactggggttagatgataataaaaatttaggaatccagtactgagacacacgaccagaagatccaataggcatatatccacgagcaaaatcaattttagaattttcagaaaaattcctccgaggccgatctgaccgaggtacagtggccggtctgaccgggggccggtctgaccgcctctgtaccgccggtctgaccgaggctgttcagccagtctgaccggtcgccggtctgaccgcgggacccactgcggtctgaccggtttcctcgagggaaaaccagatttttgccactttgattttgcaaaagcaatctctatctcctttttctgtttatgagctaatctgaaacaaaaatcaacaatatgtccatctttgccaaaaaagaacaagtatatttctcacgttgtttagacactttgttagaactagaagttttagcaatacaagcagaaacaagaggttttgcatgcacaacattggattgtaggatcgtaaagggcctttcccaccccaaaagctagtcattgaggtgaggggctccc

SEQ ID NO: 31751 - DNA, 2138 bp, Oryza sativa
  unsure (1)..(2138): unsure at all n locations
agtgctaaaggtacgatcttttacataaaaagttcatgcgatatanaaagtttatattatgcaattatttgtatttaaaacatattacttttataaatattgttggtcaaagtagtatatcgaaactacgttgaagtctaaaaatacttatattttgggatggagggagtagtgccaacctaaaaaattataccgatcgatctaagaagggctgtcagagattcatccatatcaccaagagtaaacgttttattctcagtaaaatttttacttattgttgaatttgggagtaaaatttttaccattgatgacatggataaatatcaagcattcattttttttaatctaacgatagtttccactacatatgtgatttctactaaataatttttccgactataggagcctccactgaaccctcttgaaaccatacatccatggcaaaaggggctagagctttatctagtttgtccagtctcccatgatatttctttttgtattcgccaacgcaaccacttagggcgataaatataagtgtgtccatgtacaagagggcagagaattatagaatgtacaaattacaaaaatcaagttaatgttttcagccaacaatcagagctctcaaatctactcccttaatatttgtccatctccatttcacacaaaaaaaaatctggcctgttaaaatgactactcaaattgtggtatcaattcatgaaatggtcctgaaaaaatgttcctaaagaagtgaattcgtcatgaaaaagttcctttcttgcttggattcaaaggttgccaaattccctgttgcattcaactcatgaagaacattatcgatcatcaacttggagaaagatactaataatgtttgggtacgtgcatcacatcctcatagattttccgtatttttccgctacatattcctagtttgaacttatatatttgcggctatggttttaacatgaatggtgtcattttctccatagctgttggatttagattcgaactaatctcatcttcatgcattgggaactagtgtttgtgcctaaattgtgaagaaagtgagacagttctgaccctctctaggaattcaacgaaggaacattatatatcttgtgatctcccttttggtttaggttaggaccaccatgaatggatgcaagggagttgtgcatagctaatgaggctggaataacaagttagctagagtttgatcctggcacacaaatcaagtgttgcttctctccaagcaacaataagcagacatattcctttttcttcctccatagggttccatgattgtaattgtaccctacctcatctgtgagagtgataccaaaatctctctctcttccttgttttgtctacccattaatctcctgatcttgaagcttttaagggtttttttttaactcaggtaatagatattaggtttttccaccacggaccgttatgcattgcttgcaatgagggaatccacatatttctgcagcacttgaatggtttcaattaaattcttacaaaattgcatccaaattagcaaggttcaaacaatttggagatactctctccgtatttagatatatgatattgttggtttgtattacgtggaacttttgaaactttaataagtaataatcattcatagctctcaaaaatatttagtttgaaaacataaaaatcatatgggtacatttttcaatactataatattattttttttgtgagataatatcattatattctaacagtaaatagtggtcaaagttgcacacaagaccaaataaaattaacagtatcgtatatttaaataaagagaagtgcgtacagtgtctgtatatttaaatacggaggtagtacataccaattgatagattgttctccatctacttgagctacatagacagggacaagcaaagatagtactgtttgtgtttggtttaaaactctggtggtactgtttgtacatgtgttctctttcattcttgcctttagattctctgtgatgctactttaatttgataattcgtacgtttcatattataagactttctaccattgcccatattcatatatatggtaatgaatttagacatatatgcgtacctagatttattaacatacagggctgcaggaat

SEQ ID NO: 31752 - DNA, 628 bp, Oryza sativa
atgaaattagaaagaaaaatggaagcagcgtaaagagatatcaatttacatatatgatgctaatttttagataatggatatatggtgctttagtaaagtactccaaaaaaatttatagaaaaattttgcatgaaatgcaccgtttagaagcgtggagagcatgcaaacgaaaaatccaaattccagaaccggaaaagaacagggccaaaggacagatagaaacggcatgttcgtctcttgaaagataaagatagcaaaggtatttttaggacaagtaactaacaatgagcatctcataaaaacaagaaaaaatattttcctaatagaattttattatttgctaatatatttagctacagtgtgagatgttcgataaatcccaaagtatgcgccgaaaagttccaaccctgcatctgctgtcacaactttctaaactgctgttacatcagttttaggtgtcctgaaatccaaacctaactcccggtttggatcactgccaagacaaaacatgtgctgctgatatcttcaaaattgtatgttcttgtcccaatgctttttttaatcatctttcaaagattgttaagcaagctgcattattgagctctcacacactacaatacatatgaat

SEQ ID NO: 31753 - DNA, 3674 bp, Oryza sativa
  unsure (1)..(3674): unsure at all n locations
atgatgtgacaaatggttttgaatttgaacccattagaagtaaacatattttttcactggagtgtgaaactttaattatgcattcaagtcacatcatagtgaaatactaagcaccgttctttcgttgtcgtaaccaaattttagtgacaagaagcagctttgttttcatctaacactactgaagcccacctgcaagtttaataacctaaattggcaaagccattttttcactaaagatactctttggaatgggatcctactttagtactttacatattccaatttccttccaaattctagttaaataaagtctacagcttccttgtataaatatgatgttttgccatgtgtctattgaagtttatgttggaataaattattagacctacaagatcaaggtatctggagtaataatagtcaaaggctacaaaatcgtagtccactttctgaggtgacacgtccgcgaagttatcatgtatgattacaatacaaccttgttctccatggcatagtttcgtgcttaaaaatattgtttttatgaaaccttgttgtaaatcttatgctgggtgtttgatcgcagaacttcacttgctgttgtttaatattttttaattgttttgatttggtgctgctacatgcaccatctgaatctgctcttcacatactttcttactgccatgtatcaaactttgtattccttcctactggtaatatggatgcaggtttgaggcaggaatgttcaacaataattgtcacaaattcttattttctttctgtgaaagtaaacaattttttgtttttcctagtttatcagatcccccccccccccaatgacaatattgtcaagtctaatgtctccattgcgttgctctgtcaggttgattgtgttctttgagcagaacgttccacataaaagagatttggctttaagaaatctccaacaaagctacaagtgctaaaaaatgtatattgatgcaaacttaactgcttgagtttgagtgtccatactattttctattgggagtaggcgccaattgttatcttaccagacatacatattacacaaacaaaatttatattgaaaatatgcattttgttaatgggcaaactgtgagatgcatcaatttgttgtaatctgcaaccactgtttggtggttgtcagctgtacataaactctgccaatacaattttgttctccactgttagatctaaaggtacatgacggttttttgttagttgcgtaactgaaggattatgaagtggaagacattactccctctattccataatataaggcataaccacgttttttagaagttccataatatgaggcatgcatgcatgcaagcaattaactatgacctcttctccattaaattattacttttttaaatcctctactcttatgttctctaattctattggatgcattcattatactccctccatctacttttgattgttatatttcatcttggcacacagatcaaggataagtaattctacttatcatctatttaaatatgctactagtcattcttcgtaaacaagcgattcattaatatttacatttctcgatgcccatatgaccaatgttgtgtggaagaatgaagagtcacgcattaaatccaagaaagccattaagatgataatctattggattgaaatatgcctatcaaaaataaatttttcagatttggaaatatgactatcaaaagtagatggagggagtatttattaggatgatccaaactacaagataataataattatttcttggtctttgggttagaggtggttatgccttatattttggaatggaaggagtaatttactgccatgattaccatttggtaactttggtttgtgtagtggtggtatatatgcaacaagtcatacataccctacctagaatttttacattttaaccctttttaaaccttattttacaaataaataccacaaaattctcccaccttccaaaataccacaatgaaaccctattccttccagaaaaaagcacaaatcttaacaaaatgacgcgagggagacaacgctactttccaaagaccaagttgcccctcagcccttttgttcaacctgtcgtatcttccccctttcttctcatacttcaccaattttctcttcgagccttaagtccacatctatggcaatgacgcagggaaaagcaggcacaaatccacctagaggcctcaattttttctcccaaactctagagcttgagctgcataaaaagaaaaaaaaaacagnggctctccctcttcttactcctgtgcagnggttcttgttctttcggtgactcctaaactagtttcttctgcaaggtgatgcttggggatgggtttctagcgccgccatggatgcttcagtcaatttttagggcttggggatggatttatggtgccgccatgtatacttgatcgattgttacggttagggaacaactggtgagcgaggatgcatgatgagaggttgaagaaggagatgcaggggcaactttgtctcggtaagtcacaaaatctattccgatcgatggtacctaatgtttgtggtatttttgaaaggtggaagggtcttaaggtatttattggtactgataaaatgtaaaatatttatgctatagatgaaactttcccatttagagatgatctcgatgggcaaatagactagggtatttcctcaaaaaaatggactagggtattaattcagttcacatcccttagtaaattatctctcttcctcctcaatggaaaacttatgttttttgatcatcttctcacatcttttatttttggagctaaaagtcaaaataacttcttcgaggaattctcttggggaatttacctcattgtctttatactcaggaatctgattcaccatgagccatgaagcatacgccgaagatgttctttcccttgtcattgtcttcaccactctcaagatctgcactacttgattcaataccttcttgagcttgcttggacttccttccattgaacattccttttagcttattgtccttgaactttgtctccattgtcttttttcttggctctcccaagcttggggcagtgcaaacggatgtgatcaagctctccacactcaaagcaaagaactcgacctcctattttcttgaacttgacatcattcatagttcgagacaacttgtttatagtcaaagccaactcctcctcgaattgctcgagttgatcatcggacatgacgttaatagtagaaagagcagtaggagttgactaagaagcaccaatatccaaagaagtcgaaggagaaaccaatgcactagatttagaatcaactttacgagaaagaatatttatctcataagttttgagtctagtgtaaagtgaatctaaagtcaaagtgggcatgtcaacagattcctgaacacacgtaattttcatctcacaaacagacataccaagaccattcaaaaagtgacaatcttagattgtgagtagaagtatcataagatgtatcaacaaatctaagattactcaaaactttgtcaaagcatgcaaggtaatcatccaaagcctctccatgtttcttctcaaattttatgtaatcctttttgaaaacatctttgcgtagttccttgatatttgaagttccttgatgagggctgcaggaat

SEQ ID NO: 31754 - DNA, 947 bp, Oryza sativa
aacttttagttcagataaaaatttagtttatattgtagatagatcctattttaaataatgaactatggtttaaatagtcaactatggtaaaaaaagagagtaaaaggaaccgtatagtaaggtgcggaccataaacggccatgtatacaaacataacaacttccaatctgagaattaacaatccgagaattaagagggaatgatggattttctttttcttgattatatctacgtgttttattttctacttttttcagcgaatagcgagtaccatatgtacttatatttgggtggacggatagtagatacatatacaaaaataacaacttttggctgcgttcacaagtctaggttcccatcctcgtttcgcacacatacacttcccgctactactaaacggtgtatttttttgcaaaaaatattttatagaaaagtagctgtaaaaaattatttgaatccatttttatgtttttaaactaatacttaattaattaatcatgtgctcgttttcttattaggatggaaagacgattattgttttcccaatcttacatacgtgcgtaggtagtatatgtatatatgtttatgaactgcgtacgtatttttcttgacgtacgtacatggatacatattgcctttgatctactgataaaatctttgacaggcacgttagtacagttttgtgctgtgattatagatgaatgatttttgataggtgcacaaattattgtgcagattatgtatcgtgctgagttgttgtatataagatatatattcaaatgatggcaatatgtcagatttgttcttcctcttcctgagagctacgtttctcgtgcacaaacattattagaaaaaaaggaaaagtcccaacacacagaagttgtctcgtaattacatatactgtagattaggaaggagggtttctatcgtgtcgtttagaagggtgg

SEQ ID NO: 31755 - DNA, 1312 bp, Oryza sativa
tttttatcatcaataagcaaaatgcccgcgcatcagcgcgggcttccttcctaattatcctacataaccaatattttgaccggaccgggtatattgcataaatttactatagaaacaggggtttcctttaaaagaaaactgacaactagcgttttgggattttgaattacatgtgccccaaaacctagaattttgtggtaattactcttgtctattttttggcccaaatatttggttcatcacagtaagctcaactatttaacgatattgtcgctagcttgacccttaccttaaaagtacaattgaaaaggtcagtagggcaagcttgtgtcatggtcaaaattaagcagcatccagcaatataatcaacatggacagcatatattaccttatagatgtagctatatatatatatatatatatatatatatatatatatatatatatatatatatatatatagcttaatcttgcagtgtgagtgatgtgaagccccacttaacaaaatccttgcttgcagattagggaatcaatgcatcaggctattagctgttcttctacagtgctctgcagtaccacattggcccctgcacttgcaactatctgctgtcaataaacagtggtgatgtacattgcaaattatatatgcatgtgtttgtgtgtgtgtgtgtgtttttgcaattaaataattttgttaatttacataatgcatggagccatctggaaagaggacacacacatgcatacaaaagcattgcacagggatagcatgcaagcacacctgcaggaccattggatgacggccatgaggtggtgagatgaaatcaggaccatccgtttaattgattgatcaaataattgaacagttgattgattggcagtgccctagctatgctacaggggaggtccctgaccctgagttaaggtgtgtactcaaagcaaatgcaagtggcttaattataacacatgttttagttatgtaaacaagcagctggtctgatacatgcgtgatgtggagactggataaaattacaatatcaaaataaatgtaatcctttatatttatatagttcatccccactaattaagtgtagttaatgctatttctcttttctctcattaagccacatcactccaattatttttagcctttggacgatagatttatggttcaaattgtgtctcctctttcttctctcataacaccatgtaatttcaattatttaggtctcaaaattcataaatatcaatttgttttagttctaataatcatattgcatcttatttttacatattatacaacttaattttc

SEQ ID NO: 31756 - DNA, 675 bp, Oryza sativa
aaaaactaaattttttgaggcgcataaaaaaacagtaagaggaataatggagtaggagatagaaaaacagcagtagtacatatacatagctactaggtgcagaaagaaagaaacaacatccatgcatccacagcagctgctgctgctgcaaatcctttggcatggagcaaaactgtaagagtgatggaatcttgaacagtctgaatttggaagtttgacatgatgggttagatactaacatctgaagtctgaactctcaactacaggtaatacatgactcctgtatctcctgatcacttgcatttccaaattaaacttcttattatctgcttcttctatgatactaatacaagagaatatttacatgtgctaactatgctagattaaggttaattaatagtcactgtgtcccggtctgcaagacaggaaataaagctggattgaaacaggggttacatagtactagcagcagcagtttacagagttaaatcaatgagcttcttcttctgttcacatacgtgtgagtgcaataagcctttttacatgcatgcttaggtttattggtgatcttttcatagacgtgcatgcatactagtacctgtgtagtagctagcatagatctcatgagtggtagtgataacatctctagcccttaggccatcaaagaaggataca

SEQ ID NO: 31757 - DNA, 685 bp, Oryza sativa
ttctcgaaagatgtagatgcacttcctaaaactttatatttgtataagcaatatttaaaaataagctatacagtaaaagagctttcatttacaaattaatctaccaaatataatttttcatactttaaaataccgatattttttattgatgatttaagatttcgagatgtgacgactacatgcaagtattatatgacgtagcatttctttaagaacggaggtttgcattgctgacttgctgtatgtatgatggacaacgcaacgtgattgatacgtagtatatacgaaagcatgacgatgacatatatacgtattgctactcggtctcaccatattccccttattaataatgcataaattaattaatataagaaaaaaatatattccccttatactcccacgcccaatgatgaatttagtatagtatagtaaaaggtaattaaggcgatcacatcgagttgtcgatatccggctgttaattaaattagacaactatttaactaacatgattaaatatatatatatgtcgaaaatcatatgcccttccaggcttccaatcaagagtgattattccctatatggttttcaaacgttaattttcaacaaaaccttttcaaagaattacttccacaaagtctatggtaaatatatataatataatttgtggatgttgtacatttgaaac

SEQ ID NO: 31758 - DNA, 580 bp, Oryza sativa
ctagcattttccatatttatattgatgccaatgaatctagacatatatatctatctaaattcattaacatcaatatgaatgtgggaaatgctagaatgacttacattgtgaaacggaggaagtagcaataagtacatttaaagcagattgcagctactcgcctactccctccatcccaaaatatttttaattttcacccatctcacacgtaccgatacaaaacaaaaggactagaatgcatctactttattgaatctcaatgcaattgttccccattttatctattctcaatacaattatttcatgctttcataaactccgatacaatgattattataaaaataaatttattttggaacaaatgaaaagagctaaaaatggaacttatttggaacagatggagtatgtagaacacatgatcgtggtggatcttatgatatctttttgcgaacacatcctacaatacaattgcatataaatataagtatatttacaaaaatataagcaagggttgtgtattaattataagtcttgttttgaagacctaatttcgtgcataattgcacgtgaaaatccatta

SEQ ID NO: 31759 - DNA, 1186 bp, Oryza sativa
ggagtaagttttagacaacaatgggttttgaggcatactgtacttctatctatgctgtcattttatttaatctgctaatatagcaaaaaaaaaatttcgaaggagtaaaatacatcaatggtccttaaatttgtacttcctccgttccaaaatgttgctacctaggatgagatttgacccgcaatatttttgggaaggaggtagtaagaagtttttttttttgagcaaattttagcgaacgtcacgttttatggttgaagttgcataaaaccccaggcattatgaccaatggcacataggcccagctattgtggttctaaagtatttagttaaaatttcaaaacgtagaatgtatatgaaacttttagttattgatttcttaattaaggttgtcggtttactcttcgctactttgaaaaatattattttagatatgttgaaatcaattgaaattagaataaaggtggggttttatgaaacttttacaccataaaacctgtggttatttgccacaagtcataatacccgtggttttgtgaaactttgaccataaaacatggggtttatgaaatttaactttttttttcttcatcatgttattgtcacatttattccttgttgcttactctgaactcgtgtgggttgtcctatttagttaaagtttgtgtgcaaagttgtgaactataaactcaattttggacgagaatgggttttgaggcattctgtacttctatctatgttgttacatgaaatttggtttattctgctgacacaactcaaaagtatttttggaggaataaaatacaccaatggtccttgaacttgtaaggtgtgacttactgtaggtccatggacttgttaaagcatgccatactatctgaacttctcccggtgttgacgtggcagcagatatggacccagatgtgtctgccatctgtatcctcgaccctctctcatctctctcctttctccctcatcgatcatctctctcatcctttctctcccctccctcatcctccatcatctccctcgttcttaatttcttctgttttctctgccacatcacatgcatagtcttccatatcaagaaccagatcacggtctgaaggggtattgaactgtttcggacctagattacatacttttaacacgtttaggggcttggatctgtattttgcaacgtcta

SEQ ID NO: 31760 - DNA, 568 bp, Oryza sativa
cctaactttgtactatgggcctgatggtgaaggcaataaggaggatggaggcctactctactaatgggcctgaggcccagaacattaactggcttctagcaagcggacgatcgaaagaacgagctgttaggtatatcggcaatctgaatgaatagaaatgtggcattatacatttatacatacatatttgtagacaaacttaaaatgactgtaaaagttcaaagcatggcgtaaataccagattactcacaccggcaattaagcaaaagtctaaagatcaaatcaacgggcgctgacgagctgaacatcccatccaagcatcaactactgtaaaatcaagaacaactcaaatgaactgaacattactagaactgatgtttgagcaacgaagacgagtccttcgaaccagctgaagtggatgtgtcagaagaagtcgagatgtgggttgcgtagccactcaccgttgttgttgatgactgcgtcgcacttgaggatgacatccctgcaggcgacgtgaagagctcatctacagagaccactggaggaatgtacatcggcacgggcatct

SEQ ID NO: 31761 - DNA, 735 bp, Oryza sativa
tggcgccggtggcgcgtggatgcacagctccaccaagaacgggcagtccgtgaccgacctcggcgtggtggtacggtggtgcaggatcaactactgcttctacgtgcgcggcgagatggggcagcagcggagcaccgggtggatgatggccgagtacgagatcaccgacccgcggtgctaccgccgcgccgacgacggcgaggaggacgacttctgggttctctgccatgtcaggaagagctcgaggccccaagccgccaagatctctccagccaagccagcacggcggcgcaagcccgccgccgccgccgccgcggatgtccgggctgcgtgatccggccgacggcggagatcacgaggtttgcctcgcgttgggattcgacttcggttatacttttgctttggaattgtgttcctttgctttattcctcctctagcatctgcccatacattccgtgtgatgaacactgcgaatcaaatgggacgtttaagatgttgttgttgtactgatagcgtgattgaattcatggcctctttctgccaagccgcatatggagttttttttggtgtttcagtttcaagtcgcggttggtgaatccgaaatcacgtgattaaaacagtaattatcgagcacggaaggaatggaatttttttaaaaaaaatgcagaacggagtaatttcttacagatcatcctgtttctgcttgatgcgatagctaatcgctgtcggtgctct

SEQ ID NO: 31762 - DNA, 685 bp, Oryza sativa
cctctggtttatattataagtcgctttgatttttcctcatcaaacttaatcaagtttgatcaactttatagaaaaatttagtaacatctaaaataccaaattagtttcattaaatctaacattgaatatattattttgataatatatatgttttgcgttgaaaatgctactgtgtttctttaataaacttagtcaaattaaaaaaagtttgactagaaaaaaatcaaaatgaattataatatgaaaaggggagtagtaatattgtggagagtatggttactaagtgtacacacggtctacacatccgattacagataggtggtgagctatatgatataataggccagtgatagagtaggaccggtcgtcatgttgccttctatcctaaggttgtgttcggcactctgtttttccaactctcccctctcgttttcggcgtgtacgtttttcaaactgctaaacagtgtgttttttgcaaaaagtttctatatgaaagttgcttaaaaaatcaaattaatcctttttgaaaaaaatagctaatgcttaattaatcacgcgctaatggaccgctccgttttccgtgcatactgttccggttgggaaccagagatgccgaacatagcctaaaggtagtgtatagagctccaattggagacccgtgtaatagattagaaaaccgaagtca

SEQ ID NO: 31763 - DNA, 1321 bp, Oryza sativa
gtgattgtgtcatcagtgaccactaatcactgaccaagaccaaacccgtcaaaggtgagggtttgggcccgtcagagatgacctggtccggcgtagtgtcaacccgtgcttctaagccatcggcatgctcgtgtactacaacgagaccttggatgccggccgtggcatccccgtggacgtcgacgtgtgcgctcaggtcgccggcggcgagctagaggtcgtacaccatacggaggaggtgccgaagctcgtagttgtcggcgcgggtgagcacgccgatgagaaggcggaagtcgggcttccgcgacgccgtgtacgcccccggtgtcgccgggccgcacgagctcatcatgagcgcctggacggtgggaaggaggatcctgccgccatctcgctccacgtcccgccgccctcgccctctctgccgccgctgccatcggagccgaccgagcgctaccccgacgtctagtacgccgcgtcctcggctcctcgcccgccgcccacagccgcctccgcccccgcccaccgccggcctcggctccttgcccgccgctcgcagccgccttctgttcactgagagagagaggggcaaaggaggaggagagagaggggcagagaaggagagaaacaacaagcgctgaaaggtgggccctaccgttgtttttgctgactgtattgctacgagtgtgccacgtaggctgaaaaccagttcgaatcgatttagggttataatttatccagttttgagagtttggggtgttaaatgtctggtattatagtttgggggtaaatcgtactaccgcaatagttcggggggtaattcgtactttccaatatggaaatatctaactatttgccaaactattggtcatcattaattacaatcttaatttggtttttctcataattctaaggaaacataaaattaaattccattaatatattactctgtatgtttcaaaatattactggtcattctcacatttgaaattattattttagatcgcggtattctatcttcacattttatcaatgccatgtataactgttaatcaaagttaatattgcttttgaaaactataatgtagttaataagcatagcagtgtaatttgcacatctcctagtttgatgtgaaattttgctacaatgacaaataatataaaatgagagataggcaaatttaatatatattttgcagatgaaccatattacaggctaaattaggcggcacgtcaacagggcgtgcagatcttctagtatctaataatctaaagctagcgcttcttgtgccaacgggacatttaactatttgtcactatt

SEQ ID NO: 31764 - DNA, 556 bp, Oryza sativa
ttttttagaatcaaacataagtaaccaagcctaccagagaggggtgaatgttagattacgtcaacggaagtcaaataatcgaatcttaatagatcaaaacacatcccacaaaagccaatggaacacacgtttggcggtctatccgacctactagggtcggtctgaccgaagcttgaccggtctgaccgctggtcctctcgcggtctaaccgtcagcctgaaaacaacacgacagcgcttcggtaaaaacacgatttctcttaaaccaaccgttggatcgagttgcaaacttgacactaaacaacctaaagaacaattccaccggagggatttgtaaactaataaacggtttaagagaaaatacccttgaaaatcagctctatcaaaatttcagcaaatctgaacaaaacctaaaacttaagcaaattcaaatctaacaagaacctgtttagggtagaaaaatacgaatatgtccctctatgtttagagagaaaataagtgcggacgtgccagtgtacctaaatacacaaatgtaaaataaacataaaagagacaca

SEQ ID NO: 31765 - DNA, 671 bp, Oryza sativa
ataaataagggggataagaaaatcgcaaagaaaaatcggtttggaataaaagattgatttagtagtagcattttgtcaaaacatctttgggcaataggagcatcaccgatttgttatctttctcttttctactgttgcaaatccaacaaagaattgtgaaagcaattataattattttttttttaaaaaaaagatggcgtagagttttctcaaatttttacaagctttacttcacaaagcacatgacttatcagctatagccagaagatcgcatgattgaaactgatttattctagagagtaataggcaatcatagaaccatccatgacatgcaatcggcaaccaacagatgatggtctatcactcctccatatgttcatctccagcatattcgtgtacagcttgtaatgtacagtcaatagtggcaccttttatagcatgtgtacatgccaacctacaaacagaaagatgaaaaggaacattcagcaacgcgcaaaaaaagatccattttttattcatacagtttgaaaacttttgaatttttacctagcataagaatctttttatatgggtcaagctttaaaccaccagtgttatagtactacctatagctaagatataggtatacttcaatagtcctaattaaacttaattcggtaaaaatctacata

SEQ ID NO: 31766 - DNA, 676 bp, Oryza sativa
cacgttggattacgccagagtgccattgctaggggcccgtacgccgtcatcaagactggccgtgattctttctcttcatcaagccgaggtcgttgtgccgtttgtccgcgacgctttcacttcatcatgctggagttgttcgtgatgtcacgtgaacatcacgtcggagcaccactgcttggtgcctataaaccatcgtcaagccggagtcgtcgtgccgtccgtccgtgacgtctccttctctctacaccgcatgatgagatgccatctgtctacgatgctttcacttcatcatgccaagatgagatattgtctgtccgtgatgctctccctcttcgtcgagatcaacgacgctgtattggagcgtcgctcgtccacatcaacataaagcaagaatggtgccgtttgtgatgtcagggaaccgttcatgccagatctacaccaataatttcctcgaccgttctgccgacaaggcatttacttctacaaaggtcgccgttgctaccggcaccctcatagagccccttttatgggctcgtcgtcatatcaactggatcaatagtagatccatcatccgaaggatgtgctatataagccacgttcgtccggctgctgtctgcactgacttcttcatcaacaccttcattacaaatccctgttgtatagggacatgacg

SEQ ID NO: 31767 - DNA, 701 bp, Oryza sativa
aataacttttgtgaaatatgtaaaactatatgtatacataaaagtatatttaacaatgaatcaaatgatagaaaaataattaagaattacttcaattttttaaataactagcaaaaatgcccgtgcgttgcaacgggtaaaaagaatccaatgacaatatacacttttcatgcataaccatattaatgataatgtttatatggatcgttgtagttaccacaattagaaaattggatttttccgccccttgtaccatataatggttttttattatatacggacgacggaaacttttttaactttttaagtaaaattagggattagagattagatctgttcccttttgtgattaggaatttagattgtttatttacttttctagaaataaaaagaaaaaaaagagatcgggagatggggaggagatttttttccacctccgattcgcttttgtttttctgttgccgcgtttttcttttcaggatcgctcttttttttaagttagacggacgacaaaaacatcataaattttttaagtagtaacagaaacgaacggtcaaatatattttaataaatcaacggcgtcaaatatttacctcgccaactgccccgaggcttcctccattgtcacggttcaaatcaatagcagccacaacctttcaatttagcgaatgacgagtgaaacgaccgccaacacgcaatgt

SEQ ID NO: 31768 - DNA, 1156 bp, Oryza sativa
agacaccatgtgtgtttatggtgttaaatatttatattttgacaaacatctatagtttagcgcttggtttattttcaatacttattgttgataatgacatgagacacctttactaattcgaagaatatatttattttttttaaatttattaataataactaatgcgtgggagtatatgggagttttttattttttttgtatgatactatatacgtatattttttttggttctatctttttttgacacgatggctttattcttttaccgtacgtatgtaggttttattgttccttttcaatcttacgtacttactttttttttggcgaacctattctctctcgtatgtataggtggaaagtattagtattagagatatatatctaatctaatgatctaaataacggatccatcaatttaagtgaaaatcaacggtatagatatagatataatctaatggtctaaaataacgggtccaccaatttaaatgaaaatcgacggtgagattaaacagtgccacgtggcggtttaggagcgtttataagaatgccacgtgtcgtcttgagagtgtttgtaggacgtttaatggacttttagtatataatagatagatagatatattttgttccctaccttgcccctctcttgattaacggtacacattattccatctccaggtacctctaagtacctcgcaaacggtgtaaaaagtctcgaaaagtaattgaaagctcatactgtcagtagagagttcactgtctttttcaacacggtgacggtcgtgcgtgtatgctgcaggctggaactcaggacttaattcggtcttcgatcggttgtactagatgacatcaaagctcaaatttgcggagactctttactccacggccaaaggggagtctttaaagtctttctgcgatccggatcgaattcggatcctctgcggtggaggagaaaattcagaggttgctacagtacccagcattaggagtactgtgggccgtccgatcaagaacggacggatcagaccgttcgctacagtaaaacagtgcattgatgcacagtactttcatccctgtagatacagtaaatcatcactgtagcggtactgttctgtgcattgaaacactgtccccctcacatatcactgtggccacagtg

SEQ ID NO: 31769 - DNA, 542 bp, Oryza sativa
ttttgtaatttcccaatatggtcaggttaatttgacagagcggcggtcctactcgtggggcatcggatggatcagccgctatattgatgtgcagaagccaccgaatcgaagccgggttcattgcaagcacaggagcattctgtttgtggacaagcagcatgaaaatggccccaagttcgtggtatcgatgcccgtatggtatcctgtggacactgggctgttcggtgacagcttcttttgatcagtatgtcaaagtgtgggatactaattcgactcaagtatgcattcatctgctttgtggatgcttattttttttttcctcttgcctcctttggtggtggcaacggtgtgatcctgatgttctgatttttgccttggctttcttttcctaggtcgtaatggattttaagatgctgaaagtgtatagcgcagcaatgtccccaattgcaacaacacatatgctgatcgctactggaagtgcggatgttcaggtccatttatgtgacattgcttttggagcctttacccacacgttgtccggt

SEQ ID NO: 31770 - DNA, 567 bp, Oryza sativa
agttaaatcgatggaacgtcacgtcaataacattcttatacaaattgtcttataagatggtatttattgtaacttcattaatcgcaacttgataaattagattcctatcaatgacacaccttagaatttcttactgattttgtgttttcaatgttttctttactggttcgatatatgccactcaagaaaagtgaaaataaaaaggcaaaaactctatgtgtgtttgatatgacaacatatagttttgccttctaaatgtatccgcaaaccttgatggtatgttttgaatttaagtacattgcgatttgggtcacctttttattaccaacaatcgtagcattgtgtttgtgtttaacggatgaacgatctggatgcaactaaatatggatgatggacaaaaaaagtgatgtaatgaatgaaaaatatatgtatttcctaagtatgtgagatttcacaaatatgatttgagacttttactttgtcgcataaatatttcaaatggtttgcagggaacatatgacgatagttcaatgcatatgcaaagaaataacaaacatttgaaacttt

SEQ ID NO: 31771 - DNA, 2703 bp, Oryza sativa
gggagtggcggcgatagaaggagtgaacggccggcgtcagtggtgggagcgagcggatccaccgtccccgcccgcgtgagtggcggtggcgcacggatccgtcgtccccatcctcaggagcgacgggcgacaagcgatgggaatggatggatccactgtccccaccctaggaagcgatggtggcgcgtggatccgccgtccccgctctagccaggggcggagctagaacgaaacggaggtatagctgattcggttttaacgcttaatttactctattttagatcgagtttaagctgattcgggtgtctatgtttgtattgaggggggtgcacacatgataaaaataggtgaggtatagctaaatttttttcttggccggtttcctagacactcctctaatatactatgcctccgcccctagctctcgggagcgattgcggtgggtagtggcagcgcaacgatgacgactagtgttgacggctgctctgacgacgatggcagtggcagctgctctgacgacgacggcggtagcggctagggtttcgggtgattttgattttctggatttcttttaactgaaactattttcgtgtgcggtcggtaaatgtgaccgcatgcgaaaatcacgtttacgcatgcggttgcactaaccgcatggaaatttagcgattttaattcacagaaacctaggtgtagatgggccagaggcctgtttgtgaaaatttgttttggccgtctggagaaattatttatgtactagtgtaggcctactttggaacaaaggacttttagagaatttgtacagaaattaaattgattcctataaatttcgtgtggtcaattggaaaggagccggccttaagctaagttgatttgtttttttttaataaaaaaactaagttgattggatatgtgcagcactggagcattgacctagctcctgcaggtagaaacaaagaaaacaaaacaaggatggatcgatgctagccatctttccccttctctttttacgaggaaatctactttttgggcgcacttgagagatcggagggatggccgaccaaagtgtgtactgcagccaaagtttgatggatggaacaccatacataccatgagatgtacgtatcaaataatgcactttttctcacgtttggatagaaagaaaagggtgggtatggacagtgtgctgatgggtacgataagtgctcttttgtttttgtcagaaaaaaaaatccaccgaacgtcgagagttttttgagaagttaataaattaaaggttatgtgtgtggtgtatatatatatgtgtgtagtcatatatagtgacggctgcatgcatttgcaaagcgcggaaggagtagcttttcagtcaggtgaggttccaaaagaagatagatatacggttctttttacaatcttgcatgagagttaccgttacctcagcgtcgtactatctccggtcactaatatttgattatttaatttgatgtcaaccggattttattcctactagttacttcctccctcccagaaacagtccattcctagcatccctaggtgaaactagtggagagtgaaaatgactaaaatacccttaatcattaaaaaaatagtaagagtgatatgtaggtaaagagtattgaagcaataaaatttctcgttttacgtgctgagagtaggtagaagggtaaaagttggtttttttggaacaaaattcaaactctagaagttgagtttttttggacggagggaataggtgttacccgatcgacatcaaatattaatgactagaggaagtatacaatatatctttgagttatgtcttaattataagccgtggccatattaattcttaacttttcaaattaatttacttatttttatattgtttttgccacaatatggattttggaccatcatactttaagatcatttttcattgtatcgtgtgtcttcagcatataaagcgcaaaatggaatgccttcgaaagtaggcccatcatcacctgcttagtaccttctaaattctaataaagaacaatagaaatggagaacagggaattgtggattttgtccatcaatagctactacaaatgttcggccataaaattcacggatgttatgtagcaaccggatgaccggcgatggttgccaattgagagatctcctattcggtcttttttttatttcatccttcggtcaagattcaatggttcaaaccaactcctatagacatatataaaaagagataactattacagtcgtcagtcgcatcacaccaatctcattgtctgactcctcctatgtgccggtcactacttaaaaaatggtttttccaagcggccaaaactgatctttgcatgcggttgaccactcccagcaatttctccttctcccacaactcactatgctgaatccgtcattgcagcctaaccactctgtgccttcttccccatcttcaacgatgttcctcttaataccgatctctccgtcccctgtaattcctattactggatccacggcccccgctatcgtcgctcatcatcctcctccatcactttggctttggaaatgcctcacttctatctgtatcagcttatcgtcgagccatagctgcctcgatcttcctctaaacccgagggagtcccctcttccctcttccccaaccctgattcctactccctccgtcccataatataagggatt

SEQ ID NO: 31772 - DNA, 1133 bp, Oryza sativa
ggcgctagccagtaaaatatcttcactatattgggtgaggttacaatgccgcacggcggcttacaagagatatatatatatatatatgaggtagaaccctaaaaggtattacgatccgtaccgtaaaaggtggaaccctaaaaggctctgaaccaagcctaccggcgacgggcctccgcttcactacggcagaatctagcctttattaagtgtaaataaatttggatcacaactcaacagtttaagcttctaaaatatgcaaaaccatcatccaaaaccaccttaacggtaatatggatggtatggcaaagttcagggggttggatgttcgattttaaagtgcaatgtgctagacagacttcaatataaagtttagggatgtatatatactttttcatattacatattacatacgtatatacttatttgggcctaatactttattctcggtcttcttttctcaacacatctactcctcccgacactattttgttttgttgtgatgaactttatcggcaataattattgagtgaatagctagccttaaaatcatgagttcattgttgctttgctttactgaaacaaaaaacacttatttgaaaatgaaaattgatatgtttttagtccgggtaactttctcgagactgggataagtattatttgccttttcaaagtggctgtccataaaaacgattgtatcagcaatgtactgtaaaatggataatcacgtcttaagttttgcaactactattttattgcaaggttcaataataactgccaacatttcaggtttaaatgaactgtaatttaaacgtgcgttccaaactactctctcggttttaaaatatttgatgatgttgatttttaaggtgatatttgatcatttatattattaaaaattttaatggaaatgtgcaaaagtatatcatggtccaaatacatttaattattaaaaaaatcacaaccaatataaatgttagttttatttaggaagacgaatgtaatgtggaaatgtcaacaggcttatgtatttaaaaacataggtagtataaattacgtacatagctctgtgaaatgtttcttgtaaatatttttggataattgtgagatcagtcattcgatgcacaaattag

SEQ ID NO: 31773 - DNA, 1852 bp, Oryza sativa
atatagagctggcttactctttcccggtcagatttgtggttggtgcatgcatgtacagagagagagagacagtgacagagggagataattttgactttgtgacgataaagtagaagactgggcaaggacgcagtcatgttcatgtatgctgagctcggtcagggatagggattgggtgcagaccaaagatcaaccccctagtccatgctgcaaaagtatcataaatggcttagcacaatttgacttgaacagcagtacaagtggtcgattggaccttttcctctcacttttgggatttgaccatgttgagagaaaggtattacctgtgttcttatattttatatatgtatgatgatgattgtcaactgtaaagaaatttgatattgaaacagttttcaaagtacctttttatataatttctttcaaattaaatatatatatagtgttgtcaacttttggacataagaccatacatcttattttaaaaactatgtaaatattatttagtttgttctgacttattttactagtcaaggtactttaatttaaggataaattatacttctacttatctgtattaaaatttcgaattagatgaattgtcaaactttatgtcctaaagacaacagtgtcatttatttaaaattgaagtataatcataataactagtaaattaaatctacagtattatggaattaccttttgagcccggtgtgtacacgtagattttgatccattccataaaaatagttcaaaagatcaatatagttaatttgatgcatcatcaaaactatagtccaaatcaaaattttcgtaacttgtttttgtaaatatattagtactatgacattacgattatatttttatgacaacactaggaacatatttcttgatgtataggcaaactttaagcatatcgattatatattcttgaatattaagtttaataacacatgaaaatggtatgagccatagaaactaaactgttgtaaaattaatttactatcattcataatccgaagctctagtcgtcgttttttatgcatcaccactactacttttgatgcttgtatatatgatagatataataatttggatgtagtatggtttaattcggtcaaaaatctatatagatcgttatttgtgacgtcactttctttaaatatgattaatctcctagctcgtgttgacttttgtaatcttgtgttttgactggagatgttatatatgcagcgccgtttacgacagtgcgactcgacgccgttcatgcatggacaattcttgcatgcgaagcagcgaaagcctttcttgcatactcctacggaaaaagtacaccaaagatctctcaacttgtcatcgaattacaaaatcgtctcccccaaccgtaaaaccaaatataaacatcccttaacttacaaaactgtttgttttacatctttcgatggttttgaccattgttttgtccgacgtgacggacgagccagcgtaggacccacatgagccctaaatgttaggacgccacgtcatcaggctctctctttcccctcctctcccttcctcctctctccctctctcgaaaacgctttgcatctgccgtccgacggaacgaaaagtatcggacgcttccgtcctaccgcgccacgcagtcaacgctgaaacatatcggcgtccatccatccaaacttatccatccatgtaataattcctctctcctctagccttctcgtattctcctttttctctttgcttcaactaccaacgctgcgccacttttctcaaataaagatgctattagatggcaggatgaggagctagatggagtaagagtcaggccgggcatggatgccagggg

SEQ ID NO: 31774 - DNA, 664 bp, Oryza sativa
aacaggaacaggaacttgcagtaggagtagtcatgttgaagaacgctccctaaaaaccttattgcccacctacccgtgcaggaactcagacgaacagagtttcggaggcccgactcgtcccaatctcttgtgcatgcaagagatcagagaccggggagaacagaagcagcacaagaacagagaaactggggtggaaggagaagtgcgccgagagagaggaaagaacagaagacactcgatctgttcgtccctttggcagagtgtttctcatgagagtaatgtttgcgcaattaatcctcaaattaacagcgaatgaatcgctctccgttaatacagaatcaattcccatatattttccgcctatccgtgcaggaactcagacggacagagtttcggaggccctactcgtcccaatctcttgtgcgcacaagagatcaaagacccgggaggacggatagagtttcggaggccctactcgtcccaatctcttgtgcgcacaagagatcagagaccggggagaatagaagcactggaaggagaagaagtgcgctgagagaagaaagaacagaagacacccgagcccttttggcagagtgtttctcgtgagagtaacattcgcgcaatcaatcctcgaattaacagtgaatgaatagctctaaattaa

SEQ ID NO: 31775 - DNA, 728 bp, Oryza sativa
acgtgcatgtgcaccccaatatatacatggatatatgatcagttaatttttgatctctacctgatgaccagaattagcaggaccagctagacatcacctaccaattttatataccgaccaactacatatatatatatatactcctttgctaaatgacatatatatataaattcagttgtgtttattaggagtatagtctagtactctagctactagctagtagtgctcttttttgcatatattgcattggtcaattgtatcgatacataagtgcttaatttattagttatgtatattaatttctgattaaacatttcactaacttaaattccccttaatttgcagcagtcacatcggcatttcgcaatcaatcttcggtcagagaatgagttaatttaagagtaacaaggcaagtacaagtggacgtcgctcatcatcggatgcaaagtcaacagagacaaactaattaagattaatctctcttggcactagctagctagctctaattaaaccgaacaatagaacatatgcgcaatatatgatcaatatgtacatacatcaggagcaacccctattaatttaatttataatgattcgaatatgatcgaattaatgtctatacatcatcggacgtatgtacacgtaatcacgtatacaaaattaactaacagacaaatagctttgatgatcatcattagttaatgcagtttgctaatgaaaattagaag

SEQ ID NO: 31776 - DNA, 1172 bp, Oryza sativa
atcatggatatccaaataaacaacccaaaaccgaaaccaacacagagtcggccggtcagaccgcgggctggccggtctgaacgctcgatcaccactggtctgaccggcacacactgcccggtctgaccgaacccaaatcacagacatcagttcctattcacctgcaaatttcaatcatctccaaaaccacttcgtaaataaattccaaatatcaaaactaataatctcatatgcaaattgttcataacagaataacaatcaaaaacactttgattttacagaagtttgattaaaattgaaacgatgtgatgtaaaagttgaaagttgaagaaaaagttgggaactaaaccagggccctgagggtggcgtgcgacaatggcgtggtcactggcactggggaagatgatgttgaggtggcgccatgcaatgatttgtcttgaggtcccaaatttaggcggcagcggctcttcttctattctcacgttcgagaaggctggcgtgctcgaggatgacgttgtcgcttcactggaaggagcgacaagggaggtgcatcaaaaaattggatgggtgcattatgaattttaaatgtttcagtgcatgcatctgcatattttaatagttcgagaaaattgttgtattagctttagcttgtttggttgggacatggatgagcagtagacaacaaagagattcacaaattagttgagaaatacatgtaaattatatagtacacttgttaacaaatatataaatgtaaattcaaacccatgtcaaaataatcacatctattccagatgatcacacgtactttgcaaacacgagagcataacgaacaacacatggtccaggtgataacgcgttcgatccgtcatatccagatgtcaatagatagcaggcaatattaaatgacatggcaggcaatattaatttcgtgaaatcgacagacaattttgcccttctggcatgttgttagcaaccaatcagaaaagggccatgtttttcatatgttagacacatgttgagtgaaagttcagctataaatacccctgctagatagcgtctgcctccacgcatcatccatcttcacgagctaaaaacctcactaccacaacaagcatcttggtttctgctaaaacaaaggtccctctctcgctctctgacacacacacatt

SEQ ID NO: 31777 - DNA, 675 bp, Oryza sativa
cccccccaactggtccatgggcaacgcaactgacgaactgtactcaattgggccgaatcccgcactattgttggcccaataaaccttgttgatttgggctacattatctccctctctcccccgttcgcattaattttcaactacgctaaagcacttaaaaacatgaatgaatatattgaagcctatttgtacgtataaactgaaaatattttggtcatatattagttaagctaaacattctgaatatttcaatatgtgtgtatatctttttaaagaaagcaatttcctcctacgcatgtatgcgtggacttaatttgttctcacacaagtgtcacaacacagctagctaggagagaatcgagatcgagattgtataagttggtttcaaggatcatattacgcagcagcagacaaattagaccgtatacaattaatatactacagtttgacttatacagacagtgtacatgtaaaaaaaaaaagagattttgacctacgggctacggcaattaattaatttataccgatcgatctacctgttcaataatatatgagttggcaattgatagtttaatgtccttgtaaattctcatagatagtttaataaggctagctagacacatttctgcacttttccttaatctgtttatgtctagctacaccccatatggatgc

SEQ ID NO: 31778 - DNA, 645 bp, Oryza sativa
ctactgcctgttcctcccagtcagcggaagtgtactagtggatattacatttgcgagttccttaggatcaataggagataatgtatggtttatggagctgtaagtacaaatcatcaatacgttaattaaattaattgctaacaatattcattgctatgattgtgatgcaccttccaaaatttctcaagagtgaaagggagctggatgatgaagccattcagaacatacaacgagacatgtggtatttcatacaccatgaggcaaacttgttgtcaccagcttgggagaaattttttatataaaggagagtctttgaacttcccaaaaaacgagtgtcttactaactgcagtaagagtataatttcaatttcacatacgcgtcatcggtcgagctataagacattgaagtactcggatatgatcgtccaatatctatgaacatataagtgcttcacaattatgtgggttaattaattaataccttccattaattatcgtgtcttgatttatatattgcgcatgtatattaattgcaagcaataataagaaaacatttatcatcgattgctcgatcgataaatatatcctctaagtgtgattcccaaatatgcgaacaaactaaatagattatcaaattttgcaaaa

SEQ ID NO: 31779 - DNA, 641 bp, Oryza sativa
catcaatatacactaccggagaattgatatttgtccggatgacaaaaatcacattagccccgattcgaataggaaccgagactaaagaatatgtttagtcccggttcaaaagcccaacagaattttttgatatttagttccagttggtaacatcaaacaggactagagatcattttttatgtcccggttcaaaaattgtcaagcctcccactatctttagtcccggttgtctaaaccaaccaggacgaaaaattaaaaaaacagtcgagccacatggggagggagagagcagcgcgcgtcgtcgtccttatttctttctccccctcatccactaaccctttctctttctctctttctatctctccttttcctcctctctccgatctcctacacctcctctccgatcgtagccgggaccgataggcggtggcagagccctctcctccactggatccggcggagggggaggcggcggcggcagcacaaggggggaggcggtgacgatggcacgaggggggaggcggcagcggcggtggcaagagcggggtggtggtggcacaaggggtaggcggcggcactcgccgtcgcggtgcgtgacgacctaggcgcgcggacagtcgtcgctgggatccgcctctgcc

SEQ ID NO: 31780 - DNA, 660 bp, Oryza sativa
tcactcaccgaacttccctggagaggattagcactactggtagtggaggaggacgacgccatcaagtaacgtcgctagattagattggatcaggctctgataccatgtgaaagaatttggcagaaaagccctcaccgtggcgtttacagaagcctacgagatcagcaacaaccacgccatctcaggaggaaaacagcagcgacaacggatgtaacagaaagagataaaatctaatcctatcttatcacaactcagccgatcattatcacatgcatggatagaaatatgctcaaccaacaaggagaagaagatatgctcctggtgccctggcgtggtttatgttctttgttattgttcgtcgataaattgtcaacttcccccaaatccttttcagacgattttttctcttctttttccaggaacttgttcttaatttctgatagcagttcattttgggtcacctggataactgcaactgcaattttcagtgctacgaggtcacaataatcccaacctactgttgtctgatttgctcaatcgtttgggcaagatgtaaatcgaccctgctgaaatttatctaggaaccatgaatgacgatttgacattggcctaatgttcatggttaatattcctttaaaaaaaatgttcatggttaacata

SEQ ID NO: 31781 - DNA, 699 bp, Oryza sativa
gctctgcttccaagctcagttcttcttcagtatcttcctcagcactgtcagatgacgatctgacagaagaagatgagcccgacaatattgttcgtcgtggtggttgccggcaagacgccggccatcgatcgccaccgtgttccctcccccgctgattaatagagtcaatgcgtatactgtttgcagtggcagtagtgtggagacatgatgatgaattttagaagaaaggtaaggtggcccatcaggaaagcacatggatacttccttttccttcttcgttccacacgtgcgacagcctgtgaataactaacaactggacgaacgagtatgcgaaactgtataagggaacatggttaacgattcggttgcgcaggagaaaaaaaaaagaaaaaggagaaaagaattccatgtcatcgtccatgtggcgtgtcacataggcaagaccacggtcaaacgcggctttgaaccgagatgatacagtaaaccaagtttagagatctcgatgtgcacttagcaagttcgtaaacctgagtgaaacctcctaactagtttaagaactgctggtgtattttattttttttatggtgcgcccaaacttctcaaaattgtgactgaaaattaaccattgcctccatgaacattggtttgattaattttctagacttcgaggaatataatgagcctatgctgatgttgatt

SEQ ID NO: 31782 - DNA, 666 bp, Oryza sativa
cgtacacggtttctagcagtgagaggacttctggcgcacccgggaagggaagactcacacaaatgcattaagttataattatgtttaaattatcacatggcagtcctaccaatggcgacaccactatagagcccctgccttacacatcaagaagccactatgcatggatactgcctccgctcagctatttactccgctaggtctatccccatacgagaagtgtggttgtacggggtcgtttcatgcttaacttcatggctcggtccttaattgaccggggacgatactagtctttcccagataccacccaaatccaccgtccgccccagtctaaaatatgtatttaatttcattcctacttcctcaaatcatgtcattattatcatggcaatgtggagctcatgtctccacatgccgcatctcaattatcttcccaaagataattgccccaagcatatagcatttgataaaatatgagtatgcataaatctagagtagcatttctaagcaagtgtcataattgactaagtactcatacgtatttatggttacaaagatttaaaagtaaacaatattcaaggcatggcataatcacaagtagaatgttcatcattgcatgcaatcttatttgtaaacaaaataatttcgcaattgggatcaatatgt

SEQ ID NO: 31783 - DNA, 663 bp, Oryza sativa
attattttgaagaaatagtgcctggtggatttggatgataagatgaatgggataaacaaggagagagaggatgagctgctacttgtttaagagacttggacatgagcttaagaggaagagtagattagacaaacaaataaactattataactagttataactatgttgctcatttttccagttctaaaaatgacacatacaaagggattggaacgtagggatataaaccataggaatataaaacgtaggaattactgtaaaatatattggaatgcgagcgttaaacggacgaatgaaaaaacatgaaaaatctagatttttaaagtggtgtctggaatagaggaattctagaatatgtattaattacctagcactaatgatctctgttttacctgtgatgactgtccagtccaattaaacgttatcatgagataattgcttctgaaattatgttttatgtcctgtgttttgcttctgaaatggaggaaaggaaacctttcatctgttttggttttgcttcaattccttcgaaccaaacgcagctacatacattagttttcccttcaaggaactaataaatcctttgaaagcagctgctacggcagtttttcttccttttggagctctgcggtgccggagtgtcggtcagatcgatgaagccgt

SEQ ID NO: 31784 - DNA, 543 bp, Oryza sativa
gcacggatcctcattttacacatgaaggggagtccacaatgccattgcatgcatgtacgagtggggcctactcctctaaacttaatatgcttagtcttgtagtagtccctccaagccagctgaccagatgtgaaagccatgcctaccaactaacaagtggagagatgaatcaaaagtcttcgttccaattgtccacgggctacccataagcgaccgtagccaacaggggtggaacttggggatggttgctgtggacgcgccatgtcgcacgccttgtgttctccggggtaacgtgggcatgcaaggggttgcatgtgctaccacgtctcccaagttgtgtatgagttcacctcacaattaatgtaaagtggtggtttaaatgtgagcatcagacccgagcagctgtccttaatggggtgaacctcttcattgattgaacggagcgtcctcgggccctgagggattaaaagcttgtaaccggttggctgccgtgtgtcgggtcaccccgtgtccatagggtgggcaagtccttggggcacccct

SEQ ID NO: 31785 - DNA, 777 bp, Oryza sativa
agacaccaccggtaggagatcgccggagagcgccgccgcagagcgccatggccaccccaagagctctgtttcttcagaggaagattcgtgatggcagcgagaagaagcaattacctgcagcagcaggcgtcgtcagggtcaaggtcgtcctgacgaggaaacaagcggcgcggctcgtctccctcgccggcgaggggaggaggaggaggaccgccgcgcagcttgtccgcgagctgaggaggatggaggacggcgccggccgtgtcgatggctcgccggcgacggcgacggcgacggcgtggaggccagtgctcgagaccatctccgaggagtggtaataatgtcaaatgtattatgtataaataatgtgtgtttgtgcatgcttgtacagtgtgcatgcctgcatgttagttatgtagtaagattcttttttctttgtatggtttggtcgtcaatttaggttgggttcagaggtgaggtaaacagcacaatatctactatccctcccatatgtatgtacccagattcgtgagacatattacatggtaaattggtcatggacaggtggatataatgttcatcatgctgggagacggaaaaaataagaaacaagaggatatgttgtctacttgtctcgaagaatgaaaacactttcccatcacgctgtggtgctagctacggagtactaactagatactgtatttcccttctttctgtccttgaacttctgatttgttcttcatatgtcatcactactggagaaactatctttgggcg

SEQ ID NO: 31786 - DNA, 682 bp, Oryza sativa
gctttgaaatattgttacttggattattagtatttgtttttacgttttaccaactatagttcatattctatgccatatgttaaagaccaaaattattgtccataaacgaacatgaacaatgaataatgagtttattgtaacacaattcatccttaatgcttaatgaaaaaatatctgtattgtttgcatcctttaaattttgaactaattagtagggatgaaaacggctagaaatggttggaaacaatatcattattttattatatttatgcaaatggtttaaagtagtcatgaaatttctatattcatgaatttaagtaactaatgtcaactataatgtgacaccgacagaaataaaaaaactaaaatttaaaactgtaatggttgataaagatattattattttattagttttttgaaaacggtatcagtatagcctggacattttcactcgtactaattaggattactttagaacaaaagaattaagaaacacataaatatgataaattatacattcacatttcctctccaatcttacagaactgacaaaattaggaaacaattaattttctatggttgaaagaaaaaaaaatagatgatgtaaaaatagagagaaggaaggagataaccttaaggccccttttaaaatgtgtgaagatgataacatatgaatagaaaa

SEQ ID NO: 31787 - DNA, 560 bp, Oryza sativa
ctgcagcccggcgcctgcctgcgtttcgcactggccgcgctggtgctgattccctggatgtactgggtcggcggctttgcccagctgcggcactggagcccccagcgctggctgggcatgctggcagccggtgtcaccggcgtctttggctacgcggcgttctttctatcgggcctgcagcacctgccggccggcaaggcggccctggtgatcaccctgaatccggtcatgaccttgctgatggcggcctggctgttcaaggaacgcctgaaccccacaattgccatcggcatgctgctggccgtggtgggtgcggtggtcgtgatctcgcacgggcagccgctgggcatcctgcaaggcagcatcggcctgggcgagctactgattctgggctgcgtggtgtgctgggtgctgtacaccctgatcggccgctgggtgctgaccggcgtggacgccctgtccaccacggccgtcaccagcaccatcggcgccgccatgctgctggccgccagcctgatcgtcgaaggccccggcagcctgggcctggcctggcacagcga

SEQ ID NO: 31788 - DNA, 501 bp, Oryza sativa
atcatgattatttttgctggcattggtctctttaagcatgtgggatgtatatttgtgggtgtgagtgtggtgagcgtgcgtgtgtcttatcaataatgtaattttaaatttttttatataaactattttataattttttaagtaaatttcatgaaacctcacatgttatgatttaagttgcacaaaatcacaacggctctggtacatggcatataaccatagatattacggtcataagatttcaccaataaaaatagttaacttacctacaatatttaaatgatggattaaaagaattcatatatttcggaacttgtatgcatgtatggtagatcaaagaaaatttagttaatggtgtatataaaactaaatgtcatagtaccagcattacgtgcaagtgtgcaacatgccaaaactccaatagttttatgcaaattggatcataacatcgtggttacgtgaaatttactactatctctgtcttaaaatataacaacttaa

SEQ ID NO: 31789 - DNA, 570 bp, Oryza sativa
tatgtggcggtcaaatggagaaaaaatgataacatatcatactatccaccaaagtaaatgactacaaagatgaaggcaattgtctatagtattgaaaagtgaaaactttaggtacaaaaagtttgtcagaaagaagcattgataaatagcggatagatttatttttttgattatttcaatatagagctagtgttacgaggagaggatggagaaatagaggtttacacaaccagagtaatgatttagcatctctagtgatattaatatagagaaattttatagttaatatatcttgaggtacctaaatttattaaaaaaatttggtactccatatgttgaagtaccaaattttatataaaaaatacgataccttttggtactttctcaaggattgtaaaattacccttaatattaatagcacttggttgtgtgtgtaatgtgatactggctattagatacttcttccgtacttgtaaaggaagtcgttttggacagcgacacggtctccaaaacacaactttgacttctattttctataaaaatatttattgaaaagtgatatatgtatac

SEQ ID NO: 31790 - DNA, 731 bp, Oryza sativa
acttctagaaaaatataaaatagaataagcatgtaccttagggcctatttggcacagctccaactttaactccaggagaggtggagctggagctctgccaaatagtttcagctccaccgaaaatgagaacagagctgggtggagctctctcacaaaatgaactagagaggtggagctgggtttaggcagctccacaactccactccagaccagtggcggacgcaggattaaaataaagatggtgcgaagatgctcgtctcaataagaacaactaaacgcaaaaaataccatatttatgttgtaatcatataaacatatagtacaattaataaattaagacaaactaaaaacaaaaatgatattaaaataaagaaataatttttgcgccatacataattcatcatacataaaaagatactagtaaacatatcaatttacaaatatgagtcaattcataaagcatggttgatagatatcttctaaaaaataaatatatgagaagatatcgcatacctagaataagatgattattattttgcttagaagggagagagagaaaaacattaggcacctaactatagtaggggacgggggtgagcagtgtcgaggaattgactcaagaaagcatcatatacgcaagattaaaattggacactttagctgcttatttatgggccaattgtgaattggatgtggtggtaggcggcccaagaaggatatagagggttggg

SEQ ID NO: 31791 - DNA, 690 bp, Oryza sativa
atgagcaagagagggtcgtattcaacgagctatagtcagccgccgattgttatgatcgatcggaccgactggactgactgatctagctagctttgtatacgacgaagttaattaattacgcacgcaatctcatcactgatcatccaatcgatattagagagttagctagccctactggagaagtgatctttaccgggtcatgcaaaaatcacgttagttccgtttcaaataagaaccgggactaaagatcatttgtagtcccagttaaaaacttcaacgggactttatgatctttaatctcggttggtgttacgatcggtattgataatacattagttttgatataaacatgcgtgagtatacttttcatataaactagttgaatatccatactttactgcatactaaaagaaaatatattataatattatctaaaatacataaaaatatatttcttacgaaatatgtactgcctatctttttgttacggggaatattcgtcttatttaattttacatgcggctatacattaagatttgtttgtttcttgatattaaaaattttaaggaataattaataaaatacaaatgggtaggtaaggtggcacgatgagggtatttgcaaaaaataaattcgtgaccttagtaaacactcttttataagaagatattgatagtggcagtaaatctg

SEQ ID NO: 31792 - DNA, 2250 bp, Oryza sativa
caagccgggccgcgggaggggaaggagagaggattttgggccgagcccgaaagggaggaaggggaagtttattttgttttctttttatttaaattgatgcaatgacctttgtgctattaaaactatttctcgagctccgaaaattcacggaaaattccggagagtacattagggcacaaagaatattacaaaatattcccggccaatgatttttaagggaaaattttaattctcccaacatttcacttggataaattgatttaacttttatttaatttctagaaaatgtattattaattgatttttaaacccgaacgaaaatcggggcgttacaaatctaccccccttacaggaatctcgtcccgagattctgggatggctagaaagaaagccggtgctggtgggcggtctgactgatctgcacattgaactgccacattctgcttcgaactgattgattgactggttgatcaaacctgcacgattgcactggctggattcgacctttctgttcctttgctttgccaaaactggaccgactggttctgcttgaactgacctaggccagaactgcggatactcctgaaacttacttatcttggactgaactgttgaggttggcaattttggtaacctgagaattcaccacgctggctataagaggatgaaaattgaatctggcatttgtaaatcatttaccctatgtccgcttggactggtcccaactcaaatgacaagtaaatccaggaaacctgcttgacctgtctaagctaagcggttgaactggcctcatgggtgtaccttagaattcaatcggttgcccggggatcggcttaattcttctgataccttgcaacttgcttcttcaagtgctaccctgattgcggcactggttgaaccttcaactaaaacagcgacgaagtgaggcaaaactcttctccgagacctaccccccttacagggagtagtcttacttccgcgtggctgggatcagttgaactgttgtccttcaaatatagccaacacttctctgatttacaaagagccctgactttgaaaactgaaaacttcatcggtccatcaaattgaagcaatggcgatgcactttcaccccgacaagatttggaacttaacccttagttgatgataggaaattccacataaaagtgactctcatttagctcatggacacactgactcttgactgcaacacactactgctggagttctttccgctacacttgaccttgcatcgagctttgcatctcccgcatcaatacatccatcatctaatcttggacaccaaatgttgatcacgagcagggttcttctggcactgggataccttgtagctttcaactgaaccattgattggtgactttaattgatcttatctctgacactgaccatccgctgccaggacggaagagaggtggaagagaggggttgctaaagataaggtactaaaccacttgcctactgttatgttgtgagtagacttttattgttcaagttgcttaagcaaacaacctagtatggtcgcatccccaccaatgatgcaaaccatacccctacacacaagcaaacaacacacgatctagaaagctaacggaactactcttctgggaaagattgggtttaggtcaacttcgggaaaactccacttgatcttcgcagaacgacgactctgaactgatcttctcgctccttgcacgaagcttgaggctcgaattgacttgacttccgaacagacatgaagctgacagctggtcctctaggtttgacaactaaaagaattggagagattgggaggagaattttgaaaaaccgtttcacaaagaaatgccgaagggcgagaggagacaatttgcaagtagggttttcagaaaacttgtccttacggtttgaccatttggctcaacctacagtcaagttggctctgataccactttgtcacgcccagaaatttagcccaaatttccagactattttgtgtattaaatccctgtccaggaccagccagggtacacaaaacgacaagtaataaacagttccaaacgtaaataaagcgtaaaatacttacagaagaggcacttagtcctcacaccgaaacaaaagcagcagcagcggaaaaaggcgatcctagcggggcttcagctccactccacaggccaaactcaactggggtctgagccttggtcctctaactccatcttcagctcagaagcactacacttctgaaaaggggga

SEQ ID NO: 31793 - DNA, 514 bp, Oryza sativa
cattactgcccaaggtgtggtgagcctaattgttaggccatctgcatgatggatgatagtgggtttatggcaattattcgagggcattatgaataaattgaatgttacaaagttgaaaaggtgtactaaaaagtactccctccatctattttgatagtcatattttcaaatttgaaaaatttatttttgataggcatatttcaattcacacatttaatgcatgactatctattcttccacatatggttggctacatgagtattgagaaatataaatattaatgaatcgtttgtttacgagaaatgactagtagcatgtttaaatagatgataaatagaattatttatccttagtctgtgtgtcaagataaaatatgactattaaaagtagatggagaaagtattatataacaaaaagatgatgaaaaaaatgtttatcgaaaaatcgtaccatttaagagctcgggaaacgtgcacgggataattcataatccatcggccataccgaacttgct

SEQ ID NO: 31794 - DNA, 622 bp, Oryza sativa
cccctctacagcatgttcgccacctacttctttattgtcattgtgattctaaaaatcgaacataactatcgttggaattcattttttattttctagaagtcccgtcaaccgtcggtggctctgcaactatactcttatacaccccgctcgctgcttctcctttttattatcattgagattttaaaaatcgaatacgattatcaatacgatttgtttttttactgtctaagaagttccggcaaccgccttactcgtttgcttcacggcctgcctgacgtccctcctttttaatcgtcagtaggattctatttgatgttttattaacaatttttatatgtcgtatcaaccgccaccactctactcttttataggcctgttacttaatttatttttattccaaattttaattaatctcgtattgggttcttatatgaactcttcttttaatgtttcttatttttaatactgaatttcagttatttttaaattgtattcctacttggactcttatttccttttctaattttggattttattttatttttatttccaattttgattaatctcgtattgggttcttacatggaaacttctttcaatattgattatttttaattccgaa

SEQ ID NO: 31795 - DNA, 689 bp, Oryza sativa
aagggtgctctaaaaaaaaggagcaaaaggatcaggcagacaggtttcgggctacttgtcatatttgtatactatattgcatagtccaaatggatgcttacatacctacattttcttagtgcactattaggacatcaaaattgagagcaagtcaacaaacacagatgaatttaagaagtaatgaggtattacatattctcaatccgtggaatttttttaactgtcacgatgcaaagagaagagggccaaagacacttaacaacgagtaagggagagacaaacattgtgaaatcatgaaacaatgttgaggacagcaattcatgaattactctataaagcaaacaaatataaatgttaaagccaattatttacctccaaatctcctggttgatgcatgagtggttacagcccctggcagtgagcacgtgacaagtgttgacatggaggacacttttaagatctacaatcaagcaacataacattgtcacatatgaaaagaaatgaaatgccatgccaaatgattgcaaaatgaaataactatttactacagagtgcataaatacatggcatctcaaacctgatttgactgcttgagaaacaacacagtatgctcagggataatgttatcatgcatataaaaataatacttcctccgtttcatattataagactttctagcattacccaca

SEQ ID NO: 31796 - DNA, 1118 bp, Oryza sativa
ctaggtatgcgatatcttctcatatatttattttttagaagatatctatcaaccatgctttatgaattgactcatatttgtaaattgatatgtttactagtatctttttatgtatgatgaattatgtatggcgcaaaaattatttctttattttaatatcatttttgtttttagtttgtcttaatttattaattgtactatatgtttatatgattacaacataaatatggtattttttgcgtttagttgttcttattgagacgagcatcttcgcaccatctttattttaatcctgcgtccgccactggtctggagtggagttgtggagctgcctaaacccagctccacctctctagttcattttgtgagagagctccacccagctctgttctcattttcggtggagctgaaactatttggcagagctccagctccacctctcctggagttaaagttggagctgtgccaaataggccctaaggtacatgcttattctattttatatttttctagaagtaatcagaaaacaaattttaccttcatccataacaaatgattgtggtggggactctgcatcatggaggttgcgtgatgatgatggattttaccatggaagaagccctagaatttgggtattgcgtcgcgatggattcaagacatggtgtatcccgtctagctgcatggcttgcatttcatcaatctagcggtgctttcctctcatttggcgataaactttgcctagctgatcttctacaggtatatatttaagtcttgcctctcatcatgtgtcatacgttgcctacaagctctttggtgaacactttcttttcccctctcactcagtgttgcattttgtcacgttgctctttgaggatctagctttgcttgcctttgtcctggtgtaagtctagcatagcaagccgcttcaaaaaatattttcgtgctaaataaattcattgaataattttaaaattttaattttgaactatatatgtcattagaaaaagaaaactcctggttttaagtcgatactatttgagctttcttcctgttccaaaacttaaaccgatgtaagggtacaatttgtaggattgtatctttttcaaaacaatttatta

SEQ ID NO: 31797 - DNA, 624 bp, Oryza sativa
tcctgcacccccgtcagcgattaccgcgcgctcgccgggctgatccgagcgcggtgaggggaaaggtgctgccgaaggcgggcaagggctgtcatcctgccccgcctaagcttgaaatagaaagaccattccgttgacgggaagcgactaaacacgcattttagtgatgtcgacggcccaggaccaggccgtcgaccgcggtgatttgatgagcgtcgcttgcgccgcgaaaccaaacgctaaagcaccacgaagcccgcgcgccgtcatggaaggcgagccggcttcatggtccttcattgtcaggaggactttttatgaccctgtccctcgtagcagaacggaagccccgaacctgcgtgccctccttggcacgtggctgctgtcgacgctgagcgccgtcctcaccgttcgatcagccatccgccggcctccgcgccggccatcgggagttcctcgtcagatgtccaatccacagagcatcgccttcgctgcggcgaacgcgcatccgcacgccgtgccggccccgtcccgcatcatcgagatcggcgagatcgccgccgggatcgcagtgccggaggggcggggcgtgcgcttcttctcctcggcccgcaccttcgacag

SEQ ID NO: 31798 - DNA, 880 bp, Oryza sativa
atcatttactctcatggattgtattgtggcatggactcttatgttaatatgtttggtcttacttttatttctattccaaaatttagttatatagggattttactatataatttgtaatgaaatgaaatatagttgatttttttatttgtttttattacgaataatattattttcatgtcattttacagtattgatattttaaatatttttagtcctataaattctactagtatttataaaatgtattttttaaaatggtctcttcttaatatgtatttgccaaggacacttctttacatatttattaattaatatttttgtttcattgggagttttacctgtcctttaatttcacttagatattcttattgaattaaatgatgattttattttattcttttactctaaaagtggtattgtgttccacatacgttcttattttaatattctatattctatattgtaaattccaaatttcagaatttttatagtgtatctctatgcgaattcgttggtttagtgtagactattataatctgtacccatactacaatcaacggtgtatgatcttccttttctatgattagcgtagtaatttctaaacctccaaagcattactatgaaatggctcatttttcttctatctgaacaatataatctaagcagacactactatcaacgccatatatagagtatagacctttgtctttcgtcatatttttgtactccctccgtttcaaaatgtttgacaccgttgactttttagtacgtgtttgaccattcgtcttattcaaaaaaaattaagtaattatttattcttttcatatcatttgattcattgttaaatatactttcatgtacacatatagttttacatatt

SEQ ID NO: 31799 - DNA, 503 bp, Oryza sativa
aattccttgtatgtccttccctttcttcacatccaccgccgacgtatcttctttggactctatctataaacaacaaaattaccctttttatcagactgaacaaaacaactataattcagaagatgcatgcccaaatcatctaaaaacaacactagctgctggtagagccagaagcaaactaataaagcaaaacctgcattgaattagacaaagatccattcctgcgctgaagtctgcacatacctactctaatatcatgatatccgcatgtcacaactcacaaaagcagttaggagcaactgcgacttgtactagcattttctctattcttttgtgaaaaaatgaaaaggaaaagaacagcactttttttagataatctgtcagatggcgcaagcaactcgtgcagagcttacaggttgtccgtactcgtcggcgtcgaagtcggagtcgcccatcagatcaacctggcggtcttcctgctccgccgcgcgatacccagaccg

SEQ ID NO: 31800 - DNA, 3338 bp, Oryza sativa
ccatcgatatgatccagtccgcctcttgtcccgccgtgcaaccacaacactatgtatgcatcacaccagcagtcccttgttctctggctactatttccaattaaatggcctcactgtttggagtttatggtttataccttgaacccactctgtctgcccgtctgcccggatcatatatatcatgacatctcgtacgtatcctcttctactacctcattgtctccaccccccccccccccactgtcctctcttgccctccaaacattgcatggatatatacatcacttaattgatcgtcaagacgtcaatggtgaatgtttttctattagtacataattccactattccataaaaaaaaactcaatctaaaaggggatgtggtttctcctagtacaatgaatttccaaaaaaaattaatccaggaggaatgtgacccctcctaatacaatgaatttggatagagagttgagtttttttctggaacgaagggagtatatatctatgtgcttgttaattgctctacacttccgtggcactgataggcgagccactccgtattctacgggtaaatttgatttctttttttttctacatagggttagcggaggtcaactagtggtcaaccgatgacgatagatggcaaagaaagaaagaaaaaaacgcttcatggcatttcgtataactcacgtttctcaattcgtacaactgatcatttgtcaattgcaaaacatagaactaatctctaggccatgtgatcaagttttgcatatacataatttagaaacttttatactactatgtaacttgtatttttcacacaggactaatggatcgatctcccttggtgcattcgggtgaggccggattatatatgtacaggggatcgcaccgatggctaatcaattggaacagtagccggcggttggacagggccactacctagctgactgctcgctctgcacgcagagagagagaggatacactgtgatgcacagctctcacacttaatctgacgcctcccctccatcacccatatgcatcgatcggagatggaatggaccgcgacactacgctacacgacgacgccaatgtacaagcacagtgtacgtattcaatgccaatctaactactacaaacacctgcaactcctctttcttttttctcactatatccttcaggtggtgtcgatccatggatgaaatcaatgcatcatatgcatggatagatactactatatatcgatcgaagacgacgacactgaatggcttgctctctgtctctctccatatgatgatgatgaccaatgccgaggtcgagacatgtaagaccaaacgctgcactggagagcatttgcatcccatgtcgctgcatctgcgaggcaagtttaatttgctactagtagctatagccttcagtttggttttggctctgcatgcatggatggattccattgattgacagagagagtgtggtggtggtagtagtatatagtacttgctagcgacaatgatcgtgcatgatgcattcatgcgatatcgaccggcaatatcgcatgcatgcagtagttttcataggcatgagcacagtgcgatggcttaggtaatcacagtgtcaagctgcaggggagagagaggtgtgtgcatcttgcgtttgctatagtgttgcatcaatgagctagctagctgtatgcatgagatgtatatcatgtggtgcctttgatcattgctgctgctgctgctagctgctaagcaattgaatctttcgatttggattctcagaagaatcgatcgatcgagaccgagaatatatacacgctagctactgtgtggttgtgcatacatatgcatgcatgcaccctagattacaaaaaacctggccggcttaatttcatttgccaggaggcactagtacgtatcatgattcatgactgatgatgcaatcgtcgtcctcgaataatgttatggtatagtagaagctagcagtgtgtgcagcggcgtgcatgcagcaaaatcggtggttaatcattaatgcatttctcttctatttcaagggtaggaaaggttgatgcgtgaggaggtaccaccttttctattataaatttggtactttttgatacctactccctcagtcataaaaaaaggcaaaccctaggtttccgtgtgaacgtttgactgtccgtcttatatgaaatttttttataattagtattttcattgttgttagatgataaaacatgattaatactttgtgcgtgacttatctttttaattttgtttcataatttttttaaataagatggacggtcaaatgttggacacggaaaccagggtttatcttttttttgggacggaggaagtaggtactatgaggtatcaaattttaccctaaatttttaataccccatgatatcttcgtaaagaccgtaaaattgctcgtatttttaaaggcagctaaaatgcatttgcaaaggtggttcggacgacagcctctaacaaaaggcgtggaaaatgatgcattttcacacatggaaaatgtaggtgctcgtgttagacaaccatatgtgtaaatgatttttcattggtgacgtcaacccattatggtagcttctttagaaaaagaaggtacggcttgatgcacatgcagttgctctctgcagtctgcacttgcgttgcccccattgtcaatttcaaaagtcaaatgaattggcatatctttacatactcctccataaaaaaaaactcaatctggacaacgaatcagggcaagaggttgcctagattcgttgtaggtcacaccctatctagattggatttttttttttgaagagagggagcacataggaagaaaatcattgcccccaaccctatcggttcgaaattcacatatagaatatcataaattgaatagcaaaaagggtttcaaatataaaatctcacaaaattggacagctaaaaggggaagaacatgggtaaaaaaaacaacaaacgagctcagcctcggtcttcccaccatctcgagacctcggctacgcagatgttccagcagctctcaaatctgtgagaaaagaggagaattgtgggacaacaaaaagaatagagaaaggatgaatcgagattcattcagagtctcagtcatgacagcgaggcaatgagcaggtgcgtatctgtggttgtggttcggcaacaaataggtattgcatcaactacatgactgacgagtgctaatgcaggtgatggtgccaacagaggagttgcaggggtccatcgtctagtttaggatgatggtgccaacaaaggagtcagcgatcttcgcgcgtgcgcgtgtgagggagagagaga

SEQ ID NO: 31801 - DNA, 719 bp, Oryza sativa
tagtataattatcttcttatgtacatttgagtttaggaatgccgtactattaagagggatgcaacgtcgaggtgtttgtgtatgtctcggtgctcaaagtgacctatcatagtgctaccttgagagaaacccaagctttaacctatcctttgagtggttttagaccttgtttttcgttgacttgggtagtcctctgagtgagctttccatagagtctaagttcataaaaaaacggactcccgagcgaaaagttatagtcgttttactctgtgcttttcggaaagtccgaaaaattaccggaaactccgataatttttcggacaacttcgaaaatttccggacattccgaaaatggctgcgaatctgagatttgcttctgtaagttttcgaacttgtccgaaaatgcttttcggaaactccgaaaattacagtcttggcctccaacggctagtttttgaggggctcgggtatataaactcctccacccctcctttgagttgctgctgctcttggggagtattagacacatccaaagccaaatagcatccccatttccctacctttgtggtgcctctttgtgagggggatttgagaaggggagagagttggattgagagagtgaggagttgagagctagtgagcttcactccatcctttgtggtgcctctttgtgagaaggatttgagaagggaaaagagttggattggggctgcaggaat

SEQ ID NO: 31802 - DNA, 591 bp, Oryza sativa
  unsure (1)..(591): unsure at all n locations
tattgcaaagaacacggcctaggttcgttggtcagcaaaactaatttggaaccaaacatttagtacaatctagaaactatcaaattggaaattggcaatgccaatgatttggttgcaaaccaaaaccacatgtgcactattcaactactaaaagtattttggtaggacatgttttggcatatcaacaaaataatttagccaattgcaacacacggggacacagacaaccaaacgagatcagaatgcagacgtggtaatttatatcaannaaaattttntttttnncccccaaaaaaaaaaaatttttttnccccaaaatttttgggggnnaaacaaaacttatattaatgtatggacttgcagaattgcacaaacgcaaaaggaaacaaaaaaaggggcaaggaattgtgctttgcttcactgcttggcaaggggcaaggcgacggaatcaatcccggggaccatatgctgaagggccagaaaagagggcacaagatgtcaagcttgttccgacttccgagaggaacttcgtacaacaaaatggaagtatatacgcctatcatgtacacatggatctatgaggtatataca

SEQ ID NO: 31803 - DNA, 1487 bp, Oryza sativa
atgtgacatgggtcctatgtatccatcacatgtaaatttcctttataggcagactgtgggtacaagtagtgtgtacaacaatattcaaatgcaaatagccctaaaaaaccaaacatattatacaaagatcagtataaattcttttttttccaactagaaaggcactagggtatatagtcgcatggagttatggatgcatgactccacacctatcctaggaattaaaattatgtatacgcaaacatgtttcccaaaaaaaagatcataaatttttcactgatccattctctttagtttgtggtccccatcggttggccatgtgctaataatatgtgtgctctacagcgtattagcaaaaacataataatttgtgggtaaaacttttatatatgtatcatcagtgatttaaaagtaaatgttgaaaaataaatttcgatgaaagaactttaaattcaacttttaaaattcaaatgctggcagcagttggttctatacgtatatatagggcaaatgatttggggtgggggagttgtaaatgtgttggtgtgtgcatgtgatgtgctggtatcggcccgagcgtattctacgtatgtgatcatagaaatattataatttccgttaacacacggagtactctcaacgaaatttgggaaaatccaaatgacccctgtacgtcacaaagtctttttacaccccatctacaactcactttgatacaaaatatcccttacaagttcaatttctctttcaagttcatcgtttgctcagattcgcatgccatgtgggcgtccaacatggagaaatggaattgccccatcccatcatgacaagggtgggttcctcaggccttccacaagcgttgcggcagtgatggcaaaccttgacaccctgccttccacgagcaccgcggtggtgatggcaaaccacgatacaaaacacaacatggctatttgaaacatctacaactcagtgtgatccctagttgactaggaggtgcgtaggcttccttgttgtatcgcgcatgaggtaacttcgcctcatcatgctggaagcccagatgacacaagaagttaagctaagagcaggtacaatagcagactattagctagctgcaaacatattttaatgagataaaaaatgagagagaagagcagcgggctacagatctatagccagctgcagcacggactttaagacgcaatgtgtatatgacaggtgggaccatatattaatagtatagtaagcaactattgtatggattgactataaatgaattggagccagtagtgggctatactattaaatttgctctaatagtgatagtacatcgttgaaaggtagagggggatcaggaaattaaaagtggcattgaacttgtagggtgagaccaggaaactaaaagaggcattgaacttgcagggtgtctagtacgaaagtggcttttagggggaagattagaaaggctagtgatttatatagggatattt

SEQ ID NO: 31804 - DNA, 2679 bp, Oryza sativa
ggttaccaatttgtagtccgctactactcttcgatatatcttcttttttatcttctcgatatgtgtttatagatggcttatagtccactattgtgtaccgtacctgctcttagagcaagtttaatatatagtccactactagctccaaatcatttatagtcaatgtaatagccaattcatacaatagttacttactatactattaatatctggttccacctgtcttacactcattgcgtcttggagtccgtgctgcagctggctacagatccgtagcccgctacttttctctctcttcctttatctttttaaaatatatttataggtagtttatagcctgctattgtacctgctgtaattagcaagatttactataggagtaatttgcatgcatgggattagcacgtcgcacactccgaggcggaatgggggtaggcggcagatcgatcgatcacacaacatgcggatcgatgtgtgtgatcgatcggaagctagggcgcgcgcgcggcacgcgatgcgagggtgcgcgtgcgcgtacgacgtcgtcggctcgacggcgtacgtcgcgttccccggcagcgcggccgcgccacggcccgaccgcgcgccgcggcgtccgaggcgggtgccggtggagggcgcggccgacgcgccacgccccgaagcggattacgccgcggctgtcgcttgcagcccgcaggcaggggcagggcagggcagacgagcggcacgcacggtgcaggtgcaggtgcaggtgcgtaaatcgatcgatcatgcaaaccatgtaatgtctggaagtgaaaagcttagttagtctcgttgtttgcggaattgtttattcatatgcctgcgtttcttttgcatgctttgtttggctttgtccatttccgttgaaccgtttcttggttggttcctagctagctaatactacacggctggctggacaaaccgctagtaggagtaatataatatagtacaggtgttactctaactatggactaaaactaaattaaattagttcgaatttaatttgatttaatttcccacacaagcttcatagcaacatactgaaacaaattgttgtttgaaataactattatgcatgttctgggaaaacatttgaaaagccagtcgggaccagggtttcccaaaccgtcggggctggggttaccgcaccccgacggtaagcacggttaccgcgcggtaaccataaaaaaccgtgcaaaatttatcaaaaattcaaataatttttttaaatttatttgtatttaaggatattaccgtggtatttatattaccgtaccccgcggtatgccggtaactgtgcggttaccggcggtaacataaaccctggtcgggacatcttgaattcgttcatgctataaacaaaatggtgatggaagccatacatttataaaacagagaaagtagtttattgccaaatcatttttcggtgcttgaaataatttgttaaatacacaatgaaaataattttttgcagacctggaaggaaattacaggtacaagtatctctagagtgttaattttccatgttccatcaatacatatatgcactcggaaaaggctcaaaaaaatattctctgccataaatggcgggaaacaatgaaaaaacaacatttcatcacaaatacatgtttttagagaatattattgatgtcctcatcagcatttgatcaatattttaaaacatggagtacacgaatgtcttcttaaatattagagcaatttcaattatatgatttggctaaactatcacaaaaaagatatagttagccttgagcttatcacaaaactaccagcgcaaaatttaaggcacggtatcacaaaactacaaatttagtgttaattttaattcaaaactacaatatttatatttatatatatagctctaaattatgttttttttctgataactttattactaaatctgtacatttgtaataaatcgacttgaatataagtttttttaacagtttaatgaaagcaaatatacatagttttgttaaattactctagatattagttctcagaaaggatacatgaaattacttatatatggctaggttcatctctaaaatattcccataatattagacatataattgtgttatttataacttacaatagaaaaatggatatattgaagctgtatttatttggaacataactagcgccgatgccaaaataaaacgacgtgtattttttaattgtatcagataaagtaactttacttataggataattttaatattcttgagaaagtaaagtaaagtatacttttaccgtccttgagaatatagtaaaatattatatttttatataaaacttagtaaatatatacttcgtacctccaaacactttctcaattgccgtaaaatttcagtaaagtgtaaggtttgcattgcatgtactgtatgatatatctggtctcatgatgaagatggagccccatatggtgtggtcatcagcctgcacataatactctccatacaacatctcatctggtaaagcttaggattccccttagcagagtgcaaccgtcagaagaacaatactaccactcttccggagacggattctaatagctcaagtggacgtccacccatttattgcatgtcaactaaatggttaaaaaaaattttcaaaaaaaaattgaca

SEQ ID NO: 31805 - DNA, 666 bp, Oryza sativa
  unsure (1)..(666): unsure at all n locations
ttaagtaattattaattattttcctatcatttgattcattgttaaatatatttttatgtaggcatataattttacatatttcacaaaagtttttgaacaagacgaatggtcaaacatatgntaaaaagtcgacggtgtcaaacattttgaaacggagggagtagttattttacaattacacttaggctgtgtttagttcacactgaagtttgaaagtttgattgaaattggtacgatgtgatagaaaaattgtgtgtgtatgaaatgtttgatgtgatggaaagttgaaagtttagaaaaaaaaactttagaactaaacagggccttacatgctagatttttggaagaaagttttaagacaaagctagcaactgctcgcgcggcggctgcgggcgggagcccacaccgtggcgcgcatcaaactcgcccgctaggatcttgcgtcggcgcgccgttggacacttggacttggaagactcagctagcagctggccgatggagagctggtcgctggctacttggctagctagccaatctctccctcctacttgcaagctgcctcctccgacatggaattttcctgagcgagaagacgaattgaaagggggaagcttgatacttgatgggcactgggatgggatgttctgccgatcgggctgcaggaat

SEQ ID NO: 31806 - DNA, 667 bp, Oryza sativa
tttagtgctttatgctaaagacggagttaaaagaccaaggtttatacctcagttgcgttttacttgtggagtggaggtgaagttccagtaggatcgtcctttttcactgttgctttgttttttctttatgaggactaagtatttattctgtaagtatttacgtttgaatatgtatattaatttgtcattttgtgtatcctagtttgattcctggacatagatttatacacagaatagtatgagaattggtgaaatttttgggcgcgacaatgaactacgtgccaaaagttgggaaacccggcttttccatattttttaaacctaactacgaaccaaccgttcctccgaattttaagctctccaaaacgggacaaaagtctatttcactatacattagagaaaccaccatgatgctatttttggttcagaagtctcacataggctcggatggtctcacatccttccaccaattgaaattcttagcccaaataatgcaccacctaaaattgaattgaaccccagaaccaaaacaaaggtcccaatgattgggaatggtagggaagatgcaagatccatggtccaatcagaccaagcaaaccatcattgagcaatgttcactgcactgtgtgcgagtggatcccatcaagatctcgctcgttcgctcgtt

SEQ ID NO: 31807 - DNA, 749 bp, Oryza sativa
  unsure (1)..(749): unsure at all n locations
ggttaaattagttcatgcttggggtccttcaaatcccaacagaggaacatgcattcctctcatgctctcatttatgttggtcgttattgggccgcaaatgtcaggccttagcctttcacagctttacagcccgaggcggtagagctgggaattgggagagtttccnnnnnnnnnnnnnnnnnnnnnnnnnnngatatgcagaacaagcagtaacagtctatgatctctccaattgcggcggcttttggccctggaactgaaacaactgttgacgataaattttgtcaactttcaggttagccatatgcctagagaatgtaatagagtacatttaatttctagcacgagcaagatgaaaaaagagggaagaaagtgctaggaatactagcaaatgatttcgcaagatcaaaacaaccatcagaagaagaacacacgctaaagcagaacatatttgttgggtactgtggtgctctacaattatttgaaatgattgcaagtgcatatttgttgggtacttttttgtggtgctgtctgcagcagggccagcagcaaccgaagatccatgggcatattcaactcaaaaaattatgttaagacttaagaaccacccggcctttttaaattgtgttcctcatcatcaataattatcaacgttctaggcctccaaccatttttttttaaaaaataaataggcaggaggatttcattttacatattattaaatagaggagaggaaaaggacagagcag

SEQ ID NO: 31808 - DNA, 606 bp, Oryza sativa
tacaactgaaagaccagatcagcaccaaaatttggtgcaacaagcagcatctggagggtgacactctgacagggaggttcctctgcaacagagctataacatgagaaaagtgcttcttgatcttcagagaatcacacagcagtgagtaataagcattggcatagtcagaggcaacttcaagccttcaagccaagaatatacttgaattccgacaataggtcagggaaattacaatttacaaggataagcacactggcaaaaggtaatagaagtactaaagcttctgacccaatgtgtcacctattgatttacctaactatccaggagtcaagtcaagtctgaacagctaatgagctagtcactctccatttctccagcaaagcatacctataactttcagtgctccccggatggatcttggttcatgcaaaatgctaggaccggctgaaatcttcagactttcagataagctggctaaccaatttcagactacaagcatagcataggggtgatagggtcagagtaatgcgaggtagctttcactgctgaagctgaatgagcaagtcactcttcaacaaagcatacctacaattttcagtactacca

SEQ ID NO: 31809 - DNA, 1230 bp, Oryza sativa
tacctaactattactatcatgtatgttagtgtacttgttagggaagcaaccatgagttaggagacatacgtaatttgttggactgttgggtgtgtgtggtgtatttttgtggctagagttaatttggatttttattattttagttctttaaaaaaattaaaatttctcattgatttttttggcattaagataattttataaaaccatgaaaatagtgaattcattcatctgtctattaccatgttttaacgattggagagcacatattaacatgaatgcattttgcacttagtacctccattgttttttttttgggatcgaaatacatcacgtaataacacctaggaacgtacgcaacatcattttcaacttttaagacccctttctccaataattgaaaaattaaacatgaaccaacctattgaacttctatgtatgtcaccatcatcgcatctcccttttaacctactccctatgtttcacattataaattgttttcggctagtcaaaattattctaatctaattaagtttataggataaaacgtaaaagcatttttaaaacaaagcaaacatataaaaatatagtaaatgatagatttaatgaaaacaaattttgtattataaatgttgctaatttttttataaacttgactaaatgttaaaaagtttgacttaagataaactctaaatggcttatgatgtgaaacctggatagtaagtccatatagataggctctggccatattggtgcatgtcaccctccaaagtaaaatcttcatttatctggccccaacggccgctcaatactttagaccaaccaaatcatttccttccatctcacggtaacaaaatgaatgatgtttttattgtctcttcatctttgcacattaaaaaagtgaaaactttataacatcattactggtaagcattacgcaacatggcactgacttcttgtctgaatgtacacaagcaacagcttgtttttataggacaaaatgacaacatattgccctgttggaacttagatgtacatttgtcatgtaaggataatattaaaatgaaatctgttgataggaaaagtgaaattttctttctaccactacctaatatgtggtcctacctatgtatacgtaagattggcacaagtaaatttggtatggaaaattgtattattatacttttattaatccctccggtttttttagtacgacgtcatgaatgttggata

SEQ ID NO: 31810 - DNA, 3289 bp, Oryza sativa
tggagcaaagaccttcgctagtttcatagtattaaggcatttccaattgataacactaaataagtaagttgctacctagaaaaaaaaatgatgtggcaagtgaataaatgaggaaagaaaaaaaaatcatgtcttgtatgagacatggtttctacacaacatccaagacatcatgtgagagaagtagcattaaattgaagtatggaatagtggtgtttgcattggaagagtagtgtctagtactagtttcttgatgatgtggagtttatggaaaccatgtctattgttatgggttgggactgcccttactaacgagtaacaaaatactccctccatattattttaatatatgacgccgttaactttttaaccaacgtttgaccattcgtcttattcaatttttttatgcaaatacaaaaatacttatgtcatgcttaaataacattcgataataaatcaagtcacaataaaataaattataattacataatttttttgaataagacgaaaggtcaaacgtttgttaaaaagtcaacggcgtcatacattaaaatacggagggagtacttatttgttggatctcataatatggcaagatgaggggaaggttttagatgaagaagataataacccccacataacaaatgtacacaaccaaagaattaaatcatatcatatgaagatttcaaagcgagacaaaaacccttgaagtgcctataaaaagagttggttaagctctaaatttgatataggtgctcgcatttatactaattattcattcagtggtactcgtaaatagcaaattgtctgtgatgacttcgttaatctcaaaatatgttgggctagttttttaaatgtgcttataagggtagggtgtgttcataatgtgagtaaacgctcacgtttgtactgcatttttttttaaaaaaaagagttgtagcttgtacaagtcatagcctgattttcataggaatttaactagttcctgtgagattcgcattcccatggagtcctcaattttgaagtttataacatagtttatacccataccttaagattgtttttttgtttattacgtgaatctagcgcatcatccaaactgtttttttttaaaaaaaaaaactgtgaagggtcagctccaaatgtttggccttcagttaccctcttgccatatgttgtgaaaatgcttttatgttattagttcataagcatcggagtgaaataaacacttgtccaccatacttttaattccctgacctaaaggtcatattaattcgcatgatatagtgagtacacaatttatgtgcttttgtctccacaggaagagcatgaccctgcaggggtaggtgacgtacccaaaaagaatggcccaacacattgtactagtactacacagatcactgtcatgaatgttttaaattggccagtcgagaacttaaaccaacttttcagatttaaaatcgatgtaaaaatgaaacaattcttcagatcaagatgtatccgtgaattctacagtagcacagtttcaggtgtctgaactctgaattgaccccaaaacggcacaaaacaacagaacaaaccatgaacacatcatctgaaagatcccccaaatcacaatgatattgccaaaaacaaaaagggcaatgtattttctaccaaaccatctgtaacattttggagtggattccagtgcaagcatacatgtgggatggagatatcagcaatcggcatcaggacagtgcagagaacatggttgttggcgagtcatcccaacgccaagactcccccagcctttctgtccctggccataatgccaagaacactacattgcaatgcacatagtgacagtacctgattatatgtgggcatgcaacacgccatgatgccaatttgccaatcaagatttgtcatatgtgcctctattatcatcatctcacattctgtgtgattgtgtgcgtgtgaactgtgaagtgttgcagtgaattgttgccatggggggacagagtgagcaaaaatgcaccatataatgcattggatcctattgggtttccaccccacatggagaactctgaactctagaacatctgtacaggagtacaggacagcatgcagacatggaaagctgatcactttgtgtatgtgtcttgatgttaattagcagaacagaaaatactgatgaatcatgtacacatgggagtacatggtagggatcactggcttggtcaagctctgcaaaatcatccaaaaaatgttgcagtttcactaatccacctgatggggagttccttctttaaccagccatctgcatcaccgcaatttaagtagtccccagtagcacaataaatttactactaacttgtttggtaaccaattaggcagtatattaaactgtgaagtagaccaagagaagacaactacgcagcaccaatcatatggaccttctaagctcgctgccaacctggtcttactagcatccaaattctaaacttacaccacctaaacaattgagtaaacaagtaatcaaacaatgactcgatgagcaagattaatgaaattatttaaccatggaagcatcaagcatgcacattttttttcttttctctgcacatacacacactgcaaattccattccatggattgaggcatgtttgtttgtagggtagtagtatgtaggcttgcaagccgcatgtgcccatcatggcataaaatatgcagagaatcagtgacccaagtgtgtgtcaccctctggaaaacttggagattaaacaaaggttagctctggctaacaaaagtccatatcttgtgacatggactgtagtaaaaagtttacattatcttagagtaattaacacttctccatttgtaataaaatccttattttgttcttgtttgcatagtactagtaggagtactggactagctgcagtagtagcaggctacaatcgctttcactgacgagaagaaaacaggggaaatttagagtgcagcgcacggtacacggtgggcccgaaggtaacatggagttaagcctcgagcatgggccactggcccagtgggaccacagggctcgatgtacattgtcgaggcatacaatgcaatactactaccttaattactgcctttccaagaaaaaaaaaatcattcactgcttgcaagtactacaatgtttattggtgatgagtaaatttgctgtaacatttcggtcaccgggtactgcacatttactctgcatatttgtattccctccttgttcattcattcattcacaatatgtaaatagacaaatcta

SEQ ID NO: 31811 - DNA, 1696 bp, Oryza sativa
agagaaatggtgtccagctctctcacaacttcactctcaatctaagaacaattagatcaatagagaagaaagatcaatgcacatcaagaacaagaacacgaacaagaacaacactaactagctagatggatggatgcaagaatgcaatggaggagacgatgattaatttgatcaggaggaggaggaagaagatgcagtgagctaggtgtttggggggttgggtggtggaggtagctgtgtgtggtgcgactgtatataggcgtagtgtgcgcacatgaggcgatggatcgaggtcaatggcgtccactgctagcgaggtatctcccaactgctccgcccgaataatgcaacgcgaagtactaaaaaggcttggggatcgcatcagcttaatcagaagaagcagtagctgtaattttgtaagtttgtgaagtaactagtactaataattaagtattttatatgagttaaagaggacaaactgtcatggagaggctgcccaatagctagctcaggagaggaaaaaagaagagggggagagagaaaccatgcatgcactcattggtgtggtacatttctgacaaagtgtgctcttctttatttgggtttaaatctttcaatttggatgatatatattgtgaagatgatattgtaaatgtattttttttttgtaatttttgtatgactttgagggtgtatttttgggttttgcaatgtgagcaccagtagtacatgatgttgtccctcaaatgcagtagtggggtttgcacattcagtttcagcacaaaaattcctgaaaaaaagaatcaatttatgggtccaaatgctgaacagatttttagcatgaattttatatccaaccaaaatatctctttgacttttgacttctgatttgccatgaaaaaaccattaaatgatgtgatacccacattgtttaccatatctatgcaatgctgccagccgttattgacttatcaataataatactgtttttttaaatgtagtatcgatttgtatgaagctaggacaacatgaatcattaggctttgattaatcgtcattctccaaaaaatattgggatgcatgtgcgatctgatcgaaacaatacaagagatgatctcacgcagagttcgatacacacacaggactcatgcaccaacaaccgagtacatatgactccggtaaatccgaatataccaaacattagaactggtataaaaattgcatgcttgtcatgtgtgccagcaaatggtcagagctaccgagtggcaaaacatgctaccatatacacagcatgttacacagaccaagtctccttcgaaacacatgattttatactttttaccgtaaaaaaaatcgggctataacgtataagactaacgaaaaattatcgtagaatttctgggaccgaaaagcgcgcgaatgagaataagcacaaacaggagggcagccaaagtactgaagattttgaaaatctgttttttcagagtgaactttcaactccaactcatggcaaaagaggaatggggctatctagctccaatatctctctcccaccactactacagtgtggatatctgagtagtaccattttggctagtgatgttgtgtcctactcatatcatactactaccacctgccatgagagctgatcagtctcctctccactttgatcctgctatgattgtcccatctttat

SEQ ID NO: 31812 - DNA, 677 bp, Oryza sativa
aaactcaatcggagcaacacttaattgggctgtccatcaaaatcttttgcacatattttttcgatatgaaactacaaccacaagtgacggtagcttcctcatctttttcttatacttacacttaaatttaaattttcaacattaaatttgtagttaattttagttttttttttatcaaagtttattttgcagtatttaattttagatcgctaagaacatgtacatatcaagagttttattcacaaattatttttcgtttataaatatgccgtttagcttattattacctgaataagcgaaatgttggggccggccatagaggttcccacatatttttcagtccgtcaaaatctgaatttaggatgccatgcgaaatccgtattcattaattaattttcatcagttggtccgcagatttatggagagggtttgcataggcacatcgaagacactgaaggacgtggacactgttacgtctacagtattatcgtggactcctcacagataataatgaccagtaagatcgtcagttactctctttttttttaagaagaaagttcaggattgccagcttaatttatgtgacactgtcagttagtcacaaagtgaagttattgctgacaaattttgggccaaacattcagttaaccacccttgttactaaagttgctggagaa

SEQ ID NO: 31813 - DNA, 937 bp, Oryza sativa
gagtctgtaaattaagataaaacagtgatagcaattgagtgatatccagaataaatgacaaaacaaagtagattgggtagcaaacagtgaaaagtacacccaatagtacaagaaaatggaatgtgcaaaaattatatgatttaggattgcatttgcataacacagagcattatgatcactgattgcagcttctggaagtcgttaaaccctataacttttagtcaaacaaatggataaaaaatatttttcctttagctaaatgccagtaatttgctacagataaaagaaaatgtcataatattacctgaaataaataaactataattttgcatcatatatattatccattttttttatgtagggggtgctcagcttgattatataatggggtaacccatttttataggatttttttgtaatactaatactaaaatttatcaggggacaatttataaaaactgcagtggcaagaggtggggtggcagattcactgctgccaccactagtcaactagagccttttaaaatgaatatagatgaaaggttgacaggcagctaatcttaaagaaagggccatcacagtagcacaaaggtacatagactcccttttaaagctgtgtcagttacaattgagattattatggtcagatgggcttggaccattacaaaaaatatgtgagtcatgctttataaaatagttcaaattcggtattatccacatggacattaaccatgtgcagaagcaggaatgcaggatcccaagaggagacagcactgcatattttggagatactttttttaacaagaaaccaatgtaaattgtttctccatttaaacaaataaaaatatgcactacaacagtgtaaatatttggaaaaaaatagacggctaaatattatgtaagtaaagcatttaattccgtacatcttgaattaagc

SEQ ID NO: 31814 - DNA, 504 bp, Oryza sativa
aaaatacatttatatcaaatcttaagtccaaacttaatttcttttaaaaataaaacaatttttaggtgaatagtgttgtgttactatttatctaaactttgtctttttttactccataataaagttgagtttaaacttaaaatttgatgtgaatgtatttaatgcttacacctatttctaatagctttctcatgaattcacggggtttttacgggtttttaagttttcaccggatgtatccccttaaaatattttacagttagtctcatatgtccccttaaaatatatccacagagaatctaaaaatcaacacatcatccacccacaccaactcccgatgattcttgctcaaggaagactggaagagctcgagaaatattccgtgtactaccatggttaattaattatggctgtgtttagatccaaagtttggatccaaacttcagtcattttccatcatatcaacctgtcacacacaatttttcaatcacatcatctctaatt

SEQ ID NO: 31815 - DNA, 669 bp, Oryza sativa
gtgcaataatagtaataacttgcaacgtccgagctaatttacaattatgggtgaccatgtttcgcatcactaaggctgtgtttagtccataccaaaattgaaagtttggttaaacttggaacgatgtgacgaaaaagttgaaagtttgtgtgtaggaaagttttgatgtgatggaaaagttggaagtttgaagaataaatttgaaactaaacacgtcgtaacctgtatccaccgagcaagttaatgcaccaccaatataatttgctcactattaaagtttgacgtgtagtggtgataatacgtagctgtacaccccgtctccttttatcttgatgagatggtcaagatacaatcttatacgctgcatataagagcgagtataataagataatataagcggatcatatatgtcacattatatttatgcttatgtggaggagagagaaaaaagcaggctacaaatttgtagccagctgcagcacgagctccaataaaccatgtgagagaaatgtgagaaatgcattaatgtgtattatgtacttataattaactattgtatcagtaggctattaagttagctatagatgacgtgttaatttttgaatctggtagttggctatattattaaacttgctctaaatgaaaaagatgatggaattaaagcatgat

SEQ ID NO: 31816 - DNA, 778 bp, Oryza sativa
gaaggagagagggaacctgctgaaagcactgggtactcaggtactgtttgatggtttcatattcataatctccatatgatatacataggcatactattatgtaagatcagtgactgatgtgttatctgttatgcttgaaattcttctgcatttaattaagtagagccggtctgatgcgttatctgctatgcttggaatttttctgcatttgatcaagtagagccagagaatgacacatagattcgattcatgcattgtctccttgattcgtatgtcagttaccatacaacaagacaaaacaccatcttgtaatatgtttttttaaccctgtctatgactcaacgtaatgtgctgtgctcgtaggataacaatatatattatggttatttgtggtaatacatccgtgctcattaatgtatctaggctctagatttgctatttagttattgaaggtgagtgatttgccaggttcagagccttgtcctagttccttttatgctcttaactatttcaaacatgcccccccccacccccaacacacacacacacaaacaaagtagaagatagaaagtggggaaacttactgcatgtactactgttcacgggtgggagaaatgacttgtagcgtctaagatttcaactgtaggctgtagctggttgctagcagcggatggctacctattggcatatgacttcattttgtgatgttatgtctttacagtttttattttgttattaacctagcacctgttaaaaacatgtatcgggctgcaggaat

SEQ ID NO: 31817 - DNA, 564 bp, Oryza sativa
tatagacatgagctcctgattgattaggcacacgagaagctgaactggaatctccatctctaataggatttactgcagagcagctctcaggctttgctgaagcaagagataattgaagcccatcatgagtaatggagtctgctgttgaactccagtgagagccttcctgatgacaagttttaaactcaaattgccttgaagtaccaacagaagtggcaagatctctctcaggttgttgtggagtaggaatgtgtactttctgtgaaccaaaatccatttgggaatttagattttctgcagatcctgctagcgtattacgtttggaatcattctgcaattgcttcttcgtaatacacctgtcaggctgatgctccaaattgctccgactcatgtgaggtgtggttgggctccacataccaccactatcctgactattgttccattcaccaatgttgcctcgagggggccactcatcatgagaaccagctggtctatatgaaaccacagatgacgggatggtacatgaataatcaccctgatgctgtgcctggccatgcaacatct

SEQ ID NO: 31818 - DNA, 725 bp, Oryza sativa
cctattaagaacacagacttagcgagacagtaacttatagtaaacccctaaccttactaaattcctatgaaaaaacgcaattgcgtgtgcataataagcctgctggtgcttccccgcaaagagttaaaactagtcctgttcattcaagtacagacgtgcaggtagtgcctgttttcagttcgaccactcttcttcgtatgctctaaaatgaaaacaaacaacccataaggcaagaacttctgttcatgaatttatgctaaattcagttgcctgttgatcccaggcaaagatctcatatctcctgcaatgtacagctgagcagtataacaaccagacagcgagtaagatatctcatccccttgatctgtttgtgttttgttttttttttcctaagtacctttcgtacctgaaagcatttgttaattgtcctgagaacaataaagtggcgccgtaccattgtccggcaaaagtaaaacacactacgacatttgcggccttctgcccccatctgcattggattagtcaagcaatagcagtttagaatcgagtaaagaacacagcaaacaaaaagtaaattttaagacatcattatcatgatcattgtcaacatcatcatcagatgtttacctgcggctgcttctttggagaaacagtatgcacctaggtagcaccagtgcaaatagtgcatgcaaaatactcaaatatagatggcatggaagaaagtt

SEQ ID NO: 31819 - DNA, 5924 bp, Oryza sativa
ttcctgcagccctatgaataatcggtaaaaagataaaagtatcaactttttttttgcagaaacaacaaaaagtagtaccatctagttcgttttgttcatagtctatttatgggcttggttgtcaagtttcatacagggcacatttatataaattttgttttcgttgcagtatccgaggctttccctcattcccggtaaccttgagatgcttaacacaactgggctcgcggcagatcacaagaaaaataaggagcccatgctgactatctggtaaggccaattttgttttttttcacaaaatcggcttctgagcccagcttacatcaaaatttgttgggcctctgtttgatttgctatcatggctgtgaactcaattcaataagccgaaccacaaaccaaatggttgactaatttctggattgccaattgttctggtttggttgagtttgggcacaaataaacaagccctgtatctctacgtaaaattagacatgtttggcttttaaaaattattttacaagttattcaccttaaacttgctctactagatagtaaaaataaaaatagattgcacacaaaagctagctttggaccctctcatgtatttccatgcctacagcctactagtcgcagtccttgacctgcatctaattattcctaacatcaaaattacttgaaatttgcgtgaccaatccattcaaaaacaaattgaatgacctaattattggtctacagttggacttttattttccaacccacatgagtaccgactactgaactctttgaagagacatttgacattgtccatttgtacctgccatttgagtttgttagacgctctcgtcatcaaaataaggctgtgtttagttcacatcaaaattaaaagtttagttgaaattggaacgatgtgacggaaaagttggaagtttgtgtgtatagaaaagttttgatgtgatggaaaagttgaaagtttaaagaattattttggaactaaagatacagtgcaaatgcaaagcacgaagaaagctcatgcagaagatctggtcttacaaatttgaaaaagccaaatggaggacggatgcgagccgtgtgcttccgtaagttttgactttataataaatgaaatgacatagtatcataatatcaaaacgaccaaatcgtctacaaataaactctatagtatatatgcagtctgaatgcaacgaacaaattaagaaagaaaccccctaaaagaaaatcgatccacatgaactgagtgcaaagcataagcatcaagcaacgtgatggcctgcatggttgatatggaaagcgtcttttgcggcctctaccgacattcagaagtcagcactaacctcccctgcatcctttgcttggatgcatgagacctaacctaattgacctgcagcattaacaatcaagtaggagtactaatcaactcctagttggaacgtagaagacctgcttggatgcttgcaggctagctagctgcagttagcagaggcgctacgctttgtcttagaattttccctttaaacaatttagattttcatacaaattctgaaaatttgatgctataaaatgcagaaaataaattagaaataagaagctaaaagaacctattttttttaactctcaccaacaagttactttatcggttgtttcttctaatcttaatattttccaaacagagctttcatctaaaaaaacaatttatctaaaaaaacagagctttcatcttcgactgttcagcgccatttgcacactaaattatcctcagagcaggtacaatagcagactattaatcagctataaacatattttaataagataaaagatgagaaaaaaaaacagcgggctatagatctatagccagctacagtacggactccaagacgcagagtgtatatgataggtatgaccatatattaacagtatagtaagcaactattgtataaattggctattacattgactatagataatttgaagctagtagttggctatactattagagcaggtacaatagctggctataagctagctataaacatattttaaaaagataaaggaagagagaagagcagcgggctacatatttgtagccaattacagcacggactccaagacgtaatgtgtgtatgacatgtatgaacagataatttggagctagtagttagctaatactattaaacttgctcttacaactaagaacaatgcacgcagtccatgcaaattatgtattcaatcgagacagaaggtgtctatctccaagcgtcaacgctgctgtacgccgtagaagacggtgtgcaacctttaatttgccagcgaaagcttgccatcttgaccccaattaattaactatccagcgattcctccccagctcgtccccatcaacatccagatcagctcgtcaaccgagaaaacaaagaagaactgcaaaccaagcggtagtactagtaccagtttccagaagtacagggcattggcataccgtgtctgaatggcattcaccaaaatctcggaggtcggtagttgatacagcaggacaatgaagagataaataaatacagggagttcttatcctatgctatgcaatgtaaactcccacaactacggaagaagatgcgttcatatactctcaaattacttgttatttatagtatttgtttagtatatatggtttttagtcaaacaattgtaccttcaacaattgatttttgagaaatttatatagtttaacattgtaagatttacattttcttatatttatcactgaacatacttccataatatataatatactccatttaaactttaactacccatctttaaaaaaaacaataaatacttgaaaatatgttatattaccgaagtacatggtgtcataaatataacccaataaatttcatccatcatactataatagtaacttattaggagtaatttgtggtcaaagtgagaccgccgtagtgaatatctatagttattcgagaatagagggggtaattcgcatgttaatatactatatgagtttttgcttgtgttcgtgaaaaaaaaaagagtttttgcttagctgtttggaggggcattgagcatacagctctagctccttgttagtctagtggcggtcggttcgatgctagtctttttatggttgtgtgcgaaggcgattttagtgtgtggtgaggacgtttttttgttctcttttccttggctatattgttttagggttatagtcaatttactcatgctttgttcactgaaacttcgcactatctaggtgccactgttaaaaaaaatatgattgtaaaatatagaattatttaatttttaataaaaaaaaagattgacgtcagtaatacacaaggctaaatccggtggatcttaattttttaaaaggggaagtacagaaggagagagtgacactccaaatctcaaaagcccttttgtttgtgaaaaggaaaaacctggatgcatcatgctcctgcatgactggatgtaggctgtgcagcatcaccaaacttctgggcgcggcaaccaaccaaaccaaccaacaaacaacaaacaaccatgcgtgcgcgggctatctggggtaggccccgcgccgaggatatcaagccaaccccgcacagcaccgcccggcacggacgcgtagccccgtccatccgtgtcgcgcgaccttcacctgatcctgcctccctccccctccccacccatccagaagaaaaaactgacccgagatatgagatatgcatgatcccgttcccagtttctaggcttgctccacgaaacgtgccgccttccctcattcgcatgtgcatctccccaaactttgctaactcttttctcgacggtccatgcatcgaaatccttcgtgaagcaccatccaccatcatgataaccactaatattacgtgtatgtaagagtgtttgtaacaaaaatttagtgagattagaaatatatatatatcattaatttccgtctggtagagcatgtgttaaggtacacgtatataaggtgtgagtccggtgttatgtgtgtagtgatgtgtatgcgtggtgggaaagagaacacaataattaaggatttgtcacttatagtctatgacacatgattaaatatctctggaaactaacgtgcgccggtgcgcgtacgcggtacacctttgcccgtgacttagcgatgaagtcgggccagctagagactgcgtgtgacatgtgcaccgaggcggccggcagcggagagctagctaagctaagctagatcgacgaatcgtacccgagaaaagccggctcgggcgcgcggccaccaccgccgctagctatctcctcgcgcgcgcgaggggacgggacgacgaatcgattccatctcccgtgcgcgcgcggcggccgtcccgtttcgtcggctggtgaatggccgtgcttttcccatgtggatgtgggattttttttgcggtggcgcgcgcgcgcggtccaggtgatgaggagattattcgacggcgcgcgcgtgctgcggcgtacgacgtacgcacgtgtgtgggactgtacgtgaggtggtccagtgcaacgatattgcgcgtgtagcgtgtgcgtgacagcgtgaggggacgtggaatggaacggatcgtcctactgtgactcctgcggctgatcgatctgtgcgatgggtgactgcgacgtcggcgatgtttcggtgccgatgacgatggagttagctgggaatggtcgagcatggtttgacttgaccccacaagtctactgcaacgcaaagtatcaataggaggtgttatgaaacgactgataaataaacgataaaaaataatagatcaatcacagtagacacaagatttaatgtgaaaaactctctcaaagcaggagagaaaaaagacaggtgcaaaccggcaaaatatttttactatatcggagtgaagttataatgccgaacggtggcttacagaaagtatatatatgaaggtaaaaccctccgctttgctccgtccgaagttggccttatcgatcgtgcgtacgtgagacaagcgtctaatgctagctagctcagctgtgggcaattgtgatgatcaggtcaaaccagttaattaaaagcctgtatatgtagcatttttcaactacccttttgttcttgttggtgaatctatagcaaggattagtttcactgcaacttgtacacatgctggttggtagctcagttctattactggtacagacagtcagacgtactagacatcatgcatgtcacgtatggatgagatttctctccgcaggagcaagccacgccagtatgagtatggcagcatgcaatgtctccactaaccttgcccccctgccacaactccaaccccatcgatcgatggccgatcgatttatcactctctcagaaaccactcctgctactccacgacagacttgatgcatgggtcctatcaattctgttgaatagtaaaagaaggggatcacactgtataatattaaacatctctgtaccaattttgttatatatttgtcgacaaatgttctcctaaatatttgatagatgtaattacagtacaatcgtagtgtaattacactgtaaattgtatgtaaactttcatatgattttaaactgttagatttgtttcaagatttatgcaagtgaacaagaaaaaagtcactgtgcgtatatatgtgagagaattcatttccacaacctccgcttcaccgaaatagcatgttacggagagatttttgaaagttatttgtaagttacatgtaattagcagtgtaattacatcacgattgtactataattatatctgttaaatttttaggagaaaatttatcgataaatgtataggtgatctattagagtttcattcatatatactttaacatcttcggcaatttaaatgtgagcttgacgtttgaaa

SEQ ID NO: 31820 - DNA, 954 bp, Oryza sativa
ctaatagacaattaaagcacgcactaaacatgctactagatcagcaactaatcacgcactatttattcacaaaaggaagccgccttgaacccgtccaaaatttcactgtcaaaacctgccattttgattttgaatggctttctcacgttgagattagcgtaaatatggtggtgatgagagaagtagcagtggttgaaggttgacgcgccaatgaaagcttggaggcgaccaaattatggcggttaattaaatcttcgcaaacacgcctagctaccaaactcttcgagttgaatcaatttgcatggtcaaaattccagccggagccccagttgtttgcagaaaattccggaatttggctgcaatttgggtatactattcggtgacagcaccaacaaggcaacaagcaaaaccttttcctgttcccacttgcctggtgccatacgagacgctcgtgttccttagccaaagaatacccaacgttgctctggatattttggggatttttatggcgttccttttagtgtatttgtggatttctctggtattttttctatatatttttgcgtaaggttttttggaactcaggaatttatatgatttttaaggtgttcaaatcttgcaaaaaaaaaaaactatgatcgatgttgttttatttttggaaaactatgatattcgcttgttccaaaggaggttataatattatgttttttcccaaagaaaaagcaaatattaggaaacgacctaatatcaaataaatagaatggacgaggcttcaaacccagaacggctaacgtaccatctcgtaaagctagccggaagacccttggaaaaaaaaaacatctacgaaacaacatgtcacaaatcaacacttaaaattaaaagattgaaaaatagtatcaactaagaattcccgaaaaaaaatcaactaataaaggaccgtattgaacacattta

SEQ ID NO: 31821 - DNA, 566 bp, Oryza sativa
tatttccagtcacatgggccaatactcctggttaatcgtagccatatggcctgaaaaaagaaagttgttgcagtaatgtcatcgagactcgtgttctcaaaatctttcatatattgtgtttgatttgtagtcttgtgttcaatgacaaatatttctaaaattccatggtgtccctaaatacttcactatgtcactcctgatgctcctgaattttgttcgatcttctatatgcatcacccctccctttgttactttaccatcagttcacatccatcattaatttcttaaaacatttgcgttatcccttacctttatcaagataagatccaaattaagagtcaaataactgatcatgctgcattgatgcatggtgcggctgaaacaaacccactaactcgtatagaaaatcattcataccactttctcctgattgacttcaaaaataaaatatcctggtgctattgaggtacacttgttcaataaggattaaattaaagcatgcgcaaccgcataatcttgctatgccctaaacaaatcagtgttgggggaagctgaatacgggtgtc

SEQ ID NO: 31822 - DNA, 527 bp, Oryza sativa
cttccctctaaatttgccacttccacccatccacctctatgtgttttattggagtttaagtcattgctttcacatgatcgctgctaggggtggatccaccacctagtgacccgggcaattacttgggctcgttaggtggacacgtgatgctaaattttcagctaccgttacactccatcaacgaatggagttaagtttcccaatttaccttttctcgcactaacattttcctaactattaaacggtttgtttttcttaaaagaatatgaaagttgctttaaaaaaatcatgttaatctattttttaaataaatagctagtacttaattaatcataacgctgatgaatcacttcgtttttcatgcgtgaggcattagttcccaacttcaacgtctgaacacagcctagtatgtttgaaacaaattgagtcaaatcatcacgtatggacaaaaagtgatatttcaaaagtttcaagcactttcttatacatgcgccaacttgttgaattcattggttagcgatgaatgg

SEQ ID NO: 31823 - DNA, 630 bp, Oryza sativa
tgtgcgagtcattgaaaaaatcgctaattttggagaagtatgtgttgccctcgttctaacattttcgcgcaagcagagtttgccatcaaaggagagccgatttggctctccttggctagctagatttttcttaccccacaaagccagattattttaccggttgcaaacgcgtagctttgcttggcgaggctaggatgacacttgcccaggatccaaacatgcccgtagctaccatagaggacaagggtattagcgtcagtgtctttgtcgctgagacattaaacctcgtcgccttgaccctgatctgagaaaaagattgcattcttagaataaatttttctagggtctatttgtaaactatttttaaaaaaggctaaaatataaatatccagaaactttatgtatctctttaggtcgagtgccattgtaacttacatgcggggtactcgatataacgtgaatctatttttcacctcaactaaccaacgtaaaaaagaaaaacaaaaaacggagagagaggaaaaaaaaaacctggttatccgtgtctgtctaatgcccaatgtacacccctacggctcatatcaggatcctttgcagttgaagtcacttgactttatcactgacatgtgg

SEQ ID NO: 31824 - DNA, 503 bp, Oryza sativa
atatttaggcccaaaagtgtggtgttaaaagaggggtagacgggtatacggttagcttaaattccccaaattcaccagggctcctttgtagagtatttgttatcctacacactagcatgcccatgcttacagtgggcccatgcatctgcaggacgcacatcggtcttcccttgtgccagtcgcaggcacacccgcactagtgtatacagtgtgcaccaagtggtctcgacatataccactaaacatgtaaaacagtgggccgatatcattaaatgatggttattatggagacgagcagcctccaagtagtcagtgagtcattgatcaactatgggcgagtcactaggtgaacgttgcattaacgcccccccagagggggccaagcatgctgtaaaagtgactatagcctacagacataggactatggaaggcatctttttaggttcacgccagtgtgctgaatgtttccatgactttaaggtcaggagatatccttaaatgtc

SEQ ID NO: 31825 - DNA, 588 bp, Oryza sativa
ccaaattaaaaattaaaggagagggcaactctgaattcacaagcagaaacagagatagagtttcagacacagatagagagaggaacacaattctggcccctacgaattccagccattttcttacactttcctggagagaaaaaaaaatccaggaaacatcaataacactctcagaacaatttgttctttggcaagatgcagcaagctttttcattttcttctctttttcctcagggaatacggtgccatcgatcattggactctttggtgtgtgaatcttcagagagtagcaccgactatctcagatgccaattttcaggaaaatttaccgtgttgatagaaatttgtcatagtctcacatattttccacgagagaattccaagaattgaggagtgcttgttggtacagataccgccatacgcgaatattttttagtaaaaaataataggagttgacgacagactctatttctaagagtttacatccgtaccttccaccaaacaagataccaaacaagataggctatgttcaatggtttatttttcgccgggccggcagaacgtattaagtggggtatgacaatccta

SEQ ID NO: 31826 - DNA, 718 bp, Oryza sativa
ggtcccgcgttttggagctgcggaaccgttgggactgcgacggtcccgcgttttggagctgcgggaccgttgcagtgccacgcggccgaccgcgggactgacggtcccgcgttttgaagctgcgggaccgtcgcggtcccgcatttccatcccgcgggacgagtatatttttgcaaaaaaatttcatgcatgtatataaatgtaaattattgaaaaaagaagtatattcgcaaatttaattccgttaatgaatctatacacatatatgcctagattcgttaacatctatatgaatgtgggtaatggtaaaacgtcttataatatgaaacggacgaagtattacactattttccactgaatccctccctggtttgcttccccttagggatttaacctccaagaaccgaacaagccctgacggggctgagccgaagaggctattctatgaaatctatagaaggaggaggaggaggagggagaaaggtgatgtcagcggaggaggaggatgagcagcagcgtcggcgtcagcggcgagactacttcatcaatcttgcccgccaccgccaccgccgccgcagcagcacagcgtccgccagaaatcctagccctagacatggaagaggaggggagaggggaaggggagaaactcaccggagagaaggtggccaccgtcttggtcgccgtcgcctccgacttgcgcggcaccgcgccggccgcc

SEQ ID NO: 31827 - DNA, 762 bp, Oryza sativa
aactccaagttgagggcgagggatgcacctactccagatagccattaatttcaattcaacagaggatataaaggataataaaaatttattaaaacataataatttgaaactcaaataacttgtacaaaatgttgaaagtttgacagaatatatcaaatcaattgatacggaatagagttaaaacaaaatatatataatctattccaatactctgtgcaactaaggcccgtcatggtgctgatcctacaatttaatacatgagttttagcattgcatgatttaactacaatatacattagaaaatgcacatctaaggcagtttaggttatctatctgaattaaatcaactctacaatttaactttcaacaacaaacagatgtgcaacacaatagaaaaatagaactgaaaaagaaaacgtaccggaacttatgccatagcttcaaacacttgagtatcaccgatgaaggtataaaagcatgtataagaccagtcattcccaccaccttccccttaaggtcaatcactaatcctcccaagccaaactacaacatttaccaaattaactagaacaaatcatgcatgccatacactacacaattcaaaataagaaatggtgtggggtaaaatggagatacctcggggattgcactgctaacgtacatatagtgatgacgatcacataagtatggattagagtacaacactctgccatgacttatacgcggatacaaattttcatctcttccaagcatgaaaatatg

SEQ ID NO: 31828 - DNA, 1299 bp, Oryza sativa
tgtcagcatgatctgcgttatatacaaacaattctgtagagcagatatgtacagatatgtagtgattgaaatgatgaatttatatgagctatgtacacttcaaaagaatgatgcttcatctggtaacatggtcatgaaaaatgaaggagataaataaaagatcaaccctcttgatgagaactttagtgcctaaagcaaaagatggagcaagttactctgcatgttcaggggacaaaagtccttggaatcattcagtagttgcatggtgcagaattaaaagtggcaatcatccaatattaaccacaaattaaatatcagaaaatggacagcgaactttgaacaactcaagtacattctgtagattaatttaaactcttactagctatttgacctacttaagtttttttttcctggaacatggcagagatctgcacgtcatttcattacgagagaagaaaagctaaaatagccaggtacagtgaccttacatgaccatgcacaaccaaaacaacggcctcacagtagcgtatctagaattattttagagcacgagcaaacttcactatagctagtatttactacagaaattctatttcatttttttcttaattacatggaattttagtggattaaccaccgacgagcccgggcagctgcctggggtcaccaggcagtagatctgcccctgcggcctcatgcgaccttacatgaccagaacatcaaccaagcacaaccaaagaaacaactaaaagacgcctcacacaagcaaaacaacaactagacaatgccaaacatgacctttaaccgaccaacacaatgcctagaaacaaacaaacaactccgaccagccataaccagagatgagattcagatcccaccagaaaaggcctcacaaccacgaccgttggctcccacggaggcggtatcaatagctgcttcaaataacatcggatcccacccatccgccatgcaagcattgatcattgaattcatctaccaattaaggtggacctactgaagttaaagaattgcttcattctattaaggcctttggcactaagtcttggcattttatctgagaaaatcaaacataagtttttttctcgatctaagctatgaggtatcctgatcggtgataatttgggtctcgattccatgtccataagatagccaatggttataatcaaagcacttgtagagtaactgaacatgagatacttgaatcaacatcttcacaaaagagtttttgataaggaacctgacctgacaatgctccatctctagctttttgcccaattg

SEQ ID NO: 31829 - DNA, 585 bp, Oryza sativa
cacttcgacatccctttccctgattggtccttctggggctggtaagaattaaaaaatactccctccgttttagattataagacgatttaactttagttaaagttaaactatttcgagtttaacttaaatttataagcaaatataataatatttataatactaaattagttttatcaaattaataattgaatacattttcataataaatttgtcttcggttgaaaatgttacgttttttctacaaacttgatcaaacctgaagcagttagattttgatcaaagttaaaaacgccttataacctgaaacggagggacggagggagtacttactttgtcttattgcttgtcttcttcccagtagtacgacagtagtactattaaaatatttgagtttagaacatgatttagttagaattttagaacttttaacatctacaatttcccaaaaaaaacttagttcatgaatagaaaatatggtatgtttaaattgacctcaaaatgcactttccattatatcataaatttgttacattttatagacatattctaccaatgttatgattagtggccaaaattttaatggtt

SEQ ID NO: 31830 - DNA, 1056 bp, Oryza sativa
tcaaataaaaagatagttgcttattcgttcgagaaaacaggttatcaatttggtacagatttggcttgaattttacattttaatgctagttggtgaaccgtccagtactctgatggccatattaataatttccccataaaaaaacataaactaaattcaacctcggacactcaactttatattgcaaatctgaaataattttactgcattagaaaaatcagaagatggctgcgagtaatattagtgtcagttggtgaactgttgagtactcccatttccatatatattaatcattttcccatcgaaaaatgagaaaccaaatgcaaccactcaactttacattaaaaaactaaagtaattttgcactatatagagcattaaaaaaatcagaaaatgatttcgagtaatgtgagtagtcatcctgcacgagcttgactaatgcttttggaaaaagggagtaattgaggtgaggtgtgagagtgagattccccacctgtgggtacatgacaaaacaaaccaatcttgctgttgaagcgcatgatgtgagataagatcatcaatcagcagcaccaaaaaatatctctccttctattgcgtgcatggtttgttccttacatgattctatcttgagcagtgctcattcttcagtgatcattagctgtttcttgtaacttgtaagaacttgtttgaagcgcaggaatatttttttccttgaagataaatatagcgaaattggaatgctgaattatcaattaccggtgtgtaaatgccctctgatgaaataagaagagtaagtagagcacaaattttacagtaacaaattaagggctcctttgaatcgtaggaatgaaaaaataataggaataggaaaaacacaggattctgacaaaaatacaattgtaaaacagaggattgcaaaacacaggaatgaccgtttgattggaccacaggaaaaacgcaggaatcagatgagagagatagactcagaggaaatgttccaagaggttagacctcttgctaacttttctctaaaatgtgcataggattaccccattt

SEQ ID NO: 31831 - DNA, 694 bp, Oryza sativa
tcctgcagcccatctaagatgactacctgtaaaatctgagatgattacctgtaaaaataagcctatatttctagagatggacatcttaattgagccgcctgtctctgcgatcggtgaagcgagttccccaatccctatggtgtgtattgcagaaaagattgtagcttgtttttttttaatacgtgctccgtgcagcttaaacagctggatcaatcagttatgttcacgtggctgaaagatcgatcctgatgaatttcatgtatgttgtttaatttacttaattcttcaagatgagttctattatcctcttggccgccgccggtttagttaccaagttgaagttttttcaatatacttcaagagaaaaaaaaaagaaaagacaaaaacgttatggttatactataccggcgactaaaggatgataggttgaattggagcgagagaatcaagtgtctgtttagatggatgccaaaataatccttaccaaaattttaacaaattaacaatattgctaaaattttggtacgattggctaataatgttaccagaatttcgtacacgttgtcaatatttgataacaaactaaatgtagccatttaactatcaattttagcaaatagaatgttcgaaaatatcatcgatctaaacaagcgaaaaaaaaccccttcaacgtacgttgtaattgtaggcagag

SEQ ID NO: 31832 - DNA, 1522 bp, Oryza sativa
ccgagactaaagatcaagaatctttactctcggttggtagtactaaccgggactaaaattaaacacgtagtatataatccctatccattattctctcctccacagttacaacttagacagatcgaatctcacccctctcctcagatctatcctctctaactctcctctccaactcctccccttctctccccttcctccttccttcccagccggcttccccttcccatccggcgggccggccggcggcggggccgcgcccggcggggtcgcgcctggcggagggcggcagcgccgcgcgcggcggcgggcggtggggcttcgggcggcagcggctgtggcgggtggcagggccgcggccgcggcagctggcggggccgcgcccgtcgttcgtagcgaccggcggcggcggcggcttctttgtttttttttaatttgtgatgattcattgttatgtatttgactaagaagttacaaatttgtgattcgcggttaggggagctctcttaatgacgtggtggaatgtgtggttagagagaaataataggattttcgccgatagtgctagaactgagcgtgaggtggcctatgtcataaagcaggagctagatctctgcaagtcggctttcaggccgccctgatggtttttcctctatttggcttgtaagcactatatttcctatctctaattaaattccggcagaactcctgccgtcggtttcctaaaataaaaaacaaatttgtgattcattgtttggatctgtgatgtatttgagtaatttcttaggatattgtgatgcatttgatttatgtgtataagtaactttatgattgtgatgtgaatttgggatgttagttagatttggggattgatttggggatttgcctacttgattcgggagaatataaaaatgaaaaaagaaaaagaaaaaggaaccatctgtactgccgctattgtctcttttagtccaggttggtaacatcaaccgggactaaagatcccctctctttagtcgcggttggtagtaccaaccgggactaaagatgaatatctttagtcccggatccgtactcccggttggaaaaccgggattaaagggggttcccaaccgggagtaaagatggtttctccaccagtgacatgtgcatgcagtgcagtgtgataccgaaaccttttttcaggaaaatgtgtagttttcatgaataaatctcagatgtatatttttttatttaatggtagatatctgcaggacatatatagcatacttttctatcttttttttatttcgtgttgaatggaagtcaagtactactctctccgtttcacaatgtaagtcattctatcattttccacattcatattgatattaatgaatatagatagatatatgtgaaacggaggaagtagtttacaattgttaaaaaaacgcgtctaacaatcgtgcaccctaaagaaaaggttcttgaaaaaaaccctaaagaaaaggaagtcgcgtgggggtcacatcaaagggctgcaggaatt

SEQ ID NO: 31833 - DNA, 676 bp, Oryza sativa
tcttggaccaacagggtcacagtacttcactttgacacttctgataaaatcaacaaaatgcaatactttgacatagtctagcaccacatccacaccaaggacaaggagtgctactattgtcaatttcaaagatctcatgcatcagtccatctcctgattaatcactgtcctgctccataaaaaggactgttgcaagaacaataaatcatctattccatttatacataaaataaatctattataaagggagccctggttagcttgcctggtcaaacaaaccaccagcatagatagtgccttggagccttggaccaattccaggcacatcccaacaaaccaaagtcgttaacaattgtcttcttctataaacattgttgttttttttaaacacctgtaatgaaatcattatcccttttatttgaattatttttctttcagaatatcaaagtagacccaatattcttgtaatcacttcttttggaatgatgctcctttataagctaagctttctaaccatatttaatagttcgtatattcttatatttacatgcctatgaaaactgtattttacttttatgcataagtaaaaaaaagtatttttagagaaaatgaaattcttttattgtatacatacactattcatgaaaggacaacgaattgaacctaggctgtgttt

SEQ ID NO: 31834 - DNA, 568 bp, Oryza sativa
atcttttcttcttctgatcttgactgttggatgccttatctgcgtcaccttccacgatgccatactcagatacttttataaacatttggtgcttgtctacttggtcaagccatttatcttctggaaacatggatcctagaagggatatcaaatccttctttgcagttttcccaagtagctggtacgctcggaacaaatccataaacaggtgcctccttgacatcgcagacctgagtgcaagatgcgaactcagatacttatggaacttcctggttttctctgagttgtactgcccgagctctcctgcgctctcttttagttcagaaaaaagcttaatgaagtagccagggacctgcccttgagctgtgcgaaagtgtttctctagtatctttgccaactgtttcagatccttagccattgctttacaacttgcatgggaagaagctgccttcgtgattccaaatgttgattcatttctgactagtagatcatcaatagaaaattcaccacaccaactgcgtccatctttatgctgattgatgatatatatgaggaaccctaggaacac

SEQ ID NO: 31835 - DNA, 1293 bp, Oryza sativa
taatatttatagtcaaaattagttttattaaattaataattgaatatattttaataataaatttgtcttgggttgagtacaaatttggtcaaacttgaaacagtttgactttgatcaaagtcaaaacattttataacctgaaatggagggagtatctcttttgtttttatcaatcgcttctatacaatattatagaaatagccgataattcagtatttagagcaataatagatactgtattggctattactccaatacagacttatataaacaacttaatcgatataaatacatcaaataacagtcgttcgatcagggcggaataaggcggcgatccgatcggagatcagctacgagggggcttgattggattgaatttcgtcgttcgatccgaactccggcctatctcgctcgctaattgtaattgccatgacgtcgcgtgaagccattatgctatttccacggatcgcggggcctcctcgccgacgccggcccgcgggcgcctccctccctacagcagccggagctccgccgccgttcctcgccggccgacggatggtcctccagccagggttttcccttcggagaagcaagaaaatttcggtgggcaccgaaattccgaaatttcagacaaattctgatatttcgaacgaaattttttgaagaaatttttttgctgatttcgaacgaaatctggcttttgaagaaagccggaaagcaagagagttcattacaaaacgaaaggtaaaacacgaactctaacgatggggtcgccagcttgacattttattatagtataataactgaacaaaattcctgagtatccatttccggccaatcatcaggggaagatacagtttaactcaggatagataggcgaaaaccaaatccattacagaaagtagcatgtcttgaacagaacaactctgataaagtagctcattaatcgcccagtctctgcagctcgtttcatttcttcaacccagatagcctacgtgattcattaattaattcctacttcttctttcttgagactctattaaccccagtttttacaagagttcctgcctcacctgcatcaaacacacaacatacagagagagggtttaagtggcacttcaaaaacaaatcctaggagtgcaccctgaaaattaaacacactcatatgaatcaagtttctaaccagacaacttgtaaacagtagtcaaagtgaaggttatgaactatccattagattatcggagtattatggtgcaacagttataaagcaaacctgtagccttgataagatat

SEQ ID NO: 31836 - DNA, 2377 bp, Oryza sativa
cctgcagcccgcatgcttaacgactaacgtggtatgatcagctagcaataattaatactcctagaacagtaagcttttgctacatgtacggaaaaggatatactatagtattagagcaagtttaatagtatagcaaattgctaccttcaaattatttatagtcaacttaatagctaatttatacaatagttactataaacatatactacataattaatatttagtcccacctgtcatacactacacatgtattttaaagtccgtactgtagctggctacaaatctgtagcccgccgctattctctcacatcttctatcttctcaaaatgagtctatggctaacttatagcctgctattgtacctactctattgtacctgttcttagggcatgtgcaatggtagtctcttaacgttactaattagaaatgtttgctaaatgatagagagagagagaaacaaggagaggcaaacattatttttactatggttaacaactttttagcgacgactttgaacatctataaaatgaaaactttgctgcataaagatgtgaacaaggaaataatagtaataaaaaataattttgtagattaatggtttagagtgtttgctgtgttcaccgttgtaaggacatggtatctaagtaaacatatgttactaaacccttaaatactacctcccgtcccaaaatgtaagtatttttagctagtgcccagattcatagctaaaaatgcttatattttaggacgaaggtagtatttaagcgtttatatatatatgggctctgatttgaacatgcctaacaacggcttttagccttcatacaatgaaaacatagttgtatgagggtgaaaaaaaaaggaaacaatggaaataaaagaatcttatttttaattaatggttatattagagcttttatcatctcactgttgtaaagacatggtttctaaataatcttatattgcctaagcgaccatactcgtctttactattgaacgtgcctttactctctctctctctcgcaatatattcttaactaaagcaagtttaatatatataagagagctagcggttgtctccaaagttgttcacatcaaaggtaggaattgctaatatatacaataactagctattggattactatacaaaaatttccaaaaaatctatcatccaacttttaaatataatcaaatttaggcccccaccactttagggcttattcgattttgaggaatttgaatccataggaatagaaaaggtgcaagaataggaatgtttgcatacatcaatccataggaatttttccaacatgtttgagtggatggaaaaattcctatgttttctctatacaacttgtaggaaaggaaactttcctttgattttcctatacctcaatccaacaaatggaatgacgctcataaaaattaatcttatgaatccaaatgctttgtttttctctaaaacggacaagcccttaatctgccttttctctcacccaccaaactaatttttcttccaacctatggaaggccatgcagtcccacaaataatgcatggtattggcagcaccagccgcatgcaggcgctaagtactttctctttatcttgtgctatcgcctggcgactgcatgattaggagtagatcaaacggtcggaaactaattgatcctctctaaaacgttatcatgacagacaccactgtgatttagtaaagtgcagtttttagttaagcccttaactagtctgtgaatgcagtcaaaatatctaataaacactttatttttgaaataattactctcctgatggagtaataattactctctctgtttttattttttacgcgtttaacttttggacgtacgttttgatcatttgttttattaaaattatgtaattattatttatcttattgttatttgtttaatgcctaaagaacttttagcagaattacatttttaatatttgcataatattttgataagacgaatggtcaaattatatccagcagtaaacggcatcaaacattaaaaattgaatggatcataagtggcgcttctagaaataaaacagtactagcagaatgatgttttttacaataaccctgggtgacgtaccgtcaagacccagctgatgcagttaaaccaaatcggctgcggctttatgataaacaagtgacaaactctaaataatccctctgtttcaggttataagacgttttgactttggtcaaagtcaaactactttaagtttgactaagtttataaacaaatatagtaattttataatatcaaattagtttcattaaattaataattgaatatattttcataataaatttgtcttgtgttgaaaatgttattattttttctacaaact

SEQ ID NO: 31837 - DNA, 645 bp, Oryza sativa
tttcgccagcctctccatcgcacgtgcgccgcacgtgactccctcagagagcgccctctctctctctctctctctctctctctctcggcgtcgcttcccgccgacgctgcccaaaattccggccgccgccttcgattcccgcgcgcccgtgcgcgtggctgaccgcctgggcgccgccatcgccaccctcggttgtcgcctgccccgatgaccaccgtgtccgcgcttgccttcaaaccgtccccgtccttttgcagtcgtcgccggcgtcatcctctcgggcccggcgccccatgccgcatgcatccaaaaccgtgaggcgcggctcgttctcatccctttcctcccaaaacggaaggagcaaagctccctttcctcctcctcctcctttcgctttttcccctcccgggtagcgagctccctgcctccactccttggcttcttgttcaaaaggcagagccgctgacgccgctgcagcgcctcgccgcccccaccttgaccgcacccgctcgccccgcgccaatcctcccgtgctcgcggttcgatttcccaccacacgatccaccgcctccaccaccctttgcatccttgccgtcgctcgttctcgcggcgcccatgaacaccagccgagcgccaagaaaaccg

SEQ ID NO: 31838 - DNA, 2297 bp, Oryza sativa
agttatggtttccgtctctcaacaagctcaccatcggtcattatcatcgtataatgtatttatctattatcgttaatattgctttccagtatattgcgaaatcactgtgcacttactttgataaaatgatgtttcagatcatggaaaatccttcctttagaagaaatgcgagcactcaaggagttggagttaatggacgtgcctgttgttgaagaattgtcagttccttctctggagaagttggtgttgattcaaatgcctagcctgcaacgttgcagtggaataacaacttcatctctaccggtttcgacctcccaaatacatcagaagaaattggtatctagtctccataaacttactatccatgattgccccagtttgatagtgtcgcttcctattccaccttctctgatttctgacttatctgcaaggggatttcagtgttcccaacaattaacttatctcatggaacattcagtattgaatctaatgagttgaatgagttggataacaggatcttaccgttccataatctgaagggcttacggtcgatgtacctacaacattgtccaaacttgagctatgtatccagtgaagttttcagccagctcgttgctttagagcatttgtctatagagcactgccctaatttgttccagccacactccatgtccgagcctgttcatgaaaacagtatacttaacacagatcaccttgtcctcccatctctcaggtttctcaaaatttcctcgtgtggcatagtaggtagatggctaacacaaatgcttccccatctgctgtcccttgaatactttttattatcggactgtccacagataaaattgctgtcaatcaaccaaccaacagaaacagaagcaaccagcagtttggcttcagtagagacagcctcatctagggatgaacagattctgaaaattccatgcaatctccttcgttctctaaagtggttgcgaatttgggaatgtgcagacctggaattttctggagtcaatagaggattttcaggattcacctctcttgtgatgctacaaattagggaatgccccaagctggtatcatcattggtgaccgaaacaaatgatactaatgtattactaccacagtcacttgaacatcttgatatcggtcctcttccagcaaacctgcagtcctactttcctaaaggcctgccctgcctcaagaagttaagcctaaatagcggcgaatatttgaagtctgtacaattgcattcatgttcgggtttggagtatttgcagatctcgcggtgtccacaccttagtgtgttggagggcctgcagcacctcagctcccttcgaagattatgcatccagatgaatcctgagctgtccgctgcatgggatcttaaactgtttcctctgtcacttgtagaacttggggtcagaaaagtcgagggcagcttccattcccgctctctgtcctgcctcccttctatcacaaagttagagatacaggatagtccagaattggtgtctttacagctaggatactgcacctcactggaaaagctagagattacaaattgcaagtcgcttgcttcgatcaagggcatccagtccattagaaaccttaggtacttgaaagtactcttcgcccccagcttacctccatatctgcatggggtctcagggatctggtctcgactggaaactctccagattagtaatgcagctgtgctatccacgcccctatgcaaacagctcacagctctacgtgagcttatgtttttgggtaagcagggggagggatatgacggcgagaccatggtgagtctgacagaggagcaagagagagcgctccagcttctcacctcactccgagtactagctttctcccacttgcagaatctcaagtcacttcctacgaacctacaaagccttgactgcctcgacgagttgtatatcagtgtgtgtccgagcatcctaaggctaccacagatgggcctcccaccttcgctccgttacctatctttgtaccgctgcagcgaggagctctgtgtgcaatgcagaatggcagaaactgctaacctcagggtcggcatttactctgcatcggctattcccaggcctggttatggtacatattcctatgcctgattatgttgcaactgcccttccctaatctagagttgatgctgtctgcatatgcactgagtctgaaacaactacacatgtatctgcatttctgctgtgcaaatgctatgatatagtcaaaatgatacagttaaagcttgtgtgtaactccaatctttgctattg

SEQ ID NO: 31839 - DNA, 725 bp, Oryza sativa
tcctgcagccctactccctccgtcccataatattaaaacctgggactggatgagacgtttcatagtacgattcattgtactatgaaacatcacatccaatcttaggttgtaatattatgggtcggagggagtaggtggagatttataaaatttactcaaattaagaagaaggagaagaaaaagaaatggaaggagagccggtgggagggagtgggcggtggtggcgctgctgccggcgaaccgcgccacggtgcggacgaggatgggggaggtcggcggggggccaaatttccaaccgcatcacgccaccaactcaccattacccgcctatgcgacgtgtgttggtgaaaggtgaaaacccccctctcaaatctctaagtcaacttagccgattagcgattgatatggagtaggtctgatccagctccgcggagtcgattttagtttttcttttttaaggcggagtaccatttgggttcttttattattattattattattattattattattattattattattattattattattattattattattattattattattattattattattattattattattattattattattgcaagtgtaagttggaataatcagtggttggttgtcagttaatttcccctcttgtaccatttcacgcataattccatggctgtgcactgcagaccgcagatcatgtttctttgattcggggtgcagga

SEQ ID NO: 31840 - DNA, 592 bp, Oryza sativa
tagcatacatcaagcaagtaaagtaaaatttgagattaatcgaaattaattggtttaaatatattctcttatggatttgaatacttgaaagatcaatcatatagtgcatttagagttttttttgcaacatatcccgtgtaatataaaaacacaatcatttctttgcctgggaagatattaatgatcctattgtgtgatataagaaagcgaggttgcctttttttctttgttttggattttttttttcattgcttaataattttggatacactatacattctggaattataggagtggtatcaagtaggcgtattatatttaaataaggtaagggaatggaagttcgtgtgattgggaagggaaagatatttttggaaacctctagaatccatatgtgatatttttctctagatttttttctcacatatgattgttaggtttttttcttctctagtataaattcatgatttttcttcaatgtaaggggtgccacatggaccaatcaaaaagctaacaaaagagccagctttagattattagataactctcttgcccttatcttctttctctaacttatccatatccagtaaag

SEQ ID NO: 31841 - DNA, 1282 bp, Oryza sativa
attctgttgcatcctagacattcaactgaaatgcgtaagaatagtctaccttgaaccacatgtacatttgtcttttacaagtaactagagtgttttcccacgcaatttcgtgcggagctagattttataagaaatggatttcacatacaactcttagattttgtttctatagatataattatattttgcatacaattgtaagtgatctataaccccacttctattactatacatacaattgtgttttgcatataatagattttaaaaagtagaattggattaatatatattttttatcttctattttcatagatataattatattttgtatagaactatatcaatcgatctacaccatcaaaacattgatataacataatctactggttaatattttttttctttttctccgtggtaatttataggcctccagagcaaatttcttgactggacagatgcaagtgtggactcgtgaagttggcctttctgaagaagtggagcttgagactgagatgaggagcatgtatgacgccgaggatgtcatggacgagcttgactactaccggctccagcaacacatcgaaggtggtgccgaatctcatcaaccttccattccatgattcttgcttcatgcttcttttgcatttgtgtactagtgagcttactgtgcagctaagagaagctgaataccatagtccataggctccagtcaccacccaatagtttatctcagttaattaagattaccttcccatcatttaaacttccgttgtttactatttttgagcttactatttttgatagccactaagatatatgtttctgtcaaacttttatgcttgggagatgttctagttgtttctttcttcttttttggctgtgtgcattttatgcagaggccgggggtgactcggtttgattgtatcatcttgatgtaattaactgagtttaaataaagcttccattatctaaaaaaattatttttaagaaaccttccttaattataacagtagattgcacaactggttctcttttgcttgtcccataacattgggttttaaagagaattgcagagaaacaatgaagatggattaatctctcgagtggatgtccacccatttattgcatgtcaactaaatggttgtgaatttttttaaaaaaatacaagatagattaatatgtattatatcacttcacaaacatacaagttcaaattcgacttctataagtcgtaacaaaaataaaaaattaaactctaactagtatacgcgggctgcaggaa

SEQ ID NO: 31842 - DNA, 1017 bp, Oryza sativa
ctgcaccccagtttctcatgccgaagttttggtgtcagcattcagcaatcctgtgagtcatgcatagctgaaggttcatactgctgcctgtctcatcaaaagttcagattttgcaatgttgtttgggaaggtaaggtctacgcattgtccctaaaacacagcaatttttgtttctcacaggaaacacgtcagctgctgagaaggcaatactgaagacgaaatggtctgtcaactgaatcttgaccactgcagctatttgtaatagacaaaagccaagattgatcataaatcaaaatgaagtgcatggcaagagttgtaacgtgactaaagaagaatgcaaggatcatggaaaaaaagctgagagaaactggcggatgcattgccttcatgtcagtatcaacatatagctgcgatgtgcctctctggtcaagtgatggcctctgtgatggatgatcttgtagaacatccaggaacatggcaatcccgattaggcgattaaacaaggagatcaatctcgcgtgtcatccagcaaaatgatagccagctctgaaagtcaggtccaagttatcacacctcttgagctgacaagaagccaagttagattaacaggaagaggagcagaacaaacgcaccaaccagtctaccacaaacaggacaaatcaataattgaatatcatgcgcggattgctgctggaacaacaacaagagttgatagattcgagctttgccttatgcaacaggtgagagctcctttgcttttacacaatgcaaattccatccatggattgtctctgaagatagggttgtaacatccggcaagaaacatatggccaacatggagcgatctacacaggagatgccatacggtaattgcacatggagaggaataggattctgatgcaaaggctcaaacaattttcaaagagaaaaggaaaacggatcagctcctttaggtcgcaagtttgtcagtgcaattttgtctgaaatgacaggaaataatgtgttgcaccatgtttt

SEQ ID NO: 31843 - DNA, 643 bp, Oryza sativa
ctttaacgcatttttgctgattttggattcatcgatgatattccagatagatatctaacttttccaggtatttaattaaaaggtaaatcattataacccaagaataaaaattgtaaattttcatttgcaaccaacttggcatatttttttagtatatattgttccagacatcaaacataagaattcatgcttctaatttattcttatgacttatttatttttaaatgttttaattatgggttatacttttcatagttcaaagaaatagtaaattgaaaatttatcctacatataaacacttattatgacattctaatgttagaaattaaaatttattttgtatgtacatagaactgctataaaatcggtttggccagaatcggtttttacctgcggctggtcggatcacctgtaagtatacgtgtaaattaatggggatttttatagacggccaatcggaccacgtgccaaaatatattatcgtggtgatcataggcaggcgtcctaacaggtcagcgtgcgaaaatcgttatgacatgcagctgacttaagtgcgctgcatgcaataatgatttttcctatgatggtcgcttgtgataacatttttcaaggcgggctggttaggatggccacctgtgataat

SEQ ID NO: 31844 - DNA, 678 bp, Oryza sativa
agataaacaatattaaattccaggtttatcaacagagtataatatcgagggcccacgtggaaccagctcaattgctcaaactccaaacaattgaaagacaactcgaatccaactttggcattacgcgattataaataaaccggtacaaactgaaaaatggcttccagcaaatacaaagtcggccactgaaagcaacattaaaaaggtccaacacacaacttgaagaaatacacgaatataaacccaaaaaaaaaaaggagagccacacacaactattcctaaatcgtttcaacaatagtgacatcatatttcaagtagtatatgcaatagaaatagtgagaatcttagacctctgacaaagtgacaaggcagagatgattaaaaactgcacaaggaggggagagcttcccgaagcaaaaaaccagggtgccagctcagagcagtacaggttaaccaccagattaccgtgcactaaatcagtactacatctcagcaaaaaaaaaaaaacaatatgaactttgaagaaaaaaaacaactctacgaaaacaaaataagtaaataaataaaaataaaacgatctgaacagaacgggaggtgggaggaaaccatcggattggcagccgcaagaggagagaatgcaatcatgtacaccgcgagaatcgcaggaggtgaaaaatc

SEQ ID NO: 31845 - DNA, 861 bp, Oryza sativa
aaagggaggaggaagaagagtagggggaggggaatgccaagtcaaggggggattataagtaagcagactgcagagctcatggaggaagaggaggagaagaagctgcaaaaaaaaaaaagtctccggtttctttctgcatgtggctggcctatctctgactgaattcagctctcacctttccttccaaatgcaaatttctttacaactttccatgtatttattagagtaatactactacctgtattggcaatttttcattgttaacagtatttttgccctaaaaatatatatgtatgcgaatataagtagggctgtgtttagatggtggaaaagttgggaagttgagagaaagttggtagtttatgtgtgtagaaaaattttcgatgggatatgatgtgatggaaagttgagaatttgggcaaactaaacacagcctaggttcaattcgttgtcctttcatgaatagtgtatgtatacaataaaagaatttcattttctctaaaaatacttttttttacttatgcataaaagtaaaatacagttttcataggcatgtaaatataagaatatacgaactattaaatatggttagaaagcttagcttataaaggagcatcattccaaaagaagtgattacaagaatattgggtctactttgatattctgaaagaaaaataattcaaataaaagggataatgatttcattacaggtgtttaaaaaaaacaacaatgtttatagaagaagacaattgttaacgactttggtttgttgggatgtgcctggaattggtccaaggctccaaggcactatctatgctggtggtttgtttgaccaggcaagctaaccagggctccctttat

SEQ ID NO: 31846 - DNA, 2198 bp, Oryza sativa
attcctgcagcccgtatgcatgtgtgagtgcattcatcttttctacatggagggatggcgaagaggcacgttgttaattcccacacctgtcattcagtctatccctccgaattttctcacggcaagctttggactttggaccagatgatgatgattcatctctacctctgcacaaaatcagaaccattacaaatgaaaatcaaatatggtcccagcaataaaatgaataatatgtctaaatactgtgttaaatttgttcatggtaataccgtaatggttgaaaagttataactatcagtaacagttcaaggtatgtaagcaaagatacttagaaaatcataagaaagtaagattcagaaactagtgacagaccttttccctaaaacagattggtcaaggcaacaagtatctccactgacatcatcaatcccaagtctgcaataattacaaagtaagcgccaagtgaataacagttgatgggaacaaaaattattcaagcaaggtatagctgctcaggtaggcaacaaaagattctgccatacatatttccattagcaagtgcttcaaagctaacattttacattcagaatcatacttgtgtagatatttcagagagcaaagaacaatgtaacatatcctatggcaagtagttggcaactaggtgtttatcacgcaggcgcccacttttccaataagggcgcaatcaaattgctaattgatttcaataagctcgattggaatggtaccaacagcaccagaactactagtacacgctattgtaatttacggtttttgccctccaatcgatgggtactgtagcagcatttgctgaacccgcctataaatcagctagcaatcacaattcttcgttcatatactactataacctaatcgatcaatcaatcaaccaactagacggtgtacatgtgaaaatccccctctttttctcaagaaaaaaaatactcctaagtagtatcaaacatcaccgcaatttttttaagcaacaaacctgcagcgacaaggacagcaaacactacaaaacgcatgcaacaaaccccaattcgagctcaatttactcctcaaaaagaaacagaagcggatcaagcgtaccctccatcgcagggcagcgtcggcacaccgtcgcagaagacgccgaggtcgccgtcctcgccgccgccgccgatgaggaactcgtcaacggggtctccgcctccgtccatcgcccgcggcgggtgcgggagatcgggcctagggttcggggattctcgctcctcctccgcgagcgagaggtcggggaagaattggggatttggggatgagacttttgcagattgcaccctggatataactgtaatgtctaacgagtcctcgcttagtagtttttagctgtggtggagaggggtgatgttgtgattttatacttttttggaggggttgggtgtaaaagtgagaataggttggtggctgaggaagatgctgggaaaaaaggggagataagatgatgagcgtgtatagcacaggatgtggtcctgttcatcatgtttttttgtgttttttttatttttggatttgtgtttcatgtgatcaacttgatcagtgtcatctactggctactgcatctgttctcgatttgtttactctgattaggtttagaaaagtttgtttcatgtcaattagcctaacataaagagagtggtgtgactcgtgatttaataatataaacatagagttgactagttgagtatgcgttttgtagagttgttagcacaattcttttttgtgtgagtgtgtagaccatatacctcaagttttttttttaaaataaaacaaatgctcccaagctcgtcgtttgctctataactgataagatgtgaaaaaagattgaagtatggaaaaaattatgagtaaaatttttatatatgtataaacttagtcatttaaaagtcgatgcaaaagataactataaaactaaaactaagtttcaaaatttaaattttactcgcggctgataatcctcaagcaaatgatggcagtgttatacttcaaatttcaaggttggtgtacctggagcaatgttactgaagagaagatccaatccaagtacaaatccagccacagatgctcagcccactgggctcctttcgtatgcctgagcccatgatcccctctggtgtttcaagcctggccttataaccaat

SEQ ID NO: 31847 - DNA, 587 bp, Oryza sativa
tccataacctattctattcaatgcctactccctccgtttcaggttataagaagttttgactttagtcaaagtcagactacttcaagtttgaataattttataggcaaatatagtaatatttataataccaaattagtttcattaaatcaataatttaatatattttcataataaatttgtcttgggttgaaaatgttattatttttttctacaaactaagtcaaacctaaagcagtttgactttgaccaaagtcaaaacatcttataacctgaaatagaagtagtactatttatcagcaaaaagttgtgcacaggtgtttatcagctaaaacaattcatatataatttgcaacggaacatattgtagttttgtatatgatggagatatcaacaccatagcgagctaaatgaacctattacagaaggccctagctttctgagatggtattttgatcttggatcccctctttgttccaactaaggacctccaaaaccaggttccagaagcccaaagagagtgagagagaacattagaacaaaggagaagataacctcccaaattcactgcatggatccatttcacaaga

SEQ ID NO: 31848 - DNA, 583 bp, Oryza sativa
gaagagtgcctgtaagatctaggaaaaatatgtatttagtggaaattgcaacctacatggaaaattgtaaattcgatcgtggatcattggatccaaaatgtgcagcctgtatgaagacttgtcagccccgccatccccacgatacattttacaaaatactctcctcatcatgttgtgtacatttttcatatacaccatttacccaacgcccaaagtgtttccaaaacacaatggttccttctttttccctacttttccatatataattacttttccatatataatgctaacaacccattccaagaagaatgttagagggtcatccatacatatggaatctattgatgcaccgaaacaataataaactgcaattaatttcacttattaggaaagtataacaacccaacaaagtacttggattttactagcaaagaaaagaagaaaagaaaacatttcaggttttcttaatgaaaataatatgctttttccccaagcaagaaagtcacaacaaaatggggggctcaaagcaaccaagacatcaacacaaactgatcccatcttgttgtgagagagatggattcat

SEQ ID NO: 31849 - DNA, 1603 bp, Oryza sativa
gttggtaacaccaaccgattggtaggttttttagtttttttcattgtttttaattccttgcatattaatttcactccattcccaaatcatgcacaacaaattaatcatccataattcacatgcccatccacaaaatcatccacaatctacaagtcattcacaaaatcatccacaaaatctaaaataaactacaacaaagtttacaaatcattccaaacatctaaaaagatcacaaaatcatgacggccgccgccgccagccacgcgccgcttccaggccgtcgccaccccgccgcgcgccgcctctcggccgccgccactaggcttcccctcccgccggatctggcggaggggaggccgcccggccgtgcgccgccgcctatcccaccattgtttcctccgcggcggcttccgtcgggtcgcctccggccgccacctgccgtcgccgtcgtcggaggaggggagaaggggaggagatgggaaggggaggaaggggaggagatggccgggaggtggaggagagaaaatgagaggggaggaggaggagaggatgagaagggaggaggagagaatcggataaggacgagtaagcactactggagataatggcacgcggggctcggggctagattttcgcgattttttttagtttcgatcccggttggtataaacaaccgttccagttggtaatttcaaccggggctaaagataatgagggtttgacatgtttttgaaccgggactaaaaatggttaccaaccgaaactaaatatcaaagaagtacatgtaggcttttaaaccgggactaaatatatttttagtaccggttcttattcaaaccgggactaatgtgatttttatgtgactcagtaaagatcatttttctagtagtgacacatcacccaatttgtgtgcataccgcatgtacgtggtacatatagttagtataattattgtctacgatgtctacttcaacattaagtagtgcatgattaagcgcactttgtttcaattcgctccaaatgtttgatccattacagctccacatatattgtgaaatcatttatgctccgaataaaatatatgttggcctgaaacctacgtacgtcgaacatctatctggcccaactggatggggaaagggtcagcgaattggtacgtacccttgtacgtgttgacgccatttgaagccttccatttgacgccagaaaccctttgtgttgatcacaccgcaggagctagcagaaatataatgccacaacacaatgttatacacgtacgagtgggaaacactaccttatgttgtttctttctagtgaacgtgaatcctatagctaccatgcatgaaacattaatttctgctaggtttggtcatgatatgatcagtccattctgaatgcaaagggatcggatcgatcattctcgtggcttatacttggaatctcttttctttttctttgctggaatgactgactccattaattcatccaaactgtacagctagcttaatttacctattgacacttgtgttagctaggcttgaccggcgcgcgcggtggcgatggatctgaccatcactagtctcgtggcggcatgtctgagcat

SEQ ID NO: 31850 - DNA, 2300 bp, Oryza sativa
tttcaatttttttccatgtacgagaatagtcgttggagatgttatagtaattaattaagattagttgttattgattagtaactattaggagataactacacgttgggtacttgatccggagtgggaaaattgggcccccacgtcatgctgatgtcatcatgcaaaaactactttaaattattttttctcttaaattatttatccaaatcatgattcgattgtaacattaaattcgttgcaattaaatctttgaaacaagaccacatatagatatattctgacgaaattttttttttgcttattattgaattatttttaaatgttgcacgttgttctaccaagtatatcggaattgtttcactaagtggatcgaaaatgtttcaatcgtttaaatcggacgctgtttcaccttatataaaaacaatgtttcagcaaatagcgaaagaatatttcagttcactacaacatttgatccatatgtagtgaaacattataagtacactaggtgaaacatttttggtgaaacaaaaaaatgaaacgaattcctttaatagagggtttccaaaatatatgggtgatttgttgcaacggagtatgtgtgtggagacacgtggcaggtgggcagggagacgtggtggggccagggggcacgtgcgtctcgtgaggggagcacccgattttactcccccgccggtcgccagcccataaagaatttcgtactctctctgtttcatattgtaaaactgtctagtattgctcatatttatttagaagttatgcctaaatttttattaacatctatataaatataggtaatgctaaaaagtcttacattgtgaaacagagaaagtaattattaggtactccagttccgtataagacttacctggccttcttgaaaggcagcattataagtaactgtagccgcagaaatttcgtacttgaccgaacgaaagccgtagaatttaatcccaagtataataacaaatccgagcgctggcgcctataaaaggtggctcgctcattataccatccacggtcagtctcgcccatcttaattagcttgttgcataggccggcctgcttcaatcaaggtagaaacaagtgtaactctctctctcccccccccccccccttctctctcctctctctctcacattttatacctgacacacattctagttcggtaatactactacgggaagtgtatgctaaccatcaagccatgtacgtaggctgttaatattttgattttaggcaggaacgtttttattgacaggactgaaaatatatacagaatcagatcggagaatgatgcatgattctatcaaatttaaaataatgcatagtctctttgattattgaaatactctcgccattccaaaatgtataacgctgttgacttttcacataacatttgacaattcgcattattcaaaaaaattatataaatatcatttattttattatgacttgttttatcatcaaagaaattataatcttaacttatacttttagatgtttatattaaattctttaaataaaacgaagggtcaaatattatgagaaaagtcaaccgcgtcatatatatatatatatatatatatatatatagggatggaactgcagtatgttcttataaatggaaatctatatatattattgatttttaaaactctatgtaaagttaataaattttagtaataaattccatcatttaaaagggcacattcatgaataattgaattatgacattcatttgtatataacgtggataataaagtaattaatcatagatattaacatactcatctgaaatgttaataaagaagtccttaagaaaatacctgaaggtaccaagattttacactaaaaattttggtacctcaaggtatataacaaatacttgaaggtaccaaattttataaaatgtgatacttccggtactttttcaataatggcccgttaatataggtgttgtcagatcataatccattgagaatccatgcctttgtacttgaccctacattattaagaacacacaattctatgacattttggtcagcacgatccatgtcatgctagctccctgtaacaataagatcctaacatacgtcttggaatatcctatcaacctttcttgcataggctagcagtacatttctttcaactacttaaccatcacttgtttccatttagaaatagataataacctataggcaaacatgaatttagctccattgtattttcttgactctttctaacaaaggaatatagatcataaagataatgcaagtatg

SEQ ID NO: 31851 - DNA, 958 bp, Oryza sativa
tagagcgtccttttttaaggaaaatcaaattcaataacttttgactaataatcatactaaccatatatatgctaaatattatgcaagttatatcaataaattcatattttaaagtactttcatataatggtaattttatatttgttgggattgtaacatgaaattaattaatgatcaaactatgtttttgaagaccgtataaaaaatataaatcttataatttactcccttcgtttcataaaaaaccaaactagtaccagatgtgacacgtcctagtactaagaatctggacatacatctgttcagattcatcgtactagaatatgtcacatccgaatccgattctagatttgttttttacgggatggatggagcaggacttatggagcagctagcatcaacgtgcacggcaggttggcaccccgacctctgcaggtatcgcacgtacgtgccgtcgaatctctgcaggtatcgatcgtactcctgtatatcaacgtgcacggcatcccgacctcttcttatcgttgaccaacttgtagctagcagcgttacgtgcagccaccgcccgccgccgatcttatcttgttgttccaatccacatcgtccagctcggccgtcgccggtacatccggcttgtcaagtgcaccgcttcttcatttttcttattattatctacaccttcaccagctagccgtcgtctttaattattcatcaatttacatatctgatatcgtattaaagtttaaacctgtactacaactgaagctaagggtatgttatgtttagttcacattaaaattaaaaagtttggttaaaattaaaacgatgtaacgaaaaagttaaaagtttataagtgtagaaaagttttgatataatagaaaagttaaaaacttaaagaaaaagtttaaaactaaactcggtctaaacagatctcccaaacctttttttttcgcgtcaa

SEQ ID NO: 31852 - DNA, 675 bp, Oryza sativa
gagggagtacactctgttttaaaaggccatgcctactccacctagatggtgcctaggcggtaggtggagcatcactgcctcgcttagcaactactcactctattctataaaaacccaatctaatattggatgtaaaatattttaatgtatgacgctatttattttttataccattcgtcttgttcaattttttttttgtaaaatataaaaatatttatgtaattcttaaagaacatttaatgataaatcaagtcaaaataaaataaataataattacataaattttttgaataagatgaatggtcaaatgttggctaaaaaggtgtgtcatattcagttctagattctgttttttttttatggagggagtaagcattttgtgtataggcgtgtttttctcacctggagcattttaaggtttggtttatacataaaagttggagaatattaaagatggaatatgatgaattatggtcatagaactcatggatggcctataatgttaaattctttgtttcagcgtgtcaaattcttccatttaacatgacataactctacccatcaagaaaataaattgtctaggcgtcgtctacgcacgctggcattaggcgaagcgtcaccgcgtgcctagcacctagcgctagaaaaataccttaaagttcttcaccattattt

SEQ ID NO: 31853 - DNA, 1213 bp, Oryza sativa
aatgagagtccaagtaggaatccaaattaaaaatagctgaaattcggaattaaaaatacaaatattaaaagaagagtccatgtaagaacccaatacaagattaattaaaattcagaataaaaataaaaataaatctgaaattagaaaaagaaaataaaagaagagttcaagtaggaatacaataaagagtaggccgcggacgggctatagagaggcataatggcatcgtttaatgggacttctaaaaattataaaaaatgaaactacaagtctaatttttaaaggtttggaacttctaaaaagtaaaaaaaaaagcaatgataatcatgttcgatattaaaatctcaatgacaataaagaagggaggcagcgggcgagctatagaggagtacaatggcaaagccgctaacggtttggcaggacttctagagagtaaaaatgaacccagacaataattatgttcgatttttaaaatctcaatgacaataaagagaaagacagtggatggaccatagaggagtataatggcaacgtttgacgggaaatctagaaattataaaaacgaaacccaacgtgacaataaactctacaaactataaaaatccaattttaaaagatttcaagaagaataagtagaaatagtggtagatcgagcaagcaaatgaagaaggagatgacataaaggatagcaactggtgtgacttaaaactatataattaaaaacacgaggatgataaggtttggtctttcaaagtcttaagacaatgagatagctatttaataaattttaagtaaaattatacttaaaaaatatgattttgtttgacacaaaataaaataaaatccgaaattagaaaagaaaaggagagtccaagtaggattacaatttaaaaattactgaaattcggaattaaaaataaggaatattgagagaagagtccatataagaacccgatacgagattaattaatattcggaataaaaataaaaataaaatccgaaactagcaaaaagataagaagagttcaagtaggaatacaatttaaaattaactgaaattcggaattaaaaaaataaaaaaatatccaaaattagaaaaatcaaagagagtttaagtagagatgtaattttgaaacaactgaaattcaaaaataaaaaataaatttaaaagaacactatactgtattaattaaaatttgaaaaaaataaattc

SEQ ID NO: 31854 - DNA, 1150 bp, Oryza sativa
ttagccaactaaacatattcccctatccatgattaatctgcatgtttctccatgattagttttgcatgttaaatgattcttttattatatgttataaaatatcattttcttgatttcctatactccgtaattattttcaattggtctgtacacttatactgccctctaatccactcagtttcttttagattttctttaagatttataggtggcaagaagtaaacctaaatctcacaaattattttccttgatgtttaggaaatgtttcttcaaaatcaagcttatgatctgatcctgtaatcctgtatgctgtaattttatcttacttttacttattcatcattactctcttttttttcacttaaaatgcactatatatacactattcaaggtatttgtaagttttaaaataccaatttaacaataatttgatatatacccaactattatttattcaacttcatgtacccaatttcaactttggtatgaagtaacctgaacctgataaagtagacaccagggatgggatgttaggttccatccttcccttctccagtattgagcaacaaaacataacatgggaagattctcagggcaaggcaaggctgggaaaatgccacccaattgacccatttgcaacatgcaacgcaatgtaacctcaccaattgttcatcggaatttatttctttatcttcgttacgttaggtccggtggatctgccggcctggagcttatgaatggtatgataggagagatagacgacaagaggggatagaaagtaagcaaggttaaggaattcttctacttgttctttgtttgtgattttttttcctatgctaggacaggggtcgtgcatgttagctttatttgtactgtagaagactctgtcactcaagttgagataaaccgctaaagacagtgacatctcaatggtagacattgtttattgtcatcttgtcggttaaacaacaagttgacgtgtctgtcaaaattattccatctagttgtagatagcagtgcacgtagttgccctaacggtgcagcttacctgaagttcttttagcaggataggtagtaacacgacatggcaacttatcgtaatctgaacactgaagctatgctgcatgccattagttcagcaagataagct

SEQ ID NO: 31855 - DNA, 688 bp, Oryza sativa
ttcaagtaattggtcctcatcaacatgggaggagggcatgttgtaattggtctatacgctcctccatcacttccctagttccctgtggcataaccgggaacccgttggatatttggtcattatttgatatattttaatccagaaatatgatactaaacctaacttgtgtataatatggtggtctagtgatagtgctaaatatgaatatgctaagaacaataataacatcatttagtaacatgtttaacattgaaataaagagaacatacctaaaaaatacttcagatccaatagcggtgttggtgttgatgttcctaatgtcggtgacaaagcaaagagcagttgcacaaagaatgcgtacccaaaaacttgatcgtccacctaagtactatatatgggggatacacttccggaggcctgcttgtcctgaatacctgggcgtgcaggtacttaggaccggggattaccgaagttacttataagcataagaacatgatgtatctaccagagagaaccagaacaagacgaaggaacatagagcttatgtgcgggagaattctttcggacaagagacagtgtttttctacctcttagggaatgagaacagacaccggtagtggaagaggtatatgttgtttactcctcttgatggaagagagagcttatgtgctacagagttctttcggac

SEQ ID NO: 31856 - DNA, 709 bp, Oryza sativa
ttcaattattaattacatctaaattaatactgtgaattgatttcttatggagagtactaaaaataatctataatctatagaaattcatccatttatattttcattaatcctatacttaagagttagtattttaggtatttaattagtaaaatttcatctaactacacttttattaaccctataattaaattctaaaatttgtaaatattttaaatttccctcttaatttttctttctctttttctttccctttttcctctcctctcttttcttttctttttctttctctccctttcttttcttttctctcctggcttcctcctcccttcctctccttctctttctcggctctccctctctttctctcggctctctctctttcccacccgagcggtggcggcggcggactcgagggaaacggagggcgactcaccggcggcggcagcggcgatgacggcggcagcgacggcggcgcacggtggcgcgagaacggcggtgcgggcacggaaacggtcggcgcggcagcacaacggcggcggtgcggcggcactacgatggcggcgcggcggcactacgatggcggcgcgacggcgtggaggagtgggtggtggagacggggagaaggggggggaatagtgaggcctttataaggggagggagagagataagggggaaggaggaggacggaagagggaagaggggaaaaggg

SEQ ID NO: 31857 - DNA, 709 bp, Oryza sativa
aacatcctcgactcctgctctctttattccatactcgcgtacactttagtattagtcgtaccctacatccctaaatacagtggtcgggcataacctgacgacaaccctatatttagtacaccgacatgcatcatccatatgcttgattgacaatatgtcaacggatgaatttactaagggatttgtggcagcatggtgcctacaattgatctccatctctataccagctatccacgctaaccagcattaccaccaacttagacaagttagctatgagattggccttcataccacatcgaatatgaacctatcatttgctgcctagctatatatggtctctatatggatagggatcatgaataggggattagagagagagagagagagagactataacatgctgaacccgtgtggatagggtcatgaatggcttggtgagagataggacacaaacccatggtaaataggcgcatttcttccttctctctcctaactttgtggcaacttttattttaatgttccacgcaaatgaccacaaaactttgacgccctatgaaaaaggttggcattgggaatatgaagtaacagatgatttttctaggggaggggggatatgtcacaccctgaaaattcaaaatatataaattgctgtttaattggaatttttagaaataattttaaaagtcttgataagaaatataagtttaat

SEQ ID NO: 31858 - DNA, 710 bp, Oryza sativa
acaggagcggaaggcagagtgtcacaagaagcgcgaagcatcgggttgggtgcaattatgttttggaataagttcactacaagtctcttaatttatcgccgagtctaaaattcatttctaaaccaaaatacgagatacaacacatcctcaactttcaaaaccgtcacaaataaggtctccatgtggtttggaggatggttatagctgacgtggcgcctacgtagatggtttgtatagcacgtcagctgaaaccgccacccaaaccgccttaggaccttatttgtagtagttttgagagttgacggacatgctatatctgctatttcgatttagggatgaatttcaaactcggcgacaaattaagggaccagaagtgaacttattacttacgtttttgcacgtcgttagcgctaggctgggccaccaggaaaccgaggagtgccaaataaggaataagttcacttagtgaccctcaaaagtaaacgaaatctaatccgtgaccctaaaacacgaaaccggatattcaaccccaaactcttaaccggtacaatttgacacttggagggcggttttgctgacgtggcggtattgaccgggtctcctttacacgtggcgttgaggtggcatttagaatttaaaaatatatgtgggacccatttgtcagtgacacataaaaaaaaattgtgggacccacgtgtcctttctctttc

SEQ ID NO: 31859 - DNA, 534 bp, Oryza sativa
agagttttctctatcttctctgcttccattgactcttgttcataaaactcaacctggagcaaatgttatgaacatcatggttgtattctgccacagttttaaagtcctgtaggcataaatgtacccactcataattagccttaagccaaatgagttccttttgctgatcataacgctctttaagagctttccaaaggttgagagggctcgtctctaacatgtattcatgtttgagatccttgtaaatgtagagtctcaaaagaaaaaggttgtattgagcttcctgggctcaattgccggatccccatcattgggttcctcaattgtatttaaaatcccccgagaggcaaaattgattttgatatcggaagcccagatgggatagttagtcccatcaagggcgagttcgtcgaactcttttgttgacatgtccctacaatcatggttaacattatcaatttacagaggtaaattaataaaacatgatattaaggttgtaatctcaatgcgtaatgtaaaacttcatattttgta

SEQ ID NO: 31860 - DNA, 1736 bp, Oryza sativa
agcgaatgaagatggcatcagcagaggttctcagcgacgacgcactaggggtggtggtgacttgaagactttcactaacggaatctggccgtttcagcagggtgtggtgaggtgtaggttttctttttctggttctatgttctcatcgttgaggtgtgagtctaagtgctcttgtatctttttggctgtgtatatctttcatggatacaaaggctggataaatgaaaatccattatcacaaaaaaaaggatttacaccaaatcaaacagaccgtagaaaggattgatcacgcttagccaataattcttttattgatctattaagctaatatttttcttaatttggaagacgacttttctttcattttttgatgtttgttggaagattcttctgctgcattccaaccagacgttcctgttaggatacgcataggctacggtagcataaattaaattttttctaccgcgtaaaccaggacccatacatgtattagatcatagatcattatcattcgacgcgctgcgcagcggaagaaagcgataagaaggcgaaggaaccctcaggatgtagcgcgcgtcgatgtagaggaagtagttgaccgcaccagctcgaccttctccttctcgtgcgttctcctcgccgtactcccacgctgatcaacaccgcaaagcagcggctcctctaccgtattcacatgtatagggacggaacgccacgcgcagatgtgctagcacatgcgcgcggctagggttttgctcgaggaggggagtggcggctagggtttctcacgtgatggaatacctccgccggtcacacccctcacaaatatatagaatccatgactcgggcctccaaggcccgtaggactcctattcggatccctatccgaattaagctcatattggatctccatctaatccccttattccggcccattaagcgtgcgaccctgtagatttatgtacactcggctgcaacccgaaaactccttttcggtctacgtgtcaacagcggcccctagcagaatgtattgatcgaccgggcatgcacaaagatcatctcggttaaacctctagtatatacttgtatgaacccctttcccttacgatatcgattaagctcaaggctagatatgtgccatcctcttcgcatggattgaaggctcgctttatcaccttatttgcatatgctttctcctataatattaggtatatgctatttccatataatatgaaccatgtatagcatatagtatatcttactcgtaacaccaacactatcatggagcaggtgatcgacaagaacatggaagaaattaaatggaatcttggagcataggaggagcgaggagtaacggtgatcttgttttctcccctttttttagcaacatttttttatattttccttgttgagaggaatggtgatcctctgtttgctgtcaaattctcaattagaacagaaataaccgcttaggcaatattcttttctcgtcaatatacatattttatcttaatttccgttagcatgttttttcaaaccacgaaatataccatttatgaaaattttatatacaagtcattttaaaaatttagataaatttatttttaagtttatactccatccgtttgataatgtaaaactttctagcattgcccatattcacacacacacacatatatatagatatatgtatatacctagattcattaatatttatatgagtgtgggtagaaaat

SEQ ID NO: 31861 - DNA, 687 bp, Oryza sativa
actacaaagcattcggtttgcgacgaactaatctttacctaactcgggtacgcgaggtacgcaagcgaggggaattcgcccccaccgtgttactgggccaaagggagtatgggccaacttgtctaatgtcctgaaggccaggaggctggccctctttctttccttttttttttttttccaatcctcttccaatcgggagaaaatctgtgctgttattaaatctggcagctctcgatgtcttgattgggagcgactggggttaggaagagcaaaaggctcgatgcctcgattggcaggagtactaaaagaaaagtagtgcttagatatatatctaaactaagcacgatgacaattcaaaataaatatacttaaagaaaccaaccaatattttttttctttttcagagaccactattgatgcatctaactaatgaaagattcatggcgtatgtcgcacataactaatattaaatttcatattaaccttaatctaaacatattgatttcaatttaatagatggtgcaggttgttttttctctatatcctatccttgccctcccgatctcttccggtcttttcggttgaacacttctattcagttcccgatcgcttcccaacgctacctccgtcctttcgtggggcgtccgtgtgggaaccaacggttctctaaaaattcagttgcctcga

SEQ ID NO: 31862 - DNA, 1173 bp, Oryza sativa
gctcgcccggggcaacccgtcgagcaccttgcgcgcgtcctcccgggcgccgagcgcgaggtagagctcgacgagcctggcgagcaggaactcgttggagtcgaggccgtggacgcggaggtgcgcgtggacctggcgcgcgtgggcgagcgaccggcacgcggtgagcagcgcggcgaaggccgaggccgtggcggggacaccgcggtgggagaggtggtcgaggagggcgagcgcggaggggagcctcccgacgcgcgccagcctccggagctccgcggacagcgcgggcgcgttcttgagtccggccggagctccgcctgcgacgacgaagcgccccgcgcggccgcggcggcgccggcgtggagcgcgcgggagaggggcgtcgcgcgggtgaggggcttggggcaggagagcggcttggaggggaggagggggtggtttgcggcggcgagggaggaggacgccatcgccatggatggtggggcggaggttttcgggagggaaggagaaggggttaacggttgggaaggatggtggttgttgacgacagactaaagagatttttattagtttactttttcaatttctttgcattttctagagagtttgtttttgaatttcttgtgcatttttacgaataacattttaaattatgacaaagaaaaactccctagctataaagtcagctaatgctcccttagtagcatccattttgatgaaagaaaaatgtgttctctgcccaaacaacctaaaccgtaagaggccacgtgtctatccttacctatgagtatattgtatacactaattttgtattgagtcattgggatgagagattggggctgaacttggatggatgatagcattgaggttgcgaggataacggagaacgatagtaggtagagagtaactgtcagggttatggataccacatacctaatagtagttgactaaatctcggcaggacccactacataccatgtcttatacggaaacaaccttcggtataggaggagttccgcataaggaaggatgaatagagttctacatggaaacgacaaggactactcggattgtatcaatattggttttcctagttctacttggacaaggggatacctatgggtataaatacaatagatcaagacacaagatcaatatacaagccaacat

SEQ ID NO: 31863 - DNA, 555 bp, Oryza sativa
aaaattcctcaatctcgcgtataccctggtactaacggtccctatacaatgcaaataccgtagtcgtgatctacaacatcgacatatacgaactcgacactataggttcttaaagttttttacttataatttatactttaaaacacatatcctatgaaagtgacataaataaacatttctaacatgataaataataaatcaagtagttgtaaattacaatatactccctccatattttaatgtatgacgctgtcggtgacatgggatcgggagtatcatgactagaggtttgaggcagacacaatcgcccacgtggcctggcaccctcgggggacgtcgggcccaagatgtgttcgccctcctcttagtccccccgagggggtcgagccgcacccgcctcggccccgagggccgaggcgccccgacccctcgtgggttttcgctccgcgtgtatgggttaggtgggcacagtggggctcacctaaccacatttattgcggtttggctgagcgtgtcacgccgcatgtaacgcggtgcagtgcactcatttatccg

SEQ ID NO: 31864 - DNA, 704 bp, Oryza sativa
acagacaatgcactaagatttggttgtgtagtgcgcgggtctgtaaatactgacatgtaatgttggaaatgccggttttataagctaatactagcatttttgtaattgcttacatggcggaggcagaaccagatattttggtgagggaacacttcagaatgaggaattctgaacctattaattctttggatgtttctcatctaaatactagttaacttcctagatctcatcacagaaatgtgatggcttagacaggacggtatagaaaattaacaatatcgaccaacaattttcttgtaatatattttgagaaaaaaaatctaacgatatttatgctacgaaaaatctttcccaacacttatacatacatatttcatatggattgtccaaaagttcattaaaatcagaataattttgttgctagctagcatgccactttttcaccagagggattgatctgcaatctgcaccataaaaatacaggaggtagtacaagtgggctttctattttcttacaagattataggaaagcgggaagtcagacaagtagggagcacttccctttgagtggaaaaattgagccacatatatacaaatttgcagtcagaagacttagcaacaaagtactgcaagtaggcgtagttaaatcaaatgagtgctgtgctgtccacatccatagtctggacataactaatggcattgag

SEQ ID NO: 31865 - DNA, 689 bp, Oryza sativa
ccttctctaatgcttgccaattctccaatcctcgtgacctgcccgctagcacctctggttcaacatggcgtagcatatcctctaaatcaaaaccaccatcgaaatcatcactatcggtggaaacatcgacaaccattctttcacgcgacatgtcttcgattataaaattctctgcctcattcatctcgaaacttaactcttcatcgtcatcttccggattggcgaattccccgtgataggtccaaaccttgtagttggcggtgaatccgtactccattatgtgacccaatatttcaccaggatctaccaacaatttctgattcttgcaatgacggcacggacaaaagatctttgtcatattctccctcaaagcatgctccttagcctgatcaataaatttagatgcttccttaataaatatcggctgcgttctccgcatctcatacatccatgacgaccgatccatctaattatataaaggcaaaaaagttacagataaaaaaatagaccgcaggtatttcatacaaaagtttaaatgcatttgtctcccaaaaaaaaatacaacaatacatgtaactagtatgtacaattgattacatgcaaaatttgcccatcaaaacatatattttgaagctagattttgcaaaaaatagttagaacaaaccttgtcaaaatattaaaaaaactcc

SEQ ID NO: 31866 - DNA, 559 bp, Oryza sativa
agacaacgcagcggcagcgggcacggggtagtggcacaaccatgctcagagtggcgcgagacggggagagatggagttttgcctcgtgggcttcatgggcggcaggggagctcgcgcgccgctcctccgcttgccgcccctccaccgcctcgtcgcccggtgccgacgccctcctctcccgcctcgcactgtcgccctcgcagcgacttctccaccccggctcgcagcgcccgcctcgccgccagcaagctcgccgtaacgcgtgtctcctcctcctgatccgcccccatcctgtgcctaccgccgcggccgccattcgcgatcggccgccaccgtggacgccattcgcaaccggccaccgccgccatcaccgcctcgtgggccccgtgggtggtgggcggcggccagtaggggagcccgcgcgccgctcctccctcgctcccgcgcattactccgccgccgcccctcccccgccgctcttccacccaccaccatcgcgtcgcccgttgccgccatcaccgccgccgcgcagcccgtcgccggccgccgacgccctcct

SEQ ID NO: 31867 - DNA, 845 bp, Oryza sativa
aacatcgatccctattcgttttgcatcactctctacgtactactcttccattaacttttcgcatgatgtctgactatttatcttatttaaaatttagtataaatatgtaaaagtataaattgatattagaatttatttgatagtaaaaaaaagtcacaacaaaataaataatatttatataattattataataaaaaaatagtcaaatattatatgaaaaatcaacagcgtcatatattttgagacataggagtataaattaattaaagcttatcgctactactgttgctagctgctactacgactgttaattgcattattgccatttgcaaagttctattctgatctttgatgcaaaaggaatttgtacgcaacacgtgccgtcgagatggcgatgcatatatatgtgatcaacagatcgatcaggccacgagacttccatgagtcgatttatgcgtctgtttgatcctttgatgccattttaattcctcccttgaaaattcagaggttaataattttggaatcgtaatagtagtacatattcccatgtgttgatcaacaccatattcccacagatattaacttttttaattacacggtacaacgcagacacccataacacacacctataagcatcttcgaagactgggccggtaaatcctggagattgacgatgtcggtgatatgggcccgggggtatcatgtttagagggaggaggccgccctcaaacccacgtggcgtccccagaggagggtggcgcccgggaggagcggcggccgccctctcagcttagggtaccgaatttggagcgaggaggctgccccctaacccacgtggcactccc

SEQ ID NO: 31868 - DNA, 749 bp, Oryza sativa
cctgcccactcctctactctagataacttactttaagtacagatccccctggttgattaatttaagaaatggactaattttagttaggcatctattaaattcaaacccactttaccacttttctcctggtatatttatctttcggttgcccacagaatattttgtcatgcatccgggtaatgcagcaaatgtttagcatagatgcattgcataccggccaaaccgctgttgctgtctagctagtatagaaggaatgtttgaatgtgttgtctgatttattgtacttgtcacctaataatgtttaatacacttagagtccatttcacctcaatttgaaactctctgtgatttgtgtaaattttactttcatttaatcttccattgttctcccatgccaatacccatggtggcatggttgatcatatatatatatatatatatatatatatatatacatctaattggttgctacttagaattaaaactctaaatccactattcatttgtccttgaatcttctttggtccaatgtatagttgtatgtatactacctctgtcctatatttattttgtccaagtaactatatgactaaaaaaacccttagggcttattcgtttcaaaggaattgcaaaggaaaagcataggaataggaatgggttttaaactaccattcgttttataggaatgcaccatagaaaaactataggaaagttttccattcctccatttataaaggaaaagcatagga

SEQ ID NO: 31869 - DNA, 579 bp, Oryza sativa
attaattttttttaataatggagcacgttggattaattctgaatatgttttgttttatctatggggttctctgaactacttgttccctgcttgattgagaaatgagaatggtaaagtctactcaacttagcttctctgaaatatcagtgttagtatggggccgttttaaattgggatttacttagattctagcagaaatttcagaatgtgtgctttacggaaataaaatatgagaagcagctctaaagcctgtttggattttattttcagattactgaatcaattcaaatatgcaacagtatgaattttgagctttcgaacttcttggctctacattttgaccttgtactagtatcaactgtggggtggggtctataggcctgtttagttcgcgaaaagaaaatttttgagtgtcacatcggatgtttgaccggatgtcagaaggagttttcggacacgaatgaaaaaactaattaatttcataactcgcttggaaaccgcgagacaaatcttttgagtctaattaatccgtcattagcacatgtgggttattgtagcacttatggctaatcatggact

SEQ ID NO: 31870 - DNA, 1090 bp, Oryza sativa
aaggccgtggatcccgccgactccccgtcgaaaccggagaagagctccgcacctctctccgccgcctccgactagaaggatgacctcgacggcgcccgcctgagcagaggactcgtcgcctcgtcgccgtagccgcggagctcgagagggtggtggatctgtcgccgtagcccgtcgcctccaacaccctcctggcctcctcggcgccacccgttgcccgccgcgacctccccgcgttccgccgccggcccacgcgcgccgaccgcccgcccgccccagcacgccgccgcccgccgcccatcgccgccccccgccgtgcacgctctgagcctgagagagaggaaaaggaagaggaagaagggaatataatgcagggaaaagtccattctacaccctcgaagtcttgtgcttgtctaaaatacacccccgaactacaaaaccggatataatacactctcgaactgtcaataccggacgcttaacccccccgggctgttttcaccgtggtttttgccacgtcggatgccacatcggatgccacgtcagccctagccacatcagcgcaaaacattaacatgggccaagcccatattctctccccctctctctccctccccctcccctgttcattatcttctctcacggccgttggcgggcggcggcggcggcggcgcagagctacgagggcggtggcggcgcggagctgcgaaatcgacgactacggcggcagcggctgcgtggagctgtaagggcggcggctgcggcggcggcgtggagctgcgagggcagtggcggcggggagctggtgcgagggcggcagctgcggcatcggcggcgcggagctgcgaaatcgacagctacggcggcagcgtagagctgcgagggcggctgcggttgcgtggagctgcgagggcggcggctgcggtggcggcgtggagccgcgagggcggtggcggcggggagttggtgcgagggcggcgacgctgcgaatcacgagcttgttgcctcgctcagaagtggccgacctcgccggagccatacgcgcggggaggagtcatccctatgcgctcgcgccgccaccgcttggtcg

SEQ ID NO: 31871 - DNA, 701 bp, Oryza sativa
cttccacatatcattttgcatctatgtatagatggactgtttcatgacagaccattctttaatttttatttgacatattagattttgccatgtcaataattacaatcctaatgttttgttatttatatgtatgtttgtaaagatagattggttggtagttgctaatggtggtcagtgctcagtaggccatccacagatactgaagaacaaaattaataggataaatatatttgaagttacaaacataaagagaatagggagtttgtgtagattgcatagatagatagatggcatggtgatgcccaccagatcttgtacttgtgatcttcacttgcttctattggcccaaatgcagctgtggacaagccaccacctgcacccccattcaacagaacagatcacaccctctcctcatataatatctgaatcactttacaaaccatttaattattaaactattgtatgattagctagccctgtcctgtgctacgtacacatgcatacacagaggcatgaatcatcatcatcctgcaaatgccaactaaagtggcatgcactcagggcacaggtacatacatatggatctagttttcacatatattgtggccaatctcatctggacatcatttaattaagcctcatgagtacatactaaggagcaacacaacatatatttaattaattgatcaagtgtattagct

SEQ ID NO: 31872 - DNA, 1266 bp, Oryza sativa
aaaaaaaatatgagtttttttggtaaaaagatctttctatgcggctggcttaacagcccgcatggaaagatctttttcgcatgcggccggcttaacagcccgcatggaaagatctttttcgcatgcggccggcttaacagcccgcatggaaagatctttttcgcatgtggccggcttatgtcgaccgcatggaaagatatttttccatgcggtcccttaagccgcccgcatgcgatgatctgcgcctatatatagggagcgcggggagccaaaattttctaagtcccggctcccgcgaaaccctagccgccaggctgccaaaatttcccaagtcgccgtcgccgtcgtccccgccaccgccggctcctccccaaagtcgccccgccccacgccgtcgccgccgccgccgtcaggacctctcccccctcgccgttgccgtcgccgccgccaggacctctcccccctcgccgtcgccgtcgccgccgccaggtcgccgtcgccaccgcacggaactctcccccctcgccgttgccatcgccgccgccaggtcgtccccgccgccaagtcgtccccgctaccgccaggctcctccccgaagtcgccccgcccctcgccgtcgccgacgccactgccaggacctctcccccctcgccgtcgccgtcgccgccgccaggtcgccgtcgccgccgcacggacctctcccccctcgccgttgccatcgctgccgccaggtcgtcgccgccgccaggtcgtccccgccgtcgctcggtaacatttacttttaaaaaaagaaatgtgaaatgtgcaattgtggattgtggattgtttaattgtgcatcgtggattgtgatatgtgcaattgtggattgtttaattttgagaaggtttaattgtggattgttaaatggagatttatgtttaaattgggacttatgtttaaattgggacttatgttaaattgggatttatgtataattgggacctttgttaaattgagatttatgtataattgggacttttgttaaattggcacctatgttaaattgtgacttatgtttaagttgagacttatgttatattgggatttatgtataattgtgatttttgttaaactgagatttatgtataattgggacttatgttaaattggcacctatggcaaatggagatttctgtttaattgtgacttatgctaaattgggacctatgttaaattgggacttttgtgaaattaagttattgggacttatgtgaaaataagttaaa

SEQ ID NO: 31873 - DNA, 599 bp, Oryza sativa
tctagcaattggtatattagtttaaagaatcaatcttctaatatatcaatattgaactcatgttttacacggcggcagcaactcagagccatgtcgatccttgagagcctggaaacacaaatttccccatggaagatgccaattgttcaatgatttgatgtcacgactaaggttttgaatataggcaaggattcataggcttcatatgaccatcgagacaaaagacttttctacaggtttaaaccctctcaaggtaatagccatacatcctatttgtctttgtatacatgtctatttgtctttgtatacatgtagatgtgtacatattacaacatgtggagggcaaactatagtctagacactaccaaaaagaaaaacttgtagagacatttatctaatattacagaggtatttgtctaatgccttcacaatactgtagaggcattttgaaaatgcctaataagtgacttttggtgaattgtctctacaaacaaagtggcattttacaaaacatctctatgcctagcgacaattttctacatgtatttttatgtctactagaaaaaatgcacgtgcgttgcaacgagtgaagtctattt

SEQ ID NO: 31874 - DNA, 1131 bp, Oryza sativa
acttttttttcttcaaacttttaacttttctgttatatcgaactttcctacacacacaaactttcaatttttccgtcacattattctaatttcttcaaacttccaattttgacgtggaactaaacacagccttaatttggtttgtacgagtaaagtaatattacctttgtttcataaaaaactaatctatattgacacatcctaatactacgaatgtaacgagattcatagtattaagatgtgtcaacatctactactagattgatttttttacggagtagtactcccttcgttaaagtgtgtgtttttcactcttttaccgtactaatacaaacaaaaatattcttactttatcagattttaatataattatttcttctttacttattttaagtgtatttatctttacttttataaacttgggtacaatgatgatggttaaaaataaatttattttagaagagaccgaacgaggaaaaaaaatggagtaacatatattgggtgatggcgacgttgcaccagctccgggcggtcactacgtggccatcgacgaaccacagaaacgcaatcaagaccgatcatcgataaattcatataccatggattaaatagagtgttgttgtttcgacatacaaatcctcatcgataagaataatttacaaataacactcaaaagcaactactctaaagctagctattttcagagggagttgttacttttatattttttcttaaaagaaacttcaaacgatagcagatttgctggatatgttaggaggaataaaaacataaagtcttacagagatcttttgagaaaggaacacatctaaacaatcaaagtgattagacttagatcaaatcaggtcagtggatcgactatctgtcggcaatcttccccaagtcgagccgactacaaggttgaagcgaaactgccctttcctctcccacggccgaaactttcctctccccatatctagatccgccctgccatcgcagagctgaccggcggtctacgcggcggataggatggcagcggcggggagacagacagcggagaagttgcggtggcggtcggacggccagactcgtgcctggccgcgtgggttggcggcggcaacggaggtggccggg

SEQ ID NO: 31875 - DNA, 1042 bp, Oryza sativa
cccccccgggctgttttcaccgtggtttttgccacgtcggatgccacatcggatgccacgtcagccctagccacatcagcgcaaaacattaacatgggccaagcccatattctctccccctctctctccctccccctcccctgttcattatcttctctcacggccgttggcgggcggcggcggcggcggcgcagagctacgagggcggtggcggcgcggagctgcgaaatcgacgactacggcggcagcggctgcgtggagctgtaagggcggcggctgcggcggcggcgtggagctgcgagggcagtggcggcggggagctggtgcgagggcggcagctgcggcatcggcggcgcggagctgcgaaatcgacagctacggcggcagcgtagagctgcgagggcggctgcggttgcgtggagctgcgagggcggcggctgcggtggcggcgtggagccgcgagggcggtggcggcggggagttggtgcgagggcggcgacgctgcgaatcacgagcttgttgcctcgctcagaagtggccgacctcgccggagccatacgcgcggggaggagtcatccctatgcgctcgcgccgccaccgcttggtcgaggacgaggtcgagctcaagctctacatccgccgccgcctcgtcgagcttgagttcctcatccccaagcagctcgagttccaccggcgagctcgaacatggagaagatggagttatggagctcctggagccggcagaagaggtagacctttgagctcgtgctcgccggcggtcggcacgaagggaaggctggggatgtgcttgagctccgtcgccgcaacgagtcccctgctccacggccaccgatctcctgctcagctccaccgctgctctctgtctgggaggaagaaggatagagaaagaaagggaagaggagatgggggaagaagtggccactaacgtgtggctctaatttttatttttagttttatttgctgagtagacttccacatcattgccacatagatgaaaaccagctgaaaaaccacttgaggg

SEQ ID NO: 31876 - DNA, 1165 bp, Oryza sativa
ttcctgcagccctgttatttgtctctactccctctttcctcctaatattatttgttatctatgcatattgtaaaggttacaatagttaagcttatatatgtgggtcctatttatatgggctattttttctatatacattatatatattgttgttgctctaagaataaaatgccgtcattaaaaataaggaaaaatgcatagcaaaaattcctcctatttattgacggagtagtacttgtttcagtagcagttaagacggtaaaatatcccacttcactgttgagagctactccaaattttagaatttttagactcacctgcagttgagaaagcgaaggacctgtttctagacggaaaagaaaaaagaaaaaaaaagagcatttacgagtagtttatgcggcgtgtgggcgtgcgacgtgtggacggaacgagtaggctctcctcttttctttcagaagaggcgatcttttgttgtgctttggactgtgtcgtctcggcagtgagtactacctccgtctataaaaagttttcatactattaggagaagtagagacaaagaaaaaagaaaaaaaaagagcatttacgagtagtttatgcggcgtgtgggcgtgcgacgtgtggacggaacgagtaggctctcctcttttctttcaaaagaggcgatcttttgttgtgctttggactgtgtcgtctcggcggtgagtactacctccgtctataaaaagttttcatactattaggagaagtagagacaaagaaaaaagaaaaaaaaaagagcatttacgagtagtttatgcggcgtgtgggcgtgcgacgtgtggacggaacgagtaggctctcctcttttctttcagaagaggcgatcttttgttgtgctttggactgtgtcgtctcggcggtgagtactacctccgtctataaaaagttattaggagaagtagagacaaataatatattttattcgtcttatataaaattattttattagtatttttattattgttagatgataaaatatgaataatactttatttatgcatgtcttatcttttaaaatttttttatggtttttttaaaaagatgaatagttaaacgctagacataaaagtctaataattaagtttattttgagatagatggagtagttgtttgtacctgtcgctgg

SEQ ID NO: 31877 - DNA, 1181 bp, Oryza sativa
atgtttgagatttcacaaacaattcaccttttttttttgtttgatgtagaagtctgggaaactttcatgttctaaatgcattctcagtttggttattgatcgaaaatccaaatggacataaaagtgacattctcagtcaaaaccagcaaatttgtggcctgtgaacacaagccaaatatatctcatgtgcaaaaggatgaacatgggtaccagtacaatgcacatttatccgggacgatcacaaaacaagccatagataccatatagaaagcacagacttaaaagaaacagaatgcagctgggaggtaacaaggtggcaaccatatccaacatacggactgcagtatttgtttcacattacagggcatccatctcgattcctggatcaacatcctatctaaaactacacagctatccaacagatgtcttttcactccagcaagtaaataatcatcggatcggctaaaaatctgaaactcaaaggccattgtagagtgcagaattgcattgcatcagctgcaaaaagatttgcagaagtcaagccaaaatgagagtgacagtaggagaaaagtgtgatacagatggataggattctaagagaaccttctcaaggacttgttttcctgcagccaaatcatcatctttcttcaagagttcaattcgagccttcatggcattgtttttctcttcaacctatgttatcgtgtgaagagaaaaggaaattatcacttgcaaaagatgctctttagccaagttaccaaaaatgaaaatgtcttcgcaggagaaatcatctattagaactcagttgttattcgcatagtaagaagagtatcccttgaaaaattaattgggaatagtgtctatatgtctgcagaaccatttccagggtatattacctcttctattagacttttcaggtattcaacttcatctttcttagcctttgatatcatttgcttggtgtcttcaatgttagtcctgcaaccggatcaaccataatcccaaacatggaatgaagaacaagtcaaggaaatacatgttttatccagacagaacagaatatcttgtgtatttatatgctgcagtttgagaacaaataagagagcaatagccatgcttgtccatttgattgtatttcttagaaagtggacaagagaacaacaaaatttcaaaaagatgaa

SEQ ID NO: 31878 - DNA, 710 bp, Oryza sativa
aaagtacggcaaagctagaaataaacctagcaaaagttcgatcgcacaactcatcaatcgattgaaaataaaatgctagatataccgtctttgttccatttctttgcgccatcaattttaatccgcagtgatcgtccatggcatgtacaacgtgtggttctaactaaaaaatatcgctcaattaaaatagttagttcataattattgcttgtcattaataaccaaaattaacaacaggggcctagatggttcacatagacccacccacccaaacctcgccacgcatgtgaataattcatgagtcggtctattttcatcgacatgaacctgcaaaagattatatcaataggccatacttggtttcaggtgcatcctattcgagcccagccatcggtatagttgttgatgcaaaaatctgcaccaacacacgaaggcctaggagatctgcttagcttcagtgcaggttctaaatccagcaactaacaacataggtagacagattgtataagatcaaagagccgatcaaccaataagccgatgtgatgtattgaggtcagccgatgtcgttaaggtttttatcaaatggctttagatccaatgtaaattcaactaatcagataactaataattgtcgataggatttaacttataactgatgactgaaactgatagctgatagtgactattgatggttaaagcatacatcggct

SEQ ID NO: 31879 - DNA, 586 bp, Oryza sativa
aatggttggatggatgggttctcttcctctgctttgtgggccccatttttttagcttaaattaattaatatactctataattgttagtagtaactactaataacagattaacagattgattaattgcagacattatggatgtcagagattaattagtttttggtgggggttattggattgggatttttgttaattgcggtatctattaattgttggagatagagatatatcgagagttatatcagatggatgtggtggatgatgggtgcaagtactggagagatgatgttgctctgttttaaatgatgcgaatgcaatgtcctatcttgtagatatgttgggtgtcggcttggaattttcattcctaatttttcagatatataataactaagaagataatatcgaagcaattctgcctaatggttaattacaccgttattcgtttcctagttttttaacggatattaaacccaacatttacttcaattaaagctaaccacttgcacatcatgaaaaatcgaatttacaaaaaaattggcaaggttgatccactacaaaatcaatcatgaattttgtgtttgcatgg

SEQ ID NO: 31880 - DNA, 703 bp, Oryza sativa
ccccatcatcaaatataataaaaaattttaaatatgcatctagatgcataataactaaaactaaacttgctataagacagaggtagtagctcctttggtctccatctccctggcaactatgcaaacggggacattaccaacttgggtgcttgaagaaaagtttttctccttacgatcgaggaatgtttactttattgtcggttacttctccggacctgattactttggtacaaataatctcaggacatattcgaaggggctgcatataggtagctacatgactaaagacgtgtttctaactgcatgattgaatagataatattgatagagaaaaataactcatatggatgaattgaatatcataaactaacaaatatattagaaaaagatatcttagaaaatattacacttcaaaaagcatggtacgaataatccatgcacccactagttggctccccacgtctttgccatgggttttatagttttattgtcaaagttttaaatggttaggtgcaactctatgtttatacaaaatatatgataatgtagatttatatatgtcttatgttattgaaatataattcatgctttatttttccaagagtaattgcgtattgttataatatatgaatattattttcatgcgcaatatgggtattgttatagtaagacaatttgcatctctctatttcactcaagttta

SEQ ID NO: 31881 - DNA, 542 bp, Oryza sativa
atcgaggatggtggtggcgggtcccgagtcctcccaccacggatggggttgaagacgacagtagcaacggtagtggctctcgaggcctctcctgccgcggaggtggtcgatgatggcggctgcaacggtggttgtcaacgatggtggtggggagagagaacagaggggagggaggtgaagacggaactgacagttaggtcccacatgcagttggggataacagagattttttttaggaaaacgtgatagagtggcactggtccaatttccccaaattccagtggtacatagccgatattgtgaatagtagtggtatttatctaaaatgttatatttgtagtggtatggatccaactatatattcttacatgtaaaataataagcacttacacttatctcaatagttcaaatatccatatcatttgcatgctatccaaacaaccttagaaatttctaaaaatcttagtatatattatgaaatcaaatatactactttacaaatattcaaagctaaattaatccacatatgtgcaaacaaacca

SEQ ID NO: 31882 - DNA, 1109 bp, Oryza sativa
aataaagtgcctgttacagtcaaggttattccgtgcattaagtagtaaccagcttaatacaatactaaacctctatgttgctgtgcagagacttgatcacctgcaaaatgagcaagaaatgtatgaaattagagtggccacagtaaaccacacacaggaaactcaattctgtaaccccattttaacttgtggtacagggatagacaaatccacaatcaaatgcaattcttgaactgggagatggtcagatgatcagggcactcacgtaaatgaacatctggtacaagcgttccctctccgcatccgtaaacgacgggaaagccctcttcacatcctgcagtgcccaccacaacacgagtcaacaccgcgcacgaatcgatttcacccccaagcactctctcgctctaaatcacgccccccaacatttcacgctggtctctctcagtagcaaagcgcagtggccgcgagagctgagcccgagaaattcgaaggtggggagagaaggggaccgaacctcgcgggagcaggcggtgaggacggagcgggcggcgagcttgaaggacctttcgaggttgccgtacctccccgccgccgccgccggagcggcctccatcggtggtggattccggcgaggtggaggcgccgctcgccgttaggtttcccgattcgaaattccgacgagcgaaaaaaaaaaagaaaaaatggctgcctctccctctcgtctccacgctgcctcgtgaggaaattgttatgtgggccttattgagccgtctcatccagattgaaccaggcccagatatagatggtcctaattgatctaggcccaaataggccgcgtcagacttacaggtgggccgtcaggccgcctaacaaaggcaagactgacacctctcagaaggaaagacacttgttgtccgaacagatggacacgtgtcagggtggcaggcgctcacatcgtgagcggttggatcaacatcctaaggagtagacgaggagtacaatgctataaatatcgtggcaaccacatgctaaccctaggtgtccattcccctaccccctcgccgccgccgcagctctaggatctcttcacccttacatgtgtgccatcg

SEQ ID NO: 31883 - DNA, 739 bp, Oryza sativa
tagagacatgatatcttacacttctcaaaggaatttttttttgaacggaaacttctcaaaggaattcaaatcatgaggtttgagctcatccttaaaaccctccaaaaagtgaagaaaaataatgattcttatggagtttttccaaccaaagcctatagaccagagggctacatagaaaataatcctacaggatttgaatcctttgaaaatcctataaaaatttcatttcataggaacccttaattttcgtatgagcagggtgaaaaaaaagcatctcatgattttagtggagtacttaaatattagaaataaactaggggtaaatttggcgtatagaatgggtttactgtccaatctctctagacggtatgtggccagatgtttaatccatagaaatattgtgacggttcaaaagctaatttcgatgatgtaaactaaaataagaatggattcatacatgttgtcaaacaagaaatcaaaggtcatggtcgtgaatagtttctcaaatttatgtacaatgtttcgccatggaaaaatcatgttgagttatcgttccttagacccttaccatcggttgtgctattagtgggcgctaaaccgtgttctaccaattcgtggtttatcacggacaactaatgatatagtctttgctgatagaattttttttcaaggatgtacaataccaccgcgaatttagggtgctcatcaggcctaacatcctctctttatggcctaacaa

SEQ ID NO: 31884 - DNA, 704 bp, Oryza sativa
  unsure (1)..(704): unsure at all n locations
gtgcgtgcgtgctcgctcgctcgctcgatcgatcgaaatgaaaattcaagctgagcgtgtgcgtgtgttcacccatgccccattattgctagctagcagcttgtttacaacaacgcggagtggctccctcactgtgacgtgccccgcatcaaagcatgggtagaaaaaatggcagcgtcgtccatccctttcttcgcaacgccgggtcggtttccccgtggcggacgtacgccgctgcgaaacggccgaggaagcggaaagggaaacgggcgatcgtcgtcgtcgtggtggaccagtagctgtagctgtagcggcacaagctgagggggagaagtagaaatgagaatcggggggggcggcggctaatggccacaggaatacgcacgcgagtaggagatcaagatcgcggccgntggcgggtcggggcgtatagtttaaaggcgtgggtcgtggcgaggagcgccccacgtcgcgccgcgccggagccccggagcgccagcgccgcaagggattttttttttgccctctcttcacattctcatttgtgtgcgggttcgccgagcccgcgtcgcggctgcagctaggggagggtggctacgacggctgttcatggagattaactgcagcttgattttactggtatggttaatttggcgtgaggcgttgagcagcctttatcatttcctcgcttggggctgcaggaa

SEQ ID NO: 31885 - DNA, 987 bp, Oryza sativa
ttagaaattattcatagttaaatattttgaagttcgatcttagccttgtccaaaacgatgaatattataaatccagatagagtacttgtgttagtcttttttcactttgcatatatgaagaaatttatatttcaaaaaaattgagcaaattttatttgtgtttactttttcctctgctagaacaagtgcgttgcctttactgcgagcatcaagggattaggattgtgcatccatcggtggagaatttccatgggcgtgaggtggaatttgagaagatggtatgtggaaaagatccctgtgaagacgattttgatcttttagttgatgaagaaccgttttacaccaacgatggtatcgtcaacaacctcgagtatgcaggtgctatggatggttcgaagaggacttcatttatcgagatagcgatgaaggcaccgacgaggaagaaggaaactctgatgatgatatcgattttgtgtgaggtttacatgactgtatattttgattgatggagctgtgtacatgttcaatgttcatgttcagcccttataccggcatgtttagggagagtttagttccactgggccaaagttttccgaaccgtaggcgaactactcctacctattttttggaattttgttttattttcttgattgactatttgacgtaggatattccagttcaagaagggtctaagcaagagatggcaatggttccccgtcctccgattccctgcggtgaatcctcccattagaaggtgggggtggtataaaatatgtctccacagaggataaatagagtaaaaacaccttccatcgggtctggcaggggcaggtttgtttcagcgtccctcgtccccgctctccgtggaggcccgacataatagtgtatgtgtagtattatcatgtatatttggcccatctggcccatagaaaccaggcccaacacctagagcatataaagcatctgcaaaaccctacccattccaat

SEQ ID NO: 31886 - DNA, 681 bp, Oryza sativa
tgacaataccccttgcacaacacaatccattacagcgcacctttcctggatcataatcacccccttataaacaaggcatggactccctagcgacccccgtgggcttatctccgccacttctcagtctggtgctccgcaatgaaccatgctatacaaaaggtaaagccgttgcccacgctggcttgtggttggcacggttaatgtttcacaaccgaaactcgtgaaccggtccttaattgtcatgagcacgaccatcaaaaccatatgctcacaacccaccattatcaggttttagttggcacattaattaattaaccaatcacgattgaccaacgtgaactatcattaagccatcattaaataatagtaaatcttaagttatcccaatagtgtgctaatgtttctaagcagggctaagcaattatatctaatatctagctgaaccaatatataaagctcaactagtcaagttataataacccaaggtatcaaggaataaagtaatcaagaacaaaagggctttagcaaacaataggttaattccacccaatgacattcgaaaataaatgcaatagttgaatagaaacgatagctttaaacgggatcaacatgctcaaagggttgtttgggatctgtgtgacttgccttgctggccttggaactcttcaaactcttctcctg

SEQ ID NO: 31887 - DNA, 669 bp, Oryza sativa
taggaattgcagcagtagttcacttgctgtctgaaagataactttcatggtgtctcggataaacacacgagtgcgttgctgcgctataatactgtactaacaataattgtccacaaactatacgcaagaccagaccaacactacaaacatggtccagtgacagaaaaggtgattaaaaccttattaaggaccacttagctaaactataggaggagaagtgaactgaggaagaagccgagcaaccgcaagccgccttccaacctcctccctcccgacacatagccacctgcacatctccacactacgtgcaccccattttcccatgagaatttcaacgaatcaacacagtactatcccaaagtcctattttagcgaatgcggtatcccaaagtcctaaagaaatacaacaatcaggctggcaagaaagaacactgtgccaagctaattcactgtccaagctgataatacttatcattttgaaaaaaacacagtctttaaaaaataattttgaccatttttttattataatataaaaatatcaataaatatcctattccagtgaagcatttttaacacttgttcaaaacaacaactagtattatcaacccgcatgaagtagcaagaatcctatgatcaatactaaataatattccttcgttctaaaatata

SEQ ID NO: 31888 - DNA, 954 bp, Oryza sativa
  unsure (1)..(954): unsure at all n locations
cagcgtgcaacgcatggagatgcgcgagcgcgagccgagcaagtcaagctattttttttttgaaaaaaaataatacgtgctcgtgcaacggtgcaacgtatttcatccgtccttaaaaaaaagactcgttatatatctagacatatatcatagcatttgcctctagctatgtttattttttttatgtatgttcagatatatagttagagtttgttttttttaatagagaaagtacatttacggtagattacgtgaagcgatgtgcgattttgggctagggtttgtgtcaacttcatcggtggccgtttgggttggcgaaaggggtgagctgcaatcagggtttaccttatcgtttgggtcggggttatcgccaccccgcggtagcgcgataaccgtgataatcgcacgataatcgtctaaaatcgcacaaaaatcacatccaaaaatttgaattcaaaactcaacggtttcgcggtttcaccgcgataatcgcacggtttaccgcgatattcgcacggttatcgcgggctgtgtagctgaaataatgtaaatgtaaaataaatagggtaaaaaaaatcaaaaatacggttgaatatgtgtagaaaactagaaactgagaataatcaaaaatatgcaggatacttaaggccaatatcctcttcatttttcaattnnnaaccatttttggttttgtcctcaaatttgaatttatcttactctatttaaaaaaattcttcaccattggcaattacaaatcaagaactacatccatgaattttttcagttttttttgattttttttcggaattttgaatttggtcaaaattcatccaaaccatatcgccggtttcctctaccgtatccccgcaataagcgcgatactcgcccgattatcgtgcgataagtgaaaccctggctgcgatgcgaagcactggtgtgtgtatacagtagtcg

SEQ ID NO: 31889 - DNA, 606 bp, Oryza sativa
aaaaaaaaggtcagctcgatctttagtcccggttatttcacccgggactaaagatagcgatctttagtcccggattgatactcccggtttggaaaccgggactaaaggggggttacgaaccgggactataaagggtttctccaccagtgattcctcgtcattgtttaggagaacagtgagtggtacgcacctgctgctaagcaacgtgtctcgatcgagagctagtcctgaattgatgtcatcctgtattctcctgtgagatacagtaatataatagttttgcacatgtgtatgtctcgtatatactctcatggcatgtttattcatcattaattcggccacatgcatggggctatatgtatctatgatgcaacatgcatacggtgctccaggacaaaacacagttagcgacacgatacacacacactatgtgtatggtcaggtgatcatttgggaagccggcctatgatacttaattgcttgatcctgtagagttgggtacttaggtctgaaggattaacactttaacatatcttatacttatgggattaattaatttcttgtttttgggagaacttacttgtcaacttagagcaagtttaagaa

SEQ ID NO: 31890 - DNA, 1376 bp, Oryza sativa
  unsure (1)..(1376): unsure at all n locations
cccaagattgcattatttgtaacaccggccccccaaagcctcgtcgcgctccacacatgtcaacgtcgagcctccagagctcgagccttcggacatgtcaccagtgcagcagcgtggtgttcatgggcgcatctcgtaccaggtcggccccgtcgtgtctctttgactcgtcgtcgacaaggccactggcaaaccgagggccttcgtgttcgtcgagtacctcccacaacacctgccgcaacctcgaccgccacgcctattgcagccgcgtgctccgtgtcnnntcgccgaactggaagtagcagggcgctcgcgcggcagcggcgagccgcacgagctggtgggcatcgaggactccacacacgccgcatcgctcgtgaagggggcaccacccagcgccgacgacagctgtggagacggtgggcgccgtggaggcccagggagacgtcacgcgcaccgctggccgcgtcgccgttgtcccccgccggagccggtcgcccccgccgccgggctaagtgggtccctctatttggtcgcctgctcggccgcccacccgcgccgccggctgcccgggaaggagagagagaggggaaagggaagaagagatgaggaagatgaggaggctgacacatggagcccacgtgggccccaccattttaaaattatttttatgtgcagctgatatatggggccacactttttattattttttcgagatatacttgccacgtcaatgccacgtgggacggagaactagtcaaacaagccacgtaggcgccacgtcagccaaaacagacttcaaacccgttgagggacctcgtttacccggtttacataagttgagggacgggtcgtacctggttttgcggtcagggatgaaaatcggactgggcgacaaatagagggatccaaagtgaacttattccaacggaagaggagaaggcccataattcatagtgggccgtacttgaggactggcccaaattttgccgttcgtctttgcattgcaggtttttctctgaacctgattcggctcttgccgctcacagatccagccagcttctttcaaggcgaaactgatcaatggtactgaccaaaatatgaatattttttttattttttcatgaagtaatgaagagaaaggtaaaattaaataggtggactagtcgtaattggttaagatgaaagagtaagtaaagaaattaaacaagagatacattgtgtttgattgagatgaataagtatgccaagaaattattatattttgagataattttaaaatgctagaaactgctatatcttcggacgcagagcagtagatcatttgtcagattggatggattgtgctactgtacatgcatagtgtttcagacttt

SEQ ID NO: 31891 - DNA, 1589 bp, Oryza sativa
  unsure (1)..(1589): unsure at all n locations
tatgttgcagtcacactaggtactgcaccggatctaaatccgtctgcatgtgtccaaagggaaaaaggcaccaaattacttgcagttgcaggcttgctgtattttcttaatcactggttgattcagtgtaaggaataaacatggtgactgtttggagtactaacaccgtgtttagttctaaaccttttttcaaactccatcacatcaaaacttttctacacacataaacttctaattttttcatcacatcgttccaatttcaaccaaacttctaatcttaacataaactaaacacggccttaagttaataatcaccgaaaaggacatcattagaccagagtttttggacttggtgatttactctagtggctctcctttgattttttttagagaaggttattttctacccgacctccatatccaaccggatatatacagccattgagatagggaacttagccccgtaaacaacctaatctgaaattcactccatagaagattttaactcagaacctcgtactacttttgtactactcaggctctcctttgatggggcagtatattactctctccgtttcattttaagtgtaaccatgagtttacatgtcaactttgatcgtccgtcttatttgaaattttttataattagtatttgtgttgttatgagatgataaaacatgaatagtattacttgtgacttatgtttttatatttttttaaaaaaaatttnnncagacagatgattaaagttaggcgcgtaaaatcatggctgtaataagacggagggagtatcactgtatcgtatatttggacacaatcaagcaagtcagtactgagaaataaaaatgatctgtactgtaaatgccaagttaagtacatcagcacgatgtagcacgttgtacttttgtaccgcggatcaggtgcagattcagggaatgattgagtagtctgctctacagccattcactggtgggctgggccgtgggcttcccaacggtccaaggtcgtgcactgcaggaaatggggcccagcccgaagcataagtgcaaacaacagcccaggtaggtggcacacccgcgccactggactgacagcaagtgtgggtgaaacggaagaggaataagttcactttaggttcctctatctgtcggccagtccaattttcgtccctgaacctcagaaccgggtacgacccgtcccccaacttatgaaaaccgggcacataaggtcctaaggcggtttggatagcggttttggctgacgtagcgcctacgtggctggtttgactaggtctccatctcacgtggtactgacgtggtgcttacttggcaattcaatttggaaaaatataatacccatgagacccacatgtcaattacataaaaaaataattaataaaaataattaataaaaggtgggctcgcgtggaccccacatgtcaatcccactcccatctccttcctcctcactccccgtctccccttctcttcgtctctctccgactctcccccctctcctctctcttctcctctctcgggtgcgacggccggcggggtggacggcgtgacaggcggcgaagagatgggtga

SEQ ID NO: 31892 - DNA, 1308 bp, Oryza sativa
cagtagtcggatgagatcagcagaaagtgaatcaactatatgcttccttgaaaagaaaatctcccagtttttgtacgctgaagcttcatctgttatgtgttaattacataaaaggaagtgactgctaggagccacacaagctgtggcgggcaaactaatactcttttgagctgtgagccagtgaggctagattgattgaatatatgtggagaaaactgcccacaatatgtattttagaactagctgacattaccaactaatttctatcatggtagcaccgtggtcaggacagagctttggagtttttaggtgccctctatgtagcaacaagtgcaatgcaaaatttgaaggttcacgtccactttagatttcaggtcggtttgaggttgtgtcatttgtgtgccatgaggttgagcacccaccaccttgcctaggagatgcaacttacttttttcctgagtcatgtctttgtatcaagctaactctgttagaattatcatcctcattgactaatgcaaaagcagattaccagatttggatctacattacaattgtgtttctgtgttaaaaggataaaaattgctaatatttatctttctttctagtttgccttctactctaattggtatgtgaaatggttgttaatagacagtggaatctttttttttagagaaataggtgtaatctgattataaatgtgaatatcaaatctgatgactccttttgttttgtccacgtaaaaaggattggctactaccatagaaggtgctcaagtttgtcaaaattccaggagtttcttgaagttgatttttggttatctatcaaccttgtggctctgctttctcatgttatattgtgctaagcagctacattgcagttcaagatgtattattttatacacaatctttggaaatgtttgaattgccacttagattcagttttccttgaatgccatgactaaatgcatgtctttaaatatagcggggtatcactgcttagttgccagacaagaacaaataactgataatagaacttgctgcactgattattatctcatcttcctattttgtttgatattagttttttcctttctaaattaatggacaagaggaacaaaaccaaagtcaggagttctttttttgtttactctgtttttctatatcaaatttaagtgacaatgctgtgacacttcttaccgacaatatgtactataaaatgattagaaaacctatcaattgacctccatgactatctttgtacttaatattactctaaatgggatattaaaaggcaatgatgatttgctct

SEQ ID NO: 31893 - DNA, 2280 bp, Oryza sativa
tagaattttgattttgacagctggaggcagctatacatagaaaatcaaagtactaaactataatcccagaaaaaaagaagtaataaattataatacgacaacaagctaaaacacatttacgcagcgttcgagatggtgagagtgagtttgtttgtttcgttttccgcgcgcacgtttcccaaactactaaacggtgcgtttttttaaaaaaatttctataggaaagttgctttaaaaatcatattaatccatttttgaaatttaaaatagttaatactcaattaatcatgagctaatagctcacctcgttttgcgtatcttcccaatctcctcaatccccttctcctcaaacacacccttattcaacaaaagcacgtatttccgcctctagataaaaattatattaatttacacccaccatataagtttatgcatcgtggatgcaaattactctttctttaatccaaagagcccctatggttaatcacatagggtaaggatagaggtaaaataaatgattactctctattaattgttctgtttggtaagaggtggacggagggttttgaagatggggagtattttggaaatttccttgctataaacaccctgtgggtactctagaagcaactatatttttttaacaaaatttaaatgctagaagtaattatattttgggacggagggaataataaactattgctcctatttgtcatccgtccatagtttagaacggctttgtaaagcgttttctcgtgctgacagagtgattatgtgcaagcaaagatgcttatattcatattaccataatattatttattttagatttaccattagtaatggccggctctcccactgattcggttcaagtcaaatatccctcatttgcgatttattcgcacaaaaatgaaaggagtaaataagagcacctaattccagagcgtaagcaaaaggggaaaaaaggagagaaaaatctcaccacgcgcatttctactaatttcccataatatttattttaagataacggaagtgacgaacaattccctaacatcggagatgagctagatactccacataacacttccaagaacgtaaaaacacgaggcatcaatctcaaatacaataatcggggtaattaaagatagggtggatctgctctcaccagagcgtttcacgtgacttcggcatggcgtgtttgctcccgctattatccacgtcgtccggtttctccttcgggtcactggggtgtggatcaacacaaaactttttacgacggcaatcgactgctctgtgccgcttgaccccgtggctgacgagtgggcctaattcttctcaatcgacctttctttgatgggtataggcgcgggcctgaaaagaacggctgctatgccggcccctcgtgcctataaaaagctgctttggtgccttcttatttggttcgatgggcctggtctagggtgcatagagaataagtgggcaagaaaataatatgctctctatggaccgggagcacacatagcgatgtgcctgtttacccgcatactccttgccccaccgtccgagctgttggagccactgtgtatttgataaagagcgttaccactgatatttgggctctcctattggtatggtcccaccgatcagccagtaattgccgttgcccattgggtggatttaccctatgtgttttgcgcgcccaatgggaaatcgacaatagtttctccgtttccccatagtgctctggaacccatcaatgccaccgaatgcccttctctccttttcccctttcttcagttcttttctccttttcagtgtgtgaagtgttcagagtgctacaagcattatccatttcactctttggttcctatgaagatggctaggtaaatttctccatgcgcgtgatgttctcagcattcttgtgcaatgtgtgagtgtcctcagcttatgcgtgtttttctatcgacgtgtcttctgcattcgtcgtcaccttcatataggaatcaggcttgacgtcacctacagatcgcccgtaaagcaaaaggtagggcctggttggttccttgcattcatccgtgagctttgatggtaggcttactcctcttcatggcgccccggcgcagtgatcgaggcagcgaagccgtgcctcgatccccaagacatcgtccgaagccgtgcctccgacaacaacacctcaagcgcttgaggtcaatgccggttatcagcgctcggcgcttttagttattttctcatgtgagtaacaacctctcctctattgtcagt

SEQ ID NO: 31894 - DNA, 1386 bp, Oryza sativa
cgttgctgtagtgctatcgtgaaatttcatggtcagtagttcatgtgcatggtcgccctgatcaatggtggtaggacatctctggagctgtttttatgcgatattcctgcaaaattcctagtacgaattcatgcgttgcaaacaagcccgtatgtctccttcatttcttgatacgacatggatggattgtgttttggttgacaaaatccaaggagagcaattttatgcatgaaatgagaatgagcaattatcaggctgcgcggccgcccgccggcaccaccgtgccgtcaggcccggcggccggccgcctccatgcacccccggtcacggcggtagggcagggcggcctagcgcctctccagtcgcggtggcgcgcctcccggctggcttcgcgggagcggccgacaagggcgaggtgaagcgccggcgtacgcggacctgagggcgaggcgaagttgagtctgtctcaggctgatccggcgtacatggacgaggacgaggctaagtgcgtcctgtgcgcgtgcgggcctcctgttaggttgaaacggagattctttttgcctgcgtgccggctcaaacgccatctccgttggattcattctggacgcccgagatgcatggtatgtcacgttgtgacttgcctatgctaagtaaccgaagctgagtccctccgcgtttccacgctcatgccccaccatggcgccttcccccgaccgctacacgcctacaccttcccggctcccgctggcgctcaaggccgcggctcaggccgagacgccaacctttgccgacaactacacgccgccgccgtcaagggtgggctagcgcgctgcgcgccaccccctcactgagagcgcgctcatcagctactaagcgaaggctctcgacctggatcccgcatgcagggtgttcgatgaaaacccccaccggggcctgggttcgtggaacgccatggtctctctcaagttggggagtcaagggaggcgttggccttgtttctcgatctgcgaaggtatggcatactcgtgctgccagatgatctgaccatggtcagggtcgcaatcagcgtgctgttctgtaggggatattcgttttatggagcagttgtataggtgcgtgctgcaatgtcatcgacaggacgccttgacgtgacgctatccaatgcattggtcaatatgtatgtgaaagaccaagaacagctatagaggagggggggtgaatatagcaattcaaatcttgcccccgaaaatactcatcaagctggatttctcaaaatccttattagaaccgcggctattagagaagccggatctagaaaagaagcgagaaggaattcccgaaactagaagaggaagagaaaaggaattccccaaacttgaagagagg

SEQ ID NO: 31895 - DNA, 1391 bp, Oryza sativa
atggagattcaccaatagactagaataatattctccttgtcatgtttggttttcttttattttggtttggtgtgtttcactttattttggactacactattttagagtgatagattgtaataattggctgcagctcttttgagcaaaggccgggatgtttcattccattttctaaaaaaaccaatatagctcctagccgctacgagtctatagccataccaccatcatctctctacatatctacactttattgtagtcgccatggttacattgtggttctaggcgggctggagaatggtgtgatggcgtcaaggccgaggggggaggatcggatcaagctgcctctgtcctcgcgtcgcgatcccgcctggcccaaatacccgatctcctcctgcctccataccggactcagcttcggtgacttagggagcgttcggcaggaggagtttgtgagttagtttgtttcgttttccgcgcgcacgcttcccgaactactaaacggtgtattttttgtaaaaattttctatatgaaagttgctttaaaaaatcatatcaatccatttttaaaatttaaaatagtttatacttaattaatcatgtactaatggctcacctcgttttccgtatcttcttaatattctattttcccctcctctcaaactcacccttagtgtaggcaagtcacaacataacattccatgcatctcgggcgtccagaatgaatccaatggagatggcgcttgggcccgcacacaggcaaaaaaaatctccgtttcagcctaacagaaggcccgcacgcgcacaagacgcgcttagcctcgccctcatctgcgtatgccggcgcagcctgagatagactcaacttctcctcgccctcaggtccgcgtacgccggcgcttcacctcgccctcgtccggccgccgccgcgagtcagctgggaggcgcgccgccgcaaccggagaggtgctaggccgtcctgccctaccgccgcgaccgggttcgcgtggaggcggccggccgccgggcctaacgacgcggtggtgcaggtgggtggctgcgcagcccgagcccggcgtgtggaggagaccgcgctgctcctgccacgccacacgtcccgatttcggcagcctcgactccacgatggatttcggcgtccgagcccgcatccagagcccgtacaggtcggctgcccacttcgtcgccggcgagaggtgacaccgccgcccggcttcgtccagggtaggagttattggcggttgagtttgtggagaacaccacaccttttcccatgcccgcgaggtgtttgtggaaatgccctgccacctgggatgatgcagagtcctaattggaagtgaattgttattgtttggctttgtgagattgggaaaatt

SEQ ID NO: 31896 - DNA, 1139 bp, Oryza sativa
ctttcctttcgccttgtaaccttctcctttacgaccttcttcggtggcattcgctctcagtggtttcgctcggaggtccacacggtcggcaccagctgttgtcgaaacgacaactgcatacgtcgaaagatgtggttactcaacagtggttgagaaaaagtaaagtgtattgattagagaatttttcttgggatccccccatacctggccctatgggactatttatagcccctattacaggttattactattagggttttggttatacaggggaatttacatggttacccttatgaaaggacatttacatgagtacatagtgtaatagaggttcatggactcctgatgggccgttaggcgatcgtcggcccaatggcccctaggcttgatgggccggaaaaggcttctttggccctcgcggggggagcttgctttggcgaagtcgtctcccttcggcatatactcttcgccctgcgtccttcgcccaagaggcctccggcttggcagagtacccacacgatccttcgcctctcgctgtacttgttccatagtgttcgccatgggggagggggcttcgccccgactaactttagcgtctcgggcttggattcccactcctcacatagcctttggcagattttggtcgaagggcctcataccataccgccaacagggagtaaggaaacaatcaagcctcatagtttgccctacaaaacaaatgaacaagagccaaaatttaaatttaaaacttaatcttgaagttaattctacggtatgttaacgcaatttcttcttgatatataaaaagctttaaacataaatttttttttctaataagccgtttttacttagaatcagctcgtagccaaccaatgatgccaaaaaaaatcaataaagacatgcaactacaaaattttagagcatgttttctcaggcttattttacctacttctatgtaagaaaaatgggggcctttgtactgtaacatgcagtcatcaaaacaaacagtgcaaatagtgaaacaggtttgtgataaactgataagagtagttaattttgattaagtgtgattttttggcaggaagggggctgccgacgtgtcaccggagcacggtggaccgggtctaatcaagttaatg

SEQ ID NO: 31897 - DNA, 730 bp, Oryza sativa
caagcatacttggtgatataaataggtgcaaactgtaacaacttaagtataaatacaagcttaatttgagctatgttagcaatggacttctcttaagaaacagaatgaggtgatgttcctacaaagtaaaatatagtgttagtttgagtgatcacgcaacacgttataacttgttctctttcttttttttttttttttgcaaaacaattcataacttccaaatgtttctgaatcatccttctggtttggaaatttattacctcctagcaattgtagttagtgctaaaggggacatcatcattagctctccatgaatcggtgcttgtaaagagtatgtcccatcttttcaaatgaactcctatggagggaagaaattcaagccactggagtaatggaatgccctctcagaacaaggattgcttggtaaaaactagggacacaaggcatatcgcttgctgtctgctagattggcattttaaaatggtcagtttgatgaccgaagctgaatttgaggaatgatgtccatttttacgactatgcaacatgttctctgttaccttatctgtctgaattgccaagtttcagaagtattcgacgcttaaacatctgcattcccagtccttgtatattcagaagtttgagttgtcagctatacttgatgtgctcctttggttttgtttttcacatcagtcacaggaaggttcaggatggaatactgggctgcaggaat

SEQ ID NO: 31898 - DNA, 647 bp, Oryza sativa
ttagaggctggcattgcgacagctgagcctctctgaagaacacacggttcttcggattcagaaagatggatgagattacacggttcatggcgattggagatgatcatgttttcaattgttttcaattaatttctagaatcagattcgcagtaggaaacaggcctaaaagctgctgccatagcatggtgcttaaatcatcgtagacaattaggtcaaccagcgaatatgatttttagctttctgcacttgatgaaagccttgattctctggtgaaattaacgaatgatagtgagcaaagaggaatatggcatttcttgataatgcccgacagccaaaacgagagactttcacattagacctgcaggactggatggactgaacagaactgattctgaagaaaaagaaaaaaagttagccaggtcttccaatagtcaatctcgagacatggaagcttcgtactgaaatggaggcatgaatctttaccagtgccagcagctgatcttggtacagcttttatataaagaaaaagagagaacgaatttctgtcttcttcttaggctgtgtttagatccaaagtttggatccaaacttcagtcattttcagtcacatcaacctgtcatacatacaacttttcagtcacatcatc

SEQ ID NO: 31899 - DNA, 707 bp, Oryza sativa
ctcgccgccggcagatcgtccacccttgctttttttccccgggccgatcgatcgatacaaccaaaaccggcaacgtatacctgctagccagccgtgcgtgtggtgtgttcgtccatatgcgtgcaaaagctcaacgatcgaacggagaaatggagcaaaaaggcgcttttttacgcccgtctttaatcggaaagaaccgcccaaattgcgacgtgcttcaacacgcttatgtactggatctatgctgttcttttttttaatgcaataatttctaatacacgttaaccacattcttctgattaaaaaatatgttattaacatttattttgttgtcgtctgtttctattattaaagttacttttaaacatgatatttttttaaaaaatctatatcttgactttgaaggcaaagtcttgttcaaaaacatggttcaaacaatgataggatagcagtgacattggtattgggaggacgcggagggtccctacttgacacataaaaaatgatataattaatcgtataatatttatctcctgttggtgaattctacccgatattagagtttggtggtatgatttttaaaatgtaccgagatatattatatttatgcttagagactgtaaaatttctcaatccggtcggttgtccggcaggaagactgaatgaatagtttggtccagagtccaacaacagtactcaacatgtgc

SEQ ID NO: 31900 - DNA, 676 bp, Oryza sativa
ctaagtttttatattttaagacggagagagtatcacactactagtatactactatgtcctaaaagaattaaaccctgagtctgaatctatatacacatttctattttaagatatgtgtctgatttaaatccaggtttaatttttttaaggacagataggtatgcttgtgctccatatacgtacacagtgcgttttggtcttgttggtagtgagtgtaaaatacgaagtgctcgtgagggaacaacggaagaacaggacgaaacggcactagtacccggagttgctataaatatagcgtcatatgctatagtcgatttttttttcagccacttacatagtagttacacctcatttacaccccacttacatatgtaattagtatgtaattttcgaatttacatatgtaattttagtacttacatatgtaattttgagacttacattgtaaatatattaaaattacatatgtaatttagtgacttacaatataaatacatgccgactattttttgataaaaaatatggcgtcataaatatagctacccctagtaccagcgtcgatctctgtaacttgggagatgattcgatcatgcgtctgtcgcgtggaccatggacaaattacgcgactattcgatcaggatcattttgcaaatcgcattgatcgcatggtcccaat

SEQ ID NO: 31901 - DNA, 740 bp, Oryza sativa
gccatgagagcgaacgtggagcattctttttctattcctttaataatataatagatgtctagtattcaacattaacaattaacgagtttcatttcatcaatataatttcacacattggttctcttctttataaattagaactcgatctatgctaaatcgtgcacgtggttatatgaatttaattttagttcttctcgattattaggtttgcccaagcttagaaaaattcctagatccgccactggccacccttcacacgccggcccgccttccacgcacagtgacagggcgccatcgaggcttggccttgccgtcgccatcccggatggccgcacggtgctccggtgacgcgctccggcggtggcgctaggtttctcctgagtcgcccgcgcgtggtcaccgggcctatgcccgcccgagccatttgtattgcactaggcagttattttagttttcttttcttcttcttcttctttttctttttttttgaggggattacgtgtgcttacgtcaagtcttcgtcacgaaatacacaaacggctcaatcattgagctttccgctcccctgtgacgacgcgccacgcatccttgcaagaaacgaaaagaaaagaagaaaaaaaatggaaagttcagaaatacactagatacgagtccaaaaactactagtaactggagcctctcaacgaactccccttaaatcttaattaagcagatcaatacccagctgcaaacattttccc

SEQ ID NO: 31902 - DNA, 543 bp, Oryza sativa
tttgtacttattggcatgaaccgattcaaaatggccgtagtcttccatctgtaggcgtgctgctggcagagtggccaggttaacatggactgtaattttgttttatgtccataaagctacatatctgatgaacgccaatgcaaacttgcaattgtcagattatgaactacatttatgctgaagacatgtaacatttttgctgaactgacattagtgcctggaccaagattgattttttttcatcagcatatatttttaatttcaatcactagtgagatataaaatacaacaaaaggatgtttcattgtcctccagaaaaagatatttaccgatataatttcctttgttttcttttccatattatacacaaatttttacgtgcactgatagttttttcccctttcttgcatgaataacaacggccgttgattacccttgatggtactgaagacggaggtatttcccatgttgtattacttgttaatctttaagttttgttaatgaaggtttattcaatttacttgttgatcttctagggtgaca

SEQ ID NO: 31903 - DNA, 680 bp, Oryza sativa
tcttatatatgcatgatttcgatcaaatatagtttaactctgtcgtacataaccacacatacatgtgcatgatactactaaattaacgtactaattaaactgatcatgcatttttggctttgtctggcgtccggtactccggtttgcacgagctggactccgatcaaacgtcacagccggtgttagctaggcgtgtgcgtacgcggtctttctatctaacaagcgatatatcctacgtgcactcgtttgccacactggctaagaattacgcgtgttcctctgccagatcgcactgtgtttatttcagtttatgatccactgtcatcgtggataaacataacaggggatacacactgaattttaatttgtaaataaccaatgcaaatagagtcgtcgatggctactagctgttctcggtcaaggaatatatcggtttgattcttgtcgtcgctcataggttgtgatgctagtagcaacctgactttgattttgtggttggcaagtgttgcaatcatgtgccccttttattagtatttactttcttgatgaacttaactttgcagttctctggtttcagtaagaagaggcaaaaaccgatggtaattcgaggcatatcccagctagcaactaggcaactggccatggccagcattggtgtgtacatggtcagtgagtttgtc

SEQ ID NO: 31904 - DNA, 688 bp, Oryza sativa
cttccggtcatgacaaaatatattggcgtgttgtaatattcaaggtatgaaaatttgagtatcagcatcttttaaaatattttgttcatagttgggtaatctgctcattatgagcttaatttgacatcatccgtaatctgtcacgctattccattattgctttctacccctttgtagaattataatagctgaacaaaaataccgttctctttaattaattttataaaacctatattttggccctatttttggtatggaggatttttcagagttgaatgtacctaccttatctttgaaacaacttaaatgtatctacctgcatagctgaccacccttaacatcctatgcaatacttcgcaaataattaaaaatgtgcttctttcaactaatatgtcaattttccaggcaaagataaatcaatatcccaatttcctgcttgaattaatgcaactatgcaaaagtaatgataataaaaaagaagaaacaaaaattcaagaaataccattgataatcacttaatttcaagaaatatcatcgacaagtacaggttctatgaaatgccattgtacaaacaattttgtttcagaaataccaccaatgtcaaggtttcaattcgttactagtcttccgttaagtgatataagatgaacagtgcatttaacgacacatgatcaatagaaccctaaca

SEQ ID NO: 31905 - DNA, 1093 bp, Oryza sativa
gtggtgttacaaaccgggaataaaaatcaacacgtactatataatccctattacttatgctcttctctcgtccacgcaacaaactctatctctttctttctttcttcctctctaactcctgccttatctctttctttcttcctctcttttttcttttggatcgagcgagatcgagggccggccgggcggcgggcggcacggccgacgtggcggcggccggcgcggtggcggcctgcgcggcggtggccggctggcgcagagaggaggcgacagcggccggccgagcggcgcctctgtggtttttttctcttttttttagaatttgtgatttattgcatgattctgtgatgtatttgatttgtgtgcgatgtgaatttgtgatgtatttgcgatgaattttgtagaacttgtgatgtaatttgatttgtgtaattttttttttaggatttgcgatgtatttgatttatgtgtataagtaacttaaagatttgtgatgtggatttgagatgttaatttgatttgggatttggggatatgcataccacttgattggggagaaaataaaaaagaaaaaaaagaaaagaggactatttgtactgctattattccctctttagtcccggttggtaactccaaccgggatctttagtcccggttggtgttaccgggactaaagatcgatctttagtcctggtaacaccaatcgggactaaagatagcgatttttagtcccggattcgtagtccaggttgaacaaccggaactaaagggggttacgaactgggacttaaaaaagcacttctccagcactgctggtagcgatggccttcacttgcgtcaatgccgtgttcatcgtcgtcacactcgtgctctgggcattcctcgtcggaaggtacagccggccggcgccggaacatcgatcacactccacgtccacatccagatccgccgaagaaatcacatggcgtgacatacattgtgttatatatatatatatatatatatatatatatatatatatatatatatatatatatatatatatatatatatatatatatatatatatatatatatataaacaaagagatat

SEQ ID NO: 31906 - DNA, 511 bp, Oryza sativa
gattggacctaccacgcgtacaccacgtaggacaaaactgctttggcttgagtcgagaggttcagggtgagcgatgtctggtttttcgggttcggggggggggggtaattcggtcaaccacgatagttcggggtggaggtaattcgtacttttttcctttttattatcatatatatactctctagagcaacacatgacttcatatggtcactataggctaatttggagattgggcaagttcttttttcttgttattagtcccccttatgcatggctacacacagcaaagaacatgttgctattttccagatacgaattcttcctgaatagtaaaagaacaagtacgatttaccccctgaactatcacggtcgatcgaattacccccccccccaaaccacaaaaccagatattttacaccctcaagtatttataccggataaataacccccctgagcattgttcttagaggtttacacttgaacttgtacacgtggcgccaacgtggcaatc

SEQ ID NO: 31907 - DNA, 793 bp, Oryza sativa
tcaacaagaaatagaagcaaagaaaccgcaattaaatctataaatgatagccgatcggctaggtgccaatgacacatcatttatctttgagctgatgtcatatgaatcgatcaacgattataaataaatagtaaggaactaaatctattcgatcggctgtagatattaacgatatatagttcttatattaatatatacttaaatcaagtgattgggataggtcggtcatcatgccgagacagtataaattacttagatcgaaatatatattaataacagcattatatatgtctatagcataaccgatcagatagatctagcgtgtatcggctaatactccgatactactctacatcaagatattaaaacatgtataatgtattaaacagaagcttaatatatttagattgcaacgatatcttgacacagagggcggatttaacatgtcagtgaaacatatagagcgaatatggttaaatcagataagatcggctgaaactccgatactaccctaatcggcaaccaaagtacaggctagagattgatattctaagcatgacttaatagatcaaactcaactgatgcagcattaagtatgaaaagaagaacaatatctagacaatcaagccgctggaagtttcatagtggtagatatcttatataatctaggtcaacgtcgctatttaaccaaatcggctgccttctgttaacagatgttagccgattgtaggttagatgacaatattgtcgaatattatgtaagatatatgataacttgacgaattacatagac

SEQ ID NO: 31908 - DNA, 524 bp, Oryza sativa
gtttctgcgagcctttcgacactacgaccgaacagaactgctgggaaatccatgacttgcaatgtggtgggtcttttttctgaaagcttatcgtatttattgtggaaattctgaaaactcttcatgtgaaattcctcacttggatggggtatgagatcaagtgtccctggcatgtaggtccaagccaagtatgcagaagaggtcactgtcggatggggtgaggagtggggaatgtttaatttaggtgttttttttctttttttgcagggttttttttctttttataaagactctcatttattgcctatatttactaataagataaaacggtttattagaaaaaaaaatagtttgtagttaacacttttatattcttaacgacttaaaagccataaaaggaataaatatttttaaaaacaacttctaagtttgaaaatttaatcttagtttcggatttggtttattagggtaaccgataaccaaaaaattctagattctgctataaagaattacatatgaaatgt

SEQ ID NO: 31909 - DNA, 676 bp, Oryza sativa
tgcggaaatatgaactgaaatagttgctattgttagggctatgttcatcagggtaacctgaattttgtggagtgtagtgatggtggcacctcagtgcagctaagtagaaactggagaagatattattttactattggaaaaagtacgaattaacccaccccaccccccaccccaaaaaaaaaactatcacggtcgatcgaattatccctcagaaccgcaaaaccggacatcctttacccccgaactatgtaaatcggacaaataaccccctggctcaatccgcagtggttttggtcctacgtggcaatccagtcagaaatttctttttttttaaaaaaaaatcaatgggccaaacatgtcatttcaccctctctacctctctctatcctatctctttcccaaatcccccctctcttctccctcccctcagctccatcgctcactggtggcggcgacgaagaggggccgaggacggcaacagccgaggacagagccggctgggtgcagcggaggggagccaaggacggcggtgggcgggggcgaacgccgcgcggacgacgcgctccgcctctgcctccaccgtcggtcaccgcctttgcctccactattggtcgctcgagctcgttgcctccatcgtgaccactcgagctcgctctgccgctggcggcggcctccc

SEQ ID NO: 31910 - DNA, 577 bp, Oryza sativa
ccatgcatgtattcaaacattcgatgtgatggaattgttgaaagtttgaagggaactaaacactgccctaatggttaaaaatattgggtccaccagattgaatgaaaatcaatggttagatgtttttttctcagaatttttaataatttctttaatttatcatagtgccacgtggcatcttcggagcatttacagggtacacgtggcattatcatggtggtatgtttgtttagctatatttttttaaaataatgtcaataattaacctcactcattttcaaaagagagtattatatctatatcataaaaatttaagtagtaatgatcaacaccataaacaaactatgtctaaaaaactattttgatcacttccattttctctttatccttccctaaagggcatcaatcatggagcatatggctaagttaagttgaccccactggaggccatcatcgctaatagttatgtcatcatatgaattaacatgttggatctgttctattctatttggaccatacggggattatttagaccaaatatggctaacataattaaagtatcactcctatttaccac

SEQ ID NO: 31911 - DNA, 1330 bp, Oryza sativa
ttcatggttgactggatttagcggtgatctcgtatataactcataatcattctatgctgttctttttctatataaatacatgcgaggaaaattatgcattttacatccacatgccacggttgactctatcaacatggaagggggtgtgaaacaaactaccgtctgtaaagtttacatcaagataacataacatcatgtacggtgacagctattcttcagttaacaagttcctgatgggacaacatgcttgttaattaaattgatggagagatggtaaatataaataacaaggctattcctgatcaatcatgcacatcaccgtgccacaaattatgccattttcccttcatctgttccttttttcttctttcttgcttatgatacatgatagatgtgcttgcgtaagaaacaaaaaggtaaagtatcaaagagaactcattcgccaacatactaaaggattgccctttaaccaacgccatgcacacctcaacctgtattgcaactcatacagccttccatggctacaaagtactctagtctggtgctttttttttggcccaatttttaatacttgtggcaattaaatttcaactttagtagcaaaataagtttagtatatactaatcatgtaaatatgtaatgccatataggagtagttgcttttggcacaatctttatacttttttccctgagaaaatgagaatcatatacaatttttcaagtttaaaaatgatcatacatatatatctttgaatccattgcaatgcatgggtatttggctatttttgtgtagaatccgagaatccatacactaggtgttatgtaacacggtgctcataaaaacattttgtttatatgacattttggaaataagtatttactgccgcagatactcgtttgcgaacttttcacttaatgaaatgggtacaagtacaacacagtacctaatgtaataatctgtattgactaactctttgttttttcccctcgattatctgttattactatgctgtaaaagcaaacggctataattcaaatgaaatttacaatatttagaagcattttttttcaatttcataaagcagtgatacctattgaagtacattgccacaaacctgcaggatttccaggaaatctttttctataagaccttaagcttaaaggtcatagtctcattcctgatgtgttgctgaaagcaatagtaattgctaaaatattctgcagcatatcatattgtcctaaataagaacagctctgtcttgatataatctccgtgcagttgagggcatactttgttatgtgatccctcttttgcggttgaaattattca

SEQ ID NO: 31912 - DNA, 612 bp, Oryza sativa
tttttagaagttccgaacctttaaaaattggaccttgtagtttttagagtttattgtcttgttgggtttcattttttatagtttcagaagtcccgtcaaacgatgccactatacacctctatgacccttccgccgcctattctttattttcattgggattctaaaatcaaacataactatcgttggaatttattttttattttctaaaagtccgctaaccgtcggcggctctgcaactatactcctatacaccccgcacgctgcttctcctttttattctcattgagattttaaaaatcgaatatgtttatcaattggggttttttttactttttagaagccccggcaaccgtcttgctcatccctccttttaatcatcattaggattttatttggtgttttactaacaatttttatatatcgtattaactgccaccactattcctacttgaaatattttatttctttttctaatttattttttaattaataccgtatagtgttttttaatacttttattttttttattttttgaatttcagttgaactctcttttatttttttactaattttgaatattttttattctgaattttaattaatctcatattg

SEQ ID NO: 31913 - DNA, 635 bp, Oryza sativa
tattctttgtgccctaaaatactctctgaaatttcccgtgaattttcggagcttagaaataattttaatagcacaaatttcatttatcaattaaaataaaaagaaaacaaataaaatttcccctctttgtctttgggccgcttttggcccaagatcttttccccctccttggcccactcgcccctctccttcccttctccctctcaggccgacccctcccttctcggcccgatcaatttcccctcgcgcaaagtctaaataaccccctggctctcctccctctctccctccccgacaggtgggcccgacgaccccacctgtcaggtccttcctctaccttcggcctccaaagccgaaaccaccattgctgccattgctgccattgccgcccacgtcgccgccgattccggctcctcccgctcacgccctcgcgcccaaaccgcataaaatcggtttccctccacctcctccacaaaatcccccacttttccccaatttttggcgccaaatcaatccccacttcgcccacgatgtcgcccacgtcgccggccgttgccgcttcaaatccgtcacgtccggccacgatttctcctccccgagcctattaaaaagcaccctcgtgctctcctcttcca

SEQ ID NO: 31914 - DNA, 684 bp, Oryza sativa
aaacaaatatgcatgttttgctaattacatggggtcagggttttacctatctgctcgcttgtgccatgtttacttgatatctgttctttgtcaaccttgggtaatgaatcgactagctcatgttacttatgtgacctagctagaactatatgcttagccatgcttaattaccactagctcagttgatgggataactgcagtattagacctttttagtatcagagtgagctgcgtgctcgagacacctggccatgcttcatggtcgtaattatccaactaaaatgcgactgaatggtgggctgtgggtgcatggttttgctggtcgcacccatggcagttaaggaccggttcgcgggatgccctggaagaacttatcgtacttaccacaagccagcgtgggcaacggctgggcttgtagtgtagcttttctctagccgacgtacccaggcgagggtgggcgtgatggagttgggtcggccggggtgtccggttgatcggcttccggattcaccgcggcacgaaaggggggctgcccgttgcctgctggggacgggggcgaaccctaaggtgtggtgcgatcggttagagggggttatgcgaagggtcctgtcacggcctctttccggtatgtcgtggtggcatgtcggcgcacgggaacgtgtcgtggggctgtgtcttgtgggt

SEQ ID NO: 31915 - DNA, 872 bp, Oryza sativa
aaatggaatctggcatttataaatcatttaccctatgtccgcttcgactggtcccaattcaaataacaagtaattccaggaaaacctgcttgacctgtctttcgtctgaactgcaaccatcctcgatgctacttctctaagctgaactgttgacctggcctcaagggtgtacattagaattgaacctgttgacttgagattgggagactctgctagtggctcgcaacggactcctttaattactaaccaaattgctgcactgggttgaacattcaagtgaaatgccgacgaggtaaaccaaaactcatctctgagacctacccccttacagtgggtagtcttactttcgcctgactgagaacctttgaactgttgtccttgaaaaaaatgaccaacatttctcggatttacagatgccctgactttgaagactgaaacttcatcggtccatcaaattgaagcaatggcgatgcactttcatcccgacaagatttggaacttaagccttagttgatgataggaaattccacataaaagtgactctcatttagctcatggacacactgactcttgactgcaacacactactgctggagttctttccgctacacttgaccttgcatcgagctttgcatctcccgcatcaatacatccatcatctaatcttggacaccaaatgttgatcacgagcagggttcttctggcactgggataccttgtagctttcaactgaaccattgattggtgactttaattgatcttatctctgacactgaccatccgctgccaggacggaagagaggtggaagagaggggttgctaaagataaggtactaaaccacttgcctactgatatgttgtgagtagacttt

SEQ ID NO: 31916 - DNA, 1337 bp, Oryza sativa
ttctttttttccgcatgtagaaataaaatcccaaggcctataaaaatcactttttatagttattcacggaatgaattttaatttctcaagtggatatcctctcatttacctttttctttcaagttcaatgcaaatatttagttgtgaaaaattctgggaaaaaaatgtacttctattaaaatttattggtccaccaaaaatcaagctaggttaaattcgacctatatattagggaaaaaataaattcaggtataaacattacacaattattcatacgttgaatttgacattttgttatctcgatgtatgagttgatcagtttggatataagctctataaatgtgttggatgagtgttgtcaaagttttttagaatttcataaccgtttgaacagttttaaaacgtacaaacggacatccctcaagtgaatcaaaatagttttccagttatccacatgattgcacgattgtgctaacacatgcctcacttgctcgatccaattatcctcactgtacgtactagtgggcaacctgctagtccgtataaattaaaagcccacatgctatgctcactatactagtagaagaatacataagtatagctaaacaactgtgattaaacaggctttaaaacctagtagcttgtaccacaatgtactgctgatacattataatattttgcatgctttccatgtgcctttaatttgcaatttcgtgccaaccatatatatatatggccgttccaggcttccagcgacggtcctcctaggattatgggttctttgaaattatgtcaccgtcgtcgcttctcaaagaattatcacagcaaatcaagtaatataaaccacatggtatgaggtgatgaggtggaagatagaagttaagagagaatgatccacccctcgtgcaagggggatcgatgaggatccggcctataccataataatgacactaccaatacaatcactaatatatgggtcttatcatatgtcctattgccccacgtgtcagtacctataatgatagtataattatggtataggatgtgaattcatgtagggcaacatccacacaatctccaagaaaaatgaagatggtgtgggagtgaactaatatttgagtttgtgtattgcatatgatatattgtactttttatctcttaattaatttttagatgacatgcatggttttaaattagaggtggcattcaccttcactataaaacttgctctcagataagttggcatgagtcgcatgacataagcagcaggtgtgcagcaaattaactccaataacttactatcgatctcagaaaagtagaatatggttactttgtga

SEQ ID NO: 31917 - DNA, 1534 bp, Oryza sativa
tgctaccacatactagccttttctgcctctttaggaatagggacatactgtagtagccaccatatgaaagattcagtcttactactatcttctatgggcccttggtctttaagaaaaacttctgctaggaaaaggaagaagacatgcccatacatttagtgcgtgtattggtatctaaactaactagctagattttgcatctacctcagcattgcatagaactgctatatggattactacgttttggtaggtgcgctatcttaatctcttttttaagagataatatgaatctctgtttgagcaggtactatctttagtctttctattaattctgaactatttgaaaaacgtgatcagctgaatcaagaaaataagcacagagtagcttatggcctactgaaaccgttatatatcctataaatttgaactctctttattctttcatgtctactttgtgactacgtcctattctacttttagttagtacggtttatcgatattttaggtttgttggttcaacaactgaattggaaggaatcaccggatacgtacgtacacgaggtcccaataactaaactctagcttaattgtgtattcagtttttctatatagttcagttgtaatcctcatgataggatcgagttggagtggtcctgtttattcccattctaaattcaagttgcccggccggagtggcatggccatgctaccacacaaagtgggcaaatctaattgaatctctttaaacgattaggcttttaagcttttctatacgtttctaaagcactgcaatttgcaactcatgcatgcatgaaaggaaaaaaaaaagcagtacatgtacagattcagagcaactggatatcaaatagtatatgttctgcccttttaaagctgttatgtctacgtacagctcgttttcgttccgtcctgaattccgtgcttttacaccagatacgtactcttattcagagcatgtttgccatgttgcttaatttatgctctgttgcatcataaagcacaaatcactttgattatctttgtctatgttggctatcgaagaaatttcgtagttgttcgtatactggtatcataaacatatacataaatatcgtacagctactgacctcaacaatgacttgtgatcgctttagtctagcttttgctggctattttctgcactgtggcatgctgctctttgccttggttggaaggaatgcgcatggttcatgcatacaacgttgttcaagagtccatctcactttattttttctttggaacgaccgagactattcagatcagttcattgctgaatgggtttgagaatttaataatttgtttgcaacggaagaatttgaaggaattatgaaggatttgcgttgttttttttttttgctactacaaaaagtatcagtattgcaaattggcaacgccattcaaatggttgagatgtgttcaagaaagggtatctgacatgatggacacgcatttgtgtgtgcaagactgatgaacatatgaagtaatttggtttgttagg

SEQ ID NO: 31918 - DNA, 1413 bp, Oryza sativa
cgcgccacccctcaaatacgcagtcctcgtcacaccacgcgcgagcagccggcggatggggacggcggcggcagcggtggaagcaacaacaacaatgggaagttgaaggggaaggagaaggtggtgccggagtacggcaagaaccggcacggcatgcctgtcggtttctacttcgtccccatggacctagagcttttcgccatcctcatgtgcaagctcgtccgaggtgaggtccccggcgccctcaataacgtctttgagcatatcaggatacttgaattccaccccgccctcctccgtggtacgcccgcttcgccgccaccgtcactctacccctctcttgttgtttccttcgtcattagtattttaaatagtgggataagacatttagcggttgggtttctcaaacagcaatacctatagtgggttaaatggagttattacagttaaattatacataaaagcaaatagttggacccttcttttaacatttataaccgaagaatagcagcagctataactgaggatttaaaaccatgttcatcattgtcttcttcttctccggcgatggcgtgtgcagagacgtatatcgagaacatggaggacagatgcatctacttctttagcaggaggctattcgcagcgaaggctaggaacaagaggcagccgatgagggtggcaaacggtgggacgtggaaggcatctggtgggagcaagacggtgaggagcaagaaggttggcggcatcgatgttggtcagaagctcccatggtgttctacgagcgtaggttcgagggcgaccaaaaccctgtcaagaccaactgggccatgcacgagtacaccaagatcattcctagctccaaaaaccaggtagtacttggtaatttatatttaaattcaaatcagtccgcaaatacattacattacgatctatatctaaatagggtgtagctatatttatggcgtcatactttttataaaaaaatagtcggcatgtatttatattgtaagttcataaattacatatgtaattttagtgtatttacaatgtaagtctcaaaattacatatgtaagtactaaaattacatatgtaaattcgaaaattacatactaattgcatatgtaagtggggtgtaaatgaggtgtaactactgtgtaagtggctgaaaaaaatcgactatatttctagcaactccgtctaaatattgtgttttgtcttgtaattaacattccattatacggcctccattacatattataagtcgatttgactttttcatagttaaacttcaagtttatagacaaatataataacatctaaaacatcaaactagtttcattaaatctaacattaaatatattttgataatatatatatttttgaaatactaccatattttttctataaattta

SEQ ID NO: 31919 - DNA, 630 bp, Oryza sativa
gtagccgatctggactccagccgattcctgctctgtttccgaactcgatctccgcctccgacttcgctttgatcaaatcttctttcctgacacaaatgttaccaaatttggtcgttaacacatgccccccaagtccgggatatttgataatgttctggatttgccatgtaccggctccgagcaagtttcgcactccgccgcttttgactgttattccagcactttaaatactaaccgttaccccgagaaatctcacgccgtgacttccgttttcaccgctcaagcgaaacctcttctctctcttctccggtgattcccccggtgcaaaggcgatttctaggcgacttcctcctcaacgagatctccgcccgcaccaatgtcgtcttctgccagcccatctggtgcgctatcagccgaatacactgaggtaagttctcatcggctaaatccccttccttagcagcagatcgattttctcctacctcatattgctttccttctcttggttgcctcggatttgtagcatatttcccaccaagtcgcaattcccagtctgacgcatgaaaaccactactttctcggcccaatcggcaatcctgaccccaccgagttcattattggtgaaattaa

SEQ ID NO: 31920 - DNA, 653 bp, Oryza sativa
tatcctcctctgcggctttcataaaacttaatacgccatctctatactccttgtactaacgcctcaagccagtcgtgtacatccaacttcgatccatcgctgaacaatgaacaaaatattagttaacatctcataacataagtactactaaattaataggaaatgtttagtgcccttttacttacttttatgattttcctgtttttgtttgcaaaaaaattacaaaaattcgcccccttcaacctcccaccaaaatagtgaacagtgggataaactacagacaatggactgctggagtatatatagtgtgcaaagtatatctcaatcgggccaaaaaaatatcatctctaacggacgcacactaatctctaacgggcacaaatagaagcccgacacctataagagtcatcggtgatgggcattaaggccatctcaatcgggccttctttggagcccgtcacctatgacactcatctgtgacgggctcagtatttaggcctgattgagatagtggaggtcatctcaatcgggcctaacttcgagcccgtcacagatgaatgtcatcggtgacgggctataggaatatgcaccccgacgagtacatctacaacggcaaaatttaggcctgattgagatgacttcgttctgacggc

SEQ ID NO: 31921 - DNA, 920 bp, Oryza sativa
agcgcctttgaccataaatgctactcggtaccgtttttactagtttttttttatttaatctgctatcatgttttctatagtatggtttccaatctattaagcgatatgttttgtgcggaaactttcttatatagattttttcaaaaaaaataatcaaataaattcatcttctaagttagttaatatctttccgacaaaaaaccgttggttaatcactcgctaataatccgtctcattttacactctcctataagttcttcgcattttgtttgttcaacaaattagaaactagagggactttttcaaaacaacgtatttatcatagtagcaaatatcataatagcaaacaaaaaggcaaaaggacacaaaaatgatggtcttgttatattttatctagtttgggccatcaacatgctccgtattgttttgtgccgaggttaagcgaggttaagcgctacatgccaaaacccatattgttttgtgcaactttacagcacaatacctagggtctgtttgtgggagttttaatattctgagaagcagctggttggtagccgacagcttctgagaatttggaaaagctaatttctggttggtagccgccagcttccgagaatttagaaaagctaggtttcccagcttatgttttatagttcattttttagaatttacacctacatcttcttaaaacgtggaacaaaactgaactgtttggggagcttctgattttaggagaagctaacctggaacaaaagataaactgattggggagcttctgattttaggagaagctacagtagctagaagctataggcctctatgctacctacctttggaggtggaggttaggagcttcacctccctaatccgagaagctgcaatagctagaagctataggtctacctttggaggtggaggtt

SEQ ID NO: 31922 - DNA, 936 bp, Oryza sativa
gtcctccttggtcaaagcgtaaaggtccaggatgagaaaacagcagatcctctgaagtcattgacatgtgagtcccactttactatggtccacatatcagtgacttaactgcacagcagttaaatcagaggatcccttagaaaacaggaaaaaggagaggagaggatcagtttgcatgtagacaaccgtacttactttatattaaatcgctttcacttttttactacgtcaaagtttattaaccaaacctatagaaaaagttaacaacatttaaaatattaaattgattttattaaatctagtattgagtatattttgataacatgtttattttatgtttaaagtactactatatttttgaataaatttaataaagctgaaacaaatttagcgacatgtaatacaggtatacagagcacggagcagtaggagctggtggcatccatcagcgacggaggcagtgcagcaaacacgccgacaaccgtgcaggggggcatcaccacgtgccaagatccaaaatgtagcgagacgatcaaccgaaccatcgtgaataagcgaaactttatatttacaaataaaaagtaatttatgaataaaacttttatataattgtttttagctatctaaaaacaaaagctaaaaaataaagtttgataaaaaaaactttaaaatcagcttcaaatttaaaagtttaaattttaaattttagctgataagtccacgaaactctcttcggcgggacctccgtcaccactcaccagcaaaagcaggggacgcgccgtagcatatcaatctgcacttccgcatgcaggctgttataggatgtatgcgttcttgagcaaatggtaagttgtgaatacagaaatcgttaaaggagaggccccatcggttgcccactttttattataagccataacggcttattagcgattaaaa

SEQ ID NO: 31923 - DNA, 673 bp, Oryza sativa
ttcctgcagcccctgtagcaaattttgcctttgttttttcctttcatcttattcaccaagtagatcgaaaataatttaatcttttaaaaggctggaacacagtcaaattatcctataaaatattttgctacaacgtataaaacaacggttccgaatatattgaaacatgaaacaaatccgagtacatcagaaaaagtctatatgagattttgaagccaagaaaatcaaaaaagtttcaatctttttaaaagttgaaatacaatcaacaccttatgaaatattttgctaccacgtataaaacaacggttccaaatatattgaaacatgaaacaaatccgagtacatttagaaaaagtctatatgagattttgaagccaatcggatgctgtttcaccaagaaaatcgaaaaagtttcaatctttttaaaagttgaaatacaatcaacacctcatgaaatattttgctaccacgtataaaacaacggttctgaatatattgaaacatgaatgatgtagctatcaaaaatcattcgatagccatttagccttcccgttacaaatttgcctattcacataaatgtcattacctccttccttttttatcttcttccttctcactccccatcttcttcttgtcttgaccacgctgcccgacacgtggatgcgagcaaaga

SEQ ID NO: 31924 - DNA, 818 bp, Oryza sativa
aaatatatttcatattttttttataaaaaatacacggtttagcagtttgaaaaattggatcgtgaaaacttcggattagaagagcggttaaaataacaaacccttagtagtattaaaatgaaatttactcgaaactaaaattgaaaaccagcttttctccctccctctctcttttccttctctgtttttccttcttccgctgcagctgccgccggcgagggcgggggcggccagcatcctcgtggcacagccggaaccctagccgccggccgccggcgccgccacctccccgaaaatccgtcgccatcgatcatcctctcgcacaatcgaaggtaggagtgggttcccccatcccaatgcctctgtttctccctctccttcccccgtcctcatcgcctccggttctcgccgccgcggccgccgcccccctcgccggagccgcgccctatctcggtcgcccacctgcccgcacgtcgcgccactgttccgccgccgccgccgcctccgtccgcttcctctcgacaccctgatgctcgcccccccccctcctcgaagcctaggtcgccgccaccgcctctctcgccgccggcgcagctgaacccgtcatcggtcgtccttgaaccgggggaaaccgacgaccaacctttttttcgaaaaataaattagggtgagagaagggaaaagtgtttatcgtgctcgtcgatggtgtcgtttggaattaatgctgtaggaatatcttgtttgttatggatttgcaacaattttggggcaatcgagtggaagccgaaagaatctggtagtttcaccaccatgaagtc

SEQ ID NO: 31925 - DNA, 1448 bp, Oryza sativa
tgcagtttcgcgactcggtaaggagcataatagcaccctttcaaaccaaattcttgtggcaatgattaagagaataccttcaaaccacgggtaaagccaaagttctgcgttttgctctgaaatttatgtgtggcccccgatatatgttccaatcaggttgtgtgactatcacctgaacttttttgttgtactattaggagtcccccttttttttttttgaaaacttattaggagtctgacctctgttagcgtcaggcttcctcactggattgtactgtaatgttttgtttctccaccaactctggattagtttgttttccactacctaacatgaaaattgttcataggaattttggcatgaactttccactttccatctcacccttaaaaggcttgcaatagcatccttcttatgcgcgttctaaatagattattctcggatggaagctgatgaattatctacttaactgtatggaagaggcaaatcatcacggcaataatccagtggataaccaaccataaaagataagggctgaaaatgatttacatctagcatctcaagcttacattgcccctctgaaagttcaccttgcaatgttcaaatttggccgtttgaagagtacaataatgctactgcttttctaacagatcgtgcagttttcttctggtccttgtccgtcctgtagaaatgtgccgtccccggctaaactgacatttcaaatgcaatacttaatcaaagcatctcaatccaactatccaatacaagaccggcatctcagtttccccaagatattggagataagcatctctgactctagtaatctatcaagatcacaagaataacgaaaacatgtactctttataccattgctgggagattgaggagaaaacacttcgttttccgcgcgcatgcttcccaaactactaaatgatgtgttttctataggaaagttattttaaaaaatcatattaatccatttttaaaattaaaatagttaatacttaactaattatacgctaatggctcacctcgttttatatatctcttcaatctcagctgttacaagctgtttgggtcccgtgagaaacaaaaccacatggattgctcaaaacaaagtggttgaataaatatagtaaatttttatgtattgctttagacatagagaaaagataaaacatacatcagaacatccagaggatttagatcacctgtcagaattctaccaaaatatagaaaaaaaatttctctaccataaaatttcaccatcttacactcgtaaagcctcgcgtagtgatttttgttttttgataatgaatatgattatgccacttttcataataaactttcaagaagccttttaacaagtgtatatttagacaaacgattcaattaacttgggtgaaggataccaggagctgatctaagcatcaagctaaaaagatgggtt

SEQ ID NO: 31926 - DNA, 2402 bp, Oryza sativa
ggcaatggagcggttcgcgtcggagatggagaagctgtacacgcggcccaactaatccatccttaagtgggcctggcccatttaggaccacaaggaattcggatcgccaattggcccataatagttcagacatgggtccacgaagcaagagagttttgtacaccttaagtaccgacgaagcacctagtatgtacgaggttcaaatagttgtatacaaattccacaaaatttgagaagctatatagattgtaatgatacaagtcaatccacaaacaagcaaatataaattcatcgacacaatggagaagctgtacactcggcccaactaggcccatctggttctcgcgaagagggcctggcacagaaaggttgagatttggactttcaactaggagaaagctgttcaacctgctgttgctccttgcaatatttgaaggtattgtgtctatgaattacctgtacctaaaagcatccttgtgcttcatttagttaaatctgggatctgatcacttaatacctagtaattgaaggtgaggtggtacaccttttttttttcttttttttacttttgggtatcaatggttcctgcttgtcataccaattcagtcttttccaggaataatgagttaacgacaattaacaatgatttatatctcgtttcccattataacctcggtgtgaagcattgtttactgagtcatcctatggaattcgtcctacaagaatcctttgctatgaattattctgaaatgttgcagcaagatcctgagataaatttgctaatcaagtggtaaagatgataaaagcaaatatgcgactataacaaggatgatgcctttgaggttgatttcaataactactccctctgtccctaaatatttacgacgttgactattttaaacatgtttgactgttcgtcttattcaaaaaatttaagtaattattaattcttttcctatcatttgatttattgttaaatatacttttatgtatacatatagttttacatatttcacaacatgtttaaaaaagtcaacggcttcaaatatttagggacgaagggagtacatcatagaagcatttgttttttaaaaaatgtataatacagtgatgaatattgtttttggaatgaacttaaatactgtaacatacatcaatacatttttttcaatcacataattaagttttttttgggtatatattcatggtatttcttctttgacataagttgcagttactacttcctcatcggagcagctaacacaggcatatgcacttgagcggctgtgccaatcgaggaagaagatcggtgtccgcctattgaatttcacatcactatttcacaatacctctgctggatgtctttggttcttaaaagagcccacagtcagaaacatccagggatcttccggctagctttacaaggtggtagggtagatgacctgggtaccccttctaattatttgatactagtttattccctaatattcgtgttttttaaaagagccctacaattttggagatatccgtgagattgacattcacgatttagtttttttttttcataattgagtgcactcttgaaatctagtctcatattagggactagaatgcattgcgcaatagatcacccacataggattgacagaacatgcaggccagaagatttggagttatcagtaagaaaaatctgaacatgagactctggcattatacttctgtatgattactgctgatgcagcccaaaataaccgaattttctgttcctcctacttatttgatctttgtatattttttctgttactactatggcaagattgtaatgttgcaggtagacattatcttttgccatgttgtgtatgatgcaattgagataaatagatattcaaattgcgttaacaattttgtctgcataggaatttgcacggtgcacggtcccaaaagaacacaaagggtagcatttttctcaatttcatagaaattttaggggcaattattttcttctctttaaagccaaaggcaaaaatgttcccttcttccgatggtgaaaccgggaatgcgtaatgtattctttccctactaattattactaaaattttatcattttgtttgaaatcttttttttacctctaagtgaagaaaagtttttagttgggcttgtatcctgatgatctaataactgttattttagtttttccgttgtaacgcatgggtatcctcctagtaatttctaaaaatacttgtcttagaaatatggagatcatatgtataggttagtattaagaaaaatgtttgagcgtaccaatcatatagtagaaaatagtggttaaagttattttttgaagagtgcatctttatccaaaacaataattgttatcaaactggaggagtatatgccgtta

SEQ ID NO: 31927 - DNA, 696 bp, Oryza sativa
agcatggtacgagattaatatatgaattcgcttagtcgagatgaaatggtttttagatctcgtgacaatgttgtgttatgtccgttcaggcatatttatatgcaaattcaatggttttagaaacttaaggtgttcaagaaaaagaaagagagacttaacatctgtcgataatccaactcatgtcaaaagttaattacaaaatcacatactaagataacgaaatgaagcacgagtacatctataaatctatatctgaaccccctccccgcatcccctggcacaaaaattaaaaagcgagaaaagtaattgcaagaaaaatgttaaagaaagaagaaagaacacatcggtaaaataatattattctcagccagtactgtgtttgattgaatctaaatatcaaatccttaaacacaaatcatttgcaaattaatagtgtcatatgagattatgacaatgctattattacaagtaatcaccaatggctataatgttcactcaaggaaacaggtgagatctgcaatagctctaagggcatgagtattgtagtattaagcagtcgataagcaataaatactttttttctatccaacggtaaccattgtgatagcatgtaacaacaactaccaagcatttatgctaccgtccgtaggaaggaattaaaatacattatttatacagtgttttcagacacatgca

SEQ ID NO: 31928 - DNA, 1611 bp, Oryza sativa
tcatattaatctattttaaaatttttgtaattaatacctaattaattaaacataaataaacaccgtgttttcggcggagttctaaactccacctccaaacatagcgttaagctgtgctcagaaagaggggttgggaaccctcctctccagctcgcattagcacatgattaattaaacattaattaaaataaacttaaaagatggatcaatatgaattttaaaacaacttttttatagaaaacttttataaaacacacctccagtagtttggaaaatgtgtgcgtgaaaaacgagaaatatgagttaggaaagaggggaagaacacagcctaaattaagaaagatgagttgggaaaaggaattatattttacttcccccaaattctttggatcatgtaacacctaaattatttttttactcgttgtacttcctaaactattaaaattgattcattttactgcttacttttttttctctttatactggtcgtattttaagctaaaattttgtagatccatagatgacactattattccaaaatatttttcatgattatttgcttaaaatttaaaatctcgatgttaaattagtctcatggtttccaacctactaccttcgtctcatatttacacgtcattttgactttttttctaagttaaaattttctttagttttgatcaaattttagaataatatatatagcaatatttttcaacataaaaaaactatcaaaatatattcaatgctatatttaaccgaactaatttggtgcaataaatattgctatatttttttataaacttggtcaaaagtttgactttgaaaaagtcaaagcaacttataatatgaaacggcgggagtatgtaaatagtgatagaacaatttaaaagtgttgagagataaataatgcatctatcaatcctacccaaatccattgcaaggtacacaattccagagcaagatacaatctatagagagaaaaagaaaagagaaatgccattagagagtaagcttaccccttttttttaataattcaaggtttaaaatgagacaagagatagtttaagggttcaagtgctatgcaacttccttcgttaagtacaattattttttaaataatttttttacaaataaatattgaactggggaatttccaacaaagagctggagtagctcagttggttagagcgtgtggctgttaaccacaaggtcggaggttcaagccctccctctagcgcatttatttgatttgaattttttcttccgccacttatttgccacttgagttgaatttgatatgaaccgttttttcttccgccacttatttgccacttgtttttcttccgccactttatttgccacttgagttgaatttgatatgaaccgccacttatttgatagaatttttttcctgccacttgagttgaatttgatatgaactttttcttccgcttatttgatagaattttattttcctgacacttgagttgaatttgatatgaactttttcttccgccacttatttgatagaattcttttttcctgccacttgagttgaatttgatatttttctcctgtcacttgagttaaatttgatcttttttttcctcg

SEQ ID NO: 31929 - DNA, 1194 bp, Oryza sativa
ggcgccagcatggctggcgcgcccctcctctgtgggccgacccttaaaccccgtgggccccaccacctttctcctccccactcccattttcgccaagtcccagcccgagcagcagcgcaggagttcttcccctctctctccccctcacctctccacctcaaatccactcaatttgaagccgtttttcgcaggattttttgtggaaatcgaagagaaaggtagactccttcattcccccctcttttttttcgtttttattggttgaatttgtagatcggtgggtaaccctagaaccccttttttacccaaatttatgatttttagcatttgttcttaggattggcttgttgtagtgctacatgtttgcaatgtactcattggtgtcatgatttttttaaccatatatgtggtaatgttaatttttggatggtttggttggatggatggatgaaaaattatggttgaggcatgacggaggtttgggttgtatgacggagtatttgtaatatttcgatgtgtaatgcactagtaaacttattgatagttgtaggtggattaaatatttttttggagtagtagctttgggacaatttaagttatgcattggttataatatgtcggtttggacttcgtttaggaatgaagatttaatttttgttgcaaagttacatttgattttttggtgtagatggatagacttgttcatgtttactacggtggtagagtggtggaaccttatgttggtgcacatgttgagtttgaggatatgtcattgaagaccattttgtttcccacccacccaactctagatgaactaaggtcacgagtgaaagaagttcttggatggaccgaggataatgtggagattcgtttttatgggagatacgatgttggtcaagggcataagtatatattaaatgtgataggtcagttggaatgggaagtttactttgatttggtaaaagagtctcagtttagatctctagaggtgtttgcatcaaagttagttcgtaccgtagaaaatttggatctaaacaaatctccttcttatcattacgttgagaagaattttgtgacatattattctcgtcgtggagggagtgcaagtaagactgagttggtacgggaagacttggagggggaaggagagaagaagagacctttgcttggaaatgatttatgggaggcaggacc

SEQ ID NO: 31930 - DNA, 806 bp, Oryza sativa
ttcttagttaattaattagtaatcagtgtggtgtgatcatgagttgtcaaggtatcttgtttggtatagctctaactctaacttcagctctagctccagctcgagcttcatctctcctggagtttgagtctagccaaatagtttagctctaatatctaaaataggagtagagctgggtggagttctctcacatgaactaagagaggtggaactgctcgacaactccacttcaaacccaactcctagagttaaatttagaagttggagctctaccaaacagttcatatgggtcatatcagtcgctaatttacacactatgcatgacgcaattaattagcccctgatgcacatggagtaagtaaaataattgttgcaccggacgagctctttttagaattaaatttgaaaatatactgttgatttgtttgtttctcaaaaatattcggaatgcaaatttattagcagaaatataccgtcgatctcgcacaaccattccacgaaagtgacgtggaagtgatgccctgaacggtctcgcgcgaagagagcgcgagaccgcacggtatcgcgtgatcatagcacgataccgtgcggtctcgcacgacgaaaaaacgataccgaacgacgaaatcgaggacgtactacgtggtggcggcatcagaccacgcggtctcgcgcggccaaaccgcgagaccgagcagtctggctcagtcagtgagcgatagcgactgcctctaccgattgaataaggttaattagtgattaattatcgataattagaataattaatcactaattattattaatta

SEQ ID NO: 31931 - DNA, 2263 bp, Oryza sativa
  unsure (1)..(2263): unsure at all n locations
acgacattctagatgaaagggagagggtttagataccgaccggttgaggagttcgtggaggaagaggcgccggacatcgtcgttttcgtcgcggcttgacgtggatgcggcgccggtgaggtcgacggtgatgacggctgcggcagtggtggtcgtagacgtcccggcgatgaggcgtggcgcggaggtggcgtttcccgtcactggctgcgccccctctcgatcggattagggttttgtggggtggagtnngcngnngaagnnaacttcgtacgttgtgccgtgccggcctccacccctcttttatatggcgcagtgtgacgatggcccaccagccattgggctgggcgcccccgatcagggcgcggtcaaggcccccttgagccattgggctcaaggggagggagatctatctaacagtgggaattaagcacctgcctgcacagttgacaaaattgtaaaccttttgtattggctcggtgacatggtgcaagttcagttaagcaaagttgagaatctctatggagcattcgtgaaatttcggtattcaaaactcccaagactttgtgcctggaaattttttttggatctatttgaatttagttaaaaatcattaaacccattaagaaaccgctcaagatcgaatccaataaaatattgaatttgttggtctatataaactttatttttacgaaatgcaattatatacgctagaccctagttaggtcatgttcttcgatgcatcttcccatctctacttcctcgtttttcgcgcgcaaaaagttgttttaaaatgacatattaatccattttttttaaaaaaagtataatatacttaattactcatacgagtcgctctgttttacgtgcagagatgaattcttatcgctggagccgaacacaactttagtgcggaaacaatctttgtctgcgacttacaccacatactcgaaaagtgagaaggttccttatctctattgacgaagattgtgggggaggagttttcacgttgggaaagcgagagcagatgacatggttcttcctcgatcgtcggatggttttggcatcatgatccaacggtcaaatctcttgatgtgtgtgaattgtgatgaatgagcattggcgacaaatggacacatgcatggtagaaccatccatccatgaagttggataattgctacttgaaagagaggaaatattcggcgtattcaaattaattttaagtcaataatatcaaacttagtctctttatcccaaactagggcctatctgaaacatgttattgtagaggattatctagctaattgatcgtaggggtcattatccaaaaaaatgatcatagctaggggtaaattaagtaagtttttttaaaaaagaaacttagcaaataccttacaatgagtggtctaaacaatgtggtaaagaaatgtttccaagaaaacatatttctacttattataaaaattaaagatgttttgcctggtattttggtaaatcatccgtgtttgagtcggtttttaattaatatcatccgcttttagaaatacaaattcatatttgaattggattttaagctcgtttgcttttggaaatacaaaaggagtcgtacaagaaatctcttttaaaaaactccgcatgctaacttgagatgaaaatcgaactcctaattgcaccttatgattttctaaaaaaaaatccaagcggattctcactatgaattttaccctagttaaaccgtacatactaacaataataagattaaaataacgttcacccattgcaacacacggatatttttccagtttacatagacgtgaagcaaataatctaggataataattcagtgaagtacgttagtacatcaccaacagggaagggcattgccgttggcaaagaccgtcaaactgagtgcaaaagctaccatgtcatctcgccatctaattctaggctacataatgttaaatttattttattaaaaatatttagtttatcactataatcgagcggataatccacgacaataatccggtcaataatctgaaccaagctgggcaaaattatttctccgttattgaatccttctagtttaagtcagttaataacaacagaagatttttcagaaggtccagatcagcacggtgaagataagggtgactagctagctagctagttggctgcaacaatcaacaaaggcagcaggaagaagctagctagctgcttcaaaagtccaaaagagtttttgctgaaatccctagattcccat

SEQ ID NO: 31932 - DNA, 1364 bp, Oryza sativa
tagctcgtgaacattcgtatactagacatccccttcactatttatacaaaaatatattgatagtgccgacatatatgaattaaaacatcatcactttaataatagatcacaaaaacattacttggttggttgaaaacaaacaaatacaactagattacgtcacatttaattctagatttgtttttttggatggaggaagtaccaaaaaattgaccgtgcccaccacaggacctgtcgaacaaccaattcgagaggtttaacatgccacaaattgtattaattgcggctgtttgatacgagacttgtaaactttgattgttcaacatggcattaaaattgcgatttcttaccattattgttgcaatttttattaaaagagtactattattttttttaaataaaatcttcatatatggatgtatgcggcgagatggagtcaggtttcttaattaaattcgatgcgcgtgtccacggcctgcaattcaataacagaatctgattcgaattctggaactctcctgatcgagtccagctgacgcactcaaacagacgaaatcaaccagctgcaattatttgatgacgtaattaaatcgaattgagattacgtatatatacttgtatccagaaattaaagcagaagaagttcgaggccgcacttttgttgtgtttgtgtgtgtgcatgatgcatgcatgcacggtcaggtcaagtcttgctctatcagactactgtttgagaacacgctattcctagctggtccatacattttttgttgctaaagcttcaaatggttcatacagctttatgttttaattgacctgcagatcgagtgttatgcacataattatcatgaagacgtcgttttcgtcaggaaaatacactgcattttcctaagcttctgatatgatctcgccttcctctgttcttggaggctaaggtactccaaagttattattagtgtttcttctatcatttcatctccatctataaatacctgcctcgagttgcttcatgatcattcattcagagcaagctcaacctagctgatcagtactcgattgatcaatcagctatatatacaagttaattaattacttgctaagtacggagtaattagctagcctttctctgtgtgtgtgagcaagacagattaattaatatgccggcggagatcagcgtcctcagggtggataggatcgagccggcgaagaagacgaagacgccgccgccgccgccgacggcggtgaactcggtgcagacgccgaggatgggcggcggagcaccggcaccggcggcgactagtactgcaggccgcagcagcattgacgcggaggccgaggggttcatcaacagggtgaggcggcaa

SEQ ID NO: 31933 - DNA, 1638 bp, Oryza sativa
gcgcgagaccgcacggtatcgcgtgatcatagcacgataccgtgcggtctcgcacgacgaaaaaacgataccgaacgacgaaatcgaggacgtactacgtggtggcggcatcagaccacgcggtctcgcgcggccaaaccgcgagaccgagcagtctggctcagtcagtgagcgatagcgactgcctctaccgattgaataaggttaattagtgattaattaatcgataattagaataattaatcactaattattattaattaatcattaattaggataattaatgactaattaagtagctccgttggacatgacattcggtctcgctgattccttacgcgagactgttcggtcttgctgcttcatcacgcgataccgcgtggtctcccgctcctaccgcgcgacaccggtatattttcgctaaaaagtgtatatcacgaatattttcacgaaaaaaccaaatcaatagtatatttttaaatttaattcgctctttttatcactagctaatagccaggattacacaagaggcatgtggcataaaagtgcacttgaccagcaaaaatgtagtgttcaaaactaaaaaaaatcatgtgtacttattggcagattaattttttttactatgtatatatatagatcaaagcgctctctcctataatattattggcaataacatattttgacaaagtattgatgataaaagcctttggggaaatttgcaagatagatttgcatgcatggtatatatatacctgtgacaacgttataaaagtaagaaattattcttgcattctagaaaaaacaatgtgtacacattaggaacttgacggcagtagtttatattattattgcagtatatatgccaatcaatgcaacatgccatcttttatgaccagaggaaccaagccaggaaataaaagcatagctagtggatacccgcagctttgctatgggattttataaatctttctaatcaaaacaactaaaaacaacattgaactaaaggcgataaaatactcaatatatgcatgttaagccacaactaatatagaacaattagcatacgtaataaatttatagttatgcttaagcatagaaataatctaacgaccgtgattaagaatgatagtgatccagcggtccttttttttttgttgacgacgtgactcaccgcatgttaagcgtaattgggtctaactatataactagtagacatgggcatttttatgtcatcttccggaggtagctcggtgacgtcacatattattttctattatgtggaagcaagaaacgcgagaaggttagtgggcgaacattcacccactacctatctcgcgaatcggtcggaacgaagaggatgaaagatgtgccacggaggagaagggggaactcatgggggagcgatattgttcttccctttccaattttcggttttcctctttttatgtggtcctttatctttttctttttttcactacctttttctttttcagatttctttttttaactcttttcattgtttctttaacataaacatttttatatgaattatttcatgaaaacttaattcctagatatacatatagattttatgtatgtaaagtttctatatgtagactttatgtatataaactt

SEQ ID NO: 31934 - DNA, 539 bp, Oryza sativa
  unsure (1)..(539): unsure at all n locations
atggattactagtagcttgaaaattgtttacttgcccgttcgatagtaaacaattttttgcgcaacttacagccttattatatcaaaatattttcatctttctgtcaaaataatatatatttcatctgagatgttggtggcctgattgaacttatttctacaattccactcgactacgattctaaaaaacgttaacttttctttttagaccaatactatactacgggttggtttggtttgtggcctaaatagaccttaccaaattttgtcaatgccaaatttaggcannntnacgtagagaggaggtggaaaannnncnncncnnccccccccntcccttcctctctcaaacttcctcctaccttcacttctcaccacacctcatcacttcctttacaatctttcattctcaaaatcaatacatatgcagttacagaagttaataggaccaaatggtaggtcctatataaggataacgttcaaaatattataagcccttgcgtaccatgtcataatatcaattgaaactttgaaaagga

SEQ ID NO: 31935 - DNA, 2221 bp, Oryza sativa
ggagaccaagaggtgggcgcacacatcaccctcgggcccgacgtcccccgagggtgccaggccacgtgggcgattgtgtctgcctcaagcctcgagtcatgatactcccggtcccatgtcaccgacacccgtccattgtcttttctctttattgtcattgggattttgaaaatcgaacataattatcgttcgggttcatttttttactttctagaagtcctaccaaaccgtcgacagctttgccattgtactcctctatgactcgctcgctgcctcccttcttattatcattgagattttaaaatcgaacatgattatcatcgtttttttcactttgtagaagttttgaacctttaaaaattggtttattgtcttgttgggtttcatttttttataacttttgaagtatcgtcacacgatgccactatactcctatacgacccattcgcctcttagtctttattatcattgggattctaaaaatcaaacataactattgttggaattcattttttattttctagaagtcccgccaactgtacggctatgtaactatactcctatacaccccgcccgctgcttctcctttttattgtcattgagatttttaaaattgaatatgattatcaatggggtttattttttctactttcaagaagtcccggcaaccgcattgcccgtttgcttcacggccttcctgtcgtccctccttttaatcgtcatttggattctatttggtgttttatgaacagcttttatatgttttctcaaccgccaccactctacatttttataggccaattacttataattctatttggtgtattattaacaatttttatatgtcgtatcaaccaccacctctctattcttttataggactgttacttaatttatgtcgtcatgtgttttacatggtcttttctttcaatagtatttattttttatcaccaattttagttatttataaattatatttctaattaaatcttttttctttttctaatttcagaatttattttttttccaaattttaattaataccgtatagtgttcttttaatatttttatagcaaaatttgctacaggacactcaaaaaacgcgtaattagctgagggacaccgagaaaatgtttaactgctccaggacactacaaattttgtgaaatttgccgtaggacaccgagcttattattttatcatttcccggctgaaagtggcgagtattttttcaaaatgcctaaattgccccgcgtcccaatctatactctggagctttggagctgatgatggcatcaacctgctctttcggggagatgaagttgtgcgcagggttggtgagatccggcacgaggaggttgtgggcacacaccatgtctgcctcatcgaaggagcccatctcgatgagcacaaaggcgagcgcaaaggcgatgtgcaggcagcacggggccatccatgctgctctcctgaggtgattcgtcgccttttgctgatccgcgcgcgcgaagtaccattgcgcaaggatggtgtggtacctcccgaggagctgcttggtggcgagcccgtctccgcctgtgtcctgcagcgcggcgatcgccccgtcggcctcctcggtgaatgcggcgtcacagtccgaccagtcccagttgctcgccggccgctcgccgctggcaccggccatgggaggaggaggaggaggaggaggagcgcgtcacgacgttgcagcccgccgcgaggcagacgaccgacaccaaagaagcgcgcgcgtgaggtgtttgtcgaaatgccgatgtggcgggacgcgacgacttaggatatacgcgagacttaggatataccgacaccaaaggagcgcgcgcgtgaggtatttgtatggtatggggatcgttggaactaggatatacgcgagacttaggtaaaagagacagacgagaatttttatacaggtttgggcccctgaattatcaggtaataaccctacatccttgtcagggttatggaaaccacataccatgtcggtagggcccaccacatactatgtcttatacggaaactgacctcgagggagttccggataaggaaagacaaccaaagttctacatggaaacgacaaagactgctcgaattgtatccatattggtttccctagttctacttggacaaggggacacatatgggtataaataaaaggcatgcaagcttgagtggggacacaatcaac

SEQ ID NO: 31936 - DNA, 1286 bp, Oryza sativa
gaatccgcatccggcgagatcagagacaacactatatctctcctgacagtagccataggcaccgtaggggagtagccatgcctatctctaaagtcgatatccggcgtcttgtcttggcgtatgttcgcttgtatgttgtggcttctgttgttccgtgtcccttctcctcctagggggccttgtatttatacccataggtatccccttgtccaagtagaattagagaaaccaatatggatacaatccgagtagtccttttcgtttctacgtagaactctattcatccttccttatgcggaactcctcctatatccgaaggttgttttcgtataagacatggtatgtggtgggtcctaccgagatttagtcaactactattaggtatgtggtatccataaccctgacaaataggacaataggttttcatcaaagtctcgcttgggaaacatattagttttttttattgattttagacaattatattaagtgatactctttctgtctcaaaataagtacaattttgtactattcatattcaacgtttgaccgttcatcttatttgatttttttataattagtatttttttgttattagatgttaaaatatgaatagtactttattgctattagatgataaaatgtaagattttaataagaatataagtgcaacgtaagtactccatccgtcctaaaatataaaaactttttaccttctagaatttgactcaaaatataacttctcttcccaaagaatcataaccttccatcattcaatttttccacctatcttcaatttcaaactatataattataactttttcttatttaattctacctattttcttaatacccgtgtctacattcttgtatttagagatggaggtagtagaagattataaatataagaaaacgtaagaatgattgtttgaatataccacgggagaaaaatgttgaaatcggttgagcgagatagactcaataaaattttgcaagaggttgaatctcgtactaacttttctctaaaatatctatattgtccattcaataagaattacaaaataaaaagatataattcaatcatttatttcaaaagccatcctagtatttttcttcttatagaattgaaatgccccaagttttctatatgtttcttacaaattgtgtgtgtgtggggggggggggggcattatttcctactccagatcgtactatatccatacctaagctgtcggcaacgatggttgctaatgccggctgtcggaggattttaattgtctagaaaaggg

SEQ ID NO: 31937 - DNA, 874 bp, Oryza sativa
aaggcggaggaaagtggtatcagagccatctcgactgtagggtaagccaagtggataaaacctaaggacatattttataaataaaactatttgcgaaagttcctctttttctccttcccctaatgctatttgcaaaaggtttactcttttcttccttcttcaaatttcaattagtactagttggtcagatttgtgaagaaaaagatatcgtcagttgtttgccgaagctccggaagactgcaggattcgctagcgaagtgtaggaagcagtgaagccagctgtgaagccgaagctaagatcttggagaacctgtcgctgaacctaagccaccctctagggtagagtcgttagtcgtgtgttccttgcttgtgtgtgtagtgcgtggtttgcatcggtgggttgtgatgtgaccatgctaggttgtttgtttaatcaacttgcagaataagcaaaacaaacaacacatcaacaaaaagagttagttcctttaaggtcttgtccctagctctggtctattctttccttgtatgcttcctctctcaacccctaccttgtgacagatggataacactggtaacaaaggctatgggaatgatggatccgatgactcaagaacccaagccaatgggaatgagaaaagcatcaacgaaacctcaccagagctaatccaaattgtggttaaccaaaccaacatgttggcaacagcctttcaactattacagaatcggaacaacccagcaggggcaaccaacgttcaagtacctacagtccagcaacagtgcaagttatcagaatttctcaaaacggggcctccaacctttgccatggccgtcgatcctatggaagccagtgattggttgcgcacagtcgaga

SEQ ID NO: 31938 - DNA, 677 bp, Oryza sativa
tcggccctagagaaaactaagaatctatatttatgtgagaattgggtgtgaaacaccggtggagttaattcaggtgtatatataagaaggtgttcataatctcaatgtatcggaattttggttttttgggggtccactgctactggcctagtaatataatctccgcagcacacacagtctgtacgtagtatggcgtcgcacctcatggcaccgcgagtctctgttggcatccatgttacttcctcgcagcaaagctcacagatgattaaattgttggtaagttatgggatccgagggtctcgagcatgagcaaattctctcggcgcgcacatggacacatcacacatggttggtgtcctctacagaaagacccattttgtcttctatcgaaagacccattttcactttatgtctgtattgggtagaatctcccacttgttagggcgaagctaccatgaagctaagagctagcagaacgaagaaactgactatgttggtcatctaggcatatgacttcaacactcataaaaaagtgctcacatgtactccatccgtcccataatataagagattttggtgggatgtgacacattttagtactacgaatctggacagagagcttgttcagattcttaatactaggatatgtccacaaaaatcccttatattataggaca

SEQ ID NO: 31939 - DNA, 546 bp, Oryza sativa
ccccgtccaacccgtccaagccgccgccggtaggggacgtattcgccgacgtcttcggaaccgttcgtcgtgagccggtcgtggaccgatcgatctcagccgtccgttttggatagggttgatctcggccgttcatttccgtgaaccgctgccgtgcacccggtccaccgcaaaccctagcccgctgacgcaataatccttcttttccttttcaaaaataattcattattgcgtcataattcaattaaaatccatataaaggttttaatccgatttaatctttaaaaattcataactaattcatttgaactcagtttaatgtggttcaagttgcaaaaattatataaaataaagatctacatattaaaattgtccataaattgaattaaatttatttaattctttttaaatgggctttaaatagatttaatcttgtaaaattcataataaattcatttgaagtcagaatgaggccgttcaagtctcataattcatctaaaaatatgatctacatgtttgtttactttttatgtactgtttatttgg

SEQ ID NO: 31940 - DNA, 764 bp, Oryza sativa
ttctcgggctccataggtgcgccggcggaagatgcgggagtgattccgaacgactccgacggagaaaaaaagggaaaagagggggaaacgggagagggaatcacggggagtgattcgcccctctttatggcgcgcggggaaagcgggatgcggcggattcggcggcggcggcggcgctagggcacgggcggcggcgggcgcggcgcggggttggggatgacaggtgggccccacccgtcagcgagggcggcgggcgggcccgcctgtcagcggcgcgcgcgcggggagtagccgatgggacgcgggggaagagagagagagggagggactgggccgaggggaaggggcccaagaggagggagagaaggagggggagagaaagagagggaggagagggagactttgggctgggcttggcccaaaggaggaagaggatttatttttttaggttttcctttttagtaaactttgataattgtttttgttgcttaataattatttccggtgctctgaaaattcaagtaaaatttgagggctccttttagaccaaggagaatttaacaaaaattctccgggccacattcgaatttttcttatacgtactttagtgtttgccaatttcttttcgaattttaattaattctattattccttttagaaaatgaattttattttggaatgaatttatcaggacgtgacaaatccaccccccttacaggaatctcgtccccgagattcgaggaggctagcaagaagataggttg

SEQ ID NO: 31941 - DNA, 698 bp, Oryza sativa
ctcgatccaatggtaatttctaagtttccactatatatgtggtttgtactatatattttcccaatcaaccccttggtcctcaccgcgaaacctctgtaaaaaaatacaactagtattttgttcaactcgcctgtgtaaacacatagtactacctctgtcaaaaaaaaaaacaccaatctagatggaagtgtgataccacctgagattatccggttcattataggtgatgtcacatttttatttagatttgttttttatcggaacggaggaagtagtaacatttacaactatgctaagctttatgattaccactaatgatgatatgatgtatctacctatttatattttctataataaagttatagtccgctaaatttacaactcaacgcgcaacaataacacatcatcactcactatcaataattacatatttaacataatgcaagcatacttcatctacaatttatttaattctataaatcaacatgtaaccatatccaattggggatccattacatcgatctgcacagtatgcaaacaaacctatgtatcatttttataatatttaaattatacttatcaatatgtttcacattaaagtgcgggtatcatttgtttgttgcatgataagtactgataaaccagaatttcattttttttcattgtaactcctatatgcattgtctcaaaatatatat

SEQ ID NO: 31942 - DNA, 512 bp, Oryza sativa
tcctgctatcccagtaagtttcttttatcataacaagcattcaaatcggcaataatcgttaaacctctaatctgcttctaaattgtcactgcaagtgttagctgatcttttctcttttgacatcagagactatcttgatgaagaagaagaagataccacaagcaaagccttggctcctttatctgatgatgtgaaaaaaactctaggaagcattttagatcggctagaagcatcatcgctagacagcttggtggttgattgtggctcaattagggctcggctacacaagattcaggctttaatcccagatgagttagccgatatccttactccagccgtttaccttgagcaacaccaattcaaactgcagaaagccaagttaagactagccgaacggcgagaacgtaaggacattgaggccactatccaagctagccgacaacttgtacatgaagagaagtccaagcttgatcaattatataaagggcccaatcaagtctaacattgatcgg

SEQ ID NO: 31943 - DNA, 1065 bp, Oryza sativa
aaccttacgaatggcaaagtatccaaataaatgatcaaaatgttgctttgagaatattgaacgacacagcatgacagtttaaaaactgtcatgctaataaacagaacaattcaaggtgaaagaggtacaagcaagagaaactgaccttagtccaccctctgtgctgttccaattctcaatcggaagatgtctgctatacgtaacagacaccataaaaggttgaaaagatcaacaaccttgatgtgcttacgttgaggtctgcaattgaaacttctcaacagttcatgggtcatgaattcctttgtccatggtgacaaaacaccaactctacatcagcatctcacctgaagaactcatagattttcttttgatcatatacattacatcactaatttcttttatcaagcctttgcagcagtcctttcacactagaattccatgtagtcattatgctagaagtatccgcataaaggtttgatggttataatctgacaaaatacaaactatctggtggcatccaagcagttattcaaccaaatatccttaaacatttgcaggtcatgaactcaataggtcaatcttcccttgcagacagatgcctaatgcctctgtagacatgtaagtatgcaacccccaggccccatcacatccaccagtaatcgctttgatcgattgtgaaacacagaggtgctgaatactcttcaaatgaatcaattcaataagcatatcttgcaaccaaggagatgaatagagtcacaaacaaaactctgcacaaacttatcagcggttatcatcattaaacagcaccttgtaaaaactcctcctctctctcctcttctcagcactatccaaccgcgctgcttcctcatcgtcctcctcctcttcctcctttatctcaatctcttctctccttctcttcttctcaaattatccgaacgccggcgctgattatactcatgcaggcccttctgcatcaacttcccgagcctatccttcgccgctaccaccggatcctttctcctaagctccgacccctcgtaacccttccggagcaccaccgtgtgt

SEQ ID NO: 31944 - DNA, 1069 bp, Oryza sativa
cgcattggtggaggcgcaaagaatgtgcttttaggacatgtatagctccagcatttgctttctgcaatgattggcactttttcttcaatggctatctattagtcttcatttatcaatgttttccaagttctgcaacaaggaaaataaagaattttatgtttgcaaagattagcactctcttttcaatggctttgtggcaatcctcatttcccacagttgccatgccattcaacaaggaaaataaaggcgcattcatgaccttcactactcatttggttctcaaactgtaaaatttcctttacatatctattactccatgtatttcaagctttgcttgagcatatgtccattatgaacgctaaatatcacaaagggatatgattaatattagctactgataaatatgtactaacacaaaaaaatatcaaactgggtatattctaatttcatttattttgggtggttaacatggatattctgtaaccaaatgtcaactagttcgcttaggactcacaaattttactaaaaatgttgtaccgaaacagcatcctattctcgagttccatttatgttccaagattaacaggcatcacgggttgtaaattgcattgcggtcaatctatggacacgactgatcatgcgctggtacactagcatatgcaaataaaaccttacgaatggcaaagtatccaaataaatgatcaaaatgttgctttgagaatattgaacgacacagcatgacagtttaaaaactgtcatgctaataaacagaacaattcaaggtgaaagaggtacaagcaagagaaactgaccttagtccaccctctgtgctgttccaattctcaatcggaagatgtctgctatacgtaacagacaccataaaaggttgaaaagatcaacaaccttgatgtgcttacgttgaggtctgcaattgaaacttctcaacagttcatgggtcatgaattcctttgtccatggtgacaaaacaccaactctacatcagcatctcacctgaagaactcatagattttcttttgatcatatacattacatcactaatttcttttat

SEQ ID NO: 31945 - DNA, 550 bp, Oryza sativa
taattttttgcaggcaaccaacgtaagaggtccacctgcaaaaataaagtggtccgcctgcgaaaattgattttttgcatgcagatagcgcgtttcaccagtttacatttttatatgcggccatttggctccgatgaccaaacttgcctgtgaaaaatatactcaacatcggtaaaaatgttttttctagtagtgaattataatgtttacatagctagtatagaatatagaatcaaccaaaaatcaaacatgcccagttagctagcttcacacactctcgcctgtcacccgagttggtggttcgaagccccctcagagccaaaaaaaaaaattctcatgcccttgcaagaatctcactacaatccgatggttcacaaattgaaagttctagagtcaacattattttttagcaaatctggttttcaaatggccgcaattcataatctcttctcccaaaagaaaaggtattgataatatctcatctatctttttttagaagatcaatctctcataagtcatcctttttggggggcgatttgtcatctattaa

SEQ ID NO: 31946 - DNA, 517 bp, Oryza sativa
tttgttgatttgtatgtgaatttgttgatttgcaggtgatgtctgtggatcaataaatttgtagaagcctgggcggtgttggtgaagctggtgcgctgacctcgtggggcgattcaagatacatcgccgcgccatgtactgcctctatccctttctgtccccttaggctccctcttcccgatctcatcagcattcggctgtagtgtctccctaatctctcttctcggttcaaagagcaaggcatggcggtgcctctttggtggtgaaggaagaagatggcaccgttgctctaacctacacacggcgttgacttgccctggcaggagctcactggtaggcgtctgcaataaggcggctgtcggtacatcttggcacctagcgcctaccactccgatgctgcgggcgtcccgtgccatgaccacaaatgtgatgccacaaccacagggacattaggcccaagctccccgcacgacatgctttctcctccctctcccgggccaggccatcctcccctctt

SEQ ID NO: 31947 - DNA, 616 bp, Oryza sativa
cggcatcatacattaaaatagtcatacattaaaatacgcaaggagtacaaaactaactacaaaaagtgtaggaagtacttaattatagatgagaaattaagtacacacaaaaactttgtagtgttgaatgcgacgacagcataatatattatggtgatcgaaaaggtctctatcaaaccccatttcctcccatcttccttaatttcatacaaaatgatgggagtcagtattgcccttgataaaatatattaagttgaacagctgtgaagaagtgcctgtcactgttaattatcttacaatgcttatggcagttttaagctaacttttaagctcggccttttcaacaactctatatagcctattcctttcacatttggtcaactaaaatgttcttgtgcgtcattgcctcaactaacactctatctaggttacatcaacaatgagagatgcacaaatttctttaggaatcaaacatgaaagcgtgggactaattctacttgaattggttgatcggaaaaggagaatatttaagctaaacatgttcttagaaaatccatattcatattttgtgtagttactatatataggagttacgatcgaaccgtcagtcattcgt

SEQ ID NO: 31948 - DNA, 515 bp, Oryza sativa
caaccgggactatagatttagtcccggttgttctcaacaaccgggagtaaagatcttttctttactcccggttgttctcaacaaccgggactaaagatatctttagtcccggttgttctcaacaatcgggagtaaagatccgggggtatatatattcccggtgcgccctcgtcttcttcaccaacacttagacgttttcggccgatcgatctctctcggcctctctccttcgccgccactgcctagggcaaatccccgcgccgacgccgccgtatctcgccgtcgtctcgagctcgtcgtcctcgccgccgcctccgcctcctccgctgccgccgcatctctggggtgagtgccgccgccgccagatctcccttcatgcatctcgatctctccgatctcgatctctctccgtcgcgccgcccgccacgagacgtcgcgccacgacgacgacgcgccacgccgtcgtcttcgtcgtcgcgcaacgccgccggcgcatgccaacgccacgccgccgc

SEQ ID NO: 31949 - DNA, 682 bp, Oryza sativa
tccgccacgatgtgcggcgggatgaactcccgccggcaaaccttctgcaccaccacgccatggatgcccgaccattaagaatgcacacacccagggatgatagaaattccggtgatttcggaacccggcaagcaactatctcatccgtaattttaggatttttcaagtttgtttttataaaagaattggtcaaattttgtttaaattcaatcaaaatttgttaaaattttgaataatttcgtaaaaaagtaacaaaattcacgaaatttcgatcttctgttaaaaaataattttgcaaaaaagtaccgatattaacgaaatttcagtttttttctgaaagtgtcaaccctcgtgttccaaagaagaccatgtatatgtagaacaattggagtaattcttacaaggcaaaaagtagtggaaattgggtaccttgatgaccatgctatttggtctcgatgtgctaggaagaggaggattggggatcgacgtgcaaatcccttctttaaattctccaccatgtatagcctagagtaaagaacacaaaatcagacaccattttttgacaaaccaaaaaaaggttttaatttcaagatttaagaagctatatagctagctagatcatgcttataggtacctggtcctccatgtggaggtgaaacccatgctccatctctccacacat

SEQ ID NO: 31950 - DNA, 3583 bp, Oryza sativa
gcataataattcactaatatattagcgtaccactgatgtcttgctattccgtcctgatcctttttctttgtcccctgccagaatggacaagcatttcaagcatggtggcctggtgggtgcagtgcaagtgcaaccgtagggaacatttctgctgaaaattgttttctaggtttgaaaaaatgctctgattttgatgttaggtttcaattggtttgatcattggcagcactctatattttctaatagcctttctaggttgaatatgtcatggtttttagacaatacagcctacattacacgacaacatatttatacaatattaattggccgttttgttaggagcttcggcttcatcttagatccctcgctctagtcaggcctatgtattaagttgcttatgtataaaaacttattggcttgtcctggactataagcctggcttgtatgttgccatccttggtttttcatggatgactagctagcttattgttgaaaaatctctagatattctgaggttctatgggctactttgtgtggaagtacatgtgtagggatgaaaacggttggaatggaaacgatatgcctagtattcttattatttttattgaaacggtattgatacggttattttttttcatatttatgaatttaccttcttagtggcaactttaataaggtgcagatagcaattagaaatactaaatttttacagttagaagcaattggaaacaatttttttttattttctttacggaaatgatagcagtatggttggaaaatttctgtcatgttttcatccctacatgtatgtctgtctgggattacatacaaagtgtttcaaaacttgaatgatgttatagttttctttttggaattttgtacatcgtttttaaatttccatacaactttgtgattttgatctttttatgtacatggacagtccgagaccaaataaaactttgaagtgaacgaacagaaattaaaagacacggctgtagacattttgtttttaccctaagtgccaaatgaatgctataaaagtatatggttttatggaacattttagagttgctacctattttctttgaaataaattgcaaaaccagatattttgtatcatggatgctctaaaacttagtttttttttaaataaagtttactcttttgagaattaagtgagctccctgaaaaataaaacaactgatgtccaaacctacattaaaaaaaaacctttgaaaggcaggaacgataaaacataaggataagaaatacacatgattttgttctgaatgtatatacgggatattggatcttaaaacataagaaaaaaataagcataatgtaaggaaaccatggaattagatgagagaaagagactcgagggaaaatttcaaaagattggattcaatgctaactttcctccaacgtttccattacattaattagtcaatccaaaggaagtttatacaattttgtagatacaatctcctgtttcaaggactaaataggaaacatttttttcctaggatttaaattctgcaagttcacttcataaaccatttgttccaaaggagacgaaaaaaagaatttgtatggattggcttgcagtggcaaggcggcttttaatctttgccaaaaggcaagttgagaaagcatgcttaattcttaaaaaaagaaactcaaaaatgtttgttgcttttatgctgagtcttgagccattgtttgctggtccaaaagacattgagaatgagcatagagcggttgagtataacaattcttttagtgagatcattcatttacatggacatactaattccttttgttagaacttgacttttgtaaaaccatccctaacaatcagggccgagtcagccgagagccatgaaaattgactacgcgtaatgctgaactcaagctctctgttatgtcttcaatgtttcatagacttattacataatttgaaagggtttaaggagaccagatctaattaccctatgcttatctctgccactgtcaacaaatggaatagtatatggaccgtcacttcgtgccaacggttcttatgagaacgaaaaagtactcactccgtcccaaaatataactacatttagctctaaggatttatcccaaaatataacttctttaccaatattctcttcccaaccaatcataaccgttgaccattcacttttcccacttaccttcactaatctaatcataatcctacacctttcacttctacatactttcttagtaaccatgtctaactctaaaacttattatattatggaacggagggagtaccattttttattacaaaatgcctgttagaatatacctgtaaaaactctaaacctacaaaatcacttcctaatataaaattgtgtacatttatatgtggaggtagcggttgtgcacaacagtggggaattgatcacagttgaccccttgcatggatgccaaaggtttccatcagctaatgtaagttgcatgtcttgaggtcaacattatcagtagcggacaaatttaaccaagttggagcagcaacttacagtgctgtaacagggttgtcgactctgatgtgcttcacctcttttgtggttctcatccatgtatctttagctgtataaaggtaatatcataatcatattagcaaaaagaaaaaaaaataatttcattatctttcatgtggcaataccgcacttctaacatcggccaattattggcacgtaatgactggactatcggcaactagtagggtaaattgaaagcgcataacttatctgtcccttctctaattataaatatttgatatctatgatagtattcactcaaagttttaaaactctgaccatcaattttataaattcactaaagtttataatattatattataacaataaaataaaaaaatattgaaaaaccaacttttaactcaaaaagggtgccaaaaagttttttttaaaaaaacatgagaactatgattcaacctcactctagctagctattaattccaccacttctagttgggggttctatgtgacagcatactctgttctgcccacagctcaagcagcctggtatcctcttgtcagttgtcatgatgctcccttatgtgtacaacctcatcattttattaccatatggccatagcccacattgttgtaatcacctttctctcaaatcctccaaggaccctctacataattaagcagcaacctatagaaaacatgctgtgtcaaccatgaaatagcagcagttaattactaattaatgtttaattacatataagatacgcacatgcatccttcaactaaacaatacagtgtgttgatatgaaaattggtcatttaggtcatctgtagtacccaatatccatttttctatttcaaaactgaatgaaatgacaaggttaaataaaatcaagaggcgacttagtcgataagaaatcatggataacttacagtcggtgcggtatctgctacgatctacctttaaaaagtaagaaaaagacttgcatacatatataccaaaagtaaattttacttccaaagcaaataacactagagaaatatactacgca

SEQ ID NO: 31951 - DNA, 1017 bp, Oryza sativa
aaatcttacatagaaaacatgcatatttggttgatgaatacataaggtagccatggtcatatccgagctagtcatcattgtccctttcttgattggaaatcatcatcggtttcaccttgtcattaagactgatgaacatatctttatctatcacaatataaggcgaggtggacttcttgatggacatggtgattcaaatatagcaaataatttcttctataaacagttaagtgaataaagatcattaaattgaatatagtccaagtatttaaataacatagcggtctaagctaagtttttcatcaaattgaatttattcaagatagtgctcgttaacaagcttaacccagtacaaactaaatttggctattaattcattaatattaacaagcatatgtgtgtcaagtcgagtcttaaggaacaaccctagctactatcacccatgtaacactactacaaaatggatttttccggacgagacccctttagattgcaggaggaccataactgctcacacctgcaaaaattgatcccccatgcgcaattcagggaccacgtacaaaaatctattttcacaagctggtctcttaacaggcctgtgtgcgaaaataccacccctctctctctctcttctcaattttttttctcccctcctctctatctcccactacatcctctcactactagagaactgatctttgctgggtcgacccaaaaccacaatagtcctggttccaaaatgaaccgagacaaaaaatgatctttagccctggttgaaaaccccacagccattctacggtgtttactctcggttcatcccttgtcagtggcctgtcagggtgccaaggatcttcagagatcatcactttagtcccggttggtagactaaagatgatctagatctttagtcctgattgatataatatccctcgcacttatcctctcctccacaatcgcagccacttcctcacatatccccttcctcctcccctcctcctcctccctctcctccccctc

SEQ ID NO: 31952 - DNA, 5421 bp, Oryza sativa
tggtttctaaaagaatgaaaggcacatgatcctatgggactcttgaaatggctaatggagtcaatcgatgtggagaaagtggtggagaccaattagaatgcataatcttgcttttgcatgacagccatttttactcaaaactattttcatttgtttttgtttccttttgtaagatcagtagccaaacattggctcccaatccgggtgagatgggttcacaaaactgcctgaaacacataatttttaagagaactttttattattgtttccttagagttggttgtccttcatccttcctgaatattcggaggttttcaaccagaggttctctgcatcgtgcttctacaagtttttggatctaatacaaggcattcacagtttgcaatgcacatattggcatacatatatttttaacaaatgattcacatttttgtaagattgaatcctttcttatatccttgcaaatttggctttcctaattctttcctgtgatctattattatgcatttatggtctgtttatttttttccttttttggttggtgttctatcttaattcgttttcttttttctatcagtaaattactatggtgaggcctctataccgatgcataccacataactaactgtttgacccttaggtttattgtcttcggacctccaaattttgtataatctaaacagtacataattttagttgcttatcaatagtgtggttttgagttttggtttgagtctcatactttattcaatgcgtgccatctctaccactatattaggagtttggcttcttgcttagttttgagttatctggtactgtgcctgggatgtgaccacaaaaacaattatagtacattagcgcatttatttatttatcgctatatctgttggcagggtttgggaatctgtggatagatttcaatcagcgggttattaactgcatcttgttttcttacagtcattaactgctttgaacgaggaaaattttggtgttacggttaggtgatcttgtttctacttatcacaaattactgatctgagctagtaaggttgttgctatgaacaagttattctgcaatgtgttgtatgtttaagaacaaaaaggggatcatctctattgtcaccatgccatgctatctgagagtgacttaatcaatactagacgaattattattgtgatgataaatggatagagcaggatgtgtcactaagtaattcttatttgcctcagccctcagtatagtagttatatgaacattgattgtgtctgtgcttgcataattatgtctcaagctgcatcacattttccatgtctcacaggatgagtgaccactagatcattcctatttgttcattgaccaacagcagtagagcactgtactcccacgacatgtacataattcttctctcagttgctggtgtgcatgtttacattcttgctatgctgaactcaacaaccacagctagtcagctacagcctgatcaagagacagcagggctacctagccctttgaaaggaaaaggatatccatttacacctagaatctccttttgttggtggtcctcacaatggtggagctggttctttccctttcagattcacacgtgggagtgcagtggcagtgacctcgtgaatcacttgtcggtgagggccccagatgatcagcgtcttgctggaaacaaaggtaacatcgactgctggtcactattacattatgatatgattattattcagttccttctgatgctgcttggtgttagttcacctttagtacaatgtcgtggtaacgctgtattatacggtagatttattttttaaggtttgtcctttcactggattcttcttctgtttattcttataatgtgatgtggtggtggaagagtatcagccacacaggccttagttggctagacttttctattagtggaagtgaatctcatcaacagactttaacataaaagaacaggaagccatttgttgagtgggtctgtgctcataaagagctagagatcatcacttcccactctgagtctaagaagctagctttcttaggtccatatataaaccatacttgtaattatcttacttgatatatatattttttatgtgcaaaagagaagcaacttttgcaccttgtggaagatgaaataaatggaggacagaagaaccaattaggtttgtactaattcgttggcttgtacgatgatgattgattaaagtttcttttggcctgcacaattgattcgtcaagcaagcgtgtgcacatactttttcatgctcgccattatctctaatgattcttttaagttccataagaaatcaacctcgagtccttgacttttactgtgaggtgatatggactccaaaggaagttactggaacaattttgttatattttggtccagattactctttgatgtgaacatccattgtgtttcttttatttttggattaaagattgatcaagagatgaacatccgtgtgttactaatgacggctactgtttttgcaaatatccacactagctagggcacgccttttctcatggagggttaggtttacttgtattcaatctacttaatgcagcttcttacaacacggcagccccgcaatggtttcagatatcctgtacagagatgcacacaaaaatgttttccaaattgtagcataatgatctgaacaccaattagttacaagatttattctctgatttaaaaaaaaacataatagtttttatttgttgggaagtataattcgtcaagcaaattaattgaggataggagatcactgtctttccctacttgaggctttggagactgttaattggattgaaatactaatacttgacaagctactcttgcactattactattacacacaaacaagtcatgaaaacccctataatagttagagcatgataaattgcacacagcaaagcttatctatactgacatgtttttttggtgttaagcttcgaagcgaaaatgcttggcagaacaccattgaggtagacggaatttagttttgacaaaatatttggaagttaaacagtgcagtttgaattgtggtattttagcacaaagttctgacttctgaattagcagtcaatatcaatttggtattcaaggcctcatttgctgttgttttagagttctcagcactggttgttatttctcagtaacaaaggtattcttttcttctggaaagaaagagagctgaagctttattctgaaaaccatcaatattggcaaccaagtacaggtagaaactactaattattaacatcaaattgggatatcgtaaaagccaggcacgatgatcactgaccaacatctggtagtggtactggccttgatcttattagtattttcatgatttcttgttttccttttatccttgaatacataacagtataacacagtcaactaacaactttacctgtgtgacagaccaacacaaacttgagcaaaattagtctaacctagtgtatatagatcagtaggagttggctgaagtccatcagaccactatcaggattgctatcagtgaaatcatcgtgcttgcttttcatatgggggtttatattctttattcgtgtgaagtatatgatgatgcaatctggcatagcgcactccagtctaaccagtataataaaacaagctgttactggtggcagctagtcaccatccgtttctcgtatcctacatgtgtctatcttggccagtgtttagaacctggtggttcctggccagtatagtttaaatttgaacttgtaaattgcattatatctactctctggcacttcagaaaataagtaaaaaaagaaaaacaaactctcctcggattattccattcagcccatattctttgttgttatccccctactctgtggatgattatattgatcaatttgtgatatattaatgacttatgtgttatatccattcagatctatgaaaaattgcgctttagccgtgcccaattcttctagccagtagccaccagccaggcgaccatgagtttttgaattaaaaatttggatttgaacacttttctggtaaaaaccggtaaccggccagtaacctcactggcaatgcttctgatatttttgccaaaaccggtattcataaccttgatattgataggtcacatcaagcatgcatccatgaatgtcagcgctggacacctagatgataatgaagtagatactttttttgtggccatctgatggttacatcctgctacttgcagccaatatcactctgtacaatgtctcgattgttgagatttttaatttttggaaaaaaagaagtctttgatcagattttattaggtgggcattgcttagtagtgctgttgtgctaactaccttttggatgtcctcagtttgcatcatcaatttatgttttgtgaccaatgtgtgttgaatacttgaatgttatctgacattttgacaaatccataactcaatattgtaaaacagagtacattcttaaatctgatggatccaggccaagcagtctgctacatgttgattctagatagaactggagtgaaacccaggtttggtttgttaccatggttttctgaaggataatctggacaccagattccggagtgagcttttgttatctaccatgcaagtcaatctccgtcgggaattcctatccctgttgattttccatggaggcgtgccgttaacgcagctttgatgcagtcatttcatgacacaggtgcaaatttcgaattggacgaccttcatgaatcaagacagcagctgggcattacaaggaccgcgacacccggctaccagaaagggactcggcgcactgaaattgctcctgggaatttccacactgtgaagaccaggaggacttgagccacaatcttcacaacctttggtccttgccttttcaaacctttgtctcaagacctgctactggtgctgctggaaagctgaatcattcccctctgctgtagtgttttctgcaatcaaggtgcaagatttagtcaaggatacaccatcttgttttggttgagaagatggatcatacatgccaaaggtggctgcacttggttgtttgtgcttctgcctacagtcactggtgtgaatctcatcatgccactcatgatcaaattgtactccgaggaaatggactggaaccaagatcaggaacaggtaatccactcatgttaatgaaatgtcaattattgaagacaatactcgatgaaactgaaaattttcctttgcagggggatccattggatctaattacaatttagagctgcgaaaaaaaaaatctcctgcactcattattaatttacggtgcatgggataatcgttgacctctatgatgaactcggagtcgtgctggactatgatacaaattctccataagattgatattagcctaactgttt

SEQ ID NO: 31953 - DNA, 683 bp, Oryza sativa
atgagaactttctgctgcacgatgtcatgatacattgtggaatcgacttcgcttgtgtcccgatgatgacggactatgtaaaccatcgtttgtctgatcaaggatctgcacattattgtcatttgggagcctggatagaatcgaatgtccaagattcacaactgacattgctttttctgctagaaagggctttaacgaatgccacctacctactgcaaaactctaatggaggagctgtaacaaaaaccataatgtgctggcactgaaagaaaaaagcaacggcctactgacaacacaagcatctctataagaagcatggatgggaacgatgatacagcgaactcaaacttatctatactgcacactgctgcaatgacatgacaaacctcaggctcttatcatcctatgtcatttcatatttgcaagccaactctgactaccaaattatgatgcttctacagaaacatattcctaccatatgccttgctacgagtaagccctgacggaacatttggaagactaatggacaaattctgtgactgactaaggtttctaggaaaatatcaggtgtcgaacactacagactcatccaaacgttcatgagtggaggagatccagacatgttagctgacattctactaatatgaattgtacaagcgagagtgcgaatacatatactagtg

SEQ ID NO: 31954 - DNA, 516 bp, Oryza sativa
ctaagttcaatttcacatgcaaatgtcataaatcttgtgggttttgctgacacagagagtactatgctctagtttatgaaagggctaaacaggacctcgaaggattcagacgtaaataaattttactgctctttttttattttagggtttccaatctaatcttattttgattggtattgattttgctactaacagcatccaataaaggtgagttggatgctatcttgcttggagtggcatctggactggaagctattcattctgcaggctttgtccattgggacattcagttgaggaatattcttttgatgaaggtgaaattcttgttgtatttacgaataatttagagtaaatttcaaaaaaatatatatatatactttgaccaaactatcagaaaattacagccttaagtcaatgtactacgataatacagatttagtaacaaaagtatcataaaactacagatttagcaccaatttaatcacaaagactacaatgtttatagctcaaacatat

SEQ ID NO: 31955 - DNA, 577 bp, Oryza sativa
tggtgcccatccaggacgacgaaccgcccgactacctcgcgccgactcttcgcgacgacgacggcgggcggggctgttactaccagccgcaacacctggagatcagcggcggcgagcagcctgcggctgcctcctgcgtattccggccatgcaaggcggccggcggcggatgcaggggcatgggctgcgtgtacgcgggtagctgctgcaggagggtgctgtgccgggagtgcaacctcccgtgcgtcgagcacaccgacggcttccacaccgcgatactgcccttcctgccgcggcgctccgcgacggcgaccgagatggccgaggatttgctgctgggtttgcctctcgagcacccgtgcgtgccggggcccgagtactgctactactactcggagggggaccaggtggagaaaggcgtggggcggcacgtgttcgtgtcgctcagggatctcgcgcgcaccaggcagccgcgccgtctcatcgagtgtgggtacaggatggatatgatttacattttggtccttttaaaaaacttatttcgcaaatagacccctggaaaaacttatcccaaaaa

SEQ ID NO: 31956 - DNA, 577 bp, Oryza sativa
aattcttatgcactaaccaaattcagtgacaaccatttctcttccctcctatatggctagtactagtagtacttaaatttcagacaggaaactgaagtaagctacaagtctgttagtaaaatgtgtgatgctaatataaaagtaggactttgagctgtcatgaactctttgacagtgagacaaactgagtgaatctcaagtaaaatacaaacaaccaaacaggtaaaaatcgttaagctcctcaactctatatattatccaagctagctgtctgcatcttgtcctatggactcttgtcctcggttccttcgcctccatgtccaagcttgcaacctttcattcttttctgcttctagaacggaagatatgattggccaaatggtcattccaatgaggttacagccatttttcagaatctgttccccgtttttccaacacacacatgacaacagagagtatacgcaattaattatgcatgtgtatacgatatgtaagtacgtcgtccttgcatatagctaacgttgtcatgagtcaaaacatctctgtcgagcctggatgaaaagtccaaccattggtg

SEQ ID NO: 31957 - DNA, 720 bp, Oryza sativa
gatcccccgtttttttatgatcatccaacatcatcttgatttgttcatcatttagaatctgtacaagaccttgtggagggacataagaaggcttcaagtagtatacaccatctcctttttgatatccatgtataagcaatgactcctccaaatcgataaatttcagagaatccctgtctaaaagataaatcgatgaacaaatcctttccccaccagatttcctagagcttccaccagttgtacaaccagtatgaacaatgaaggaaatactagttcgacccatctgcagagattataccaatttattggtttgcaacctaaatcaaagagcaaatattcgatgatctgaatctagtaagacaactacatgcataaaacatgatctaaccaaaaccagggagaaaaaacgaacctgtagaatgaattgacgaggtgatcgaagtacaggctgctttagtgcttccttctatgacttctcttgccgggcaggagatttgatatcccttctctgtactatgcgatcatcgtcgtacttcgccgttgtaccgctgttctttcgccgccttagtgttgcagtagagatcgcgaaattaaagcagggaaagatggaaagtggaaggaggtgcgcgcgcttttgctgccaaggtggcacaaagcaactctacccgtgggcggcgctgaaggcccacgataacgagaaattgagcgcatcacgagaaa

SEQ ID NO: 31958 - DNA, 689 bp, Oryza sativa
ggtcttggtttggtccccaatcaacttcttcaatcatccatgcattccttacgcttggtctcttttctttcgcccaagcaagtacctctgcgaacgaaaacacacgaaactcattgtgtagcaacgtttgttcaaatatataacaagtaaatctaatatagaatatatgcacctttggttgattaatacgcaaggtagtcatggttatattcgagctagttgtgtcctcatcattctccccttcttgatttgaaaccgtcctcagttttaccttgtcatagagcgtattgaacttatcattatctgtctcaacatccggtgaggaacatttttcgatggccatatggttggatcctgaaatcttggtagtcgaaaaaccaccacactccccttcttgcagactaacatgtaactcatttaaacagctagaggaactagatagagaattacttatacgcatgtggtcctctagacaacacatttcatcatcaaaaggaggtatagtcaaattcgaacaaatatatactcgatgcacattatattctcctttactatcataattgccaataatatgaaaaatcacatcagaagggcatggcagttgagtggacaaagataatcaaattaaatataaccccaagtatttaaagaagatagcatttaagctcttcattctcgctagcaatgtg

SEQ ID NO: 31959 - DNA, 573 bp, Oryza sativa
ggtcgactctagaggatcccctcctaaaatattctgcagtaactgcatgtttgttttatatgaaaaatgttatacataaagggcgattccatcctccaacctctgcttaagcccgaagtgtgctgcctgattgagtttccgaaaaagtagagttattcaatttaagtggagcatttggtatacatgggacgaacgggttcagtttgtgtagtcgcacaaataattgctgagctatgcacccgttagcacacacttgtttagcatgaaagatgctatttttgttgcaatgatccacccataaatctgttgtggataggatatcaggcagacaggcaccaaacaatcacactgtattcttgctaaaaaaaatgacttgccttttgaatgaaaaaaggaaaaggggcattttgatcatgtgactactgaatttagactgaagcatagactgggtacataatctggagtgagatttcatgctgcttgaaacgatttagaacgtttttcaatactaaggttaaacatcaaaaaaggggtagatcgcaaaaataggtaggccatcactcaaacagtccc

SEQ ID NO: 31960 - DNA, 595 bp, Oryza sativa
gtgcgttctgcgcctcgagggattgcagcagctgctcgagctccttcacgaaatcaatggcgccgccgacaatggacgcctggtcgccatacacgccgaccaattaaaagcaagcaagtgagcgacagtaaagtgcagagacgacagatcaaatcaacctagcatacctagcatcatcgcgattctagagcgaagcagttgtgtcagcgagagtaaactagaacagtaataatgttactatgattcaagcaatgataatgacatggagggggcatgcacattaatggcacaaagtggccgaggaacgtatgccccatggaggaattaatgattcattattgggatagcatgaaagagacctggaaattcctcaatattcagttgacgagaaagagcaaaaaaaaaagtgcttaaacatcacaaaagttgaacgaatctttcttaaaaaaaaagttggatgggtacataatggtacgatttttatactagagaaaaatcacagtgcttctcgccgaaacattctcttgccaactccagttcagcacaacccaaaatccaatgtccaaatgagaatcaagctagggagatgaaccct

SEQ ID NO: 31961 - DNA, 616 bp, Oryza sativa
cctggtggagaaaggggctttactcccggttttcaaaccgggactaccaatccgggactaaagatcactatctttagttccgggtgaaaaaaccgggagtaaaaatacatctgttaccaaccgggactaaagatagagctagcctagctagctagatccggttgctctattatttttttttcttcattatgtttttaatatattgattttactatatccccatcccaaaatcccaaataaattatccccaatcctcaaattcccaaatcggccatattcaaatagatcacaaaatcttaaaacaaaattacatcacaacttctacaaaattcatcataaatacatcacatattcacggacatcatacacaaatcaaatacacagatccgaatcacaaattcttaaaaaaaaaaagaaaaaaaacacaggctgtcgactgctgccgcgccggccgccggcgcgccacccgccacgaggccccgcggtccaccgccgcgccgctgcgccgcccactgctgcgaggcctccgccccgccgtgccgccgcaaggctgcccgggcctccgccggccgccgcgaggccgccggccgccgatgggatgatggggagggaagga

SEQ ID NO: 31962 - DNA, 709 bp, Oryza sativa
gggggggggggagtggctgtgtagggtgtagccagaagcgccaaagcaaagcactcatcagccacgtttttctcggcagaaaagttaccactaaaccgcaccactaatcaacactcaagagagagcaaatcaccactccaaagcatcgaagggagaaaggtgaaaatcaccgatcgatgcatccggtgcagtttaaccccagtgggggcagtgcaatgcaattgggcttaagagggatcggatgcttcctttcacattctgtaggtagtagtgtatgtttgtctcggatgttgacggagctcgtggcccctcaccgggagactgcgcaagcccccctttgccggttcgaccaggggcttagggtgcaatcccaagctctctctctctctgtatgtggaaggatcacccgcccgcaagacacacgagacacggcgacgtatacaggttcgggccgctgtgaagcgtaataccctactcctgtgtttttgtggatttgtgtatggacaagttacaaaggattaactccctttcccctccgccttcccaaagggaaaaaaagtcctcctctaaatgggcaaggtcctccttttatatctcaaggggataccacatgcacctttctctttccaaactggactgttctttttctctttaatgggcggagatcggtacggtttccatccgggagcccttctgatgggacagccca

SEQ ID NO: 31963 - DNA, 538 bp, Oryza sativa
gacttttttgacacggaccaaaataaggccttactggcctttttctggcgaaaaagcaataaccggcctctgctctctggcccagtttggcgagcccaacaagttctacgtgaagaaacatttgctgggacaatttttattttatttttttctacttgtgttttggattttgtttgttttttttcgtgtacggtgttctgacctgagaaagaccatgcggcgtgttggacactactaaggagctgtttggttgggccgtttttggcccgtatcagatcccaccgtgaatagattgcattacacatgtttgtttcagatggatcgtaatcggatagcccgcaaacgaattccggcccaatacaaagctgattacactcataggcgggcggaaaacgataccgatacggagcgtaacctaactctcctcacgcgcctcgtccagatcgagcgccgccgcagcttctcctccacatcgcgcgcgtcgccatcgccgccccctctccctgtgcgcgtcgccggcgcctactcctcaccctgt

SEQ ID NO: 31964 - DNA, 512 bp, Oryza sativa
catccttatatgagttcacagaaacttgaatcatctcaaaatgagttatatttgattttatatggatttttacaagttttaggtacttttcttatataatctcagattttgtttctaggggtccgctaacagtcatacggcaatatgcaaaaaagcccttgagatttctagaaaccaacccgcagtcttaggcccatatgtcagtgtttagtatgttttcatattgaaccttatgtttgtttaaattctcaacacgaagtcctgcgacctggacagaacagagcgccatggccgagctcgatctcgagctcgccggcgacaaacgatggctcgtttgggggtgcgaccaatacacaaaatgaagatcatgttattgcgatttcattcctatacatttctcagatagcggacattgaagcagcgccagcggtgagtccgagcagaggatgttttcgggtggtggtgcatgtcgtgctatcgactggatgtgttagtgatatgccctagaggca

SEQ ID NO: 31965 - DNA, 515 bp, Oryza sativa
tactgctagctcccaattaacataagcggcggaatcatacttaccatcaaaaactggcaatttagattctaccattgcaagatcattatcatgtacctcatatgcaatgcgtgaagaagtcgctatatctcgttgatggtgaagaagtcgaggttgagcatgaccatctcgtttccccttgtgtaatcctgccatggttagtagcaaacaagaaacatacacaagaatatgcacgctcctatcaactactaggtagtggcagctgaaatattacacatactcaagcttttcaccaagctcttataagttcttaccaaagcaagcggaatgataatgtacactgactcaaccaagcaccccaatggagtttggatgtatcgatgccttggcaaacacttgctgtacggctgcaatcaaatctgtggagctctgggtaggcttaaatatgtagcaaagcaatagcaaatgctcaaatcagagaatacaaagttgaataattgttcaaagtcaagtac

SEQ ID NO: 31966 - DNA, 735 bp, Oryza sativa
  unsure (1)..(735): unsure at all n locations
tgcctgtgnttttgatgtcgtattcgactcactctanggcgaattgggtaccgggccccccctcgagnnnncccctttttttggatttttttttttttttttttttttttttttaccagggattcattgggtatttaacaacataggcatgcaatctggcaaatttgaaaaacttttaacatacaccccaaatccctgcccaaatttaaaaactaggggggacacagggcgtttttccatgtcgcattttttgggatggggctaccatacctgggagcaaaaaatggggagggtggagcgcatgccaaatgaggatctattagcaatgggacggggcctccactttagcatctccaccctgcttcttttaaaggaccgcctttcattgcattcagctgggatggtagcacaaacaccagtgcaccagggaccaagagagcaggagccttgtgctcttttttgatatgaagcaagaagaacagggttcggagcagtttgatagagggcatttattatggaaggccttgcttccaccttggcttttgctggacatgggcatttgccttggggatcaacaaaataatctaaacaaggttctttttgtacactttggatgttcaagtgggtggcggttttaaaagaggattttttcttttggggtgcatttaataggttaggatggggggggttttcctttttgaaggcctccaggttggtggccccacctggggaatg

SEQ ID NO: 31967 - DNA, 621 bp, Oryza sativa
tgtcatgtcttaaagatctttagaatgaaaaaacaacaattcataggttctcacttagattgtttacaaagattttgtttttaaaaaaaatgtaccctccagctccctctccaatcatatgcacataacactattgcactacaaaccctttctcatatctgattcgagttctacgctattcgtttctctcctgtctcctccctattttcagcttctaaactaaagattgaaacaaatattaaaaagaccataattttaagctacacttataattttattttatatatcatagatgatggtttcttttttatataaagtcaccacctgttaccccataaatcctcctgggccttttaaaccgataaacccattatttccaaccattagatctatctcatcttaaaagacaagcgtgtatcataatgcatcatcttccaaaataatatattgcacaactatatttcttcatccaatattattcgcgctaggttgcatggagtctcccacacactctacatggaacgttcacatatggattatctctcaaattaaacaataatattaggctatataaacccatgcatttagtggagcctcatatcccacccaattcatctgtca

SEQ ID NO: 31968 - DNA, 612 bp, Oryza sativa
gcgccacttgactgggatattctggagagatgcctaaatcatcacatcttgttagggaacagccgtttttgggtggcaaattgcctataatcttattcttgggcaccgcctttctcttttgatggcgtcacaacgcgatgttgagaaggatcgctaaccactagacaatctatttgggaccagaccgaagcacagatgaccaccgatgaatgacaggaaacagaagtatttcgcctgctccacagcatattgtacatgtgaaaagaaaaaccaacctgctgctggatcatgcgaaacggtagttccatgctgccatgtatgcgccatgtattgttttatgaagatatgcacaccaccgatctagcccggatatactggaatagtttattgggactgcgtatccctgacagacaatcccacctatattctcttaaatcatggaccgtcacatatgtgccacgatgcagacacagctctaacgataacttttgttcttctcattgcaacctatttgcgcattgacggcggtcatgctaccctggccacgtgggcaacgcacgatgcggtgcacgcacctctcgtcatggctggaatgatggcgtatatgccgta

SEQ ID NO: 31969 - DNA, 903 bp, Oryza sativa
aaaacaaatctaaccatcaattttcaattaaattggcggacttataatttcatcaattttcatttaaaacagtggagttataattttaacaattggatttaaagacataaataattcaaacagatgaacgtattaaatctacctcataaaaacaaaatctccttaccaaataacaacaagacattgaaaaacatgatatatatattcttgaatcgttttacacagtaaagatcgattaaacgtgctctatagcactcttaagtcaccacttatgatattgtaaaactttgaaaaaaaattgaaattcaaagagaaaataatcatctctttccacttaatttgatgacccattatttttaactattagattgcctctctttataaaaaaacttaagccaccacatgtcatgtcttaaagatctttagaatgaaaaaacaacaattcataggttctcacttagattgtttacaaagattttgtttttaaaaaaaatgtaccctccagctccctctccaatcatatgcacataacactattgcactacaaaccctttctcatatctgattcgagttctacgctattcgtttctctcctgtctcctccctattttcagcttctaaactaaagattgaaacaaatattaaaaagaccataattttaagctacacttataattttattttatatatcatagatgatggtttcttttttatataaagtcaccacctgttaccccataaatcctcctgggccttttaaaccgataaacccattatttccaaccattagatctatctcatcttaaaagacaagcgtgtatcataatgcatcatcttccaaaataatatattgcacaactatatttcttcatccaatattattcgcgctaggttgcatggagt

SEQ ID NO: 31970 - DNA, 1013 bp, Oryza sativa
  unsure (1)..(1013): unsure at all n locations
ctacagttggtctctgcgactttctgctgtggatgatatatcttgccagggatatgatcatgcatgtgtccatggcatttacttttgacttatgccaacctgacttatcctaattaatcaatgtataaagaggagatgaaattgttatttgggaatgattggtaagttgatcggggctggctccaatggcctgtatgcatgcatggacatgcagagtcaacgcatgtggctatcatctctgctcctctctgatcatccatgctcagcaaatatctctctgctcagcgatatcaagacagtgtcaggttgatgatttcgtgatccaagcgactccagttcggtctcagccatggccatgaaagaaagcacggaaagatgcagagatattgtcaggccatctccaaatctccaatgcaggtgcttatcaaaagataactattttgtcttaaagccacgtagagcaagaggtgctctaattaatcctaaagcagtgatatgcttgatgaaacactatgcttaagaggttctaaagtagtaatgtttatttatctcatttattcgattgggaaagttgagtatttttgtattttttgcaacttaagtgcacatgctagtgagttccagcaaaggctgccaattttgcaccctgatcactatacctgtatggctgtatgtatgtgtatacgctttaaattcatccaagaaagtgacactgcttgaagtatcatggactagcagtgaaagcaaatgcaactctgcaactgcaaagtcggtttttacgcataccggacacttttttcgccggccaatgcacatgcttctggtctaacaaaaactgcttgatggggtgggtaggaacaccaccctctttttcacagttgagaggcacacactgcatgatcagctagtacaattnaagagattatgacacatgatcataggaattcaaccgcccactaatcctcagttagaaccaagaggaattagctatatagaaaatttgacagatgtga

SEQ ID NO: 31971 - DNA, 635 bp, Oryza sativa
  unsure (1)..(635): unsure at all n locations
taatatgcacgtgttaaacacgtatataaaggttatatacgtgtctataaagattatatatgggcaagttttatattacacatatataccaacatatataaaggtggtgtatttcgtatatatacataaacaaattttgtctattaaaaatatatgcctattaaaaaaatataaatatatgcgatatgtatacataatatatactttatatacatacgtataccaaggttatacgtgtatatataaaagatatatgtatgtatacatatagtagagaggagagatgagaaggtcaaaaactgaccgtgttccacgcggggggcacgactgatcgcccatataggcccctggctgacatgtactgaccccgctcgttaagacgtatcgggccggctgactgctctcggtcgagggcctaatcatgtatagtgcagaccagaccgggcaaactatctagccatctataacaactggtctncttccagtatctcataagaaccggatactcttacgtgaactgctccctgacatgatcactgacaggtaagctcgcgagcattgggacccacgtttcaattaccacgtctcttttgactcacgtgagatgttcccatctaacccatgcatgcattctt

SEQ ID NO: 31972 - DNA, 647 bp, Oryza sativa
tggtttatattagccctaatcaatccccacgtgcttgatgaatagtctgaattccagataatatccgtggtgattctctggcagatgtaatctgacatgacctcctcctactaatagatagattgaattctttactaagcagagcattgtgcaccaagcataattatatccgggccttcatcagcaatacgcagtgagctcgaaactgattgaattttcagtgagcagtaaacgtctctctcttttctatctctagcgtgattttcgagtagcagcaaatgattcttcccttcgccggtaaggttcgggtcacatacctatacgcgcgaaaaacataatggctcattacagcatgtttctcccgttacatattaaaccgctttatacttgactattttatagaatagtttagatcgatagcccaaaatgagtttcgttcaatatatcttgataatatgttttctgagggaaacgatgtgatatttttacaaacatccaaatggagggagtgatgaatgaacgatcagcttaaatacacttgagcagtagaatgaaggctgtttttaaaagtattgtgcgtatatatcttttgataaaccaatcacttaccggctgggaaagtacctaatacagagtttatgtagggc

SEQ ID NO: 31973 - DNA, 564 bp, Oryza sativa
cataacaatacatgcgtaaatttgagtcacctagggggctaatgagttgtttttttatcaagtcgaccaacaactaatgctaaaatagttattttggcactgatgatatttattttcccaatggtcttcatagttgatttggtactttgcaaatatagagagcgtaaaattggtgccaagaaacatgccaatcatcgaggcatgggtgaccgtattgagaatggattacaatagatcgtaggtgttgtggattgtagtgaagagtgtgatgaccgtattgagaatggataacaatagatcgtatgtgttgtggatcgtgatgaagagtgggagctaccgcatgcttatgtaatacttgcttctgctttggctgactgccatgcgcatgtgcctaatgtgacaagcctgcctctgggatggattgccatatgcatgtaaccatgcgatcaatccttacgagaataggaggcaccagatgcatgtaaacgtactgatggttgagttatagatgtaggaggagatcgatattttgtggcacctttccaaactcttacgagaaatgca

SEQ ID NO: 31974 - DNA, 693 bp, Oryza sativa
ctagtggatccccctctaaactcttgaggggatatttcctgattgcttacatgttatttatatagttatttttttaaaaaaaatcaacaggatagattaatatatgataaatcactccacaaacatgcaaagccaaatttaacttctactagttgccatacaaaaacaaattaaactatagctagctaatatctattcacagtcaaatttgtttttttcattgcgacttatagaagctaaattataagttatatgcttgggaagtgatctatccactactacaggaaacacaaataggtgccggtttatccaatcggcaccacagaggcagcactaatatgaaaagaaataggtgccggcttaagaacaaacacctttgaagttccctgaataaaaaaaaatctcgctcgatgacgagcctatgcattgagccgagcagttccttcttccacatgcatccacaccacagcaagaacgagcatattatcatctattcatcacatatgccatccacagatggactcatccacatatcaatccattcatccacaacacaaaatttgacacttaaattcatactggatcttcgcaataaaaaaaaaaccatagatggattcatccacatatcaatctattcatccacaacacaagatttgatacttcaaattcatgccagatccttgcacataaaaa

SEQ ID NO: 31975 - DNA, 504 bp, Oryza sativa
atcaattaatatgttgccagccattgaaagaaattcaatggaaatttagtgcctgtcttcttgagcatagatggaggtatcaaggtatatcatgctggaattccatgttatttgattaagttctaacttccaagtgctaaactaattagccgattcactgatgagctgattatccttagggtttggaattacgatttaggactaatacacaaaacatttttattcagataataacatgaaaatctatttgaaaccatgaactggcctaaatccattcagatttataagcacaatggaagattaagatcatatcaacccaaagatgtaacaatattcaaatccttaccaaactaaaaaaaaaagcttgggtttgtttggcaaatttatatagttagtcagatatttaagatgccgcttgtgacagaataaaacaagagaagaaaacaatcaatcaccttgctttacaacctgatacacgatgcatcatacgtgtgaagagtaaaa

SEQ ID NO: 31976 - DNA, 700 bp, Oryza sativa
tattaaagcaaataaaatatatcgaacagaagcctaatatactttgttgtagtaagatcttaacataaaaggcagatctagcatatcaattaagcatgtaagatataaagctaaattaggtaaggtcggctgaaaccccgatgctaccctaatcggcaactaaaagcaggctagagattgagattctaagcacgacttaatagatcaaacttaactgatacagcattaagtatagaaagaaggacaatatctagacaatcaagttgttggatgtttcatagagtggtggataccctatataatctaaatcaacattggtatttaacctgatcggctgcctcctagtggtagatgttagctgattgaaggttagataacaatattgccaaagattatatagaatatatgataactcgacgaattacataaacaagattagagtatcataaagatgaaagcactaatcccgagaacgcaagccgccataacaagttttacctcaaattgaagatcgaaaccgatgcagctcaacccgaaagcaagaactcatcgaaagtaaacgaaagtaaaaagggtggcgatgggccgagattgtatcgaacgtctgttgttattttacatagggctcagggtttatttatacccgagattacaaaatatgtccatgtcggacacaactcgtatctctaacaaactctaa

SEQ ID NO: 31977 - DNA, 1510 bp, Oryza sativa
  unsure (1)..(1510): unsure at all n locations
ttggataatgttcaaaagaaatttagcatgaatgtacttaaatatgatgaattattggaggtacactacaattagaaatagagcattgcctcgaggttaactaaaaaggtattcagatatgatcttcagtatcccatccagcttgaatcccatcctatactaactcgttgactcaaaaaagaaatattaactaaaacaacataataaataaataaaatatactactaacatggactctagccaccatgatttgaatcctgacaccaacatatattacacagatatagatgcacatttaatagaattttagagagctagggattttgctgctggtctttatcttttaaccatatgttgagagtacattcaggtgtatccgtgaaaaaaaagaacatccatgnaattgcattacgttatcaatatattaggtgattncgccgtgctttgcttgcggaaattactaagtaattttcaatatatattttctcgttacaatcaagataggggtaaagaaaacaaatgaaatatcagagcttatcagtatttatcatgaaacaaacaaataaaacccgctttaatgtggaacatattgataagtttattttaaatattatacaaatgatagatagatttgtaaaaatattgtggaaatgatgcgaggggtgatgattggatatgtttgcatgttgatttgtagaattaaataaattgtagatgatgttgcatgcttgcatgaggttgaatatataattattgctagtgggtgatgatttggcatggctgtatgttaagctttagagttagtgggttataactttatagaaagtatagattcattcatttgcacgcatgtggatggctgggtaccatgattattgccattcaccctctgtcttctttcgcataagaacatgttgtggaggaaaaaaaataaggtcaaaatttaaaaaactctatgaagctgttgatgcgaaaaacacgaggcctggaagatctgcttaactttagtgcaggtccaaaaattttgcttttaggttcgtgagcgtgccagttgatttgatcctgcaatcaacaagaaataaagacaaagaaacagcggttaaatccataaatgatagccgatcggccagccgccgatgacgtatcatttatctttgagtcgatgtcatatttgaatcgatcggcagttataaacaatcaagatacaactaaatctattcgatcggctgtagatattaatgatatataatctttctgtcggtgtatacttaaatcaagtgattgggagacaatataaatcacttagatcgaaatatacattaacaaggagattataagcattcatagcatagccgatcagatagatctagcatctatcggctaatactccgataccactctatattaagatattaaagcaaataaaatatatcgaacagaagcctaatatactttgttgtagtaagatcttaacataaaaggcagatctagcatatcaattaagcatgta

SEQ ID NO: 31978 - DNA, 1000 bp, Oryza sativa
gtagcacaatggcacatagtggaaaattatacaggcaattgaattgtccagggcaaatttaaggaaggcaaagcaaaagcatgttccagatatatgatcgaaagaaacatctagattggttgacagctgctcaaagtagcaaaagtgatctcctatgtatatacaaaaaatacaacttctcctgtagactaagttaaacaatctatgcatataacacaatttccaaataagtaatagcacagcagtatgttaatcttctccaaatggtaatatggaaaaatggattcagaccaagtaatctggttttctgaatatctcatttggcaaggcatgggaaaaaaacaaaacctagaaaacacaatcttataaatgttcttccagacaaaatcataggttgtagttttgtacaagcagttaagcgctacagacatgcaagtatatgcatgttatgtcaacttgtgaagtgtaagccttcaacagcagcctaatcttactttttttttctgcaattaaatttactattcctaattaaatcaatcactcctttgtattttaggatagaattccgggctattttaggatagaattgactcacaatggatccgtggtccctaaaagtattgaaaacataggttgatgggtatatatatttattctgaaccatatagaaaaagattttacgggtgtgtttactccatactaaaattggaagtttgtttgaaattagaacgatgtgacggaaaagttggaagtttgtgagtgtaggaaagttttgatgtgatggaaaagttagaagtttgaagaaaaagtttggaactaaacaagggccatttcgtttgactcactagatgtctggtctgctaccgatggggcatccgtatttgaataaactgtggaaaatcacacaccatgctccaacataatccaatactctccaatatagaaaacgcaagtcggtttcttctttataattatcatccttacaacctctctccccaaa

SEQ ID NO: 31979 - DNA, 582 bp, Oryza sativa
tattttgatctagttacatagacacatctaacaccatttaaaattttcaacagtgtcataacgtgcttggggtttctgagccagtgtaacagaatctttttgatgcttgatcttatggctaataccgctaatgttgatctacccaaacttgcttgggactagaggctgatattgttgttggtggtgttgttagtgctgattttaggctacaagatttcatgcttcaatgagatagtgccacaggatatatttccaggaaattctgtttcctcaagacctaagctgtacgagcataacatccccttcagattctgcatggcacacgctatccattcttttcttcttttttttttttttgtgaaacttactcatcttgacaatttaatgtactattctgtaccagggaaaggaaaactgaactctcattgtgtaccagagaatcgtagtagaagcaaattatgatcgggattcaggctgttgtcaaaggttacccatcagtcggtatatatcgcattgtgtcttctttgagcgtataccctcttactcatttttaatctctagatgtataaaacaatggtcatc

SEQ ID NO: 31980 - DNA, 604 bp, Oryza sativa
tggtaagacaagtaacaacaaaataaataatatatatagttttttaataagatagatggttaaacactatgtgaaaaaatcaacggtgtcatacattttgaaatggagggagtatatccactaatgtatttggggataccatgtcattgatcattgttctcgaatgacaactgcttcacgtcgaaagacgtggtaaactcggtgagtggttggaatagtaaagcaatgtattaattgataaaaatttttgggatctccccattacatggctctaggagactatttataatcctagtacaggcttgtaccctttaggatttggttagtacatgtgaatttgcatagttacccttaccgtagggacattacaatgtgtatacagtgtcttttgcatttatgggccttgaggcaacccccttgggccggcccattagttgtcgaagggcctctataggccgctgggcctcctatgtccttagccgaaggtatctactacttcggggcgatggccttgtgcttcgccctacaaccttcgcccgtggtgactctccagttgaccgatgagcttggaggtgaacccttcggtctccattccatggcttcg

SEQ ID NO: 31981 - DNA, 884 bp, Oryza sativa
tcgaggaagcgattcaatcagttgaaatatattatagggaaattattttatatggtacttaggtttgatatctaggtgtatgcatgaagtttaaacagttatataaaaattcataagatttgttaagatatattataacaatataagatatttacacacatgcatgcaaatctaaattcgatctatacataaagaaaaaaaatatttgtgtgctatgtgtactattcaccgtctgaatttattgtttctgttttgctagatctagatgctttgcatgtttgtttatagttttatatgatcccaattgatgttacttattttttatttgttataactatttaatggtgggtgtaaaaaaaattgtgtccatatatcatagtacaaagaatattatattaggatatatttcatcctccgaattatatcctttcctctcttgatgggttattaattgattctctcctgattttattctataaatactccctctattttataaaaaatcaaccaagttctagatgtgacatatttttaatactggctatattcggctgtcattattttcactgtggtgcagccaacaaacacagtatattgtttctcggctgtgacagtgcggcggtacaaaacagccgacccactatgaatctggatatatctttatccagattcgttgtaagattagatagacatcgagccgatgcgctcgtgttccgtgattaatctgattatatatcgtattgagctatacacgctttcaatgcacactcaccgaagtcaacgaccttcgctgcttaaaggcaccgcaaatgcacataccatttccgtccattcatcacacacaaccagactccgatcgacctcgtctcgtcgagcgccaagtc

SEQ ID NO: 31982 - DNA, 555 bp, Oryza sativa
cagcagatgaaagaacaaaaacaggggaagcagggcgtggcagagtagtgtcaggggaataaattgaacctcccaccatagcctcatgcagcataggatctaggtgccttttaagcatgagcaacgccccttgctcctgtgacacaggcaatatgtcaggtgagagaggttcgagaggaggagaagcaactgcagagcaatgcccattttcagggctgctatctcttgaatggctgaaaggtttgcagggggaggaaaccttgtctgctggagcagggtcagagagatgcggaggtgtcgccgattgacgcctgattcttgtttctccaggtttgaccgacctggacagatgtcggcttctacttctattgatgtcagcagctcgttctctctgtcttccccttgtctcttgattgtatgaactccggttgtcaagaccaggctctctgcttttgcttgacgaacgaccgcctaagcggttccaaagagagcgacttctatgcctccttcttgaacgctgctcgtggtcgtcttcatcatcagaccttctctccg

SEQ ID NO: 31983 - DNA, 830 bp, Oryza sativa
ttcaaaattgctctgattgatgtgattattcttttaaaatgaaaactagtcaattttgaatgaaatgtgtttttattttggctcggctcattaacaagaaattatagaaaaataattttgaagaaagctcgataaaaagctgaccaagctttttcccatccctttattgttgtgctgtttgcagtctggctacatgcctacatcgccctcactacttctgccggtaccgtggatcatgattcatgaaagaggcaaggagaaagcatatgggagaaaatgttctgggattcttctaacagagagatttatcttggatgatcaatagaaaaagacttgctgtcctcaagttcaaggccactagtatcactgtatcaggattcgtatacatgcagtgatgctgtagatggactcaaagctagcagcagcgtagaagatggtgtagatacgtgcctatatgatttatgaattgttcctgttttggattctattgtgccgtctatttagttttattgcccattgatttgcactcgttctgctgtattgtctgtcaatgaaaagttgccggatgttatagaacgtattttctgaagttttagaaaagcttcaactctatagtatatttctaccaggctgtgctgatgcagtgatgcttctgcgagctgagtagctgactgctgttgattgctgatgatttattcggtgctttgagacgatcggcctcatctttcgcttatgcttatactccctccgtattttaatgtatgacgccgttgactttttgacaaacatttgatctttcgtcttattcaaaaaatttatgtaattataat

SEQ ID NO: 31984 - DNA, 1559 bp, Oryza sativa
taatgaattatttttgaaaaggaaaaatagatttattgcgtcagcggctagggtttgcggttgaccgggcgcacggcggcggttcacgcgaacggacggccgagatcgatccatccaaaacggacggccgagatcgatcggtccacgaccggctcacgggagacggggacgatgacgtcggcaatgacgtcaccaccggcggcggcggctcggcggctcgacagctcggacggcgcaagctcaccggcgaacggcggcgctagggcacaaacggagggcaccaacgggtagcggacggcacggcgaactcaccggcgaccaaagcgacggcggaagaggaacggacggcaccggcggcgaggttgaagcggcggcggtcttcgggtcgacggcggcaacgtgaaggaaggtttagggttcggaggagagagacgaaaccgattcgatctcgaatccaacgatttccaaaccgatttagccgatgtttccaaaggagaaaaggcggaggagatcccgaggatcatttcccctctatcaattcggccggagaaggaaagaagcggccggatttggaaggaaacgacggcggcgcggcgctagggtttcggacggctgcggcgcgacgaagacgacgacctgacaggcgggacccacctgtcagcgacagcgagggcgcggctgcggactgggccggactgggccgaggagagagagaacggttttgggccgactttcggcccaaagccaaaagagacttttaaaaacctttttcaatttaaattattcatgaaatgcaattccatttattaaaaatacttccttagctcaaataaatcccagaaaaatctaggaattatagaattaagcaaagtatttaatgaaattttatctggccccattttatattggaatttattaattaaaaaaaattagatcttctcttctaggcttttaaaaataaattctaataattccaattaaacaacaatttatatattaatgattttcagggtgtgacattagataacatacacgacatgaggggatatcccctcgaaatagtatgtgcatgtcacaaattttaacacatttgttaatccatgcaccaaaattcctactttaaacagaaacttcatgctgaaatccctcccactatggctccatcctaatttaatgatccacaccaagaacaaggacaacaaaacaatgctccgttgattcagtccaacaaaaaataattcactgttgcatggcttgaaaccaataaaaaataattttgattagtactttgttagatgatgattatactaggaaaaggggtaaactacattttttttaagacgaatacaggtgctccacaaaattagcgtgaccatatggccaaaatgacttcatgccttcatggacaacaaggtactacaacgttggctacttgtttgctctgtaatctgatcatcttggcctcaaaccagcataggatgacgtcggtgagcagtccgcctcgcaccgaggaagacatcagtgagcactgtctttgaatgcaacgaaggctgcaggaa

SEQ ID NO: 31985 - DNA, 563 bp, Oryza sativa
atgggtcctattcctcagccacatattggttaccttatgccattgataacttgggtatcaaaatgactagatgttggcttaggaaatgcttagccatgcttagttcaactaggacacaaatggggatcacattattacatagactctgactattggcataactttagattggtgccaccgcaagggtgtcagttaattaaaatattctgaatggcgggctgtgagtgtatggttttgctggtcgcacccatggcagttaaggaccggttcacgggaaaccctgggagacttaccgtgcttaccacaagcgggagtaggtaactgcttgatctgaagtatagctcgaccctttcctaggcaccggtggcgagggtaggcgtgatggagttgggtcggccgaggtgttcggttgtccagctgccggattcaccgcggcgcaagaggggaccgcccactgccttttgaggggtgggggtgaaatcttagcgtggtgtggatggttaggggagggttatgtggagggtcttgtcacgatttccccctttgcagtatcatggtgatac

SEQ ID NO: 31986 - DNA, 575 bp, Oryza sativa
tccagtatctagtgtagcaggtaaagagaattaaatgtttctaaatgaaaacataatcatcattcacttttactgtttataacttcatggttaacggctattatcaggtgaaaaacgctgaccatatatcagacagcaagcatgtcgatgcatgcgaatatgaagagtactgaactgaaaatttgtagttacaaacaaagaggcaagagggagtgaaaacagaacagggacgaaacagtgttccgccttcaacttatgaatcatagccaaatttaaattttagaattaatttagatgtttcatcattttctattttctggccttaatttttgtggaagtacaaaaactttaccctaaaatcaattttggttgcttcatttatttttctcagcttataagccgtagcccaaacaattagaatattttccagagaaaggccaaaagcatagctgtattattggtctcttgtgcatttgccaaaaaaacaaacaaacaaaacaaaacagagacaatcatctatttatgtgcagtacagactacaaataaacagttcactcttgctcatggcagctaca

SEQ ID NO: 31987 - DNA, 521 bp, Oryza sativa
agagatgcaattggcttattggctccctttcaactgatcttcctctcacttcatgtcatcctttttcagatgagaacagtaactacacatcgacctaaagcaaatgacggtactagtatccttctgggttcttgacaagcacaacatcgaaatataaaagatcacccagagtttaagtacaagaccagtacattttatgttaggaacggagaagctagtcattggtacaacatactattagcaagccattagctgcatccagaaacaacactagataatggataatcggatctacaaagctcatgagcatattatgcaatttttgcttttgagaaagggccttcttcccttttgggccacaatatagcagaacatcagaacatcaggccatggaaatcctgcagtcattcaaatagaacaacaacatggtgtcttcaatcctatcaaatgttatgttatatacgctagtatatattataattattagtgtgttatactatacaagctaatttttaggctat

SEQ ID NO: 31988 - DNA, 511 bp, Oryza sativa
actatatggcgaattcgagctcggtaccctgtaactaattcacctccaacttcgctggagggagaatcacctaactggagagtgaatcaaatgacaagacacattattacaataagtagaatcaacaagagtttggtctaatcttaacacatatgccttaaggcaatgcatatcttgaatagagcaatagcctgactgaaaactttggtataagatgcatacctaacagttagctcataagctagcagcactcagaaattcagaacggaatgagaaaacatgcgggcacaacataatcttaaaaatcaataattgtaatgtgatgtttcagttaccatttccttgtcgctatatttctttgaaaatcagtacctgacaaaagctgaagaaaaacttacttgtcgaagttctaatctcagaataaaacagcaatggaggacagattatatcatgtactagtgcaccaaacaatgtgtacaaactttttgtttcaaatgcagacagcacgaaa

SEQ ID NO: 31989 - DNA, 514 bp, Oryza sativa
ttcctccggattcattcggccttggatttattccttttcgtcggattaatccgtgaaagtttgtttccaaaaagatttatctgaaccccacgccctacgtaggttctcctatgtgattctgtttaatttgaaattttaattacctgtccatggtcattttcttttcttattttctcaataaaatactgaaaacaatgtctgttgctttatagtatgtgagatttccctgtgcttgttcaccatgtttccttagaagcttcctttgtcttctttattttgcgcagtgtggaaacatttccacacggtttaaatacgttgtccgtgggaatcagtgtttttcttcactgaagtgcctgccctgtgaagatttattttcttgtcacctaattattgattaggaattgaaattctaactaacaaggatatgtatggatatatggtttaattggtgtcttaagaaatggtttagttgctgttggtgggtgtttgtctgcatgttttcagaaagaggtgc

SEQ ID NO: 31990 - DNA, 593 bp, Oryza sativa
tgctcgtgcggtgaaaacaggtgggattcgggagttgcccgaagaaggtgtatttgatcccgcgggggcaagaaggtgtggggcccacggcccgctggcccgttgaacccaccgaagttatgcgacgtatccggccctcttgattgtatggacccggtccatggacccccaaaagtaaaattcagtgtgcaaaaacacaccgtttgatcaccgattgctttcggttttgtcgaaatttggggttttgcgtatctagatcgtgctagtcatgactgagatttgcgtaaatctcttgttttctttaacagatttggatatcttcctgatcacaatagcatgatcgttcgtttagtctaaattgattgttcaatcacaagttcacaactaggcatatattcttccacatggatacatgtgctgaccaaaatgtgcaaagagtgtggcacgcattcctgaagcacacgctctttgtaccatcggtgagactctgtaattacctcctccacgcctagttcacactaaagtttgaaaatttggttgaaattggtacgatgtgatagaaaagttatgtgtatgaaagatttgatgtgatg

SEQ ID NO: 31991 - DNA, 510 bp, Oryza sativa
attacgcgtaaattcgtttttttttagttatttgttgaactctagtctagactagatgtgcccgtgtgcaaagcttggatctttactttaccttgtgtggtcgctttgcttgcatttagtggaagcaaagttgcatctgtaggaataaaatcaatcagcagatttggtgcacttatggtaccatgaagtattttgaaacctcaaggatggctattggtagtatattcagagataaattagttgctgtatccataatgggagttgcaattgatctttattgtgacaaacacagggatccaaagtttgtggatagcagaatgccaagtgtggaagggtcttttcaatttttttttttttggaattcctgtaaagaacaactactagctgcaaggtttaagcactttagcccataagtggtcactgaccagtaaccagtctactcaaagcagttagagattattgcggttaggcaatttgcatctgtccggcaactagatcacaatatcacat

SEQ ID NO: 31992 - DNA, 711 bp, Oryza sativa
ctgcagcccctaacaaggtttgtcccaaaatatagcaacttctccactaacattcacttcccaaccaatcacttttcctaccaagctccacttctcaaccaatcacaaactcttcctatttagttctacttattttcttaataaccgatgtccaactctaaaacttcttatattctgggacggagggagtacttgattatttctggtgatcatgattgctacttatggttctagtggttgtgtcttttatcatgtccccctccttgactatattttgctgtggtgatgacattaaactagttacattttttccctttctagttgtggaagtgaaaccatttgaagatgcttcttttaatcctgtagaggatgagaggaaatattatctattgaaggtttgagattcacacatcacctcttcaatcttcttgttgcttttgcatattttttcttacttctgtttatgcttgttttgggttgcaggtcttttcaactgcgattcctaaagaagaaattgatgtacatgttcgatctaacaaggaagttaaaaggcttggggttatttcatcttatgacacttcattctcctgtaaattggactttgaagaccagtttactctatcacatacttcacaagaagaggatgtggtattctatggatacacacttcgtcacgtacaatatcctttcttttacctttattatcataat

SEQ ID NO: 31993 - DNA, 5593 bp, Oryza sativa
tcgctctctcgctggacggtgggccccacgacttcgggtaggtggtcccgggatggcggcgacactacgtataatgcgtgcgtgcgggtttcttttgtgtgactcgaaggagatggagagggggctgcctgggagatcgggcccacatggaagtgacccaagtactctctccatggctccgtcccacaactctaggtctctcgctcccgcttcagctccacctctcctcgagttggagctcggccaaacagtttcagctctttgaataactaggcttatcatatcctattctatattcatttattttagatgaaaggagtgtcgactggcattggtatttttatgctttgagccaaattatcagtttaaatgggagcggaactgggtggagctctctcacaaaaatgagctaagatgtggagttggattagtcagctccacaactccactccaaaccaaactcttgaagctaaaattaggagttggaactctaccaaacagaccctaacttaggatacgatattacagtacctattagaatgaatctgaaccctgaacggttgggtctatcacatcctattctatattcgtttattttaggatgaagggagtgtcgattggcattggtattcttatgctttgggcccatttaccagttaaaggctttaagtgctattcgactatgtagagtagttttctttggagcattcttacacatacttaaaatagctttgccaagaaaacttataggactcgcacaaacaaagtttctcatcatttaatttaatctactgggagaagaattggatgtacatatagctttgtccattttcattttgtcaaaattatgcgcaacatagcagtgacaaagcattgacaaaaataaggtgtagttgacagtatcattttgtcaagaattaggttatatgttctcgagtcgataatgttgtcgtattctattagtcaatgttatagtagcaaaacagataatattgttgtgttctatttctatgtcaaaacaaacataaatatatggttatttttctgttgatatatataatgtgagcagaatatgagaaaaaaatgctttcttatcttttgctgaaataagtgttattttgtcgaaatgatggaagcatatcgtggactttctgcccattttcaatataagcaacttatggcctgtagatatgtgttaaaaatcgccataaccatcttaagatacgttgtgcgagtgaaaatgatctgaatgaattatcatacatccggtggtggaaaaaggcaaccatccgacttattttagtgatacgagcgattctgttggggtacttaattacttactgtcaattcacaaatgtactttcttagcttagaaaaaaaggaaggtagtaaaaacactcatacaacgtataaatgttaatgatgtcgataaaaatggcatatcttgtcgatgtaaatgaataaatggtacacaaaacaaattaaatggagggaaacagtgtcagagacccatgttctcaaaatttcggtaaattattttgaatttcagataacctcacgtcctctccaactgaatatagtttcgtttattcacaagtatcaaatccttggctccaaaaaaagaagatgttgacttcttcatccagaaaggaaaaggagagagagatcaaagagagaaatattcagatgttgctttcaaagtttgtactactggtttggaggatttatgagaagaagaagaagcagagaccaagcttccgaaaaccggttcttgacttgtttatcctgaccatgacaatttttgattaaggttgtgtgtagattcaaaatttagatccaaacttaagtcatttctcatcacatcaacctgtcatacatacataacttttcagtcacaccatctccaattttaaccaaaatccaaactttggattcaactaaacacagcctaagaaataacaagaccatcgggtcagtatgtcacgacgtggacatactcaggtaacgacgacgctatcacattgtggacacaccatggacgacaatgtgctcggcgataattaagattttaatacggtattttactgctcgataatgacacaggtaacaacatactattaacctatccctgtcacgattcacacacgacgtgcctgtccgaaatagtggccgatctagcttaaccaatgatctccagaagattcatctagataattgggaggattagccaatgatatccaggaaattcattagtacttcctcgttcccaaattatcatcatataataaaatctaaaatttctcaaattaaccatcatataaccgcatggatacggatttcatcataatacaattaatataacaaggaagaataagcgcatgctaaggtgtataattggcatgatgttttaattggtgcatgtactgtgagagagtgtgtacatggtgtcttaattaatgcgatttaaattattcttatccttggtgtataaacatatatgacgatcaatttgggatggagcgagtattacattacgaggggattaatatgcgcctaaaacacataggtggctagctacttagctatactctctctgttaaaaaaaagccaacctagatgacgatttgacaccaactagaactatagatctggataactaaatacaattaaaattatttcctctgttctaacacataaacatatagaaatgtaagatttttttataagataatgtaagattgaatgtgacatattctatctaataaagataatgaaattttgattgtgacatacttatgataggtatatatgtactacttggaatttaagttattcaagagtcctcacaactgatcacagtcacaggttgccgaccaaaatctagctgtcaatgaagtaattatcacgacatgttggtgttgtttaaaggtaatgaagattaagattaagcaagggcacgctaaataaaaaagctattaggatataattaattaagctttaatattacaaattttaaataaataaatttatttcttattttaaagtaacttttatattaaatttttcgtacggaacatacggtttagtagtttaattttttttccgacgtagaatctgcatattcattagaaaagaacgggctagttgttgagtccactatagactcttaaataggccatgttagagaaaaacgatagttctgtaaaggccggctttctgatcgtctctctactagtaatacgcaataattaaattcttgtagcaagtgccatgattttctacattttggatctaaatacgtgacttttcttgtagatggactatacaacggccgttgcttatctcgtctgctcttgtttttctcgttgtgagccggtgtcaggctgatggcatgcaaaacatccctgcatgcatcttccttcttggttctttctcttccacatcatcaaatttgtttacataataataaatagagcgcatcttccttctttgtttctttctcttccacatcatcaaatttatttacttaacaataaatagagcccattgattaatacctttgtacatgcccttacgcgggaaggaatcgacgacaatggtgcgcatggaccaacgtggctatacatcagcgacgacaactcacaaccgcgaagcaatgtaaacgcagtagcatctaaataggtaacgacaaagatgttcactaatctccaatttgtagtttgtagctagtagcatatcatcccagacgggcatatcgcggttataaataaccagcgatggtccaattagtttgtccaattactttcacgagttaatcccgatcattccaggattaatatatagcaggtgcacaatacacatcggtctcaaacggccttccttttagacaactaattatacaagagatatgtaattaattaggtgaacccatcgatcaaaagcatcacgaccttacctatagagctaaagcctccaatggcgagagagttggtgagtaaagagcagatgacacagaacgcatatgtacacatgattgtttcttctagacgatggtctttcctggcttgaataatgatgttttatagtagtattccactaataattaataaatatccctagttggtcatcttcccgacgactaagcggtcacctaagcactcaacagctactagtactaatgaatgtcgatctgcatgtgcttcctgatgtgacactaatgattgattaatttaagactatatgatgttgaagattgaaccacccaaattctctacccatttatatttattccctaatacaatgaagcatgcatttatttctagactagagacatttaattattttgccactcttaaatgtggtaagtaaccatttaccatgtatacccacatgtcatagacacgtaaggatccaaatgttaacacataggtgtcagatagttaaacgtctaacctaaaagtaacaaatatttaaatatcccttatatctatgattgaaaggaaaaaagtctaagtacaattgtcgagatatggcaggtttggtaggtctctaacttctcaacttaactcaaataattaagtttagagtggaattatggagcaccttgaatccagattcatctctctaatttgttttaatagcactgctctactcccttttagatggaattgaaatcgtttggttggacttcatccctaacctccataagaggtgaaattggagctagaagtatgtcaaacatggccatataatctaagaacagcttatcgagatatccaacaaaaaataatcgttctcctatttcagtgagtaaaaacctgatggtccaaacgagttgggctgaaaatgggacagtgtttcggtgagacgggcccagcaagaacataggcctggttgggcccctattccccctacgttttctcggcccacccaccgttgggctcggctcgggcctaccatcgggcggagaggaggcccaactcgggaaaaaggagaaacagaaaagaggccgaaaaggcgaaagggatcgatgaggtggggaccaccggaccagcgagagatgcgcatcccgatgcagcacgatgccgcggcgccctctgttccgctccgcgccgcggccacgaaaaccacgacgccgccgggatcatctgcgtccgccttaccagtggccgtcgctgctatggatgacttaagcagttttttttatgtgtataaataaaacagggtagttaacgagtcatactttggttctggaagagaatatctttttaggaaaaaagcaataggtcatcttactctttgctacaggtgcaataatttgcccggacaatagacctgagtatagtttatttagttctaaacaatgcatcagaatatggaggaaaaagatggccttagtataggatcaattgagatgtacagttaaacaaaaaagtagatatggatttacaaaattgatgcggaatattatatccatgtagtagctcccatgtactagtttcttttgcttgaaaaaataaaagaagcagataatttctagagaagtccagagaataaaaagattggtggtgggagtgggacccacctgtcattg

SEQ ID NO: 31994 - DNA, 516 bp, Oryza sativa
atagtaatatggtttatatgatgaattaatctttgtaggcattaaagtgatgtcaagagaaacacttgattataagccagaaggaggcctaatcatgttcttatttgaggttcaatctttcatccatatcattttcattgtcttgatttggttatttgtcacacattgtatattggtcttgtgttgtaggctggagttgtggatgaactgcatgctagtgccatcagagaccctattggtatatatttgaaggacaaaaatgagacaatgtgcattggctccataaccaaggcgcaacccagggcacggctctggttgatgctatcagaagaaatgaagctatttcacattctgagaggaggtcggtgtacttcaatggatatgagttttatcctatgtataagcgcttgcatccattggagacatacagaaaactatggggtacattctacacatatcttattttctgacctttctttaatatttagaagtttgttaaattttcatctaccactt

SEQ ID NO: 31995 - DNA, 587 bp, Oryza sativa
ttcctgcagccctgctgcacggagatgaacagcagggcgcagaagaaggcagcagcagcggccatgggcaagagaaagagagagaagcaggggcagggctgctggttggttggttcgaactggattgtgtttttgtgcagagaaatccgtgtgatccagttggggaagacgataagacgtcctcagcaactggcacgcccaagttgggactaccagcgcatgttcacgtcgtcctgacgagtgaacaaccgactcgctgaggcagacgagcattcattctgcccctctgttctctatgtcgggggcagtggcacggacgccgatcgagctgccgttcgggttcggcagcgaaacctggtttcgtttcgagtttcagtgaaaaactcagagatttgcgcaatccgatcgtgcttactactactagtactgatttgctgtgactaaatgctttggtaaatcctcctttgaaaaaaaatgctttttaaaatttagggcacttaccatgtaagccactcctagcaatatcctcatgtgggtcatatgggctaaggcacccaatgaaaagtactccaaccagccctaccaaa

SEQ ID NO: 31996 - DNA, 663 bp, Oryza sativa
ctgccgcccaatcgcaagtgcatcaattgcaacagtgtggtaataatctcctccgcctcctgcttgcgtttgttgctgagaagcttgattggtggttcatttcgttcccggatcgttgcatggtagagcgtggaattggtctgctgggttgtagtgttctgcagttagcgcagatttatgaaatccatttgtctctggtgtgaacttttggttcgtccgtatgtttaagcttcaatgttggttggatgatgatagggcggctcgttcgtttctgatacagggatgacatctgagaatagtgaatccgttgctattagctgtggttagtttggttttatatgttatatgattggttaatcaatagggaaggtagttcttggctcctgagttttattggctcgtgaatttcattacttcatgcacagttgtttgtatttgatatctagtcgctaagttggctgaaatatgagccgctgaacttttaatactctactccctccatcccacaaaatttcaaaccctagcattccaagatgaaattaaggaggaaggcaaaataccaaaatgtccctaattaataggaaagttgtattgatggatgggtaggtgaggggtatttaaaggcataaaatttcttgatttgcgaactggtcgtaggtaaga

SEQ ID NO: 31997 - DNA, 618 bp, Oryza sativa
ttctcacatgaatagcaaatatttaccttgtttcaactccttagattaaacatatatttccaccctatcttcatgccatcagaaatgaatggccacatcgttacggtatatttacaaacgaaaaataatttataaatatattttttatatacgtgttcttagcgatttaaaagtaaaagctgaaaaaataaacttcgatgtaaaaccccaaaatcaactctaaatataaagttaaaaatttaaattttggctgatacttataaacataagaaaaggacgagggacaaactcttccatgctagtagtaactgttcgtgctgttgtcaaacagtagtctcgcgctactgtttgtattcttttcgaaaaaaaaatgaactagctatactgcttttttatatgtgctaatggaatcctagctactccgtatttgaattgacaaaattaaagcagcatgtcatgcattctgcagttctctgcagagagaaattggatctgcgcacagcagggtcggtttagttgtcacatcgaatgtttaaccgtatgtgggaagggtttttgaaacacgaacgaaaaaactaatcttataactcacatgtaaaactgcgagacgaatctttt

SEQ ID NO: 31998 - DNA, 1315 bp, Oryza sativa
cagctaccccacctgttggggcttgctgacctaaccagtgaaccacaaatccacaactctataaaggtggataattggctgataacctgtgcaattgcaacttcactgccaccctagaatcgtgcaacttcaaggtgaccagcatgagcatcttgtcttctctactccctccatcccaaaataaatcaacttttatacatgaaatctaaacataggctatgtctagattcgtgtacaaaagttgacttagtttgggacagaggagtaccctcctatagccaataagggctcacacacttcatccttactgtcagcagtttcaggtttggacatcactccctttctctgctctcttggacctgtgacatctccacaaccacaacctgcacactgacgtgtgagaatatcggctccattttctatcagcgtgccttgcccccatctctttactgattggggaatccttctttagcttgatctgcctttttttctaggaaatgttaactttgcgtaacaaaaagaaaaggttttaacaagtagtgtactccccagtccccactctaaaagaatcatcaaccaacaaaaaactaaagtggtagatgaaaatttaacaaacttctaaatattaaagaaaggtcagaaaataagatatgtgtagaatgtaccccatagttttctgtatgtctccaatggatgcaagcgcttatacataggataaaactcatatccattgaagtacaccgacctcctctcagaattgtgaaatagcttcatttcttctgatagcatcaaccagagccgtgccctgggttgcgccttggttatggagccaatgcacattgtctcatttttgtccttcaaatatataccaatagggtctctgatggcactagcatgcagttcatccacaactccagcctacaacacaagaccaatatacaatgtgtgacaaataaccaaatcaagacaatgaaaatgatatggatgaaagattgaacctcaaataagaacatgattcggcctccttctggcttataatcaagtgtttctcctgacatcactttaatgcctacaaagattaattcatcatataaaccatattactatatagatgcgttagcgttcccacaactcctataccacgtgatagtcaagctgcaggtttgtcccttagttaggttgtgcttctataagtattttataggtcaatgcttgtatataagttagctagtttgatttagattaatccattctacagcagccaagatactgtttatataagtattaccagtcaatattgaacgtggggctgcag

SEQ ID NO: 31999 - DNA, 513 bp, Oryza sativa
gtgtgtgcactttttaatattcgtttacctttgcagagtgaaagaaatcttaaaaaggatagattacatggaatgatggaaacaggaaacgtggttgaactaacttggcaatatactattgactgtatgccaaaatgattttaggaagacctgtatgttgaaaatagcttccaatctttcataaacaaagggcgatagttagttgatatactgtagccagctaatattcgttatgttgaaaactgcctaatttgaaatatgcacacatggtttactgaaataaacaacaaatgtaatactaaaagttcacactttttactaagactgtctctgtcatatgtacggcacaagcattgagtataatatgctattgttgaagaaattggaagtgtttttactgtctgcatttgttttctgtatcatgttcaaatttgcttgtgataaagcctatcttgagtgtttcatgatatttggtgctgtgccttaccctgatgaaggggtcatgctgattcg

SEQ ID NO: 32000 - DNA, 1840 bp, Oryza sativa
aggggaagggctcatgcggcgagaaggagaggcagagtagcccgcgttcgtgtggtagctctccctctcctggtggtaagacctctcagctcagcctttacgtttcgttattgatcatcccctctcgaaatcgcaagtgcaattgcctctccattctagtctttggagttcatcgatcgatgcttttagagttttaggtgggtgaatagcagtggggatcgattatccggcacagcgtagagccctgatctttggtaagaacagttagggttttgtcaaccgctatatttcgctgtttcaggcgttaattccagtctaatcaatgatcgattgacagattaggatgctaatttacgtgctccacacatttattgcgtcattcttttactcttgcagtaatttgatggaacgtaaggattaggggaaattctcttttttcccccgaaagcctcagaaaatcccagccccaaaaatgtggggaagaatataattttttaatccagtgcagccattgttgtcatagcaagagtatatcttttttttttctgtcattttgtttcccctggacgttggctgtgtggagaatgtgtgcttcttttaacatcaagattaactgcaaatatgttcaaatgcagaggaagtttctgaagatgaatatgttcaggttggtggagtgctggaaagaaggaagaggaaagcaaccgtgacacctggcaagctgcagatttctaaaattgagacacctcataagctgcagatttctgaagttcagacgcctcataagctgcagatttctgaagttgagacacctcatcagctgcagatttctgaagttgaaatcaagagcaaagaagttcaaggtacaagctgaactgcgtcatctattcttatttgcacagcaaattgaggtgcataccctgaaattgtgatttctctgcattcagctcttgtgctggctcaggattctcaaaggatctctcaagagaatgagaatctgaggttgcagctcgctctcaagacaaaggagctcgagcatgaagagaatcagaagctcaggttacagttggagctgaagaacaaggacattgaatccctgaaaaagccagaaatggattggggaactgaaagctgagatcgagtactacaagaagactgtaagttttatatgatgttcttcccatttctttcatagtatcatgtacctagacttttaacactgcgaaaaaactggcaatacatgattttcatggtgtgaggatatcacgtcgcatgctacatatttcttacacaatagacgtggtttacatatccaatctctactgttaggcacacacaactgacaaatttgttgctaaaataataataacaaaagaaaaaagagagaagcctagggtgatgggacaaaccccaactccccttgttctgatgatctataagctgaggaggaaatcattttagattctttcgagtatcatgctagatatctcttgtattctcaactaaatgctagtactactaaaaggcgttctttgtgttatggttatttcttctatttcgcgtcatccataacaatttcataggaagattgataaggtgaggatattaaaccatagtccataggtgatgaaatatgtcaggatgattaacatgaaaactaacactgcttttgatcatacttgaccaatatggtgaaggcagaattcaatttgctgtactcacaactgttttcttttttccctactggtcaaccgggtgacaaaattttacagtgttggagtggactgctccattatatcttattgatgattgattgttttcttattatttgaggaacctatca

SEQ ID NO: 32001 - DNA, 1768 bp, Oryza sativa
aatatggattttttaaagcaactcctctataaaaattttttacaaaaaaatgcaccgtttagtagtttggaaagcgtgtgtgcgaaaaacgaagtgctttctccctcaatgtcctccgaacgaacgctgccttagagtagttataggtcatggacgcctgacggatgacgactgacatgaagatggtaagttggactatttagaattttagatcgatatgtttaggataagttgagcttttgtgatgcattgctcgtgtgtgtccatgcatgatgcatccctagctacaaggagtatcgtcttttattttgcttttatacctttagacttcagtatactactactcaagtacttcgtatctactacccaacttcgatcgggcatggtcggtaactcggtatatgctcctgtatgctgtatggctgtattgatggatgatggttcagctcgaaggtgtatttgtagcgaactagtatgtgtgcagttccaggcgcttaactagtttggtgtttgcctcggttgcatctgattaccgaccaattttccaaaaaaaatttagagccgtaaaaaatcttttgcttccgctcagaggttgcttgacagcaaaataaaaatcgtcatgcgttcagttcgtgcgctcatcacgcactaacgctgctgtatgcattgctacctacgcactgtaataaatctgtaatgacacaagtactatctgcgtctgtaatctgcacgctgtacgacgccctctcgcatcacctcatctcaaaacccactaccgcacgcagaaggcgaagaaactttatactatggccctgtttaaatctcacctgaaatttttcaccttatcacatcgaatatttggatagatacatcgagtattaaatatggacgaaaaaaatcaattacacagtttacgtgtaaattgagagacaaatcttttaagtttaattgcgccatgattttacaacgtggtgttacaataaacatttactaatgacggattaattatgcttaataattcgtcaagcagtttacaggcggattatgtaatttgttttgttattatactacgtttaatatttcaaatgtgtgtctgtgtatccgatgggacacgctaaaactttacttccctggatctaaagtctaaacaccccctatgttttggcttagagcagctaaatttggctattttaaccaaaaaaaatccactccaacaacctctctattaggatggctaagctaaatgattagccaaactcatcccctcaatggccaaatttggttagcccaacctgccttgccattggtggatcccacgctgaagaggcttttccctcccgcaatagcactacccgcgtcggttgagagcagtgaaggaggaggatgcggcggtggggcagcacgacggcgagcgcacccgcggcctcctgctcgtcggccgccggcgtcaaggaatggagagagaagcgtgtttccgccaccgcctcagttcccggccacatccgtcggcatcttcttccttctcggcaaggagtggatccgctatctccgttgcctcgcgcgaacgaattcgccgtcgccggcttctcccttctcgccgccgccaccgctgttgactcgcacacacgaatcggccgaggcggagacggaggaggacaaggacataggggagaggggcgaggcgtggaggggaccggggacgggaaaagggggagaaaacgaggaagaagaaaaagttgaggctgacatgcggatactactgtcaggg

SEQ ID NO: 32002 - DNA, 927 bp, Oryza sativa
aatttttctgtgatctggatgttgtggttagtcatgctgtggctagagccgatagaggtgaccaagtgacaggctgcgtgttgatagcatccttgtttgcatttcttgattatcctattttatttttttaggagtttacagttcatgctggagtcatgcattcatcagagagtcttgtatagtccctctattcgtaaataaatatttttaattctaatgccacctaagcgtcacatcagtaaaaccgctctccaaaaccgctgagggagtcaaattgcactgatttgaatagttcggggagtcgtgctatccgattttgtggttgagggtcacatattaaattcgagtcatcttattccaaagcgttttgatggttatgggccgttttatgtctcctcagttatagccatcgagcggctcatataagataagagaaaattggaaccatgccattataattttgtaaaatttgagatatgccatcttgacccacatgtcattgggttctatatgccattgagataccgatggcatatctcaaactttacaaaattataatggcatagttccaatttacccataagataatgcccgctcgtttcgaaatcgcaaatgcgagtgggcattctcgtgtctatgggccgggtttggtggttgcttcatgatgtgatttaaactctagttaagatttagattttgtcttggttttcgttcgcatgtttttcaaacttacacacggtgcgttcggtaaaaaaaactttttatataaaaattgcttttaaatataaaatatatttctagacttctccggtattatataacattaacttcccagttttggcacatctttacatatttttctaccaaacaaatgcctcgtgatgattcattttcatccagtcacgaaataatccacgattttttaga

SEQ ID NO: 32003 - DNA, 1129 bp, Oryza sativa
ctttttataggttggttggtaattaatttggcatatattgttttgtgtaaaacctcaaaaaatattttgcattttgcatgtcggattttctcttagggcaattgcgatagtcgtaagtcgtacgttccttgcaatatctgcacaatcttaaagctctgagtggctttgcctgcacacataaggctctagtgagttcaaagacatagctgcttggtaaacgtcttgctgaacatatcgacaaaccaaaatagtatgaggatgttttcaaaaaaaaaaaaatagtatgaggattctaaggtttttcggctataagtatatggtaattatttataccaaagttttggatatgtcaattagaggattaaaaaacaaggttgcttgttcgaagcatatgtagcatttcacaaataataagaagacaatgaaaaacaattggcaagatataatggagcagcccattccaatactcaagtaaaatttcatcaccttcggttgacccgtagaaaatgaaaactgacttattgatcatcctatggaaattcaggaccgagcatgatcaaaagtagtattagttttaattttaatctccccagcaaatctcatcatctactaggttttagtttcttcaccgaaccctatgaaattgttctgaatgatccaactgttgtttcttatgacacaaaatagaataaagtaatcactaaaacaggaagcaggccttttagatagtagcagttggctgctgatagtacactaaatagatgtagcttgctagttgctacttcattttttcacaccaagagaagtacatatcctattccaaaaaaagaaaaagaaaaagagaagtacatatggccagtttccttgaacagttaaaattcttaataatctaggtgaatgataaaaatgagaatagaaaactcacattcttcttgtagttctcattctcagttttcaactcattgttctcctttttcaggacctcgatctcctagttcttccactcaaccgtttgcactgcatgctcaagatccttggccttgaatttgagttcccacctcagattctcattttttgagagagccgtcagcttccttagccaagtcactcagatactgagctgaacaca

SEQ ID NO: 32004 - DNA, 1848 bp, Oryza sativa
aagattaggcccagtgatgcgctggatgatcaatcccctatgctattaacccatctaaaaagcatccatgaactccaaaaactctaaaaatggagaggcgattacacttgcgatttcgagaggagatgatcatggctgaagtaaaacgaaatgtaataaatggagatgatcttcctcttaccaccacgggaacgacgaggcctctccttctcgacgcacgagtccttctccgtctcgccgccgccggggcccttcccctcctcgccaccctcctcctcaccatcatcatcaacatcgtcgtcgtcgtcgccgccgtcatcgacggcagcattcttgaagcgcacggaccacgcattggcttcgtcagacaccgcggcggagaggtccccgcgtccgccgccgccggcggcggcggcggcggtcatgtcggcgtgtccccgtaatcggcgggaggaagtgggttttgcgttgtggcgatctttgttttttctctcctcgatttcctcctctcaagtctcaactttatgtgatgctctctagaaaatcttctgtgtaatttttttttttcatttgccgctctgctggtgtctctcccgcgccacttacaaattgtaaaatctagtagaagaatagataatgctcctaaacggatgtctaatgtgattggaaaaaatcttactcccttcccttcccgggtccacaagttgaatgaatcaaaagtgacgctgacatgtgagcccgggtgacaaataaaaatgaaaatttaggagtggtattttgggcatgtgcattttgggaggatgctagcctcatttttcatccattgagctggtggacacgtgtgaacctgaaggagacttatatgtgggtctgggtgctaatgagaatgaaaatttgggagagtgacatttgagcatatgcacattgggagggtggtaaatagtaaattctcccacggctcgtaggcccattctaactggagtacttcacaacgggattgtagacttcacaactacccaatgtgtcatcgttcaatgtctacagtagtagtatcgatttgttggttagtagattgtctgatagcagaagaaaagagaagattgataagatacgtaatattaggtgagctattggcgtgtgattagttgagtattaattatttcaaacttgaaaaatagattaatataactttttaaagtaactttcctatatatatattttttttataaaaaatacattgtttagcagtttgaaaaacgtgtacgtgaaaacaatgcactttctctctcacatatgaattaacttggcatgtctcatgtgacaaaactgaaaagaattttgccttttgtatgttggattcatgaccaaaattcaaaacatgaaggacaagaaaaggaacaaaggtacataaaaatgaataacttgatcaacgatcgattgatcacagacaatgagacaagtattcctagttcttgttcatgtcccaaaagaacttgttttaggggacatcccatttccctcactgagtacgcagaaactaacacttccactactgctaggactactagataacacataagttcacatcatatgaagattaattaaagtgcagaaatcctcatgttctgaagcagatttatgattattaattaactaacatagactggcacctaaaagcgtcactagcaagaagcaaaatgaggcattgctataaccatctttctgaatcctagctccagggcgtaaaggcgtaaatttgaagatttctgaatcctaatgttagttggagtcgtctccttcctgttcttaataagaccttctttgagggcaattacggtagtcgtgggt

SEQ ID NO: 32005 - DNA, 715 bp, Oryza sativa
ccagccgcatgcgataataggtttattttcacatgcggccgtcttaaggggccgcatgtattagggcatgcggctccttaagatggccacatgcgaaaataggcccattatcgcatgtggctgtcctaagcagccgcatgcgataatggatcttcgcatgcggctggcttaagggaccgcatgcgatgatcggccatatatgctcctccaggcccgagcttgaccatttgaaaacgaagctttctctctcctaaagcaagcaccaattagggggggaggttttcaactcgaaatttttgcttgaactctatacgaaaggtgaagaactctctatcctccttcatttggctccatttttgttatatttcgttggtggaaagtggagtttttttaatattttgacaaggtttgttctaactattttttgcaaaatctagcttcaaaatatttgttttgatgggcaaattttgcatgtaatcacttgtacatactagttacatgtattgttgtaattttttttgggagacaaatgcatttaaacttttgtatgaaatacctgcggtctatttttttatctgtaacttttttgcctttatataattagatggatcggtcgtcatggatgtatgagatgcggagaacgcaaccgatatttattaaggaagcatctaaatttattgatcaggctaaggcccatgctttgagggagaatatg

SEQ ID NO: 32006 - DNA, 675 bp, Oryza sativa
tcatatgtgatccgaacccatcttgattctctttcttatatcatctatgaattaatggaaatggaagtcatcaggaaccaaagcataacaccgttgctatccatgccaaccagaaattctctccagtggagccatcatctaggacgccgccgaaacaccgggccacttttcacggtcgacaagtcaggctgctacggtgatcagcgttggaggaggttaatctggtttacgatcatgctgtcgtcgctaattctctcctgtagcactactacagaaagcgtttttgcatacgggcggaatcaattttcacatgcggttggccggcccgcatgcgtgaaatggtctgcaaagatcaccatttgcgtatgcggccgtcgcagccgcatgcgaagatcgatcttcgcatgcggtcacttaagacggccgcgcacgcggtgagcgttgcagaccgtttcacgcatgcgggcgggccaaccgcatgtgaaaattgattccgcccgtatgcaaaaacgctctctgtagtagtgcttcaggagagaattagcgacgacagcatgatcgtaaaccagattaacctcctccaacgctgatcaccgtagcagcctgacttgtcgaccgtgaaaagtggcccggtgtttcggcggcgtcctagatgatggctccactggagagaat

SEQ ID NO: 32007 - DNA, 1119 bp, Oryza sativa
taggaatcctccgttccaaatgaggaacagaagatagtttctcacccacttcaccaccacttaccaataaaaattaccacgtttatttaagttgagactgtcaaattttttactacaccatagcaaatctaaggaaatcttgttgtactttttttgaggagtaaagtgcattggcagtccttaaatttatagggctgtgtcatataggtccctaaactctcaaaatgcatatctaggtcctagaacttgtcaaagcgtatcatctatgtcccaaatcggcatatcccctctagaatcctaagtggtactgatgtggtataccacatggatatgacgtgtcattttcttttttcttcttcttttctttttctttttctttttcattttcttctcattcttctttttttcctttcttctgctcgggtcacagagaaagaagaagaaagggaaaaaaagagaagaaaaaagaaaaaggaaaaaagttaaatgggtcccatttgtcaatcaacattatgccacgtcatgtccatgtggcatgccacaccagcgccacgtaggattctgaaggggttgtggcgatttgagacctagatgacacactatgacaagttctaggatttggatatgcattttgagagtttagggatctagatgacacacctctacaagtttaaggatcgcctgtacactttactcttgaagagttattgatgtatgagacccaatttctattatcctttaaggcactagtggtggcggcggtgaatttgccactaccaaaacccaccacttctttcatagtttttataaattagcttatgatattcattaattttatggaatactctaatatttgtttcaaataagtgaataccatatatttaaataagcaaacaagtgatgctaacatatctgataaaaaatatattttgtgtatgatatattataatatattttcttttacccatagtgaattatgggtattttgctagtattgggaaaaaaatcttgttacaactgcagctacaaacgaacaactatcaagtttatcaaacttatctaatcgtgcacgtgataaattgtaactagcaaccaaacatcccctatggaacatccttt

SEQ ID NO: 32008 - DNA, 654 bp, Oryza sativa
cgattcccgataactctagggggttaggtgcaaaatgccgcttcgagtggcctcgcgtcgtcgtccacagctggacagtgctgtcctctgctttttatgatggcatgtttgtctcactgacatgtggggcccacgtaaggcgcggtgtgcggtgggctccacctggcagtgagtggggcccgctgctcctttgttgtttttgctaatgctgtgtggctggatctcgcatgcatatatggtatggagaattggagatggagattggagagagcatctgttgctctttgactttctgtggccatgaatccactccaaaaactacaaatactcgaaaattcgattgtttgttcaatgctgtggagtaatcagatgttcgatctggagattaagaaacaaattagctgcaatttgtgttacaagttggtggcagatcaaattaatcaaaccaccaaatcatatttttacagctgaagcgttggatactcctccaaatttcagcacaaatgcgtgcctagccagtgcattcatgatagagagaaaaagatatccagtgctacaggtcatagacaagatggatttcatttattatgggggtttttttatatataatttacatcttagaacagctattaaaatactggaaactattgagat

SEQ ID NO: 32009 - DNA, 640 bp, Oryza sativa
aaatatatgattttattaaagtatttttaagactaatctatacatgtttgaaagataaatattttaaaaatgatttaaatcaaatattctaaaatttaatctcacccttatctaaaacgataagtattatcagcccggagatgggaagagcatttgttctccaacgattgtgctgaagagagactgatttgtacaagtgtgaatgccgcacgtgtgtctatgtaatggacttgagtaattagtcttaagcatccctaattcgtggacaagaaacttaaatcaagcgatccaagacgaagacagccgatcccgggacaggagggcatgtctgacacagcaactctctctctcacacacacaggacagtatggcacaccatgaccaccgatgacgcagccgcgagatcagtttggggagatgcagcgcagctagctaggagtagcgatgttcggtagcagaacagacagaaggcaaccgtgggcaaccaaccagcagagcccgcgtttgcggatgaccatccagctgcactgcatgtacgaccgattcgcgccgcggaattataaaccggatccgatcctagtccattcattcacaacacacgtgtgttcttgatcttggataggggtagtacctgggttca

SEQ ID NO: 32010 - DNA, 1695 bp, Oryza sativa
acttagggcccgatggagatatggaatgttatctcaatcgagtctaaactacggcccgacacagataggagtcatccttgacgggcctgagtattatgcctatctaacatgtctgtgcgaccatatctcaatggggtgcttttttggcccgattaagatgactttcttgtgacgcccagctaattccaggcatgttagaggacatcacggatggaaggttctgtattagtgaccctacccctatgagcaccttcggaagactgggccggcatatcttgggattgacgaagtcatcacgggcgtcttgctattgacggatacgtcgcctactatgaaagaataattagccgtatgtctaacaatagttgacacctaaaattgagtgaaaagtatatttaacatcgagattagcacaagtagcagtagcagtagattttgaggcgttttgagaaaaacacctactaatgacagtaatattgaaggaatgaattaaatttgcctggtaattaatattttttaagaaatggctccaacaagagatgccttcaaatctcatccatcctgtagtgacgtgggctcattggaagcatgccaaaagtatttcaggcccgagggggtgaaattatattatgcccaaatttgtagatgtatcagaatttcgggagaacatatcctatgcacattagctttccgtgcacaccaactaacaaatgtcatataaaattctagaaaaaattaggcacgtacttccaatagtatacaccaacgtgtgaaacgttatctttaaattcattatattttagccgtaacaaaaaaagacaaaattctgacatatttttaccctaaaaaatgtcaaatttttcaccgttttattacggctaaaatataataaatttgaatacaacaccttgcagatatgtctaatactattggaagcatgtgtccatttttttctagaattctctgtgatatttgctagctagttggtatgcatgaagtgtgcacaggaagcttgtatgcataggatatgttcccgaatttcggacccactggaattgatgctcacacatctgtttgtcagcccattaactcaaacaacgacgcccaattggccacacatgatgatgatgatcaaatggcaaattaaagtatgtttcttgttagtcgttatttcctcgttacttctgccatatgtacaacatgcatggattgatgcatgccatttcatcgttgaaaagcagtaacagaaagtgaagaacacagctagcatatgacacgatcactgttgtacaatgacgtcctttctccttcttttttcttttatgaaaaatacatattgccaagtgttggaattaatgaatgggccttagcccactcgaaaattaattctttggaaaatcacaaaagcccacctcatgggatggcatgcatgtggagtttagtaccaccttgcttattctaggagagggggaccttattaaaagggaggatgccctcctagtcacttgaagcatgtgtggtggagagaagaggggaaacacacgcgcgcgctcgctcgcctcgcctggcagggcaggcggcgcgcgtgcacgacgtacgcgtcgaatggtccgaaaaattggctcctcacccttgcgcagatgcagcctccttttgcagttttgttttgctgcaaattcggattcgtttttgttt

SEQ ID NO: 32011 - DNA, 533 bp, Oryza sativa
cacatgcggcggcccgcccgcatgcgtgagacggtctgcaacgcccaccgcgtgcgcgtccgtcttaagtgaccgcatgcgaagatcgatcttcgcatgcggctgcgacggccgcatacgcaaatggtgatctttgcagaccatttcacgcatgcgggccggccaaccgcatgtgaaaattgattccgcccgtatgcaaaaacgctttctgtagtagtgctacaggagagaattagcgacgacagcatgatcgtaaaccagattaacctcctccaacgctgatcaccgtagcagcctgacttgtcgaccgtgaaaagtggcccggtgtttcggcggcgtcctagatgatggctccactggagagaatttctggttggcatggatagcaacggtgttatgctttggttcctgatgacttccatttccattaattcatagatgatataagaaagagaatcaagatgggttcggatcacatatgatgatttatcgcagttgttaacttgatatacgatggaggctgcaagatgcat

SEQ ID NO: 32012 - DNA, 10150 bp, Oryza sativa
agaataggaataagaaataagagagggaacagaggaggaagagaggaggcatacgggtccaagtacgtacgtatacctactacgactccacgtaggtacaatactgatagggactggaggattattttttctttatagattgatctaatggttaaaaatatcgggtccaccagattaaatgaaaatcaatggttgggtgttgtctttttttttagaattttaagaatttctataatttatcatagtgccaagtggcagcttgggagcgtttgtagggtacacgtggcagtttgggagcatttgtaggaagtttaatggacttttattatataatagaagatagataatagatagataactacatctattgccagtaacaatgcaaatccatattaaaaaaaaatagtaacggcactttattccgttctagtcaatgctggctgtatttaccccacaatcccattctaacccatctatcatggacctgttgagttttggccccttctgtaaatttttgtaaataactctttttctttataaaagttatattgctcagcaaatgccatgcaacgcagtaattcatctaaaaaaacatggacctcgcaaaaacccagaatactgttctagccaagtacatttgtgagcccccttgtttctgttttggcctaacttggacatattatattggctggattatgtattatattgacatattataccggtatctcgaggtactttttgctgaaccggagcaaatctcttagaaaatactaattgtataataaatcagggttacatattatttataatacattgggatgagtctctattatcattgatttttgcttgatctctgcattgtcttccaacaatgacagaaaagctagcattagtagtccgatactcctttctttggctatgtcctgctatcaaacacgtaagaattgtttgaaactaacgacaactagagctatgtcaacaagcttaccaacgtaaataggtagtggcgttcatactaagtacaaggataatcgttgcaacaattctaactaaataaaaaaatggagtccttattgcctagaagcacattcacatcatcgtcacaaaataaagttctttgatataattatagttagcatagaacacttgtcaaatttaagaagaaatcaacttgttccaactaattcagtggagcagaaagactgaaatttgaataaaaaaaaggaatgtagaaatcctaaatttgaaaaaaaaattggggggcccaaatttttgggagccttgtgcgatcgcacagcaagcacatgcccagggaccctttcccttcctatggcaatcacactagctacaaagacaacagacacaagatatacggtagagctctctcttatactaggtaatatatgttaaacatgatagaaattatgtgttgagatattgtgaaaataatgcgatgaagatgattcgacatactggtatgttgagctctatttatattctagattatgtgtaatagttgcatgagatttaagatactctataaattgttagtggatatatcatacttgcatgttacgttttagcatgtaataattgctagtgggtaccaactatctataaggccattcccaatccaatgattaggatggtgtctatatcattaaataggctgccacctaggataaaaaatgatatggcaagtgaataaatgagaaaagagaaggaaaccatgtcttgcaatgagatataggttctacacaatattcaagacatcatgtgagataagtagcattaaatttaagtaaagatagtggtgtttgcattggaagagtagtgtctagtactaatttcttgatgacgtggagtttatggaaactatgtctagtgtcttgggttgggaatggcctaaggtatagatatggtcaaatattatggcatggctataaataaaggctaaaagagatcacctatgctgctgtctgctgaggtgaagttgaaggatggaggagagaatggtgccctttttacctagctttccataaatgacggcaaccttcctatcaactagcttgcttttatttctttcctatatatgaatgtatgaatggaagtcatcagaaatgaaagcataacatcttcgggatgtatgttgaaacaaattcatattgaagggaggttgcaaccagattgtcggctgcagaacaaatcacattccgcggtgcagaattcaagttgctatgctgcagcagctgcaggaagacgttcagtccagcagtgtgcagcagcttggtctctgtcgtcgtttgcatttcggcgtgcggccgtccttctgtttggggaattggcgatagaaacgatcgaccgtcctccttaattggccttgccaacgattacttaattaccctctcacctaaattatgcaaatgactaaaatgactgtagaaatcaacggtgagatttattcctactacactactatcacctcctagtgaaaggtacaggttgggacagactttctgtccattgattgatattttttttgaacgactcaccgccatcgccaccagctgtgaacgctgtcaccggtcaccatcccgccagatccaggctcagatctggtagtctcctccacggccgccacacctccacacgccacctgcagcaccgccagtcaccgccgccccaccgctcgaccccgctgccggctgcctccccaccagatccggccgggaggcacggatctgggagatttccgccaccccaagcagcacccctctgcccgagtgtggcgcgaagatgaagcctcaccgccgccgtccttgtggccgcgcggctttagggaacgtgcgccggcgggggcgtcgcctcccgtgtcgcctaagggggaggggcgatgcgagagtctagcagcagctggctggttatatatattcaccaatctgttatagtagccattgattgatatggtcagagataatatatcaacagcgcatgactttgcaaaaaggagctttattaattattaacaattcctcgaggtctcccatattgggtgaccttcccttgttacatccaatccaaatataggaatgtaaggcatcagctaaagttatagcagatgctgatgttagtcacgccgctccttctctgttctttagaggaaagaacattgaattggactgctgtagtctgggtccatgatctacttgttcattgcgcacaaagatattcgatcatggaggacaggttttttgtcatttgttttcactgcatgcatgctgtacatcttagttacaagacagttgtagtgtaaatacttagtaatatcattacatgtcttgtgccctctagaactctaaacggcagttctatggtcttgatttccagctaagttaggtatgggaggcatcaagaaattgagaatgaatggccactcaaggatgatgaataagaaccccccatactagtagtcagcttggtgcatgttttcggttgcaaacatcttacctgtagcttgcatgctggatgttgctatattggcctctttggtaggctgaatcactagcagaaatacatgaatataatggatgcatgcaagggaaatgttatttcctcactatgcaaatgagcgatgctcaagcaatgcaggtgttcacgtacaaacagtgagacacaatgcaggaacattctgggtcactctcctttccatatgcatctcccactttctccattccccttcttgccttctctttgttcacgatgtcaccaactagaaaacctattggttgtctgccttttggtagatgccggagatgtaaatcattttctatttttcattagataagtattaaggaactgttccattgatgtgattgacgcagcttgcaattggagagttagttttcctgcatgatcttacctacagtgtgcagtcacgcaaagtgagcttttgtccaatctggacataatctgattggttctaaaacattaaggcatgttgcagtacagaggttttctttggcaatcttccctgggtctcttgttttttatgtttcacattactggttctgataagcattctacctaaataaattggactccgtaagtcagaacatgtatatcagcatgtgggaagagcacccctgaccattgcctgatcctaccaatctaccatagccatcggaaagctcttctggtgtttaccatggaaatggaagacatgaggaattctcatcatacaaattggataagatcgtccgcatctgctaagggaagacaagagatctaaaacgctgcgatgattgtagcagtgcgagtagcagcgagcctgagactcgagaggatatctgctcctccattgctccatcgccttatttccaaaatggattggttcacttgtgcatcttgttgctccttggttcttcctccatttttttttgctacagaatggttcattgtttttcttcctattattagtttactacaagatgttgcttatcacaggttgtatggagtaacttatttttcttttgaagaaggaagtaactttatttccaagaggtcaattttgtgctgagatgccttgggaggaagatgatcagctggaatttgactgggttgaaagggcatcctcttgtacctttgactgagttgcatgtgcaaccggcttgttagcactccgaataagtcattgcacaatagagtacactaatcgagcaaatcttaaaattatgttatcaaaccatatgcagctgtagacaaacatagcgccgctgtagatgaacaataataggacagaactgagaagtaaatgttcaacctttggaatctctaatagttgctctgattcgacttttggtagcatacattttgactaaaattataaattagagatcacaagaactaagagaacttcacatagactacagcccatagctatcaaatgcatatcagccccaatcatgcgaggggtgatgtttactgtacaatagaaagtaggaacataagtcaaacgcgcacacgcttcgcttgtgttccaaaaaaaggaacacacacacgcgcgaatgcctcgctcgcttggctcgggctggagtggcatgcgtacgcaatttgtgcgtgaatggtttgtaaaaattggctcctcatgcttgcataaatgcagcttccttttacagttttattttgttgcaaaatttggtgctcatttttggaaacacaccaagtcatctggtgcgtggagcggtgtggagtccggttaggttacatgcgatctctctagttcggttacacgttatggagaacgtctaggcgtcttgaatcacattttctattatttctatataaaccgagccaccttcttctagcatcacacacgaaaacaatctagggtttgcctcctcctccgaaatgtgccatcactcgtagtccactctatccagctagacagcatgcactcgcgatcacgagagcaggtctccagaaactttgccttcgacgtcctacatcgggagaagatgctaataaggttttcggaaagcactttgcaggactggtcactggtcttccacaacggctcatcttcctctatgtttaagggctacacgtagacaacaaaaccctgcacctcgcgttgttcttgcggtgcgggctgctccccgtcaagtcgatcctattctgcattcaccatgtgctacaaagccaatctgttcatgttcttctgtttagtttatatgtttaaatcacatgatatggttatgtttatttacatgttcaatgtcatgatttattgaataaattaaatctacacgtgcttatattttcatcagtgtcgtcgttatccctactgcataatggtgtctacgatatctgtgtctaaaaatcaaggttcgatcattgccggcagctgttctaatgatcaccattcataattaatggagaaagcactctaactgtccaaaagcttgattcagtacaaacgctttaagcatcctgtatttctcagctgaattcaatttcaaataatatattaatggcatatgtgctacaagtacaacaataagaaagacaatatgaagaaaaattaagccatcttagattgatcactaaagtagagttaggtaggacaatttggcctcttcagatggccaccatgtgcaaaagaaaaaaaattgagaaatacataatgcacaagcagtgaagcatagcccatgcttatttgtaaaatttgtatgtgtctcagaccactagtaaaaaggtaggtcaggaaaaaaaaagtgaaacaacatacaggggtcagtataaaaagtgatggaagaaagatctcgggctctcatgttctgtaaaacacaacacaatgaaacggtaccctagattcatcgctttcggttatgtatgatataggaatgattggaatcaggaatactgcttgaatttggttatcaatttatgcatgtttatcaaagattaccctgcctagcgagtataatctcccttgctcaacttcttccaagaggatatgatctcccttcttggatttctgcgtctttggacgatgcgtcaagaaggctagcatgcttactttatgtgcctgtccagctgattacccaacgaagatgtttagatgttggacattagtgtcaatttattgtaattgtaagcgttaactactcttttccttggggagttaagagaaatactaccgcctctgaatatactttcttttacacaagcgttttgctgcgccaattgaagagttatttttctatagcctggtgttaaattgcagtgcagtcgatcagagtctgcttctgttcactttggatagaactaataagcacatgatgaaacatcaaggcataagtacagacatgtttgacagtattggcacttgatatgaatattattacattaatgttgcagtatacagaggttcctttcacaaccttccttctgcctaaggctgagggtcttatttaaaaagttttgtgaaatatataaaactatatgcatacatgaaaatatatttaacaatgaatcaaatgatagaaaaataattaataattacctaattttttttaataagacgaatggtcaaacatgtgctaaaaagtcaatggtgtcaaacatttcgaaacggagggagtatgtgtgtgtgtgtatatatattcagtttgatttataattaaactgtacaaaaaatttgacaatttgacccttgaggaaacttgtttcaaaaatgcaccacgagtaaaactttttttaaaaaatgaatcgggaattcagcgtggtgttgagattagaccgctcggagccaggtcaactggcgctgaatgatgtgtcctcgtggtgcggatgctaactcagcctaccgacgtggcaaaggtcagctcaacctgccacagtgctgatgggcccgccatcagcgctaggcttgttgtcgccgatgtaggaaacttttatccccaccctacaatctttcgtatagcaatatgagcaaagagaaccctacatcccaaatcaatagtattaagaaaaattaacatcattgagaaagtatctccaagaaatccacacaaaatctgtgcaacagataggaaatacttttgcaacaggaattcagatacctttgcaaccacatttgaaattcagatatttcgctatcaaaaccatgttcataattagtgttgtagatctcataattgctctggctattgtttttgccaatatacattcagaaagaaatcacaaattggacaccagaactgagaacttcacatagacagaaattgcctccatctagcaaagtacatgagccccctgtcattcaagaggtgatgtttacagtaggaatagaagtcatctggaatgctagcgatgcatctgaagtctgaaccatttccaagcaatcctattattcaggtgccttgatttaaacattcagtggaaaagagtttttactataaaacagtcagttaattcttccatgaataataacggttcagttctaaatcttggatatgaacttacatatatatctatccaaaaattaaacaacccggtcttttctacctatatctcatgcagaacttgatctatttcaggtgtatcgaaccagcgtggagcagagtgcctcaatcctggctcacaactctagctgtgaaggttattaatgatcaagagaataaacatttggcaagatattagaagcactagaagactaaataagttttgataactgttgaacacagtcacttaaaaccaatttatacagggatcagaacgtaatttaatttgctatgacaagcatagtaagtttcaatagtctgagactttgagtagacagttcaatgcagtcttctttttctttctttgtgacaaattggaccgaatatcttgttttcagtaactgcaatgatttgcagggacattcatggagcaactggtgtgtaatatagatgaatgaattcacagtatatggaatgttcaaaaggccgaggtcattggtggatgaactgggaagcggttgaccaactcaactaggatggtagtgcctgatggaaaaggctatactactttttttctcgcaaaactcttattaccactgggccaaattatttcaggactgaattcctttttcattccacatgactgttgtagatatcaaattcatttgcttcaaaatgtgccgcataaacatagaaataaaacatttttgttaattccccttcaacacatgctatggtgccacagacaggaaggtaggtctgcattattcattatgctgaaagtagaagctaataaattccagtgttatatatataacatggtagcttttgtcaaccagattcgctaatactccctccgtttcgaaatgtttgacaccgttgactatctagtacatgtttgaccgttcgtcttatttaaaaacttttgtgaaatatgtaaaattatatgcctacatgaaaatatatttaacaatgaatcaaatgataggaaaagaattaataattatttaaatttttgaataagacgaacggttaaatatgtgctaaaaagtcaacggcgtcaaacatttcgaaacggagggagtatattctattgacagataacatgactagaaatagaggccaaaagagatatcacttgctgagagttgcagttgaagttggaggagaggattccatcatgcatgtatcagatcaaagttatcaagtagtagcatatatacacccaatttgccgtggtttctttccagtcggacatacgaatggaagtcatcagaaacaattctattgcacacagggtcactgacagaaagagcgttggtttagcagcatctgcgttggtcaactgcacagacgtttcatctcctcttccatttccagagatttcctccgtggattcccaaagctataaaatcttggccaacttcgtattaagggagaggttaagctcacaatgtcagggatttgaggggctctgcatgcagtcaatactcaatactgatgtagccatatcacaacaggcaaaagtgtttgttgcataggaatttcatggtctaactatagtttcataccctagctagttagatcaaaattttacgctcacagctcattgaagatagtgagcaccagatcgatcagtgccacggttggtcttcagttcttcaaaaatacgaacagaaggagcacctatcctttttagtaatgggaataatttcataaataattgctcagctaaaattttacggcaatttacattcagatagaaattataaaatggagactagaagagggatctttcacataggcacaatgcaatttcccccatctagcagcgcacgtcatcccccgatcattcatgtggtggtgtttaccgtaggaataaaagtcatctggaatgataggtcatacttcacagctcttcattgctgaggtgtatgatttaagaattcaaattgcatataacctttttactgtaaaatagtaatcttaattctgtgagtagtaacacttcggtgcttgctctgacatgagttcaatcttaatgtagcatgaccactgcattacgcaacgaagcttgaagtctgaatttcaattcaaaactgtaatatcggagatatcggcaggaaagttcatgtgcatcatcaatt

SEQ ID NO: 32013 - DNA, 1779 bp, Oryza sativa
caataacattcgagcccaatgcatatgggtctccatgctgctattaaggcccaactgagatatatatgggccaaaatatttaagacgtgtgcggtggattcgttatgggtcttgtaggtccaaatgtaaagacttttgtctttgtcctatccaataaaagatagttcagatggtacattaatacttgttttctcaaaacacaaaaaatgatacatactaaaacaattttttacccttgaacactagtgcaacaaatacaagttaggacatgttacctcttcaatttccatgtggaaagcaggacacaccataatttaattctagttatattgctagacatatgctctttaaagcaaaagtgaataagtgatcagtgatcagctaatataaattcaactggtaaataattaaacaacatggctataaatactgcaacatatcctatgcacacacttatccttgtgcactcatgcactcgatcactctagaccataggatctcaaagaggtcatctctactgctgaagagaagttgaaggatcaaagagtagatgcatgcttcagcttccatcaatcaatcactacaaccatcttcaccaacaggctgttcatttctttcctatgtgatataccactactatagaaatggtttttgcagacagccaaaaacggtcttcatatgcgaaaaggtctgcgaaaatcgagtttttcgcatgcggatcctacgaatggtagtcattaggaaggaaagcacaacatatggagtatgatggggtaaacaactgcgtcatggagggaggcatcagccagatcctcgccggcagcgcaaaccaaattccccgctgaagatttgaagttgctacgccccacaagtcaggaggagcttctgtttagcagcatgctttctccggctctcttccatcgattgcattattcatcaactcctccaagctcattgatacattccaagagggttaacaaaggtctcggaagattgtttagctagggccctctcaacagttcaggagatgtaataatatccgtatgaatataatttggaggcgatggatgtgattgtatgatctgtgggagtcggacaagaattaatgtgtgtgatcttgctcaggatttgcattttcgatttcggccaaaatttcggtgatttcggttggaccaaaatttacgaaatttcgtgatttttggcactttttggaccgaaattttttaaaatttaacaattttttactgtatttgaataaagtttggctaaattcaaaaaacatttgagaaattctgaaatttttggtcgatatattgatttgccggtggggtccgaaaattcaaaccgaaattacaatcactgatgttgctaccagaagagagcaaggttttttcagtattggcaccatattttttttttatagatccggctccttggtcggatgagttatgtctaacaatagttgacacctaaaatgggtgaaaatcatatttaacatcgagattagcacaagtagcagctgcagtagattttgaggcgttttgagaaaaacaccttctaatgacaataatattgaaggcatgaattaaatttgccttgtaattaattttttttaataaatggctccaacaatatgccttcaaaatctcatccatcctgtagtgacatgggctcattgtcagcatgccaaaagtatttgaggcctgagaggatgaaagtataatatattatgcccaaatttgtagatggatcagaatttcgaccggagcctctggaatt

SEQ ID NO: 32014 - DNA, 1698 bp, Oryza sativa
ttacaaagattaattaagaaagcatagatgaatatagtatatatagcctggtcgaacatatcctatatacttagttcatccacactaagtgtagctaatgctatttctctctattttcattaagctacatcaccttggaaatcagtgatgataaagtgatacaagagttgcagtataaaggtgaagccaggaaagagtttggaccttcatgctccctcaaacagaaaatgaacacctctaaaactcatcgcctccatcaaatatacattgtaggcttgggaggcactggaaatactgttggcgagtggtgtcgtattacctgcccttataggacatgatgcatcatgcatgcattatggctgggagcatgatatgatacctctagtatgtaaactaataattagtagcaggttatcttgagtgaaaagtcatggttaaattggactaaattagagaagtacatcagaattggtgtatctgattatatatgcaacttgtttttttctggtaaaaatccagcatgattgaaacaagtgcatacaaaatacctaaattctatagtagctgattcgcccataacataggtgatgaagtactgaatgtgcagtaggttggatcatatccttggcctctttctattggtctttcatctcttcagatatcaagggatagggattacggattatcatatttggaaccgtttttcagtctgcccacccaacttgaaatatttgacacacacacactctctctctttttttgtgaaaacatagttgtgttttcaatgaccatatgtggacatagcaagataaaccatgctagcaactgattacaaatttaaacaatgctagtatatttcactttcttttgccgctagcaactgattacaaatttaaacaatgctagtatatttcactttcttttgccgaatcatatgttgtcttttgcaccagaatattgtggctcgcaaattgttagctcatatcttgtacgacgcgcaaaattttagcattgtatagggggaggtgtggcatatatatatgacaatgaaggctacatggtgtcaagggaagaaacattcctctttaatttcagttatatatgtggatcattgcaatgtttgatgaattgaaggtgcttaactgcaaaactcaatttagcacagggcattgagttatgtggcattttattatgtctttatacagtttactaaaatcaaaaggagatgcgaataagcactataaactatagaggaggtggaagagaccattgcagatgatgcttggtcgagctggcaaatgtcactaatgctccacaggtttgagaatgggtggcctctgcaaaacatcttggacagagatcttgatcagttgcctggtctcactgccccactgcaaatctacaacacctttttgttaaattattgataaatgaggtcgacaatactgtaggatattgcaatattagcatagcatcgtggttactagaatacctgtgtaagggtgcaagtagatcagccgacagacctagttataagcaaataagtgggtaaccgcaggtcaacccacttaattagcaatctattaataggtttgcatgtcgatccacttgtacccttacgcctgtcatctaacatcaacattggatccttgccatgttcttattcattggagaaatgacataatctgtgatcgagca

SEQ ID NO: 32015 - DNA, 589 bp, Oryza sativa
tttttttcaactttttttgcatttttttttgcaatttttttcagatctagagctgaaaactagccaaacacttctcaacgagtctcggagctagctcccactggagtaggagtttggagccctaccaaacgggtcctaaacagccagtatgttaaaaattgagataaccgccaacatcaggtatcaaagggaacctctctgatcttggttaaacttcaaaattgggcaaaaaaaaatgaaaacaattgatgcattcctctcaacaaggcacaaacttgtctacacagatatcgcatccaaaacaaacctgaggtaagattgagaaacagaaagggcaccacatgattaataattaagataatacataatctcagcaacaaattaatgacatcgcatcctctttggtttaatatccatactaaactcatttatatagctaaactactatcatgcaatagcttttctttcaaagacagaggccacgggccaccggaaaaatcggaaaagttcagataacacatgaccgaatctccgacagcacattctttgtaacatcattactcccagaaattcactttgcacagcaatg

SEQ ID NO: 32016 - DNA, 674 bp, Oryza sativa
gggattgctccgttttcaatgttattttcgggttggaaaccagcatatacggacacaccctaagttattatacaatagttattttcagctattttatcggatggttggcttatttactccacatctatacaaagtatgttttttttttcaaaatttcttctaatacagtgcttagcccactaattctaaactatttgttaggtttatttgttaaaacatttaatttattgtaataataaaaaagatattatacgacaataatacgattaatatgttttgaacatgtcataaagatggcatgaaattacattgaatgatttctatgtattatgtgagatttcagagtacttgacaaatctccaattaaatgcactgtagctggtacaatactctattaagtttcagatcaaatacttatacgaatagtcctgcatttttgcagttaattttcactgatatttgtacatgaaagatatattttttttcaagtacatctgaaatctgaagagtagcgatgaagaaacaaaacaggtcaaaccatgtgagaccagcaaagatacaaaacagcacgtcatgcatattgacaaggaggaggaaaagaaaagagatagagaggaaaggaaaaaaagagtagtactagtatagtagagctacatacataaatgtcccttttt

SEQ ID NO: 32017 - DNA, 530 bp, Oryza sativa
tgtttggggagcttctagcaatagcagcttctagaaaaatctccagctaccagaagctcacccaaacaagtcccttattaggtgcatcaccaaacatgtacatcctctcgtactcgatcctcctcggattgacgacgaagcggtgactgaaaataacacaaacacgtgataccgagccagcatgcacggtaaggatgtaagtggatcgatccgtaaactcacttatagtacacaaatgaatgggtaaccgccgccggcggactgtacagaggcgtcgtcaaacgggcggcgcacatagtttccctggggcgtgcagacaccgaacgctccgacgacttgcacgctccatgcatcgccgggaaacctgtctctctctgacggctcacgagcaattcgcctgacaagtgaccacccctcatgctcaatgttctgcatcacaaactgacacggcaatacaacaattaatactggtgcttaagtttaaactgcttgcttgtgtccatcttgtattcattgtttgctggctaatt

SEQ ID NO: 32018 - DNA, 966 bp, Oryza sativa
cctctattttaaagaagttatagcgatatatttttcttagataatgaaacttattccgacttttgtttcaaagaagttatacccagttatcacaaaagttacaggacgaatgaatgcggaatatatattcacggcttgattacaacgacaaaactactgaagagactatttctcgtaaaaatattgtttcatattcggaaaagttccatattatatcgctcaataatgatcttggtctagttttcgtcttaacgtgaaaatcgtctcaatttgatgatttgtcactcactacggagatttgatgatctgtcattctgattttgatgtcgttcactcgaggatcctacgtgttattgtcaggggatggcatgtagtagtagcaaagagacacgaatcatcaaatttgactttctaacttgttaacggaagatcaaacggcaagttttgcaacttatcaaggcattgtagatactattggaggtagtgacatgacttgcatgaagaagtttacgttaccagctggccataagtcaattggtatgaaattcaacgtaggatactgttgtagggtagacaagaaaatactaaaataattacatgtgtaatttattttccaaatttccaaatctttttaaccaatgtcggtgtgcatgagtttgtcgacaaatccaactcgtttgtagctttgctgcttggttttcgactatacgtctactatccaggatctaataattgactttgtattacgaattgtgatgccagttcacgtgttgaatattaacttgtactgatttgaaataaaattgaaatatcttgtgataaatactagcatatagccggttagtagcgaattagtgtctagttagcggattgcggatagcgggcactaaattccaatagcggatttttttcaaataactataaatttacattgtacatcaagtttaactaaaaatttataattta

SEQ ID NO: 32019 - DNA, 655 bp, Oryza sativa
acaaaatcaaaactctaaaaatacggattttcaaaaactttttaaattaattgcatcatgccgatcttattcgtctattttatctggatttgatctcgaagattattaatcgtgagtaaagaatagttaattaggaataaaccttaaaaacaaattggtaaaataaatacaaattaaaataaagattaggtgtggatagaaataaataaaatattatcgcgaccatatttggatcaattaaatttaaatacgatggaataagaattaaccctaattaaaactcaaataaattatataaaaataaaatatgagtaatattaatctagggtgaattcattagttaagataacacaaatattgagtaaaatgcatatatgtaaaattaggaattgtggaatcaaatttatatggaaaatacactaaaatcgggataaataggaaaagtcactgttcattgcctcataggtgttcgatttcggtccctagccctagacccttctctgtcacgcgcccagccatgccccgagccccgcgccgccgctgccgcgccgtcgccgtcaccatcccgtcgcgccgtcgcctgccgccgcgccgacgtcgccatcgccgcctgttgccgtcgccatcgctgccgcgccgccctagccggccttgc

SEQ ID NO: 32020 - DNA, 543 bp, Oryza sativa
tatgccccaagttccaaccatacagtaagaactaaaattatataaacatgtattttgataatccaaagtatatacacctgaagactttggctctttcaacacatgcactacaacatctctatgtacatgaaacaattgttcccccgtgcacacaggaccacggcacagcagacttcagttggtgattggtccacggtgaaccataactattataagtttgagatggtaaaattatactggctatgtcaggcacactattcttttgaacaaatattcggtactgcttttaagttcagttatatccacatagctccaaagaagaaatattattgtcttagggcctgtttggatcatccatgccccttagtgcaattaaactttaaccacagaaaagaacagctagaacatactatgaatatagcttttgatcagtcaaattaatatgcaataataaagacagtcaaacagggatgaaaactttgaactttgccagaccaaaggcacgcactactctatctctaatagtaccttctgcacatgggc

SEQ ID NO: 32021 - DNA, 1041 bp, Oryza sativa
ccgtatcgaatactaccgtactgtatacggtggggggaatataatactggttgtatttcatacagggcagagctttttttttcaaagaaaaatacagcagactggttagtggagagatgccgactgaaataatgtcaaacagtgttatacagtgatttgatgggttggttgtgcatgtcgatgtggttgaaacttaatctcctgaaaacatactacctccgtcctataaaaaaacgaatctagaccggatataatatattctaatacgataaatcatacgtatatctaaattcgcaatactagaatgtgtcacatctgatactacgttgatttttatgggacgaatggagtattagatataaagtacaataaatctagatagaatgttagtcaagattcgttatactatgaaatgtcttatccagtattagattattgtattatgagcggagggtggatgaaaattttgtactagtacacaaaaatctataatttttaaccaatcagaggctttcgaagaaatctaaacattttgaatctaacactaatgtggctaaaagaacttttcctttgaactaaaaacgtacaagtgcaaaataatattagtatttgttttattttttggacaaatggaaggactgtatatgaacttatagtacaaaatgattggataatattgcgcatgatggtggcatgtgtaattgtttttttgcatacgtgatatgtgttatgctttgtattaccaggtacttcctccgtttcacaatgtaagtcattttagcattttccacattcatattaatgttaataaatctagatatattgtgaaacgaagggagtacttctttggttagtactattttgtattgacatcttgcaaatgccataatcggtattgccatttacactcgagattcatagagctttaggttggaataaaacaaagtataatcagaaactcacaatccgacaatattagctcaaaagtactattgcatatcccagacacaccatcagtccatcgccgtttacaaaggccaa

SEQ ID NO: 32022 - DNA, 655 bp, Oryza sativa
acccccgtttttataacaggaatcattcgtgtaaacagtaccatttccctggatcaagtagtctggtacacacgagtttatagctgaaataccaaaagcacatacacgagagtctaatgctaattattacatcataagcccgcaggcattgtcttaaatcatcggaccgagcggtccggaatacatccaaaagcagaaatagataaggcagcggaattcaggcagcggcatgccattgccacaggcaacgaccgtactaagacctactgagcgccatcgtcttcatctccctcctggtagtaggcatagggatcctccgaagcttcatctcccgcttctgattaattttatatttgcaaagggtgagtaccaaccgtactcagcaagtcaacacagcaacaatgcatatgaaaggggtatttcaaaggatggctatggctcttttgcgctaagccagttttgtaattcttttcacaaacctaagacctagcattgactgatcaaattttagtaccagtgtttgtatttaaacaacgacggttctgtccaccatccattgtgatcccaaggatagcttcccgccattgagtcgttatggttttctgaggacgcccaccttcccccttctcaggaagtggctccaacagcataaaaa

SEQ ID NO: 32023 - DNA, 690 bp, Oryza sativa
agatgggactaatcacggtgaatctggtcgaccgcccataaccgcgggcacggctattcgaatagctttactctgatcagaggtgtacaactgtacccacaagacacagccccacaacacgtttccgtgcgccgacatgccaccacgacataccggaaagaggccgtgacaggacccttcgcataaccccctctagccaagcacaccacacctcaggtttcacccccgtccccagcgggcaacgggcagtcccctctcgtgcctaggtgaatctggaagcgacagaggccgtcgcagggcccgccccgctccatcacgcccacccttgcctggatgcgtcgactagaggaaagctacactacaagcccagccgttgtccacgctggcttgtggtaagtacgataagttcttccagggcatcccgcgaaccggtccttaactgccatgggtgcgaccagcaaaaccatgcacccacagcccaccattcagtcgcattttagttggataattacgaccatgaagcatggccagatgtctcgagcacgcagctcattctgatactaaaaggtctaatacggtaattatcccatcaactgagctaatggtaattaagcatggctaagcatatagttctagctaggtcacataagtaacatgagctagtcgatttattacccaatgttgacaaag

SEQ ID NO: 32024 - DNA, 659 bp, Oryza sativa
aaaatgtaataagcatttgccaccttttgatcagatgatcatcacttgttcatcctaatgggctcatggcggtgcacgcttaagctagcaacggcttttttctccatgcattctactttaattttatcatatttaagaaagtattaggaggtatatttttttatgtaaaccttggttactaccccatccgtttcagattagaagtcgttttgactttagtcaaagttaagctgttttaaatttgaccaaatttataaaaaaaatagttatattttatcttaagacaaatatattatgaaaatatatttaattatagatttaataaacttaatttggtgttgtaaatattattatatttgtctacaaaattagtcaaacttatagtttgactttgacaagagtcaaatcgacttataattaaaatgaacggagcaaatagcttgaggtattttcttaagccataaatttatcttcttctccttatttaaatacatatagtcgggtaaataaatccctctaaaacttgtctgacgacgttgatatgctctcctatataaagtaaaataaaggacaatttgcttagcaagttggttaatacttttaactaattaatttatacggcagtattgtttattatttagataaggcttaacctgaaa

SEQ ID NO: 32025 - DNA, 503 bp, Oryza sativa
cagtgtaaattaacaatgacaatgcaagttgccatcaagaactaacagactgtaaaactgaagtggaaattttgcttaagctatgcatacacgaacgaaacggtgatcgaccagaagatcttagaaatttaatttcattaagtcaaaaggccgcgagaaaggaacgtgtaaccacaagatctcttggacaacttattttttacataataatatacttatcacaaagcaaagcatcctgcaaaatgagcaaattaattaattaatttacagggctgcaaaatgagcagattaattaattaatttacagggctgtgacctaatttatcctgctcttatatatacgtgttgatcatggaatggtagctatggtctgaagctgtcccagcagcgcacaggtgtattttataaaaagaaatggatagaaatccagcgtctagatctatatgtggatataaaacagctaaaggttgtagcaaacacttagacttaaccgaggaataaca

SEQ ID NO: 32026 - DNA, 1775 bp, Oryza sativa
ccttgtgttggtatttaatgacattgctaaaagtattcattcccaacaatggcgcagaaatagtcctggtatatttattgttagatataccattgtagtatttcacccagaagtattccaaggtaacatatttgtttaattccaaaggaagattgtgaaagagagaaccttgccaagctatacatattacttgcattcattaaagtctaaacatggattaattcaatatgtgggtagagtgacacgaagtgaatcttatagaattcctcatgagaataattctaactaagtgagataagaaatagaaagaactcaattcctatacttttaatatacactcaaactttactctacatttgctagtatattatcatgtggtcaataccccataacagtgtcctcctgttgtttcgagagaccaccccgggttgccgagttccttacgacaacctgtcatgaccgtccaaccggggctaaatacggaggagtaccctccccaggaatttgtcttaggaatgtatactaacatggaggaatacccgtactgagctgtcaccatcaacggcccatctactatcctgcctgcagtatatatgcccaattaatgatatttactatcctaagcatcatgcttacattaataaatactactctacatctctgcagatgacacagagtaactgacgaattagacattaaacccacgccattgcatctctctggtaggctacccacacaattataccgatacgaatgtaaagtaagagcagaacttatactaaatagaataccgagaatataataagagtagtatttcattaattcggaaagtattacagaagagaatagaaaagctactagagccataccgaaactcttccgaggactcagagaactattctatactacttccacttagctctaaactactaatacaaagtatgagaggaatcttaaagcttacttgagtgtgttgagaagtgaagtgagctccttcttttatagggttggtataacggttgtagacaaggtgaaatgaccttcttgccccttaaccatcattgagagtgcatctggcgcgaacacgtggagggccaggctgattgggctccaccagggttccggcgaactcctagttcggacgaacctaggctagcccaacaggcctccagcttcggtacaatctctaacaggtgggtcctattgatggttttaacagttaaagcggtttccaggccggttacacctgacttgtgggccctcttatccataagcttgcttaggagtgagattttctttattttctctttattttattgctcaattcctacaacatgttattctctaagcacaagtggaactatattattctgaagtaaatacgcattgcaagcatagttaattctatattattttagctatattgacggttgaaatttgtatgtaatgaccgtcaacaccttgccactgccactgccatcctcctctctgcgcattcgcagccgcttcgccgcttgctccgccgcggctggccacgagctgagccgagcctcggttgggcaaggggttgaggttggccgccgcgccgtcccgttgattcccttgcacgatcaaacgatcgaacgatgaacgattgaacttaaccaaaacttgcgaatgaactcaaaccttggacgtaatcaactactccctccattcctaaatatttgacgccgttgacttttttaaacatgtttgactattcgtcttattcagaaaaatttaagtaattatta

SEQ ID NO: 32027 - DNA, 1194 bp, Oryza sativa
caaagtcagtggcaaatcgtagacgtgcgacaaagtcagtggcatatcatggattatctcaatttgaatttggtaacacggtgtaaccatccaagtaaaatgcagaaaaactcaatattaaattccaattccaaatgtccacgtatacaggccatatttgacaatacaagcacacagtcaaatatacagaatcaaattaaatgtccaaattatacagtcccattacaattacacagtccatttataaatgtacaatccatcgtaagtccaaattaaatacagagccaggataaatgtcccatttaacagttcaattacaattctaccgtccatgtacatgttcgaatacatatatcacccctattccaatccatgcaaattacaaaagctcctattacacttgggccattcctctctcttccaacccagcccattcctcacagcaagtctatgtttacgccctctacatgccagcccactccctctcttcttctcagcccaaaagtttactttgcgtccctcagccaacacagcatgcatgcacagtaggtgttcgatgaatgcttacaagccggcacacacattcgagtgagggtgttgctgccatcaagtgcctgggacccctcccaacaacattccaacaaccatccatgcacccctgctcccagcccatcaaaaacatccccagaacacaagccaacacatgcaacagtgagaagagagtccacatcgaatgaagaaccgagttcacagggatatgcccaccaaaggaagttgcatggcttgcctccagcagtcttagggatggcaacgggttgggtcgggcacgggcagagcgaaaccatgcccgacccgagatccacgtgccagtgcccgacccacgcccgcaaagcctatcgggcaaaaccccatacccgtgtccatgcccgacgggtactcatcggcggccatcgggcttgcttgccgtgcgccgccgtgtcgccaaccaccgccacgccggcagccgccgccgtgcacaatcgtgtcgccggcctccgctcgtgccgtcgtgtcgccaaccaccgcccctgccgtgcgccgacacgccaccggccgccgcttgtgcgccgccgcttcgctggcctccacccgcgctaatgcgccaatgtgtcgccagctgtcgagcgatggtggaggaggaggccggcggcgaca

SEQ ID NO: 32028 - DNA, 574 bp, Oryza sativa
taaaaattttatacgtgtgctatagagcttaaaaactggtgttgaaaaactatttatgacgaaataacaatcaaaattaactctaaaataagttttaaaatttaagctttggtcgtggctaaaaagcaaaggatggagctgccacaaaatcaagggaaaattgcagaaaacaaaaggacaacaaaaaaaacacacatcagaagtcacttgaaatttaacatttcaccgcataaatcattttgttgcaaatatcaacctccctatcagttttgttgtaaaaaaacactttaatgcactcatgcttaattgaatcgatcccttatagctgaatagcgaatctcaacgcgataacatttaagctctcatcaccatttctatttgtggaatctccgaaaaagtatccagattatactttaaaagtatttaatttggtaaacaccacattgatggcttataatttatgaaaacatgttgattcagttaaacacatacgcactaaggtggattttacaacggaactgagtagaggtgggcaattacaacaaaataacttatgggatggaatatcaacttt

SEQ ID NO: 32029 - DNA, 572 bp, Oryza sativa
tataaaaatctccgtctccatctcttttacctcagtctcgcgtataccctagtaccaacgatccccataccatgtaaataccagaatcgcgacatcaaatgtcgacagtggcgtaccaggtaggaggattttggtgcttcaggatttcaatgagatgggtttaagagatagattctccaacaataagctactcgacgactttggctatggggagatctaacctgaccggaatatgtctttcgacaagagcggaaccatagtcaccaattatttgatctctcgagatcaaccaagcttcgacgtgttgccatggtgtcggcatggtgtcggcatgatccaacattaaattctcgacgtgtgcgacatcaactggtgcaaggtatcggccggctgagtccaagtcgaacccgacaccgatccctaccaaccaaccaagcacgtcgaggagccaaaaatctaccgctggattagtactaccgtgttctaactaggacacgatttctagccacgatctactggtcgacagcctgacgtcaccctgcatgtccctttaccgagccaacacccatgtg

SEQ ID NO: 32030 - DNA, 502 bp, Oryza sativa
tttaactagtttaaattatttataagtcatggtcaggttgatcgtacatagtttcttattcaccttttcttttttttctcctgaggctaatcaatctattcgaacagggatatggatacttggcttgcattgtgacaaattaacaacaatcttatcgcccacatgcataccaattaactaattaattaatcaattaagtgtgtccatcattagtctgtgagattgttggaacttcttgttttgcatcactcatatttgtaactggatataaaataaggagatgcatccggggtcctaggacaccgatggccggagctaaattccacttgatggggacaggtagtggtatgtgcatatgagtaggagaggaggtgcatgcgatttatttttctaacttttataaataatggaacttaaaactgatgatgatagctttcattttgttcagaatttataagattatttctgatttttaggacatgacacatgggtaccgagctcg

SEQ ID NO: 32031 - DNA, 577 bp, Oryza sativa
aaaatatctagtatttttagaggctaactcaaacgaccgtgatagtttaatggggtaattcggaccttttcatttcctttataacaagaagcagtactcctaacccatatataagagttgacaaaaattaatgggggtcaatagttaaaatgcataatcatgttctcgtgtgtgagattgtagttaagaccaaccagaacattttgaaagatgggatatcttccatgcatgtagaccaacgagctagcaacaaaatctatcttctctctcaaaaaaaaaaagggagctcgaacaccttgtaaacgaactaacttcacttttgaactataaatggctcgagatactctttacaggagttttaaattcgaccgatgcaattaggacagattagctgacctcaagcctcgttgttttcagattattcactggattatttaaaattaattatttgagttatgctttgaaaaatatgttttctcaaaacaaaaattcttctacactgcattgtttcgaacagttattctaagctatctggtaaatttatttcctaaaatatttaatttatttctatattatg

SEQ ID NO: 32032 - DNA, 882 bp, Oryza sativa
ccaggacctctcccccctcgccgtcgccgtcgccgccggcaggtcgccgtcgccaccgcacggaactctcccccctcgccgttgccatcgccgccgccaggtcgtccccgccgccaagtcgtccccgctaccgccggctcctccccgaagtcgccccgcccctcgccgtcgccgacgccactgccaggacctctcccccctcgccgtcgccgtcgccgccgccaggtcgccgtcgccgccgcacggacctctcccccctcgccgttgccatcgccgccgccaggtcgtcgccgccgccaggtcgtccccgccgtcgctcggtaacatttacttttaaaaaaagaaatgtgaaatgtgcaattgtggattgtggattgtttaattgtgcatcgtggattgtgatatgtgcaattgtggattgtttaattttgagaatgtttaattgtggattgttaaatggagatttatgtttaaattgggacttatgtttaaattgggacttatgttaaattgggatttatgtataattgggactttgttaaattgagatttatgtataattgggacttttgttaaattggcagctatgttaaaatgtgacttatgtttaagttgagacttatgttatattgggatttatgtataattgtgatttttgttaaactgagatttatgtataattgtgacttatgttaaattggcacctatgtcaaatggagatttctgtttaattgtgacttatgctaaattgggacctatgttaatttgagatttatgtataattgggacttatgttaaattgagatttatgtataattcggacttatgtcaaattgggacttatgtcaaattgagacttatgtgaaattgcgttaaattggg

SEQ ID NO: 32033 - DNA, 739 bp, Oryza sativa
ctcaccaaccaggactaaagatctgggggtatatatattcccggtgcgcccttgtcttctccaccaacacttagacgtttttccatcgagatcaatctcggcttctccttcaccgccactacctagggcaaccccgcgccgacgccgccgtcgtctctcaccatcgcttggcagtccgcgccgcctccgccgtagacgccgccgcggcatctcttgggtgagagccaccgctgcctctctctctctcgatctcgatctctctctctctctctccaaaccgccgccggctagctcgttgccgagcgccactaccacgccgcggtcaatcgccaccgcagatgaccgacttcgccgcgccgccatgccaccggtccgccgacgccactgccgcgcgccccgacatcgccgaacgtgaacgaacgtgattgaaacatgaccaaacgcgaacgaacgtgaacgaacgcttaacgaacgtgaacgaacgcgaacgaacgtgaacgaacgtgaacgaaacgttaacgaacgcgaacgaacgtgaacggaacgcttacgaacgtgaatgcacttgtactaaaagtgtgagaacgaacgcgagcgaaacgtgtacgaacgagataattaaacgattattaaacttagcatacatatatgattatatatatatatgttaaaacgtgaaatacaatatatgtaacttggcccgtttagactaatacattttcctggtaatgttgcagag

SEQ ID NO: 32034 - DNA, 526 bp, Oryza sativa
aattgtagaagttaagcaaaagtcgatggcatattgtagaacatgataaagtcagtggcaaatcgtagacgtgtgataaagtcagtggtaaataatggattctctcatagaaatttgggatcaacgcccgataaacggattcatcggtcgtcgtaggatttgtttgtgagcgctttgcacgaacgaatgacactaaagcaaaaggggtcttagggacgactcgtggcatacaaatccaatcatcgcggtaggaataaaatcggagatattcgaatcaacgtacgataaataaatacctctatcgtttgtagatattcgagggaattatcgagttcgaaacgatagagcggttttaaaataaccgtaggataagaatttgagagagcgataatatcgcgataggaggtgagagcttcggtctgtgcactactacagaaagcgtttttgcatacgggcggaatcaatcttcacatgcggttggccggcccgcatgcgcgaaatggtctgcaaagatcaccatttgcgc

SEQ ID NO: 32035 - DNA, 879 bp, Oryza sativa
agcgtaatattaaaactctaataatcttatattaaaattgtaataatcatatatgctaagtctaacaattttatattaaatcgctactaatcttatattaaaattgtaataatcatatatatatatatatatatatatatatatatatatatatatatatatatatatatatatatgctaagtctaacaatcttatattaaatctctaataatataataatcttatattaaaactctaataatctaataatcttatattaaaactgtaataatcttatattaaatctctaacaaacacttctttacatcacttgcctgcgcgaattcctttgatggctagctaccacttcggcttgagggacgacgacgacgtcttctctgcaacattaccaggaaaatgtattagtctaaacgggccaagttacatatattgtatttcacgttttaacatatatatatataatcatatatgtatgctaagtttaataatcgtttaattatctcgttcgtacacgtttcgctcgcgttcgttctcacacttttagtacaagtgcattcacgttcgtaagcgttccgttcacgttcgttcgcgttcgttaacgtttcgttcacgttcgttcacgttcgttcgcgttcgttcacgttcgttaagcgttcgttcacgttcgttcgcgtttggtcatgtttcaatcacgttcgttcacgttcggcgatgtcggggcgcgcggcagtggcgtcggcggaccggtggcatggcggcgcggcggtggcgtctcgcggcggtgtcggggcgcggtccggcgccgtggtccggcccagcggcgtgggggcgcggcggcggcgtggcgtcgcggcagtggcgtcggtggagcggtggcg

SEQ ID NO: 32036 - DNA, 572 bp, Oryza sativa
cagtgcaacctccattggtgttcgagagatgattctactcactcgctggttctcgaaccagtacgtagcaatctctcgcaccgcaaaactccattggtgttcgatagatgattctactcgctcgctggttgtcgaaccagtatgtagcaatcacccgcaccgcaacgtccattggtgttcgagagatgattctactcgctcgctgtttctcgaaccagtacgtagcaatctcctgcaccgcaaccttcattggtgttggagagatgattctactcgctcgctggttctcgaaccaatacgtagcaatctcccgcaccgcaacctccattggtgttcgagagatgattgtactcgctcgctggttctcgaaccagtacgtagcaatctcccacaccgcaacttccattggtgttcgagagatgattctactcgctcgctggttctcgaaccagtacatagcaatctctcgcaccgcaacctccattggtgttcgagagatgattctacacgttcgctggtcctcgaaccagtacgtagccattctctcgcaccgcaaccttaaatggtcgagg

SEQ ID NO: 32037 - DNA, 710 bp, Oryza sativa
agtagtccatcatgtatgaaaaactgaaaatgaattaggtttacaaacgcaatgttttgtatatgagcatctactcttttaccgacttcgatcagtcaatttgtttagttatacactctccctagcccccacccttgtcgtcgtagaatcgttctcggaggataaggctcttggacctttgacctacctcgttgaacaagcactgatcctaccccccagccgtgaggttggaaaatccatttccgataacacggcttggttaatacgcacggcaagaactcttacacgaccagatcttacatggtctttcgtctagctgctggtttctcgagttgaaagtttttcaaggtgaagtcgaaagctcatgttttcttgagctaaaaggttttggaatcaacctgaaagctcatgattttcttgagatgaaaaatttcaaatcgtaaggtcgggatttcttgttttttttgtaagattatatcatagagctaaaaataaaaagcctgcaaacagcatatctctaaaaatgttccttggatacattataactttttcatttcttctggcagaagactttctcatcggttggcacaagacaacaaaagatccttgtttgcaggcaagggaaggttaggtgcagccccccaaatgctttttttttgaaaaagtggtgtcggctgcaacccttgttggaaaggaaacccaagaatcca

SEQ ID NO: 32038 - DNA, 752 bp, Oryza sativa
actatatttttccttttctgtttgtctcgtaatattatcttcaaacgatatactttatttgcaacttttttcttgaatttgaaaaaaaatattaaagtggtatattatatggcaaatgggaacttaaaccgaaatttcaaatcaaatttaaaataaaacaaattatagaaatttaaaggagcatatacttctttcatattggcactcaaaatcaaactcaaaataaaaaaaatttacaaatgaaacaatcattttgtaaagaataaaagtgagtagtcaagagaaaagaaacttattttgtcttactctcataatattatatagattttaatagatagtaatctaaatactatataatttaacttttcaaatatgcgatgtaaattgaaaattaaaataaatttataagtagaacattttaatttgaaaagaatggtaggaaggtatgctaggaggaagtttgtcttactcttgttcgtgaattggtgaatcatcagcattgaaaattatttttgtttgaatagttactgcttcagtatacctatttttcataatggagatttcattaagcttcagtatttctatgtacacatttaatagtaacatatagcttcttttgatatctttcttttgaatgcagccttctgtaaactattgtagaatttagaattgatttcttcctgctggaggctgccgaggtggaattggacgaggaagaatgtaagcagtggccttagtgggtggggtgggca

SEQ ID NO: 32039 - DNA, 575 bp, Oryza sativa
aaatgcttattggtatttgttacgatcacaaataaatccgcaagcgcacggataacgctgtaacacttcacctcaaagtattccaagggtatcgaatcacaaggaacatgtgtataacatcaagaaatcaagttcatccaacaacaacaaaatggtaggcggagagtagggagggtttctatgggttaaaattcttcaattaagttaaggtaaaactctatcacttgcttcaggcaccgactttcccctggtctgccaagcgaattcagcctacagcccaatgacgtaccggaatgtggaggactacaaaagacgatcaaggctgttaccatttgtcgcctacctctatagcccatgaaacacacaacaaataaatgtaacctataacctaaacactacgtttgcattatcaattactactctagccttggccaagaacttcattttttatccaaagtattagtactagagtacttaacataaatattaagcgatgaacctgcaatgataagcatatattttacttatacaagaagagtaaatacccaaaagaaagcatgaacacttacttttat

SEQ ID NO: 32040 - DNA, 516 bp, Oryza sativa
ttcgcgtgggcatgtatcgtgggctgcgttgagaacggatcatattaatcagatagcctctgccatctttcggaagtacgtttcctcgacaaatattcttcatcaacatcactttgataatttctctaagttatatactatataatatttaattcatcagtataaccaaatatctataatctttatcattatataaaaaatagtagacttagtttgtttagaacatgtttaacaaattaagtgcatattaaaatcaaggtggtttttattttcattagttttggggggttggtgaaaatgtaagacctagctaaactcattgttccttttcccctaccatacggttttctcacagctcctagtcattgtgtcctacaactgagatgtggtcgttgcacctatgaaggtttccttgtgattcatcgtgattcatcgtactggtgatctcatttttgtcaagcttagttagtccactttccatgtttttggtatagcctaaaatctaaatggactcca

SEQ ID NO: 32041 - DNA, 597 bp, Oryza sativa
  unsure (1)..(597): unsure at all n locations
caaagttaaaataatggacattgaaatgaagataattatatcaaatagtcccatattgattgtgaaaagacaagggacctaatatataagtggggtccttatctcgttggataacttttaggatgaaatgtcatttacgattatacaattagtatcacagccacgtccagtggctactcaagatcgattggataactttctcatcccaaaagcatccaaaaaatgatagcccccacttatataaataggtcacttacccttctaaatatgatcctacaatcagtattagagtcaccttttacttctctttggaatttgatcaaattttgcatcttgaaactgcgcattgaaactgnnnnnnnnnnnnnnnnnnnncaatactctccgtggcctcaagcaacgcctgcacatgaacaacaacaaaaacatatccaagtacaagttcacaccatcttgtggagatagtgcgagaggagaagtgggagtgatatgggacgttggatttgagtgaaacaatcctgaccgatcaatgaagtgtgaagtatgtagaatgtaggactgttgttggtgaattatagggtagaagattgtaccgat

SEQ ID NO: 32042 - DNA, 1566 bp, Oryza sativa
gaatgtgccagttcatgcattgatcagcatgcaccggatgttagcatgatacatcctatatgtatgtgtaatatcttgtttcatccagcatcttcttgtgccattgcacggcctgctgagccatggtccatgggcctaattgctccatcgatacatttgcgaagaagcttctggaataaactccatccggtggccggtgcacgcacgcatgcaagagcatttctagatcgctacacgcgcacgcgcaagatcgtttcgtcaagcctcttccgtgaaaccggtgtttccacgtggcaccattctccttgcgatcttttgcatcgaattcgtattataagatacaaaagtctatgaaacctccgttgtcttcctcggccgaacccgagtgattgattcctctataaaagtctatatagtgcccttcatctaaccttcgggaagagcccaccatcggcccccttgtccactaaagtctatgtaatgtccctctacaacccaaaccctctctaaaagactataacacctccccacccgaggagtttttcctcctcggtttataaatccttccaaacttcgaaaatccatatatctcaaaccgtacctctgattaactccgttcaactttcataatctctataaaatcgagatctatttactggcaccattagattgtattgaatattactttattttatttttacgattgtgtggggttattctttggccgtttattggacgttttggatattctggatatttatcaaacacgggtattctggttatttttagcgatgcagatttctcgaagatatcagcacctaaagcaaggcaagtcactacactcccttccttcaacatattgaacctatatttatatatgtgttgtgtgcaaataaaattgcatgctaattataaaactgcgtacctacacttgaatgaaaacccctccttgatcttgttgtcattatgtttacacaatcatccattgtgcctgagtctatttatttatacgtcgtcaattattgacatcgcttagcattgctattatagacaattgcacactccatagttcatcaaacgagtgcaattaaattattttatggtggttacgtaagcagttaagtatatttagcccagctgaacccaaaagcggtaagtaggttcagatgatgaagtggaaaaaggagctcacatgttgcaaggattagtcttctcgacgaggtcaactgggcaatgcacggttgataattagataagacgtggtgctgcgattgcagggttcacatcgtgttaatcgaaagctggatcgtgtgtatcaagtttccaccaaaccaagagttatcaatatgtatctaaagatcgggacctacttcatcatcacacgctccttgcagcgcacggcggcctgccctccctttggcagcatggcggcggcgacctcccctcgagaacatatggttgctgcgatgccccccaagctcaacgatgggatgaccagatccagccacaacgaccttggggcagtggcatccaccccctccgatgagcagtggcgtatacgttggc

SEQ ID NO: 32043 - DNA, 867 bp, Oryza sativa
tttgaataaaattttaagtaattattaacttttttatcatttgattcattgttaaatatacttttatatgtaaatatagttttacatattttacataaatttttgaataaaacgatagtcaaacatgcttaaaaagtcaacggcatcaaatatttaggttggagggagtaaaacgcaaactaaagttgaaaactaacctctatagaccttggtcaaacacttggcgtgcgagcacgaaccgcgagccgaccatcgacgcccgtcgaccacgcacggtgtgccgctacccggctgccgcaagatgcgcattccatccttcctcttcccttcccttattttcttcccttctctctgttcttgattttgctgtcatggcgcgatgccgccgtcgtgcgcaccgtcgtctcctccttgcgcggccggcgtctagccgacccgcgcactgctcttcctctggctccccctactccgtcgccccggccggcactgagccgagaacgcgcccgcgtcgcgcgtcgtctctgcctcggccgcgccgagccgtgcacccgcgtcggccctccattccactccaccgccgagtcctcctctcccccatccaccgttgccttcgttccttcctcgacccgacaccgcggcgcccggttaagccggctcgatgcgggcgccgacccgcggagctcgccgcccccttccatcccgcaccaatctctccacctcggcatcctcctccacaccgctgccatcctcctctccccaactgcggcagtctcctccgtcccccaccgcttctctcccggcgccgcgccaagccaccgccccgcgacacgcccggccgccgccgcccgtgccgatgcgcccggccac

SEQ ID NO: 32044 - DNA, 1298 bp, Oryza sativa
gttttgttctctgtttcagtagtcttatagcctgtttgcaatgtttgctttgtatgtcgctagattccgatccctccgacgctccggtgtacttcgagatagtcgccgaggtccctccagcagcagagcaaggcaagtcatgcctgtcacttgaacatgttgatcctatattgcaaatgctctactgttttctttcaaatattgcattgttttataatatcactatgggatggatacctattgttacagccatgcttttggatatcatgctcctttgttagcttgggttataacatgattagactttggactaggaattgcttagccatgcttagttcaactagcacacattggggatctcatttaaaacctagactataggtttatatgataatgttggtttaataccaccgctctggtgttggttaaataaaatgaaccacatggtgggctgtgggtgcatggttttgctagtcgcacccatggcagttaaggaccggttcgcgggatgccctggaagaatttatcgtacttaccacaagccagcgtgggcaacggctgggcttgtagtgtagctttcctctagtcgacgcatccaggcaagggtgggcgtgatggagcggggcgggccctgcgacggcctctgtcgcttccggattcacctaggcacgagaggggactgcccgtcgcccgctggggacgggagtgaaacctgaggtgtggtgtgcttggctagagggggttatgcgaagggtcctgtcacggcctctttccggtatgtcgtggtggcatgtcggcgcacggaaacgtgtcgtggggctgtgtcttgtgggtacagttgtacacctctgatcagagtaaaactattcgaatagccgtgcccgcggttatgggcggtcaaccagattcaccgtgattagtctcaccctagtgtaatctgttgaatttggatagtttaggtggatggttgggcctgtcgcaacgtgggttagcgttggacagcggatgtttaatactgcttaattattacaactgttttcgcattcaattcctgtttataaatgccagtatttatgcaaatgaacctgcttagctatcccttgttaaatccctgcatcatacctctattccggtatgacttgctgagtacagtgggtagtactcagtcttgctctacttttcccccccaacctcagagctcgagtatgtgtccgatggcgggttctccgaggagtaggcttcgtccgtgccgtcgaggatgcctgtggagtggtgttcccgctgcagttcaagtcaag

SEQ ID NO: 32045 - DNA, 817 bp, Oryza sativa
tccaaatatggtcgcgacaatattttatttacttctatccacacctaatctttattttaatttatatttattttaccaatttatttttaaggtttatttctaattaactattctttactcacgattaataaacttcgagatcaaatccaaaaataggcgaataagatcagcatgatgcaattgatttaaaaagtttttgaaaatccgtatttttagagttttggttttatcggtcgaattttcagggtgttacaacatcttataagggaacctgtatggctcgggcgcccgatcatttcgagaaattcggtgacgtcagcgcccgatttacgtgcaaaaactcctttcaactgttttttctcttaaattacttatccaaattatgatccaattgcaccattaaattcattgcaattaaatcttcaaaacaagaccacacatggatatattccgacgaaaaatttttttagcttatttttgaattatttttaaatgttacacgatgttccacctggtatatcgaaattatttcactaagtagatcgaaaatgtttcactcgtttaaatcgagtgttgtttcaccttatataaaaacaatgtttcagcaaatagcgaaagattgtttcagttcactgcaacatttaatctatatatagtgaaacattataagtacaataggtgaaatatttttcggtggaacaaaaaataaaacgaattcccttaataggggtttccaaaatatgtaggtttttttgttgcaatgaaagatttcagttcactgcaacattagatctatacatagtgaaacattgtgagt

SEQ ID NO: 32046 - DNA, 618 bp, Oryza sativa
tttggtaccgtgaggtaccggtacctcgagatattttttttgttggtccggagcaaatgtctctcccagaaggttgttgttgcacttgatagtttttgatcttcaagtcacggttctaaaaattactcactctgttttgaaatttgaacatagatccttcaggcacttactaagctggttcttggattttatttttccacatagatcgtagggctcacaaagttatactttttgggtcccaataggtgtaccttgagaaaaaaaaaagatactaatttgtttaaatttagcaaaaggtttattagttttggcaaaaaaaacatgttcaaatttcaataaaaatgaagtttctaaacatcacagagtttcggcgttatcctaatattttttttcattacaaatacagtaaaatactgatccacctaaacttttctattaatcaatatctttttaaaatcaaaataagtcatcaaaatccataacaaattgaacaagtcgaaccacccatctcttgcgccactgccaaccctagttaaccaaacctttcatttttaccactatttgattaaattgcactattgctaatagtatggcctatacaatattgtaccagtgtat

SEQ ID NO: 32047 - DNA, 517 bp, Oryza sativa
  unsure (1)..(517): unsure at all n locations
catcatcacttatttccatctcatcaccctcaacattttccatattgtcatcatcactttgaacatactcatctccgcttgattcctcattctcactgacgggatcgggcgtgggctcacgacgaccatggcgagtgcggggaggcctanctgaaaaacaaggagcaaaggatggataagcaacaattttagaagccacatattgaagtgggagaaggaggagtgctgtctgtcaggggcggtcaaaccgaaagccaaggccggtcaaaccgcaagccccaagtcggtcagaccaacggctcacggccggtcagaccgacggtcctcggccggtcagaccgcaagctcttggccggtcagaccgccactgacagtagcacaaccgaatccttccacaatccacacaaatgattctaaaaaaattgctaggacaaagttgcccaagattggaacatgaatatcaaggtgtaggtctatttcataaagattgaaacaaagggggaaactacccttaacc

SEQ ID NO: 32048 - DNA, 1135 bp, Oryza sativa
atcctcttgtataccatatggatttcttcatcaccacatgcattgtcctctagcctttagtatcccgcatgatctcttaatccctggacatcaacttctcccaatttgactccgatctatcaccggtaacactctcccgaggtctcaagcaacaactgcacatgcaacaaccaagaaaccatattccgagcccaagttagtcccaacttgactcacattagtataacaacaatattcatatgcatagaaaccatttagaagccaaatccccgaaggaaacatccaaatccaacaaaacaacccgaaaccgaacatgatcaggatcctgccggtcagaccgtcgggccggccggtctgaccgccgcaacacctgtggtctgaccggcggcacacgaccggtctgaccgccaaggtcaaccgaaactgcacacttcataaaatcaatcgtcttataaaatctctaaattaacattagcaaaccatcaatattttcttcacaaaatctaaattaactcctttattttatagtggtgtcctcgatgcatatgtgtctcgtccaggcacgcggttgacgcgcaccatcggtggtgccggggctctcaacgcacgccggaaaagacggagccatctcccgaaacgagcgtcgcgccagggcacgtcaattcgcgcgccaatccatctctcgaaccgaccgttgtgccaaggttccccggtgccgcatcacgtgcgccgtgcgttagggccccacctgccgtcgatggtgagggcaaagatagcagccgccgccgtccctcagactaggacaccccactaatccaaaggaaaccctaaaaaatccctcaatgtcgagctggaccacaaatgaattagatgggcctcaccatcacgcggtgactggtggctgtgtgtgagatggtttgggctctgtttaatcagactatgttgtgtttcattatcagctcggaataagtacacttgagatcccttaacttatcaacaaatccgattttcgtccttcaaccgaaaaaccagatacaacgggtccctcaactatcaaaaccggtgcaaagcaggtccctcagcggttttgatagtggttttggccgatgtggcatctacgtgtcctgtttgcgtc

SEQ ID NO: 32049 - DNA, 1802 bp, Oryza sativa
aaagtgtaacacaatggtcagtcttatggttattcacattgagaaggaatcaaggaaagtcaagagaagagcaattagactttaggagtcataatctaatcatgtaatcaacaatgtatgcatagataaaagtgattccaggtcctttttagagattaaagataaatgaaaaagactgtgatggccatcattaaataaggtatagttggatttaagattgggtgaaaattaaataagtgatccgatggggaaaataacaatataaaattccttatatttgtggataaattatgagccccaaaatccgttatgttggtggatagagagagtacttattagcctcgatgtcatacttatgaagaggctattagtataaatactttttcacgtacagatagtgttcatatttacatgtgttcccacttattttatttggtccatgacaccatgatatatgccaataaagaaattctgggtccattaataagagatggttaagtgcacttaataagaagatgctttattaacttcatgttgacctcacccttcttcttatccagatatcatattctcttagcatctctcatagctaggactgattgaagaaacacaacaaagtcgtggaatgagaaatatcaatgacattatgctgcaaatcatgtgaagttaattaatatcatttaatccacataagtataaagtataggcagcagtttatctgaaacttcagcatgtgcatagttgaaacaatgcaaatcacactatatttggagtgacgagaaggggaaattggaaaataattttttattcactagaaagtgtattgtttcatctaattactgacaggaataaacatatgtagagcatactatcatgatcgctaaatattaaattacaataaataaaatataattagtaatatttaatttttagttcatttggatgtttagcatcttctttgtcaaaagattcatcatcatgaaaatgtacaacacgttgttggataattattatttttaatatttatactaaaatattttatttcaattatatttattaattaacacattactacagaaggttacaacttagatgcgattcttaccttttgattacaatatcaaaataatacaccattcaaaatacttaaattttaaaaattaagaatggtgcaatgaattctatgattaaaaaaattaattcacgcaggaaacaaattataaatgtaaaataattaaccaattaaaattgtatatgattaaaattattatataaaattccccgtgcaacgcacgagttgacatctaaaataaatgtattttaataattatattgaatcaaatgtgtgaaagaataaaataagttataatactgcagaacagatgtcacaaaataggagagcactgcatgaaattactcaatttatatacgaatctaaaaacgaggtatttatgagtttctttctttctgctgtgcttgtaagtctgatatacgaatctgtgagagaggtcgaattgattaaggtactaatgtatgtactgatatactgacagagtcatataagtcttcttatgttgctacaaatatatgttccattccatttctttcataattatttaccttgagattgattggattggtacactaatgataataaattcaattaattaatgttcattgatcgcactacataaatatacaatgaattcactaattaaaaaaataattcatatataaattgccacactcggctcccaattttgcatttctttcactcaactcagaaaatcaaaccaaaaatc

SEQ ID NO: 32050 - DNA, 555 bp, Oryza sativa
attttcatgcacctgtccacctcacttgaattgttcgaaatttccattagagtcaggcttaatcttattaacccacttaaatggccgaatattttgactcattcagaaacttctactaaattctttattttgttcatcaatctcaattattcttatatggtgcgaaaaccatttagatgaacactttaatgtcttattttgttcacccatctcaatttattcttacatggttcgaaaaccatttggatgagcgcttatttttaatgtcttataaggtgaacaaactttatttagtatttaccaccataatccgatctcataacttcatttgattttagcataagtgtcttaaatttcttaaaggaaatcggaggtcgcttatgggtaaacctagccttaaatgatcatttgttggctaatttcttgacttagtgaaattttaacttaaagctaacaacgccattaaaatctaaggaaaagaatatctctatctcatgagacgttccaaactcccctagttatgtgacataagcgacaatgacacactcccaatgg

SEQ ID NO: 32051 - DNA, 557 bp, Oryza sativa
ctttgttatgctgtcaagagtatggcagtgtcgcagacacgctgatcggcgggatgtatcatacgcgccagaagatgaatcaggcgtctacaagtggtgaagatcaagttgtgtcacagtttgtttggctaaagataaatcacgcttgagataatttggagtttgctagaggttagttattgtcagagtaatcttggtcgtgacaagttaactgcatgtttaaattagtctttgcactattttttgtaatagcatattagctttggattcctagttgcatgcgctggctgaatgtagtttttcagtcagagtttgttattcagtttctctgttttttcagagtagatgagatcgagctgggatcggatcgtgggatggcacggtcagttggcacggtcagtcgttgatccggcaaggttgcgcatgtaacagactccctcatggaggtgaataaaaggaaagaaaaaaacccagaaaagctgcagtcagttcgcaccaccaaaaactctgtttttcgtttcagttcttcagttactgttcacgtctggaaaatattc

SEQ ID NO: 32052 - DNA, 806 bp, Oryza sativa
catgggtgtactcggaagacccagccgagtcctctagctccggcgacctcatggttcagagccatggccggcgatgatgtcatcgtgacatcataaatcttttttttagtttttctgtattagatgaaatctgattaaacttcagaaattcataactaaatcatcataactcggattcaagtggttcaaattgctaaattcatgtaaaatcgatatccacatgttaaaaatatccacatgtactgtttatgcttgttttttactgttttgttgattttatttatttgctttagtttcggacgttccggaggagagcgtttacgttgaggaaggttcagaagcgtttgaggaagctcaaggcaagtcacacagatcccaaataaccctttaagcaggttgaaccagtttaaagctaatgttttatttcaacttatgcattattttcgaatgtcatcgagttgtgagcctttcccatttaattatggccaacaatgactctattttcctatgagtaataaactaaatagcttgaaccttatatattggtttggtttagctaaatgctatatatataattgcttaaccatgcttagaaacattagcttattaatgggctgaatcaccttacattattacttatggttatatttaatggtagctcacgatgggtaatccggttatgatacttaattgataactagaggctggttaaaggtgggttgcgagcacatggatttgatggccttgctcatgacaattaaggaccggttcacgagctactgatgtgaaacattaaccgtgccaat

SEQ ID NO: 32053 - DNA, 775 bp, Oryza sativa
aaccatgcatgcagatcgatcacatgacctacatgttgggatacgggtaggctacgatagcataaatcaaaattttctatcgcgtaaaccaagaaccatgcaagtattagatcatagatcgttaccactcgatgcgctgcgcagcggaagaaaacgctgagaagtcgaaggaactctcgcgaagtagcgcgcgtcgatgcagaggaagtagtcgatcgcaccggctcgaccttctccttctcgtgcgttcacctcgtcgtactcccacgccgatcagcaccacaaaccagcggcgcctttaccggtatccacacgtaaaaggacggaacaccacgtgcagatgtactagcacccgcgcgcggctaggattttgctcggggagggaagtgacggctagggtttctcacgtgatgcaatgcctacgccggtcacacccctcatgaatatatagaattcatcactcgggcctccaaggcccgtaggacttctattccgatccctatccgaattaagctcatattggatctctatccaatccccttatttcgacccattaagcgtgcgaccctgtaggttcatatatactcggctgtaacccgaaaactccttttcggtccacgcatcaacagcggcccctagcagaacgtattgacccaccgaacatacataaagatcatatcggctgaacctctagtgtatacttgtatggacccatttgcctcacgatatggattaagctcaaggctagatatgtgccatcctctaatagctcaat

SEQ ID NO: 32054 - DNA, 630 bp, Oryza sativa
cttgtagtgtagctttcctctagccgacgcatctaggcaagggtgggcgtggtggagttcggatgggccctgcgacggcctatgcggcttccggattcacctaggcacgagaggggactgcccgctgccttgcgaggagtgggggtgaaacctgaggtgtggtgtgcttggttagaggggggttatgcgaagggtcctgtcacggcctctttctggtatgtcgtggtggcatgtcggcgcacgggaacgtgtcgtggggctgtgtcttgtgggtacagttgtacacctttgatcagagtaaaactattcgaattgccgtgcccgcggttatgggcggtcaaccagattcaccgtgattagtctcaccctagtgtaatcttttgaatttggatagtttaggtggatggttgggcctgtcgcaacgtgggatagcgttggacagtggatagttaatattaattaattacttctaccgtttaaatctttcacttactgtttataaatgctcattttatgcaaatgaaccactctagctctcctttgataattccctgcatcatacccctattccggtatgacttgctaagtacaatgggtagtactcagtcttgctctatttttcccaacccc

SEQ ID NO: 32055 - DNA, 502 bp, Oryza sativa
gggctaaaccaccggtttacttatcctaacaagaaacaaactaagagataaatctgttttgtgtgatcggtacaaaatagactcgaattttagattgagatagacccccgagccccaccagtgtcacctataaaaggaaagagaaggagggaggcaggtgacgacttatctcactctaacctcaaaccctaaattaatcgcccgatcgatcaaggcactggaaggggttcatgaggtatctcacaacagaagaaacaatgaagaagaaagaagaagagcaatggcttcatctcagatcagttagatcaattaattttcgcataagcagaaggtgaccatgtttaggctaagactcaattatttaattggaataaattccaacattgtggtatcagagcctaatcttagccttcttgataacagtgaaatttggtaagcccggagtagtcatcgacttagagtcagcatcggcttcgaagtcttgagattagccgatgagagt

SEQ ID NO: 32056 - DNA, 850 bp, Oryza sativa
aaaaataattaaggaaattactatcttaatgaaatattttttctttctaaataaacattctgttggttccattaatctagaaatatttaccaagtattgcaactgatcttaaataataaacattgccaattgcatataattaattcaccttggcttagtcaatcatatgcaaaataaacttagaatttcatagtcaaaacaccattggtcataaataattatgaataatcttaaaatttattccttaattatatcaccatttggtagaaaataactaaggaataaaaaaattataattgacatgcaattataaaaacgtgggttaaatataacttcagatcttaatgctttctactcgaatttctcgttggttccattcgactataaataattaagttactaaggcactgaccatcataatgatgttgacatgaaatcataaatactttctagttaaatttctattcaactaggaataaattaagtggcttaaggaaataataatcttaataaatattgacatgaaatcatattaacattggtcaaatataatatcatatcattaatttctttctagctaaacttcctgttggttccatttaactagaaataattttctgagtgatcaaataattgaccataattttccagcaatttttaatggctaagaaaggtcataaataaatttctggaaatacataaaacataaatggcgggcttaaaataataatacggctcatcacttcctaagccggcccataaaaaaaaggctaaaatcgggctaaaatttagctaataaagatataacacattctgaggaattaaaatcatgggcttaataaataaaaaa

SEQ ID NO: 32057 - DNA, 515 bp, Oryza sativa
cgctggcagtccgtgacctcccaccccccgattttttacgctggctggtttttctcgtagccgccataaaaaatatttttcaaacgccataaaaaatcatttttctagaaacgccaagagttttccatgaagtactcatgggcctagaacggagcacgcatgcatatttgacaaccatttgaagcacctgataactcaaatgcctaaaattaattaatttatattccaaaagctttgtgaaatttatatgaaatcaaagatagccttgctgcactactactacgtggaatcaaagtgataagccagctgtaaggtgagagatcaaacaaagagatggaagttgcttgcattgcttatattgatacagcagtcggtagaactgctccatatatcgatgaaggattttcttgagctgattgtttgcttacgaaatatattaaaaactatagtaattattttgaactcatcgaaccgttgatttcttgataaaaaaatgattgcatagaaataggaaa

SEQ ID NO: 32058 - DNA, 752 bp, Oryza sativa
ctcacgtttactttgagctcttgctgtttgccaatggagaaattagcctggtaatctgatcttctttctgttctctctcttcattgttttgcggccgctgcttcccggttaacacattttcttcgtgatcgaacgacagagctgatcgctggagtagacggtcaggggtggcaccgtgcgtgagctggtccctggagttgccactcggggggcagttcgctttgtccgctcgctctgttcttgcttactgctgcttcggtgtcttctgaggtaatgcctggttttgctttctgttctgctttgcatgttctttctcatgctgtggcttgaaatggccttgcctctttctttctttgctgatgttgttcttccgcttcgccgtttgtgcgcatggcaatcctctacagtgcccataaaaaatcggctctcctttattttaagaaacaggcagactaaaaaagataggccccatgtagacattggcagttgagctggttgaccgtgttgaccggttgctgtacatttactctttacatgtttggtccgcctccttctttagctcttgtcagttgtagtctttctcctctcacgctaatacgcttcgcgctgcagcctcctgacagtatgccatccctcggtgtgtcttccatcggtgtgtcctctgtgtcgctgttgaacgctgtggctagccattgccagctgccgttggttcatacctgtgggaaatggggagtgatggtgttcttcttgct

SEQ ID NO: 32059 - DNA, 652 bp, Oryza sativa
tttcctgagaggtagatttcccctgcaaaaaagtatgggtgcgtggcgctataggatagcatgtagcaagatgcacaagaacttcctaagaaaaatcatcaggacatgcttacttttgaatcctttcaccaacgtgccgacaatatcacaatttgttgttctgactgacccctagagaagaccgaccacttctgcaggaaactcagtagcgcggtctccccaaagcgaaacacgaatagtggcattgctaatgaagtaaagtgatattacatgtttaaaatattttgtggttaatgggggttaaaaaatggttgtggaaatttctgtgtgcatgtcacattaggcaaacaaatgtaagaaaaaaaatagtcaaatgaaaagcataaggatgtctaactttgcatgcggatgaacacattgcgctttaggctgtcgccatcccttgtacgtgatcgaacaaaagtaatagatgaaacctcaatgatgactccgatagtatctatatcaggaaaaaatttgagttttgagttgtctgtgataaaaaatgattagcaataaccaatgaaatgtaaccatgtgtaaaattggcataatttattttaccggtgaatgaatctttgctgtcaagaagcgcactgagctggttgaaaga

SEQ ID NO: 32060 - DNA, 719 bp, Oryza sativa
caacacatgcatacacaacattctctttgtttagaacaattttagattacgaaaagccgatgacagcttttcttgaagaaggggaggatgatgaggatctacctacaaattgtacttgtcctttgcatgcggatcagaaaataaggttaactcgtttctctataagtctatgtgtgaaatatatgagaatttgatgctacataatatttgtcactttattactttcagacatgagatatatgaaccattggcatgcataaacaacatgtgggtccagcgggaggtagcgtcacatcattcagagttttctatcaccaacaattgcaagttgaaggcatgttgcgcaagcagaccggttgatgcacgagcagtggtattgatgatgaacatgggccttgcacgacatgcttggatggagttctactatcctaaggcccatcttgggtagggatggagtccatctacaaattttcccacgaattgaagccttccaaaacaaggaatttgaagataagaaagaaaatattcaattcggattcggtttgggtcagcctggacatacctcgactaaaacatttgtttttctctcgtccagagtccattttggacgtgtaagcacttgctggaaagctaacttcatggcccatgtgatggagtggcccacgaaaacaaaatccttctagttccactgcaagagccaaaacaaactgatggtgctg

SEQ ID NO: 32061 - DNA, 574 bp, Oryza sativa
  unsure (1)..(574): unsure at all n locations
tagccatggtctattacccaccaccagnctatactataagccttgctctaagcgacacgggacaaacactgcttgcgggatggagtcactccgcgccagagcgcgtcgcgcagacccgaccttagcactagaggcggcgcataccccgtacctggtctccatggaagctcgggggcgagggcaccgcccatctgggtggagctgaagccccataccgcccggccgtagacgtcaccgatgccgcggagaactacacacacggccgaccaagatcctcctggagcatccgcagatggctgctcttcttctgacgttgggcaacagctccataggcggacgtcgggaggagacaggaggagagggagcgaccaacgggacgtttggccgtgcactttggctatatataattgtaggccggttgggcgggccatatgactaaactttctcaccctccgtgctctgtctcactttctaatgcctaaaacctggtctggttatcccctaccggcttcgtaactgacaactgtgccgaactgttgacagaaactgtgccggaggacgatgaaaaaagaaa

SEQ ID NO: 32062 - DNA, 597 bp, Oryza sativa
cagatgactcattacgtttaaacgctctgcccaactagtcatagccaccaagcactgggagtcggcctaagcacttcccaaacatgcatatgagtgacatgagttcgtcattaatggaacaaagtttcacggatcggagtttactactcgggtacttttgcaattattaagagcagaaaataaatttatctcatctctatgcttttgatttattccgaataatacttagcaccttgcgttactcgatccatccaacgagcccccgggtgctaggaatcggcccaaaggcaaccattcattggcaaaccaaacggaaagcataggaagatagaactccataactcgataggtacttttgtactcagattatgtcgcaagcaatcaagataaatattataaaaaatatgatataacatctgtagcccccgactcactactcaatggaagaccaattggtgtagtgaggcagaggaaaaggaaaaatatcatataaagaataaaataaatgatgacttagctttgtaatattccccttggtgatggcagaagtggccaatgtgggaacaaagtcgtccatcaataacaatgaggacacca

SEQ ID NO: 32063 - DNA, 582 bp, Oryza sativa
ttcctcccagatccggccgaaggtggaaggggggaggccggcagggccgacagcggcggctcccctccccccttcctcccagatcttgccgaagaaggaaggggggagggcgtcggggaaggcgccggcgactacgacggcacggggcggcggcgacgacgatgacgcccggcgcggctccggtagggggaggccgacggcgacggcgcccgcgatttttttttttgctttttcattgcattttcgcaggcgggccattgcctcgactgcgaaaatcttcgcagtcgttgggctgcaggcggtcctcccctccgcctgaaaaagtcacttttggccgcctgcaaaaatactttttctagtagtgttagttccttgtcgaaacaagatttcggcaatactaaaagggggtggctatcaagcggaaaagtggatgggtttagagacaaggaattttatacaggttcaggccttcttaatcaagaagtaataccctactcctgtccggggattgatccgtcgagtgtatttttgatcgtatgatctgggaagaaaatcgtacctcaagaggcacccggacccctc

SEQ ID NO: 32064 - DNA, 605 bp, Oryza sativa
aaacaaaagtatgtggcatataaatgaaaggtgatatctaaatctaacctcttccttggtgccttggaagcgctatgctttgtggctgggctaggacatttcagcgtggcaagtgtcgcattgtcatcatcctagatgcattattattgttggttggtgataatgtagtttttcttagataataaaccaactggcatagttagagagagacgtacctcatcctctgatcgcacaggaatcccagttggtgtctttgatgagcattcctgatctactgctttgccttgcataggtgtcacaggagggctattgaagccaagagaagttgtagcagtcaagctttgctgggcaatagacattccttcagaagcacttggtgacatagtcaagagagggactgaagacaccgcctgagatgatgatggtgactgaagcagtaggggaggttgtgaaccatttccaataatgttgttaacttggaaggaaatgctcccaattgatatagttgtatcagtcatactaacattccaggtgaactgtttttctagcaaatcagtgatctgtttaggaatatatgcttcatcggccgggtgctgatccagtaa

SEQ ID NO: 32065 - DNA, 942 bp, Oryza sativa
ttctatttctaaacttcaacttcaacttcctcgttttctgttaacacgcttttcaaattattaaatgatgtgttttttgtaaacaattactatatagaagttatttttaaaaattaaataaatccaattttcaagttttgtgtgtgtcaaaaatctttctcaaaacaggaagatcgaacgcagcctaagggcaagttttataaaggagatgaatgctacatctaattttgaccacatcatcaactaataaatgtagaggtaacatgtacaatatatcatatcaatcaatacttctaaagctggttggtctttgctacatctaattttgaccacatcatcaacttatagatgtagaggtaacatgcacaatatatcatatcaatcaatacttctaaagctggctggagaccagccagctaattggtctacttggcgcatctagcttccatgataaatgagagactcctttgtgaagaaaagaacaataatggagcaagaaaagatgccacagtgctcaagctttcttgcagcttgtagtctctcttgagacttctatgctaattctcaataaattaaaccggtaacatcaccttctgaaaattgcaaaagaaaaattaggaaacaaaataaagaagatataataaaataggaaataagtaatgacatattggaatgaaaaatcaatattgtctatatgccaagcatgtctctaaaatcagagctcaaataaaacaaagagagatacacttaagcttaaaatgtaaaagaaaatagaaaaaatgacgccatcgtcgaggctacgccataactggtcaatcaatgcagtaaaaatagaaaatctaagtgctcttaaacaaaagtttctaattactgaaaagctacacacattttcattttttttactaaacatgcatttctctactatatatagttaaaaggcaa

SEQ ID NO: 32066 - DNA, 659 bp, Oryza sativa
gtacgggcaagtctgaaaactaaagaagggcaaaaccgtcttttctcccgctagttaacaccgtcaagtataaaaactaacggaagtgctacatagggaaggaaaattttagaagtgactagatagggaacttttgaagttttggtgctatagagggaagagcaacttttttttatgctagatagggaattttctcaatttattattggactgtctgaaatatcttgctttgttccaagcttcatataatttatctttgtcacatttgttcttcttttccattcatgaaaacaagtatttgttttctcttggtcttaaaaaaatgcccatagacactacgatcgacttatatatatgcatgtatgcaactttaggatcacagattagagtattttaatttcaataactataacttctgcttatttatctagataagaaataaaaaaaagttcctttctactcactgtgccattataattgcaggaaagtgatgatgaacacatggatcgtcattaaagaagcgttctgtttgatgacttctctgtttaaagctatcttttgctatatgaattatatagacagcattaacttctggcatatgcatgcatggacaaaagcagcgttcagtacctagactcatccattagagcacccgcaat

SEQ ID NO: 32067 - DNA, 1357 bp, Oryza sativa
tttgtttctagcggaaaacctttttaccgctctcattcttgccgccaaaacatgagacggtccacattccttaatattagttggtattactatcgtcaaacatgtcaaaccagccacatattgcaatacttagattgaatgaaagacaccaacaaaaatagagacgacttgcagtgcgattcattctccattagatggcaaggaagttcatctcatcaacaatattctgttccagttgttacatctagcaggtaagcaatataattctttcacacgatcaacagcatttgttccatgtgaagaagttttctatgttctattttctacagagaagaactgcagcatgattcagtctgatgggcagcaagaagattcttctcttcaatctccctgtcctgtttctacatctaacaagtaagcaatacaattgttagtttatatgagaccatatgtcccaaccctttctgtcggcaacataaaaacattttcaatgctatattttctacagagaaaacaccttacctaattgggtaccacaaagtagcagacatttagtagcttcgttgaggctcaaaagttttggaaccattatgggggtcaaattggttttgatgttagaaaacgatgtgagaatactagcaaacttgggctgtgttcttaggtaagggttagggttgggaacctcacctccgacatggaaaacggagcaatggattaatgcgtaattaattaattattagtttttaaaaaacttcaaaaatggatttttctatagaaaacttcaaacattaatatgattttttgaagcaacttttctatagaaaatttttgcaaaacacacaccgtttagcagttttaaaagcgtgcgcgcggtaaacgagagagtaaggttgggaacatggacataagagcaggtacaatagcaggctataagctagctgcaaaaatattttaaggagataaatgaagagagataagggcagcgggctacagatttgtagccagctgtagcacggactccaagacacagtgtgcgtatgacaggcgggaccaagtactactagtgtaatagtgtagtatgtaactattgtataaatgagctgttagattggctacagataaattggagctagtagttggctatactattaaacttgctctaaggggcctgtttgggggggggggttgtttggttaggtgccacacattgccacaccacatgttaggcatgccataaattattagtttagcgtttggttgcttgtttcagttgtggcaagccacactttcttgttctatgggcctacatgtcatatactcattttttagccaaacaatgccacacttctggccaaca

SEQ ID NO: 32068 - DNA, 573 bp, Oryza sativa
caccttcgagcttttaggcaagctcggctcgagctcgttcgagctcgagctaagctaccgagctcagtaataagtagtgtaagatatattttagtgataatccattgataagtataattattttctaattaattaataaaagagtaaaaaatgattaaaataaatatattgtgctaacacatgctaatttattgtgtaaatagatactaattaatatatatatatatatatatatatatatatatatatatatatatatatatatatatatatatatatatccattagtttattaaatcaataaggtaaacaaacaatataaactatacgctatgtataagctcggtaaactcagtagaagctcacgctcggctcgataaagctcgcaagtttttgctcaagctcgggtttggctcgtctggagctcgaatcgagcctagaattagccaagctcgagctacttgcaagcttcgaccttttttgacagccctaacagagactattattatacaacgtctccctcgtaatctactccattcaaatgtatattactaacatatgggtaatttatac

SEQ ID NO: 32069 - DNA, 604 bp, Oryza sativa
ttggatttataacaagggtcagtctctaattcatccataaaattttttatataattatatattggtcaatattataaatctttatagcattctagattatgtttaataaaaatatctttccacttattaaaaaactagtcaggtaccttatataaatataataatattaataaagataataattattgtttacacatgtaaaaacatagataattgttaacgaccaaatttggtaaggccatgggctgggttcaaagctagagtcaaagccagatttggaggaattctgtttaaggaagggagagtgcgtatcggctatgagcatcatcggctgccgtatgaatcggctacaggcggcatcgcctgtcgtatgtatcggctgacgctaaatccgatgaagacaacccgatgacgcttttctttagagatatttttggtaagagtccgcctaagggacttgttcatattttaaattgtaatagagataagagtcgtgtccagcaaggacatgttatgtacctcgggtataaatatgaccccacaccttggaatcatgggacgacagttcaataatacttccgcgcatcgacaccttttttctatt

SEQ ID NO: 32070 - DNA, 524 bp, Oryza sativa
atccataaccttgacagtagcccccgacttcgatgcaaatgaacgagttcatattctcaaccgcagacttcggaggaactgttatcgagctcacgtgaccgttctcagtgagtttagagataacgttagacttcctttatcagcctcgtgcgggcaccgaaagggtttgtctaagtcaatctctgatgtcgaccgagaaagtacagagcgtacgactaagtctctcgtcttgctgtaatcgagaatttggattgaagtcaagaaattttatctcggcgggtacaccatttcttcattccgtattccttgtcgagatccagcaaccgttctcaagcgatcgagaaggcgtagagtctgcgacggagctttgtcgacatttgtcgaactcgccttagtcgatcttggtgtagaaccatagagacatggagtcttcatcaatgtcgaatagaattttcctgaaatcaatactcagaaaagaatatcaaatagaaatagcccccgagcgaatgctcaaagggtgacat

SEQ ID NO: 32071 - DNA, 684 bp, Oryza sativa
cgtatttgagtcagtttttaaagttcgtttattttttaaaatatagaaggagtcgtataagaaatctatttaaaaaaattacatgctagcttgagacgatcggattcctaattgcagctcatgattttctaaaaaaaatatgtccaatcgaattcctatggcgaatttcaccttaactaaaccgtataataatattattattaaaataatcttcacccgttgcaacgcacaaatatttttttctagttatcaaataaataaaaggagttagactttgaaactagaccggctagcctatcatcttatggagctagctataaaacccctgaccgttccgcggattttctcaaactagaaaaacgttgctacgtactgttgtcgcacctagtgctagtcacgtgtagtacgttgcttagctggatttgtataaatgagggtattggcagttaacacctggcgggggatgcgagaatattagcagcgtacttcttatattaactttgggggcttagatgcttagtgatcacgatgttctatgcacaaagactagctacagtcttagttaattgaggctaagattgttgatgcagattggatggagtattcaaaaaataatccattagttgatgcagatcgatctgaccattaatcgaggctagctacagtcttagttaattgatcact

SEQ ID NO: 32072 - DNA, 568 bp, Oryza sativa
cccaatttaactcaattaaaatctcaagagcccataagtaatgttagagacaacaatactgtcttgcaaatctaggtggaagaatctcaacttaaatagggtgatattagagattccttgttgaccggttgaggtgatggttgtactgccacacgcgcgcgcgcgccgattcggcctcggccgtgggcatggcgaggcgaggcggccgactgaagctgagcctgcttgctgctctttcgttatgtaacagacgagaataaagtcaccattaacaaatgagagattcattgtgatgtaaccttcacgacaaatgagatttattttgtggtaaccttcacaacaaatgagatttatttgtgtggtaatggagatctttctctatatataatgcaaggcaaaggctctcaaagaacatgtcttcctcctgctattgttccttggtgatactctccttctgttcctgcgatgtctctctatttccccagttctgttcatcccgcgcgcacgggtgatcgaaacgagcaggtgcctccgaaactccgtccgcttgagaacctgcacgggtagg

SEQ ID NO: 32073 - DNA, 607 bp, Oryza sativa
ctccttgggcacattcgagcgctgcttaaattattggactgaccaattacaccccctttggaaaatgccagaatacattctctacagcaagttgatctctaaaaatatgttacagtacagctgagaggttgagtatactcctatttgacaagaaacaatgatcccaacatgtaataagaactcaaagatgcaataaaatcgcttctccatatcaaccacgtgttgattggacggcttacgttgcggccataagtagttcacacgattatctactaaccattagcattacaataaaagttttttaaaaaaaataaaaagaaaacaaagctttatagccttataggcagtgatccacttagcacatttcgcggaatggaggcgtcaaaagctattctagctaagcatgcagcctccggatccggatatttgcttcatcgccctccatccctttcaaagcaaagaatattctaaacttaatttttttcagagtttcaattcaataaaataatattcagaatttcaaaaggacttatatattcttcataatttctgtacacttcaaattttactagaaacatacgacattctactactatttgctaattaa

SEQ ID NO: 32074 - DNA, 2586 bp, Oryza sativa
attcctgcagccctgttcccgggagggcctgacaggccctgacagcatttgaaccgggactaaagatcatctttagctctagtttttattgtaactgtgactattgtgaaattcggccgaccgacgaaagatggttcttcaacagtgatagtcgggcgacgatagttgtttgtataaattgttagccgagacaatgtagcggtttggcagcgacagtcgacatctacctctcatgattggctgccggtagaagggagtctagcagagtggtgggccagatccatcaccgtgtcacctccctgcctttatcaccactcgatcaaaacgtcggattgtgtgtggctgcaggatcagcattagtaggactcatgcgtgcgaggaggcacaggtgatccggatccatttgtgagatgatgcaagtagcaatggtttctcagttgcttgccatgtctctctctctccctcctctatggaggtcctattttttcctctaacgatgtctttattactagttaagagtttttatactaatctgtgaaccggtgctattttgatttcgaaccgtaggattgtctacatcaacaacccatcccatatggaacctatggacttttggcgtatgcagttgacttgtgttgattgaaagaggccatgaacgcaaattattttcactattaacaaaattcaaaaggacatagggattgtaaatcagttatacaacttaaaaaccatagcaaaacttatccagctagcaagcaagagtactccctcggtaaaaaaattttttaagatgaatccaaataaatactttatctgaatttatctttaaaaattaatatatttttttagatagagggtgtaaatgtacctccctctccactcggattatccccctcctttctctatctaagcttcggatgtcgccatccctgaaccgtgtatccgcacaccaatgcatggtacccgtacatactagtgtaccacgtacggtacacaggattagcgagcatagttgatactccatctctgctcatcacgacaagaatttgtgtcgctatccgcgatccatggtatcccaagccaaaacgattggctttgtttttctgatggatggatggctgactgacacgataagcatgcatatctagttatcttctactactgctattccctctataaaaaaaacaaaccgggtttatctttttttaacaaaccggatttatctttttttttcagataggggaagtacaatacaagtatgaaggaggatcggaaggcataaaagattttggtcaaattgatccaacacagcactgtgctaagattgggcaccgccatgtcgtacgaatctatcaaaatagtgcaaacagtatagggaacaaaatccacacagttttctctgcaaataaattgttctgtccggaaaatatatactccctccatcctaaaatgtttgacgccgttgacttttttaaaaatatttaaccgtttgtcttattcaaaaaatttaattaattattaattattttcctatcatttgatttattgttaaaaatatttttatgtatacatatagttttacacattttacataagtttttgaataagacgaacggttaaagatgtttaaaaaagtcaacggcgtcaaatatttagggaaggaaggagcatatagaagcaaaactagcaatgcttcatttaaaggagtgtttttttaaagaaaaagacgcacagttttccgctgacttttccatgcatatggttctttcaaaaacagaatcaaaggactcgctaaactacattcgcataatttttaggggcaaaatcttccgaaattgcatgctaccttatgcttggatgtgcttcttctccatctctacaggtgatctcgcctaatggatttagggtaccgatgagagtgggggggtggaggttctccggtttagaggaagactgaggcaacagcggcctcacggtgggtggtggcagcgtgccaccaaagtcactgggttggcaatgggcggttggagggtctcatgggtagtggcaaacaatgatgctagattaggatgcggcgggtggtggcagtgtatctggtgatgagagtaaagagaagttgaagacaggaaagacagcggcgtgagatcacaggaaacaaaggagtgtggtgtactggtgtgtaaaaaatgccactagagaagggtaggaaaatgatggggtagagcttctcactgaagggcatggtcattgtgaaggcgatgccaacaaggccgaacagtcatgttgtgtggtgtgaagttagggagtaattgtggcggttgcctagggccaattgaatgggttctctatatagggcctgtttagtaaagctccaactcccaaatttagcaccaggagttgagtctgaagtggagttgtggagcttcctaaacccagctccacctctctagttcatttcggagagagctccacccagctccgctcctattttaggtggagctgaaactgtttggctgaactccagctccaggagaggtggagctggagctggatctgtgccaaacaggcccataataaggtggggtt

SEQ ID NO: 32075 - DNA, 8356 bp, Oryza sativa
gtcaaacatgccctaagtaagctttctttggtacagctccaaatccaagttttttttgaagctggatattcctaactccataaatctatgaatttagatccacaattacattgataacgtttaaataaatcattttatttccgttttggatgaaatttaaaattttgaaccattataattcaacgtacaaacttcaaatatactatagatctaaaatctacagagcctaactataggagagttgtcgtttctattagtaattaaggaaaaacaagacttatatatatagtgaacaaagaaaaagggattgtcagtccagaattcacgtgactaaaactataatcagtctctttttatgtcttttggacgaagatctaacacatctatctagtttatgagacccctctttcatgtttaaacatgatttcttcttattaataggctgaattaattttactctaacctggaggtgaaataaagctacatttaagacaaaaaaaatacaaaactaaatgtaaaaaatattcaacttaaaatataaagtagaattatatagtaacaatactgcaactcaatatgagctaacatttgcatattatatatcattggaattttcagcttatcatgcaattttgagtaactataaatttctatgtgactaatatagtaaaatccaaaaaaagagacatccataaatgtgtggacctaagaataagcaatacactgggaattactcaaattgtgaattgatctaattgaccatttcaagctcgcatttggtctttatgttataaaggacaatagttggaaatatttctatcaatacaaagagtccctggtggttgcgttagtgtttatataaagttttctacctctaaactaggaagccatacgagtaaccgagcatagattgttaccactaccactcaatgctctgaatagcaaaagaaaagttagaacaatccgatctgatgatattcgcatcggtgtagaggaagcaaccaatcgtttccggcctccttgtgcgattatattttcacttcgctgcatcacgattatgggcttgttcactttactaccatttttaaccttaccaagttttggcattgccaaattttagtaaggttgtcaaaattttggtaaagttgccaaattttagcaagattccatatgtacttacttaaatttggcaacaaactaaacgcaaccacttttttttaactttgttaaaacttgcaggtaaggttgaaaatggtaacaaagtgaacaagccctatattctcgcttcaccgcaccatgattatgttctcgcttcaccgcaccatgattatgttctcgcttcgtggcaccaattagtactctagtatcaatatggcagtgcctctagtatcaacactttgaggggtggaacaccaagtgtagttctgctagcatctgcattggtagggtttcccttgagggcagagttgcatcgatgtttcacccgaggtgagttgacgactatatctcgtgtttaatctctcggccatttgtcctcagaatttagagagctatcgaattgggtcttgcttataagtcatattttgtttttgagtaaaattttctgtatacccctgaaaactcactcaatcccttctatacccttaaaatttacacgattccttctatacccctgaaattttaacttgatccctttcatgcccctgccgtcacattttccttcatttcaccattaagttggtggcaaatatctttaatgcccttgatgatttaggtttgaatataagcttgaaaaatgattgaaaattttgcttgagtgcaaatatgtgcattttatgtagaaaatgatactaaataattagtgcggaaaatttttacataaattttaaaataaaaaattttatctgaaatttaatagaacaatagatttttttatcgggagcatttataaaaaaaatatggtgagcattcacagtcctatctttatatgaatgctcctcatttttataactttttaaaaaataaaatacatatatattttttatttcattatctaaaaatattttgtatcacacatcgaactcataactataatagtctcatgcgacaaacttttacatttccaataatgtaattcgtaaatttgtatgttcatccaaagggtaagtcatttttatagaaattatacggtcaactaacggtcaactgacggaagggttatggaagggataaaaatcaaatttaggggggtatacaaggaagtaagcaaaattcacgggtatagaagggattagctaaacttttaggggtatacaagggattttctctttatttttataggataagacgttgaccaacaattgctttactaatatatgggtatcattatatgaagaaaaaataatgataagaaagtactttcgaaaacaaagccatattcagatcacatctaaataagtcgttctagcctactaagtatgatttttaaatacgcaagagaaccgtgtattattttatttcgatcctataagaagaaggggaggttaaacatttacaaaccacccactaacatggtgacggaaaagcaaaggagaaaaacacaaaattcttccaaaactaagaggatgcgaccacaaacaccaaaactaccctagccacccctactacacaaataattttcccgaacaagcaccttagtaggttgtagacggattataagtgtccgcgtttggaaaaattgaccctcattttcgcatctggctccttaagagaccctcgtgcggccctcttgagaagctgtatgcaaaaatagagccttttttttccagacggatctcttaagtgaccacacgaagaaacatattttcacagacgggcctcttaaagtttcgtactgaaatttaagttatctcctcttttccctcttagcgcatcaatttttttttcaagttatcctctctctacccttatctcctccttatctcctctcctcctctcctcctctctctctcaaactcctctctcccggaaactctctcctctctttctcccaggcgcatggcggcagaggccggtgagcgtcctgtgcgttgaaggcggcggctcccccgtagtggcaggaggagcacgacagtagaggcgggcgcgtgatgtgtggccgggccctgcctggatccgtatggatccggcaacagtagcgggaggagcctggtggtggtaggcgttttgcgattttttatttttgcgtgtggacgacataaacacccgcacgcgaaaatcggattttcatgtgcaggtgcgccacccgcatgaaaaaatagcgtttttttgtagacccttccgggctgactggccggaggtccgcacgcgataatcacttttgacttgtctggaaaaatctattaacttattaaaggaatagaaaaaggagcctccacgttcgctctcacggcctagaaattctcatattaattggagaaaaagaaaaacatagtccatatagaaatacaatttagaaatagttaaaattcgaaattaaaaaaataaggaatattgaaagaggagactagagtccatatagaaatacaatttataaataactgaaattcggaattaaaaaattaagaatattagaagaagagtatagagtccatatagaaatacaattaagaaataatagaaaatcggaattaaaaataaggaatattagaagtagagtatagagtccatatagaaatacaattaagaaattatagaaattcgaaattaaaaataaggaatattaaaggtagagtatagagtccatataggaatttaaaactaactaaaattcagaataaacataatagaattaaaattagagtttagagttcatataaaaatataatttacaaataactaaaatttaaaatttaacaaacatgggaagaagaatatgaagtcaatatatgaatataatttagaagtaactaaaattcaaaattaaaaattaaagaatattgaaagatgagtttagagtccaagtccgtataggaatataatgtacaaattactaaaatttgatattaaaaataattaataactaacacgtatataaaatacaatatgaatattacatattagtagttttgtaaagttagtacaaaatttaaaattatgttgtcattttaatatattagaataatacattgagaaaacatatatgttattatatgggagaaaatataatgatgctagccgcgcaatctgcgcaggccaccatgcttgctgttttcatactagtgctccacctaggccaagccactagctcttgataaacatcacaaaaaccatttctccaaaatcttcttaagaaccaattacacactcagagactatgttaaacatgcaaccataatccgaatacataattttggtacacgaatcaatagtggttcttaacatggtatatttcactctcaagtatacatcatatcgattggctgaatttgaagtgtatccagctgagccgcatgcttttttggcaaagaccgaagatacaccttttgctacaataagatttcagttttttttaatagattaatattccgatctttactcaatgaagttacaaccaatttttacataagattttttttggttaaaatgaaatttcattggctgatagctagagacccagattccacaatattccgtactaccgatcaggtaattcgagagaagggaggtgaaagcagaggatgggccggaacggtgccatgaataaggttcggatctgccgaccatttgcatggcatcaagatttactttttgtagatcattacgtttgtgctgctactccatttgcatggagtatgaaacatcggattggaatcgatctcagctggtcaataattagagagagagagagagagaggcagaggcagagaagaggcatgagtaaaaaaaagtgaaggcaggagcagagagggagcagaggaggggcagagggtgcacgagtgggcagcagagaggagagggagggagatctaggcggtgtttgggagagaggggatttatatttttatgagagagactaaagtttaatacctctcttaaaactataagtctttagggaagggatttatacttttgtgagagggcctaaagtttagtcccttcccaaacaccccctggtgaaatcagcagcgtagggccaagtttttatttatgtgctgccacccacgctcacatgcaccttcagtagggctcacacacacatacacatacacacgctctctctctctctctctctctgcaaatgacatctctcattgcccaatccatccaatgaaaacatctcatcttaatctaatcaagcgccgggcatagtgtatagtagtagtactttcgttagttaaatcacagatccaactaaccctgcagctgcgtacatatttccatgtgagggggtgaagggccatctatccctgattgcagaactcatcagcttgctatgcccccatcttgatcttgtaattgctcaatattgttgctttgagtgctgccattctaggtctattcatctaaggtttttttgtggctaagttaaaatgcgtcgtaaaatctaagtaacataaaagcttatattgaccgtcaacaatatattattttaaaattattttgtcaatattgtatggcaatatatttttatcagtagtgatagtgttgcttggcacgagtttcaccatgttgcggaggtatgctgaataaggtctgttcgaaaccatgcaaaaatcaattgtattcattttatggcataaaatgcccaacccataccattgctaatcaataactaaccaagctaggtttaatgtttaacggtttattcaaatttcactcttaagtatacataacagtttaatcgtagatggcgccccggatgatgtatacactcctgtatgtgcagatgcaagcacgccccatcctggtcctccaatgggaaccaccccatgtgccacctcaatggcaatgcaaccttctctttccatgttttgtttacttatcctttgataaatttacctcatccattatttttttctaatataatgtgctgtttgatttggcatagttttgtttgatttaaaaagatgcatatgtaaatataatattttgatctttcaaaatgtctgtggtgccttttctacaatataatcttacatacattttataaatctgtaaaaaatgtcttgagccttatagttaaatgggggaaagtaataactagtggtaccatgtagacattgataggtttactccacttataatgaaatcaacccatccacctataaaatctcattgagcactgtgcatgatcaatcagtagctagacactaccatgtatcgcgcacatggcgccggtcatcgacaccaatgcactcatgcaattcctcttttcagtttctttattttacatcccggacctcatgattgattggatcgacccactcacaaacaaatcaacattcaagatcaaggacacaacaacatctttcgttgaggaaaagaaaaacgagctagagaaagccaagagcaaattaaatgtgatctcttccaataaaatttgtgatgttccaatggtggagtacgcaaattaactagaaccaaaagccttaacttttttttagactactaagcggcttgatttgtacttgttgctagatttttcctaccaaactttgtgcaaatgtggtacgtcaaagtttagaaacgcaacatccatcaatgattggaggaaaaaattggcaagaagatgaacctaataggccctagccaatggcaaattaagagaatcttgtcacatatagtagccatccaatacttgctaaatcttctagtgattgcctctgctagaagttcaaaatatagttagtgatcgatcagagagacagctcctggataggtcgatcactataaaatattattagttgagtccaccgtagaatatattataataactataaatattagcagaaattaatacgacagatcattctctaaaattcaagttctatagtgctggttgaaactgaagatatgccttatattagtatatattttaataaaccacgaacacacattaatatgtgcaaattaatgtcgtgccttttgttataaacgaaggccattataaattgcagggtgcacgtgcaagtctgcaaggttggccatccccagacgaccccagtcctcccagccggcgtccatgatttgctcccactggtctgaagccgtgtgcagtgttgtgctcgtgtgtgtgctcctcgatccgtcgtcccatccccatgcaccaccacaccaccgtgccgtgcgtcgcagcgcaggagtagtacagtacagtagagtacagaagaaatttcagcagaaggaggctgcacgcctgcacgcccatacgcacgcacgcggcggctgggtgggtgggtgtgtgtggtgtgcgtggacggggatgcgtccaagcgagcgtgcgcgcggcgcagggcggcacacatggccatccagacgcgccacctgtaggcagctattctacgcacgcacggtggtggtggtggtggcatctctgtctctcttgcgcgcgttttattccttttgaccggtgcgcgcggtgccatcccaccaccacgcagtcgcggtcgcagtcgcagcggcgcggctcccgaggccaagcatgcgccgcgccgcgccgcgccgcgccgactactactccagtggataggccagtgctacccctgctgcctatgtaggtggtgtacgaaataccaacgattctctaccataagagcaagtttaatagtatagcctactattagctccaatttatttatagccaattcatttaatagttgcttactatactattaatatatggtcctacatgtcaaacagacatcgcttcttggagtcaacactgtagctagttgcagatctatagcccgttgttcttctctctcatcttttatctcattaaaatatgtttacagctggctaatagcctgctattgtacctgctattgtaacttctctaatgtcataaccattattggctctaaatcatctatagtcaacttaatagtcaactcatacaatagttacctataaacatatactacataattaatatctggtcccacctatcatacattcatgcaccctagagtccatgctgcagctggctataaatctatagcccgctgtccttctctcttctcttttatcttctcgaaatgtgtttatagttggtttatagcctgctattgtacctgctcttagagcaagtttaatacttccttcgtcccacaatataagagattttggagggatg

SEQ ID NO: 32076 - DNA, 628 bp, Oryza sativa
ggcggtggcgacgaaggcgagcttgggcggcggttgcgctgacgcgccatgcgcgggagggtggtgccactcgtacggcgacggcgccgccgccgccgccgtcgctggcgccggcgacggtgacggtgccggcaagaagaacggtggcggaagacgggtgatggtggtggcgaacgggcgcgcggagacggccggcgcgctgcagtgggcgctgtcgcaggccgtcaggcgcaacgacgcagtcctcctgctcgccgtcgtcaggccggcggcgaacgcgtcgtcagacggcggcggcggcggcggcgagtcgtcctgcgtgaacatatcgaggacgaggtgctaccagcagctggacgccatgaggagcatgtgtgaatcagccagaccagaggtaattaattaacaaacacatcaacttcttagttaacttgtgtaatttaaatctccttgggttcattcgtgctatgcttaaatgatttgactgttcaattagaccccctttttaaaatgccagaatacattttctacagtaagttgtcctctaaaaatatgttacagcaaagtttgagaggttgagtatactcctatttgacaagaaacagtgatcccaacatgtaattagaag

SEQ ID NO: 32077 - DNA, 546 bp, Oryza sativa
gcagaaatcgtgacaaaaccctccatataaccacacctaaccagcacacccacctccggtttcaccccatccctataaggcgatgggcagtccctacttgtgcctaggtaaatccggaagcagcatagatcacctcccggtccatccatactccatcatgcctacccttgccattggtgtgctagctaaaaaagattatacttaagattcagcctggagcccatctgacttgtggttagtacgagtatatcttccagggattcccgagaaccggtccttaattgttatgggcacgaccaccaaataaatcatgcatgtacccacgacccaccaataaagcatatttaattaattaaccatatgccaagatggcataacatcatcataaaattaaggactatattatagtaaatcccattgtgagctagttgatctaagcatgtctaagcattcctaaaccaatcatctagtcaaattattatcccaggctatcaatgaatcagggtaaataaagactgagtacggtaaaatacatcccgcatgaca

SEQ ID NO: 32078 - DNA, 598 bp, Oryza sativa
catccctataaccctagtgtggtaaagccattagcaagtccttgctagctatcattataagaaagagaaggtgcacactagagtttatcggggtacaaatttgagggtaaacacaacactagaatgcttattcacgcatatgcaccatgggcacacacttctggccacaccggcccaaccctggagaccgatgaccgaaccattgttgtcttctcgagttctcgctctttcccaacttcctctcattcgactcctcgtcgccttcacaccttgttgcggtcatcgttcctgttgcgctgctagtgcctggagtcggtgcccagccatggtctccatccctctcattctccctcatcctttctattttatccgcccttagctcatctaggggtggcattttccctcatcctttctatttcatccgcccttagctcatctaggggtggcatttgccctgttggggccggggatccggcgaggacctgcccctatgggaccaagagtgggggagaattttcacccacgggtgagtaggggcggggccccgacttcgtgcgtggctagggccgagtcagcttcttcacccgctggtcataca

SEQ ID NO: 32079 - DNA, 643 bp, Oryza sativa
tatgttttaaaccgttaaaagtgaatgtttcatacattacagctatatgtttccctgtgtttttagcgtgttttaaagtttacgtaacaacgtctttcacactctctctctcttgtcttgtactatttgcacactctctctttccattttagatctttaaaatattttttcttctaaactacttatccaatatgtgatccaatcacaccattatatttgttgtagttaaatctttacaataagatatcacatgactatattctaatgaacgaaatacatatgttttataccgttaagacttattgtttcatacatgacagcagcatgtttcaatgtgtgttttcactataggcttggtttagttccaaactttttcttcgaacttccaacttttccatcacatcaaaactttcctacacacacaactttcaacttttccatcacatcgttccaatttcaactaaacttctaattttagcgtgaactaaacacacccgtactttaaaaaaagtcaatgtttcagctactaattttttttcaccatgtataacttaatgtttcacctaatggtaagtgaagtatttaaccacctgatttaaagggaatcgacgtgccgattggagttcactcctcagacttttag

SEQ ID NO: 32080 - DNA, 617 bp, Oryza sativa
tcctcatgtttttaactccatcacaacattccagttgccacaagtggaaaggcgctcacgtctaggctattgtcgggcaacatctccttcttgtcaaagctaatagctagggcgccgacttttgtcgggcgagatatcgcctggcaggggcttgagtcccaaggacaccaccaagctggaacttgaggacgggaggcgggtcctcaccaaggtgtgttctcgaatgtgagtgcgatggcatgagggagggggagagagaggcgtgagggagagactgacatgtgaagtctacccttgcgtgggatccacatattatgaccaagtccacaagcatcagcgtggtatgccacgttggcgcacagagcaggttgagatctatttggacttgtgacggtgtccaggactgtcacacctggagttttcccttcccttaggttccaaatcactaataaatggcttcaagaatttgctttggttaaccaagagaaaaccccagttaacaatacattaaataatcggaattgtcctggagaattttttttaattctctttgctatgaaaatcactaacatgacttaaagagtcaagctaataatttcttcctttgcctttggtca

SEQ ID NO: 32081 - DNA, 528 bp, Oryza sativa
  unsure (1)..(528): unsure at all n locations
acaccctgagacttagtcggttacgactgtattttacctctatcttcatattccgttaggaatatagattatcttttgtaatccggactccttcccatatataaggggggtccgggcgcctctaggggcatatgctgatttttcccaaatcatacaatcaataatacactcggcggattcatccccggacaggagtagggtattacttcttttataagaaggcctgaacctgtataaatcctttgtctccaaacccatacacttttctagcttgatagccacccccttttattattgccgaaatctagtttcgacactccgttttaaaatgtttgacaccgttgactttttagcacatggtggacagttngggttatgcaaaaacttttgggaaatatgttaaatgatatgcctacataaaaatatatttaactatgaatcaaatgatagaaaaagaattaataattacttaaattttttgaataagacgaacggtcaaacatgtgctaaaaagtcaacggcgtcaaa

SEQ ID NO: 32082 - DNA, 538 bp, Oryza sativa
gcagcccaactcctacccaatcttgtgcaaagtctagatttggtcctaggggaccacaacccactcaaaaccgtggctttctttgcctcatcctccccttcacgcgcaccgcccgagcatccgacttagccacgcgccgtgtcgccgcgcgtcggcctcagggccgcttgcgcgtgcctgaccgccttggcgcaccgtcgcccgtccgacgccctcagcccaccgccgccgcaccaatcttgacgacgacaaagccgggacgacgaccgccgcaagaaatcgccgctcgacgccgtgcgcgcccgtccaaagctgccgccgagtacgatttcgcttctacccagggtgaatcgcgccaattcttgccgcacggttagattgaagatagacggtggtatctcctctcacaattcaaaccattcacccctgagccagccgttttcaccctcgccgccgccgcgcgtcgcgcccggattagcgccctcacgtcgccagctgattccaaccgcggtcaagtcaatacttcatcggtaagtat

SEQ ID NO: 32083 - DNA, 1919 bp, Oryza sativa
ttcacaataatttagggattaattcggcctttttcaaaaaaaaaaatgtaaatgcgagcacctacgtcaagttattgaaccaggtgcaggtacattttattgtattttgaggtgcgcacatacattttattttacttcgcttgaatttattttgaggtgcacatacattttattttaacctttttaatacaaattttatttgacaatgaacgatcaacagatagcttattttgaacataacctttagtaagccacaccgcatgataagatgacgcatcaactcacactggtgaaagaagaatgccatttttggcttttcagagtgtttgcgttgtactatgtaattctcaaaaaagaaaaagtgaaataagttgtaattctgaacatgaaatcctttacaacaaacctaggtaagctagcaatattggtgtaacaacggtaacatttgttatgaaaaaaaactggatatatctatctgatattgtcaaaacttatactttaaatgaaaactatataccctgtccgttttctaagttgatgacaccgttgactttttatatgatgtttgactattctcatatttaaaaaatttatataaatatcagttattttgttgtgatatatatgttttaacattaaaggaaatttaggtgtgatactttaagcatatttacacaatttttctaataagatgaatggctaaatattattttaaaagtataatagcatcatctattaaaaacaaaggtattagattgccgtgttttaactgtatacattgtatatgttgtcatacatttcttttctgaccatagaaaagtattgcttcctccatcccaaaatataataacttatagcgtttaaaagttgtaataaaatataaaaacttatatatacctttctcaaccaatcacaactttctacctttcgaattaattttcaccaatttccttttcccaactattcacaacattctcttatttaattctacatactttcttataggcatatttaaacctaaaactcttcgcatttaggaaagaggtggtattaagcagctaatgatatatatatgtgtaaacaagtgtgagaagagccaccagtttcagaagacaccagccgactacagcagccacagtgaatcgaaccagaagaaattaactagcgcttctgatgcatgcacagtggtgtcgtcgatcgatcgatctgcccagcctcctctataaataacagtacgtagcaacaacacatctacacccctccagctgctacctcgatcatcatttgtgcactatagctagagaaacatattgtaaccagctaggccagcccaatcaatggcgtccgccgcggctaagattgccgtcgtctgtctggtggttttgtccgtggggcagtccatgatgatgacggcggcggcaactactgccgccaccggcgccacgacgtgcaactgcgacacaagcggttgctacaattgcatgctggatgtcgtcaccaactcgtgcaaaggcagagatttcaactggatggtgttcaccgcctgcttgatcaaatactccaaggaaaaccagtgcttcagcaagtaatagacttatcggagctagccgacatacgccgatctatcgtttgacgcgtacgacatatatctatttctattatctattatctatttctattatctattatctattatctatctattctattatctatctatctatctatctatctatctatctattctattatttatatctattatctatttctattatctattatctattatctattatctatcgattttgctatatatttatcgacaaatttttccccaaaaatttgacggatgtaattacagtacaatcgtagtgtaattacactgtaacttgcatgtaattacactgtaactatag

SEQ ID NO: 32084 - DNA, 1484 bp, Oryza sativa
tttccaaatagacaaaatcgattttcttatgcggttgtctggcccgcatgcgagaaaatgtctgcgaaaatccctattttctatgtggttagcgcatatgcatgcaaaaaggtaattttcgcatacgaaaccttaagccaactacatgcggaatattttttggcaaaaaaaaaaaaaaaactctagccatcccaccacgtgccggacgcccgctccggccgcccaccgccgtcacctcgagtccttgtcgtcatgcgctgtcgcccttcgctaccacccaccgacacacccactcgcctgctgtcgcgcgtcttttgtcgctgccactggatccgggcggaggacggccgtcgctgccgctcgtctgcctgtcgacgcgccaatccacccgccatcgtgctcctctcgcctttgccgccgctcgccatcgcgcctgctgtcacccgccccatcgcccccgcccaaggtcaagggcggtggatccgtcatcaccaaccctccgtagtgctgtcactgtcacccgcccaaccaccgcccgtccgtcgttagtagctgccgccaccggtcgtgcgggcgccaagcccaccgtcggctgccgagagagagagagagaggagaggaggaggttatagagagaggactgagaagtggtggagagggaagaggataagaagagaagtggtggagagagagagaggaccgagaagagaagataaggttgcctgtgaaaattttttgaagtggtggagagggaagaggagaagaggagaagtggtggagagagagaggaccgagaagagaagataaggctgcttgtgaaatttttttttgaagtagtggagagggaagatgagacaaatcagacttagcagacccttacgagacccgcattcaaaaatgattttcttatgcggacctcttaagggtccacatgcaaaatgagcatacggcccctaaagagacccgcatacaaaaatgaatttttgcgggcctattaaggagtcgtatgcggaaatgcctgctcgatttttacaggtgcgggttgttatggtctgtctgcaatctaacgaggatctcgttcagaaaaatcatttctgtagtggtgatattatgtgaagtattttgcccaaatgttagttttttttaatatgtgttgtcgtgcgtttcatggcaatttggtgaaaaaaatctataacttgctaaagctaactagaaaataagcttcataattgagatgtatggtgccacacgacaaaatttctcctgtcaccattgtaaaattgtcttgggaaatgaaaatgttcccatattctttgtatgcctactctgaaaaatgcttgaaaaatggaaccatagcgaatttacaattacttgatttggtgttaatccacgccaaaattaaattaagtctctgaatctacctacttttgacctccaaagatacattatgcagcagcaaggcaaactaacctggtactaaacta

SEQ ID NO: 32085 - DNA, 714 bp, Oryza sativa
attttgtgtatatgaggtttgtacggagttcaagattctttgttttatgcacccaggcgttgcaagtggttcccaactccccctttcgttttccacgtgcacgcttttcaaactgctaaacggtgcatttttacaaaaagtttctatacgaaagtgcttaaataaaccatattgattcatttttttaaaaaaaatagctaatacttaattaatcacacgctaatggaccgctccattttccttgcgggagggattagtttccatcctcctaaaacgaacacagccctggagttctataaatttactctttactaccttagagcatccccaggagatccttcatccggtcctccatccgatatatggtgtacgcgagatgaaaatggacctccagcagatacggcatccagtccgccaaatatggacgatgcgccaaagcgagcagatttcggccaaatatagcgattctctctcctcacgccatatctcaatgcccacatctcctgcccacattcggacttccgtcgcgacctcgcctccgtcgtcgccgttgctggccgcaagttgctgatgccaagtcgtcgcaagccgcaagctgccgccgcctcttaccagcctgtcgaccgcctgcgctgctcgccgtggagtgtggagaggagggtgtaggcatggagagggagagtaccaaatctagaaggagccgtgcggccgccg

SEQ ID NO: 32086 - DNA, 723 bp, Oryza sativa
tacagtagttatcattttctcacataatagcatttttttcatattttatttttaaaatatattaaaatggtaataggattttaaattactagcaacatgtatgtgcgttgcaacggatgaaactaatattaatataaacaacaaataaatactaaaattaaaatttaagtgtcacaacataacgttacggaagaatttaattttttggctaaatttcttattggccacatttggacaaaaaaaaatcaaagtgcaaaaatattcctaaatggtaactccgttgggccaagaaaataaaggaaataattctgcgagcctgacctgaaggcctacgaacattttaattggtcgatcacggttgacagggggagcaggttggtttttctttggagttcatgtctagggttttccctgcgaaattttttatatttttttagatatttttatgttttaattttattaatagaccattctaaaaaatatttttaaatctggaccttttggcccgcacgtggccaaataactctgtcacgccgcgtgcagcgggcatgacaattttatcctaccacgccagcgagagcggcatggccagataacactgtcaagccaacgacgccggcgtggccaaataacgctatcactccagcgggagcggcatgtcacgcccagaaattcactagtaatttccaaacttatttgtgcattaaatcctcatccagaaat

SEQ ID NO: 32087 - DNA, 751 bp, Oryza sativa
  unsure (1)..(751): unsure at all n locations
cgcgcgcngggttgcctgactaacagatggcacacnacctnatnaccgggtacccgggtacgtacaaatcagggtgcatgaacgacatatcataggcaggactaacaaaaacggtaggcaaatatatatatatatatatatatgtgtgtatatatatatatatatgcacgcacccatatacattcagatcgctcgcgcggtataacgcgcgtgtacgtatgcccacaaacaaccctgcctgtcactaacaatatctctttgtccgccatcgctacacacttatagaaacatagaaatattgagagcacacaccccaaccaccgccggccaacccacccatacccacccacgaatatgctcatatatatctccccgagacatcgatccagccggccactgactatctaataaaattgttcgaaccctcccagacacactggaccaagttcgtccaagcccataataacaaatacccaccattaaaacattcactcagcctcaatcaaaacaacattgaataaattctcgccacaatattctacgcgagccgaaaacaccaccgccttcttattaaaaccgaaacttcccctccaaaaaaaaaaaacgtgtaaccacatttaaccaaacgagtccccgtgttctactcaacccacgctcccacctcaatgcacggcgtcaccccggccagccatatatgactagctcgacgaatattcggtccctgcaccacccctccaaacacaatagaaac

SEQ ID NO: 32088 - DNA, 820 bp, Oryza sativa
  unsure (1)..(820): unsure at all n locations
agagagagatgaaaaaagttggttgcctntgngcgggtagtggtggactgggaagaggagaggattattaatattcccacccagaggcatgatgtgactgctgtaacaacncaccnannnnnaaaaanaaacccggaggcgcaacacaccancccaccgaacnncccaaaaaaagaaggattttttttaccatgcaagccaacgcccggggggggggcggaggaggaggagggggaggaataagaaaagaagatttattcgacgagatgctgtgcacggtgagggggggggggggggagataggatacggaaagagcgtatgggaacgcatgggaggcgcggtaggaggaggaggaggagcatttgatgaggagtacggggcggagttagaagaatgggcgatactggagtacggggttggacagcatcagatcgacggtggaggggaaaaggcgattatggtgcaagtgagagaccttcaaggttattacgggataggcggcggggatgacagaggaggggctgacgggatactaaaagtggggatggtagatgaaaggggggaggaagaaaatgacggggggttaaaggggggaaaaggggttggacgatttttatattggtatgggtgggtatagaggtgaaggagtacagattgaagggggaatggaagattaggtgtacttgggggatatgtggagggtatgtgggggagtttgttgggagagaggtgaccaatgggtggggaaagggggtgggggcgtgagggaaagaatgggggaggggggaatgaagaggtcgtggttaggggaaggacggg

SEQ ID NO: 32089 - DNA, 601 bp, Oryza sativa
  unsure (1)..(601): unsure at all n locations
ggagatgangggatgancagcggctacataacncaccacatgtgtatatctatttaattggttgtgcgttgggagtcatttattatacggtgatcaagttttttttaattaatactgtgatcaagttttttcatgacaaatagatggaacctagttctttcccgatagggatggatatcaaatcgccattagtaggtgcaatctcgcaagcacaattgtctaccattgattgccccattggaacaattccaatagtgcgcaacaacaatttggccaacatgatggtacaacgtattggcacactggctaatgatgatttaccaatgctggtaggttttttaataaaattttgaaattatatagtaataaaaggttggttatgatattatagactattgtatggtattgcctcatgaatagttgttgcatatttacgaagtatgatcattttcgactcaatctttgagtgctaacatcaaaattctcaacgagacataatataagatgaaatatgtgcaatgttcccatcttatgagcaattattattaaaaaatagaaattcagagatcaaatgcattttaagaaataagtaacttatttt

SEQ ID NO: 32090 - DNA, 615 bp, Oryza sativa
ttattaagttgtacaaatgatgaaatgtggtccccattatttcgtgttcaaaacggctggttaacactaagggtagcgtgtgttccatagaaactattatcgtcccagtatttgatacctgcatactacaagtgaaagaataatattgaaggtaagtcaaatagctttgcatgccacattagaatagaaaagaatttaatgaagataaactatttttatatacaatctataattgacaataagataactaaaaaaatgttaaagggtatacctcttcttgtgaaccaccattaggcatatgtgcttctgagctattgtgacgcagtatcggaattgttccggttgggcacttgatgtcggggaaatttgattctgagatattggatgacagaatagattgtatatcaagatctaatggataagagcttggttccatctgcgtaacaacaaaaatgaatcctaatcaaagatcgaaaacaaataccaaaaaatacacttatctttatattggacggtaaagggaataaatacgggaatccctcagttgatggctttcccaatatttcatattaaagtatcatgatgatatcttatataatctactaatggatccta

SEQ ID NO: 32091 - DNA, 638 bp, Oryza sativa
tgtgctcccagtcgagatagcaggacccaagcatggattttccaactttttcctccacacgtttcccttctctcaagtctcagctctatggcccatacgaatgcgaatatttgactctcgatattgagaaatccagatcctctgcagtactgggaggaccctcgctcaatattgagatcaagtgtggttattttttttgagtgcataaaagctttgtactttaatactctatctgtttctaaatatttacccagttgacttttttaaatatgtttgaccgttcgtcttattaaaaaatttaagtaattatttttttcctatcatttgatttattgttaaatatacttatatgtatacatatagttttacatatttcataaaagtttttgaataagacgaacggtgatgtgctaaaaagtcaacggtgtcaaatatttagaaacggagggagtatattattaggaaaaaaaatctacaaggaacaagctagaaaagactgttataaataacaggaactaccacagtacatctctcgatttacatcaaatgcagttataaggactgtcatataatctgagtctccatattttgatcttaatggtccatatgagttgctacaagattatactccactataa

SEQ ID NO: 32092 - DNA, 711 bp, Oryza sativa
gagttgtttttggtttggtttggtgtgcgcttgggttttggggggttttgcggggttttttacgtggtttcttgccggaatcgtcctaactaacgagacgtctcacacgttattttacggtggatggtggtggtggggtggaccgggcctcgagagggagcaatgctgcagtgggcagcggcgcagtttttgtgtgggcactccaccaccatcaccgggatcgaagtccaagcgggtggtgactgactggtaaacgggttaggtacttggaggacccgctacacagtgctccaggaaaaggtttcaggcttttgcttggtgctggggtaataatatcttggatatgttaatgtttggtaaactgtttttattgtaagctctgtctccgaagataatattgttatgcttcaaacatatatttactattgtaaaaattaaagatatttttatcgatactttgttacgtcatccgtatttgagtcggcttttaagttcattcacttttgaaaatacagatccgtatttaggtcggttttttaagttctttcgcttttagaaatatagttagagtcgtataagaaatctcctttaaaaaactcgcatgttaatatgagataattggactcctaattgtagcttctgattttgtaaaaaaaaaaatatccaagcaaatttccatagtgaatttcaccttagctaaaccgtataaca

SEQ ID NO: 32093 - DNA, 1236 bp, Oryza sativa
  unsure (1)..(1236): unsure at all n locations
attcaattacctttaagaatttttttgttttcttcaccttctcaattatcaactgaaatataataatttcttaatccagtttaattgactttcagttattagttattaggataaaaatataaatatatttatatagatccatgctagtatattgtcaaaataagtacttaaaaatttgaatttatataaaaaatgctctaaataattaagttgtcacataacttcttaatttattgtatcaaaatcctacctaccttacaagttgttgcatttatacgatcacttataaagttattatactaaattgcaccttcctaccaagatgttgcattagaacgttcatttttcaagttattgcaccaaattacacccatctgccaagttgttgcaccgtaagtgcaatttactcattattttttcttttaacagaggagtatatgtctctcatcgctttcttctgacctctatggcaccacatcaaacccttcacgggcatcacccttttttgcgcgtaaaaggagagatatttttttatgtgactaatacatctataattacataatttctgcttcccaaagtaagtcaaccttgtactttgatgtgacatatcataatacgataatacgatgaattagataagaactatatcagattctcgtcctagcatgagattaatttattttaggatggatgaagtatgctactgatttattctttccaaagttgtgtaaaccaagtgggctgcagcaaatcaattacgtatgctactggggtttgatgcaaaagaagcgcacatgtacaatggggcaatgcgcgtgaagatttgattagcataactagcaacgatcattagtaaaacagttggaaatggtcagacacgatatcattattttattatttcgtggaaacggtcataacattttcatatttatgaatttaaactatctagtgttaaatttaaagagacactgacagaaatttaaaaaactaaattttatatatcataatagtcggtaaaaatattattattattatattaattttgtggaaacggtatctgtccattcaggtaatttacgtatcgttttcacccccagccagattattacattgtttgtaacatacccaaatttcaaaattttacttcaatgaagcgtcaaaatacattttcattctaaaattttgttttcctttttcataaaaactcanaatgaggtttaactagccaagttatcc

SEQ ID NO: 32094 - DNA, 2973 bp, Oryza sativa
ctaggatcgtgtttacaaaatagctttgagcaactaagtgtcttttaaatgctctttactgcaaaacctaaccctattattattactccttgtacccccttgcattaagcatgcatctcctggtgtgacttgctgagtactgtggttgtactcattcttgctctatctttccccccttcagtaagagaagctttggagaagaagtcctacgtggagtcctggcttataccccatttgagcgcctgtgaagatggagccgtaggcccgctagtccgatgctgtttattttttattgttagaccttaagtgcctttgtaataatgtaaatattatcgatataataaagatgtgtcttttgtatcatgtttgtgtggtgtaccccggcttttcttgggacggagattaatacactagcgttcgggaaaagacaatttttctcggcgtgacagggatggcctatgagtatgtcgaaatcagagatgtcgaacacatgaaaatctaggatgacctcaatgctattgtgccgtataggcactccagagataatccctaaaccttcagtagtagagtttgcggaaattcggaaggttttgacggttggttccaacggtctgtcccctaagcaatcgaatgcaaaggttatggacataatattggcaccaacagagggattatagagagcacggaccaattttcctccaatgaaacatgtaacagttgaggaggggcatcggatctgaattgcttcagatgagagctctccttccctcaaccattcgttactcatgatggtggtcaacttcttcaccgtctctttaagcatagctttatcgagaggatcattagaattgaccttggtcggtggtctcttgtcgcaggaataattcaaggtgttcgcataatcttcaaaaagatcctcctcgaattagaatggaatttccggaggataaatttctttttccttcggctcctgcgactgggatgaggattcggtagttgagtcggcttccgactccacatgtagagattcctcatggataatctcgacctccgggacggcttcgcttcggccgaaagaatcattctctaagatcagatctaagagttctcttccttcggcagttgtcttgtgtgcaaatgatcctccggcggaaatatcgagattttcggcagactccttgtctaacccgtaccgaaaatgttgtaacaacacatggttgggtaaagacaagtctaggccagactgagttaacagtgagaacctggcctaggctgcaccgagagattccttctcgttctgtcggaaagagaggatgtctaatcgaagattgattacacgggttaatggaaagaaagaaaggcaaaaattgcacttaagctcctcccattcaccgtggaatttcttgataaataaagtgtaccattacttcacttcttctctaagaaaaaaaggaaacaacttccactttagagtttcatgtgtcatgcctacaatggataggcacgaacacactagctcaaagtcccgaagatggaggtatgggttttcaccggtacaaccagagaaggttttctctcgaaccatggctataaagccaggactgatttcgtagccatctgaaaggattggttttgaagaacaggacggctcacaaatatcaacccgaggagcagaaaggttttgaatcatgggttgctccatcaaggaaaggaaatccgcaagcgcacggaataccgctgtagcacttcaccttcgggtgaccccaaaaggatatcgaactcagggaacgtgtgcaatctatctaaggctaagacggtccaaggacaacaactgtaggtaggcaggctagagaggactttctatgtgttttaattatcttcgctaaataagttaattccctatctgttgctttgggcaccgacccctgcaggtctgccagcgtggttcccgctatagctctatgatgtatccaaacatggaggattactgggacggaattcagggctgtcaccacctgctgcctacctctgacaaatccgtgggatacacaacaaacaaaggtaatctctaacctagacaccacgcctaagttattaattactactctaatacttgcgcaggaacttctttctctatccagagtcctagtactagagcacttagtataaatactaaacaatgaacccgaaaagatggaaatttatcttacttagacaaagtaattaaataacataagaaaggaacacaaatgcttactttatagaagttctccgaacccggagcagagtgtaccgatagctccggtactcctccagaattcctcctaggaagctacactcgtcgaggtagaagtcggataagcgccaaacttccgggcactcctccagagctttccctcattctataccttattctaatgtacaaaacatacaatagagcctcttgtaattcagctcaaagttgtgtgttgtgaatgaaagagaggagctctatttatagcctccatatgatggttacaggtatgggaaacgaccaaactagcccgcaaccatcattgggatgaaatcaggaccgtccatgtgaaagatggcgatgaacagccaccagagtggttcggccgaacccgggatggctccgttcggcccgtttttcatcgtggacattaattttgaggccctcagcccattggcatgatagttgggcccatttggagttatttaattgacttatgggacctccaatccgtgtaaatgtgtcctgcatgcatggaggtgcagtttgtcgcttcatggatgtgcacggaggtgcagtttgtcaccttgatgaagtcatcgacaaacttttgaaggctttggaagagatagagaaagagaagaagagggtggccaaggcgtacaataaaagggtgaaagcaaagttgtttcaagttggagacttggtttggaagacgattttgcctttgggtactcgat

SEQ ID NO: 32095 - DNA, 663 bp, Oryza sativa
ttgatgcccaacggttatgcttttgcctcgactcgccttggctcagctcggcgcatgcacgtgtggcagtccaaccaccatctgaaccaatcaacagatgttctcaattagcaatctatttaagttgaggtctttctcgttggtttccaagatggtattaatctcttaacattaattatggatctttggggttgctagaattaatttgggcctagcccatttaattctaacatgatctgcacctatgattgcgggagaatttactatttaccatcctcccaaaatacacatgctcaaatgtcactttcaaattttcattctcatttgccatccgggctcacttgtctgcctcctccgtcacccagccccatatctcatttgtacgaatggggaaagaggctgacatgtgggctcgggtgttaaatgagaacaaaaattttgacatgtttgctttcagtcttccggccagtgtgattagcagtggataaaaagacaagagtgttcctctggccaggagaagacacatgtttgggctcgcaatgcatggtggcttgggaacaggtatgtcggccgaaggacagggggtttggggaataaaaaaaaatctcaaaatgcaaaatgaattactaatcaagaggatttttcatctgtagcagactgaat

SEQ ID NO: 32096 - DNA, 671 bp, Oryza sativa
ctattgcgtcaatccaaatcaccctctaaactacaaaaccagacatttaacaccctcaaatcttcaaacaagacgaataaaccccctctgtcaggtagaaggttcacatgcaagtaaggtaaatgaccaaaactacataaagaagaatatgtcattaatgtataaagtcttacaggagagggaagagctactagaaccatacccgaattctccaaaagacttgaagaactaaagagactattctaattctaactctactagcactagaacaaagtacgtaaactaagagaactttttcacttgaatccttcttggtgtgtgttgaaatggaggaggagatggccttttatagctgctcaacgatggttcgagcgtcaataccggccacagccgtcattgggaggtcagttgtaaccgccttcagcttgggcctgggccagcagagccaggacggggttggatgacccctagcaggtcctcctagcccaatgcttcctcctggactttgtttaatggatcctccgcctagcggcatgtggttgggcccatccatccatatgtctgccacaagtcgtgctttgattggttaaacgatgaatttccatcatttctcctcaatttataaagtaatctcctgtatatacaaataatttgccaagtacaagtggaat

SEQ ID NO: 32097 - DNA, 701 bp, Oryza sativa
gtataccatatcaatacacgacgtatatccaagggtagagggtataccttatccgtaaccctgacacatactgtcaaagatcaatagtgcaaagacaggaggtagtatctcaatgtcttatgagggaaataaaataaagaaggtgaatgaggagaaaaaggaggagtcgggtacctacgcactactacaggatagattttcctggacgcccctcctttttgtttccatgcggttcgtaagtggaactgcatggaaaaatagaggacaggctccaggatgtcgcccgcacgggataacgcatcccgtgcgggcgggttaagccaaccgcacacccgcgtggtccaccgcatttaacctagccgcccacctccctccgcctgctcaccctcgatctctcccactccactcctccctccccactctcctctcctctcctctctctcttcctcagtgcacaacgcgcccctccctctctcccttagtgcgcggcggcgggtgaagagggcggcggatccggcgacacccgccccctcccctccttccccttgcagatccgggggagggggcagcgggtccggccgcgcacggcggcgagcgaagggggcggcggcggatccggcggtggtggcgggaggagagcatgcggcagcggtgcacagtggcggcggcggcgcgcgccccctctcctccctccccgtgca

SEQ ID NO: 32098 - DNA, 718 bp, Oryza sativa
agcccccacgctttttccgccactgggtgagccgtaggctaggagagggatgagtggatcttcgtcctcaactcctctttgtgaggatgacagggagctcgcgtcgacgatcttaagtggagttagttttgggagggcgttgccaccaccttgtaggtcttgcgacgatcggtcacttagcagcagctggctcagtgcccgttcctttacctgggttgtgtgaggagctgctagtaggtggtgatgttggtgtttcttttttttttctggctagggttgtaaccttttaatttttcccgctatataaatatgaaacttcacactatctcgttttgaaagaaaaaagagtgcacacttgacccgtttgaccaaatgattttttttcaatcaccttaccacagaaaagctcatctggatttatccatttttctttaaccctttttatggtagatgggagtgcatacaggtgtaagcattaacactaactagggaggaagcccgcgcagatgcatggtcaatttatttattctttactaaaagaatgttaaaaagatgttatcttaccatattttatttaaaaaccatagattatcttatctctaccctcaaattgaccatagactttgatacactaaattaaattgtaagaatgtctctcatattaaaaaaaaaattgttgtgtcctggttatatataaaatttttatcacaaatactta

SEQ ID NO: 32099 - DNA, 890 bp, Oryza sativa
ttggccatagctgctaaggctttattctctaatgccttgaaatatgggtcccgcatcgacgtagccatgcccctcaagactagcgtcgatcacaattttaacacctattattgtctacacacttataaaaagaatgtattagtaagtaggctagttgagttctactatcaagagtgaaatgaatcatagagggctcgatggactcatcatatgggtaggtacaaacataataaagttatagttttaaatttgaggattaggacggaaagattaatacttcctccgtttcatattataagactttctagtattgcccacattcacatatatgttaataaatttagacatatatgtgtgcgtagattcattaacatctatatatatatgaatatggacaatgctagaaagtcttataacctgaaacagaggtattattttttaatcatacgtgcgtacgtatgtttttccaggtgttttttttggatgaatagtacttacttttctttggtacgtacacgggggattaatatggaggaattattttaacacatctaatctaatgtttaaaaataatgggtcacgtgacggcttagaagcgtttctatcatgttcagtggccttttagtatataataatattcttaccttaatgattggtggatagcagtgcatacatataattttaagtgtaacatagaattgacacataaagcaagacatatatgagtcgagtacactggaccttatacactatatactcagattaacctaagcttaaactccaaagattgaagaggaaaagatcaacatatgcacctcctattactcttaattaagacatattggtctggttcatttaatcatttttttatagtcatttaaatactaaag

SEQ ID NO: 32100 - DNA, 880 bp, Oryza sativa
tcactcccacttctagtcacccgccaccggctattggggcatcgtcggcccactccacccccttccctagctccgccatgtaagactacctcagccacccctctgccttcaccaaaagctatcgggactccatccccttcgctcgaggtgatattcttattctcaccaaagccatatgattgatcatattgataaaccttatatatatgctacttgacattacattgagttttatcaaattatgtgaccttagtgagatacttttcttgcctatttgatcaagattcacgcgcacccaccatatatgcttgacctctgcactgtaagttagcaaaaacatgtcatccatccgccaaataaacactccacaaaagtgcctctcccaaaagctttgcaaaatgtctctacaagcatatgagaaaaagagaaaagatgcatactcacaaaaggaggtgcaatcattctcaaagacttaatgttgaaagaaatagcctgtctccaaacaaaagcaaaatgagagagcaacaaaattagagtgccacttaccaccacatatccatacactatgcacatcttgatcaagtttgtatgtcttgttttctccatggattgactctttgattttgcaatactaattgataccacgcgctttgctgtggaatatgtggatgaatgcatgttatacattataaaaatgatcgagtatatgtttaaataatgtgaaaatgatgtgaagatggtgatttgacattgcttgcatgctgagttctaaacatacaacaaaattacaaatgatatgtcatgttagcatgagatctaaatactctagataataattgttagtcggtgatgatgtggcacacttgcatgttgagcttta

SEQ ID NO: 32101 - DNA, 575 bp, Oryza sativa
tagacgtgcttagtggcaaatatggcatgtctcttgaacacctccaaatgtgtatccatgtttgctctatcttaattgctttgcataccccaagctaatgattggtacatagcacaaaatgtcgtaggtgctccagaagagttggatactattgaaaagtcgtattggtgcacgtttttatgagaaaggcttatgaatcgcatcccctggcttgtcttatcgaaaggctcagggggtttcatcttttatcttatggacagatttattccatctgattattgtgtcctatgaactaccttcatcccaatataagtgcagttgtatggatgaacaaaaataatgctgcccgtagcttatttactaacatacattagctaagtacaatgcttaatttcatatttgtcaagatgactgctttccaaacttacactagtgcgaaaaataattggccctaccatatggtctcgcacccacatttgaaaactgacccgagtcgttccccttccccacttatagcccttgtaagtgcatacaacaatatcactcatcaaggcctattaccatgagttgatgtc

SEQ ID NO: 32102 - DNA, 1079 bp, Oryza sativa
aaataaatggtctaatggtatatggtagaagaaattgatgaattccgtagtaaagcggtatatcatgggaagggagaaagtctatggtaaattattgaactagtgcaaactcgaaaacaaggaggagattctctcttagttctttatccaacaagggaaatctatctattatctatctattatatactaaaagtccattaaacttcttacaaacgctctcaagccaccacgtgagactcctacaaacgcttctaagctgccatgtggcactctaataaatcggtaggcccacttttcatctattagatttccttttagaagacccattattttcatctatgagatttatttttagaaaaaaaacataatcctcctccctcctaaaagtccattaaactttctacaaacactctaaagccgccatgtgggactcctacaaatgctcctaagctgccatatggctctctaataaatcggtagcccactattttcatctattagatttccttttcgaagacccactattttcatttatgagatttatttttagagaaaaaaaaccataatcctcctccctcccctctccccaacaacccaccctcttcctatatggtatgtacgtacatacttatacctccccctcctatccaatctcctcatctctttctttctttaaagttttttacaattaaaaataatgtttttaaataatttccatatagagaaataatcaaaacctttatattgcacataagtctattttatcattcttcattatcgtattcatggtgcttgattaaccattcaaataccaataaaagctactaatttttttaactcataagaaattaaatatgatagatatgacaaaaataaaaacacttaaatcatgagtaacattccaaaataatttcctctattattttaaatcatatccgaacctttcgcatgctatcccaataataaaagaaatattgtgtagaacatagataatgtagatcatatcaacatatatcacttcacaatcatgcataattagattagctctataatatcacacaataaaatataataattag

SEQ ID NO: 32103 - DNA, 1446 bp, Oryza sativa
ggctaccccaaatattatactagtgtgattatggtgaataagagtaataccggcttcggccaacaggatgtatggttattacctgacaactcaggggcccgaacctgtataaaaatcctcttctccgtctcttttacctcagcctcgtgtataccctagtaccaacgatccccatagtatgcaaataccggaatcgcgacatcaaacgtcgacagaatgatccacagcactccaaatgctgggtactgtagcaaacctttgaattttctcctccacaacagagaggatccgaattgaaaaacttcagcattttaaatttatattagcatcttctcatctagtaggctttaatttatgtagtaactagaaagaattccgtgcgttgtaacgggtgaagaatgttttaatcgtattattattatatatatttttttaaaaaaagtatatgggaattttattttgagatgatatccaattccaaacccttgtacttttaaaagcgaatgaatttaaaaattaactcaaatccggatgacatcccaaaaccatcgacggaaacaacttcagtttttagtaatatataaatcacctaatcctaaatagcccaacaaaatcatatgttaaaaaatgatgttaaaaagaattatatgtagatgaatccttcacaaaataaatgaacatgcatccaagctgcccatacaaaattcagtatgttttgcatttgcatgttacaaaattaatgaaataaacacaaataaatctgaaataattcagaagataggctatattttacactgaggccccctttgaattggaggaaaaatggaggaaaaacaaaggaattgaaatcctacactattcatgcctttgattcgtaggaatgagaaaaagaaaaacgtaggaaactttcctattcctacaattctagagcaaaaacgtaggaaatttaacatccactctaacctcttggaaaactttcccagagtctatctctctcatccaattcctgcatttttcctgtggtctaatcaaacggtcattcctatatttttcctgtgttttgcaatcctctgtttttacacttgcattcctaccaaaatcctgtgtttttccaattcctccgttttttcaatcctacgattcaaaggggccctgagacagcccaaaatagagagacagcttgtgatagacgttgggcccttttacacttttaggtctatatgtgtagaaaacgtattggaggtggagaaaaaaaaggaaatatcgtcaaaacgctaaacacatatatgacaagacggtttgctggaacgaagagacgacggacaaaaatacgatgagtacggaatcatttttaattttttaataggtaaagatataatctaaaaaacgaaccggaagccagtagccagaaatgaagatccagcttttccaaattcttttcaactg

SEQ ID NO: 32104 - DNA, 547 bp, Oryza sativa
agccgatgacatatcatttattcttgagccgatgtcatatgtgaatcgatcggcagttacaaataagcaaggtaagactaaatctactcgatcgagtacatatattaacgctatacaatctttctgtcgatgtatatttaaatcaagtgattgggatagatcagtcgccatgccgagacagtacaaaccacttaggtcgaaatatacattaacatgaagattataaacgcttatatcatagccgatcagatagatctagcatgtatcggctaatactccgataccactctacattaagatattaaaacagatatactatatcaaacaaaagcctaatataatttattgtgataagatcttaacgcaaagggcagacttagcatatcaattaaacatataaaacataaagctaaatcaggtaagatcagctgaaaccccgatactatctctcttgataatcataaaacaagctagatatcacaattataaataacacataatagatcgaactcaaccgatacagcattaagcataaaggcgagtatga

SEQ ID NO: 32105 - DNA, 592 bp, Oryza sativa
ataccttggtgaagaattatacacattgagtgatccgagacaaacaattaaggaataaagtagagttatgtttttatgagcaaaacgaaaaacccaatgtactcatcaggaggagtggaggtaacttgaatcaagaccgttccgttcttcaatcacccaagatgacgtggtagatacttcaagattcacaagtacaagtatggcttggaataattattatgcaggtatcattacaaagagaatcatatctttgttgtgatccatgatctttactcagtgacgagtaaaagctaagtgtgggggtgttgttaacagtccttaagtaccagatctgattgtgaattcatgcataaaagcaaatgaaagaatataaaatagatatcaaacttagaggtagtggttattactaaccatttccataagtcttggtgaatatttgtataaaggtgaattatgaacaaaaaccacccaccatgcgaagaaacatacctctggccaattagaagcgagtacatggattgaagggttcacaaaccatagcaaaactgacatatttgaggataaccatcgtgcactgtcatgagggcccact

SEQ ID NO: 32106 - DNA, 735 bp, Oryza sativa
  unsure (1)..(735): unsure at all n locations
agatgtaaacngtgactnagcttgatcctgcgcccatgaagtcgtcacaaatggccccacttggtgaaaatcggctgatacatgacatgatacccatctcgtccattttcgctaaccccatacgtagttgaaatgcatctgatacctgataggtttcacatcgaacaaggattctgttacatgatgcccggtacaaatcgcatgatacctgatacgtgttacgtgatacccacaagtatcacctgaaacgccaccctaaccttactatgcctgacaggtatcacacctgattaccatttgatatcattctgcagtgtagaattgcctgatacctgataggtatcatgctcgagtcctactgcatatcattcctgtagaaaactggatccctgtatatagcagcactgttagtgaaccatatttaagccatgagcacagagaaggctctggattgatgcgctccgcgtacaacagtgtacgtgtgcgctctaacagagctgcgtgttgaaatgagtccaagagtctattgtgcggcttggacctagcttacagaccagtgctttcttcacattcttcgctttgtgtcagctttgatatcgaatgggctgatactcactctattacgatgctccttgtccgctcttccgtaaattactcttatcatactcgcgtgacacacacgttcaagcattattatgaaaatggtgtctgacatatggtacgacccctctcgac

SEQ ID NO: 32107 - DNA, 547 bp, Oryza sativa
gtacccctatcgttggcggtgacaaggtccacctcttttccgctggcaatgtgcgctcctcctctattaggatgtgtccttcgagatggttgtgttcaatgtccccgcctctcaccgtgactacatccgcgccggcatggtgtcccttgccaaccacaacaacttcgtcgcaggatcctacgaccacaacatcaaattgggggatgcccgcattgggaaaaccttgatgttgtcttctctcgtggcaaattggtggagaatgtgttgtttcggcagttcaacaggatgctagcaatcgttgggctcgtgcgaatcttggcccatcgtattgataccagggagttaaattacaccacttttaataatttaaaggtgaaaatatccatttttacggtggaaaggtaccttggatctttatatgaaaaagtcaaagtggacttactccaaagaatggtcagaatccccagaacccaaccagaaaaccttggaggccattatcggagaaagggattttaaggcttactttacccttaactggaattggtta

SEQ ID NO: 32108 - DNA, 641 bp, Oryza sativa
attcctgcaccccttgatttaacggctattattcattagatgatgtggcacattcttgttctgttttgggattgtcttttcaagaattaaaataagactttgaaagaattatttatgggacactggtattgcctatataatcacaatttaacataatgcccaacccaaataagaataaatcacatattttacataaatggtctggatcacataagctaccttccagttactacttgggagccatcgtttcttttattcgtggaataagcggaatggcaaatttacaaacgaaaagtgatttataaataaaacttttatataagtgttcttaattaatgatctaaaagcaaacgctgaaaaataaacttcgatgagaaaacctcaaaatcagctctaaatttaatgttgaaaattcaaattttggttgataaatataagcataagcgaaaagatgaggccccatgattacaccgaaaaaaaaacctctcgattaaccatgcgtcatgtccaaaaagaaaaaaaaaaaaagaaatttttaaaaaattttttcccttttggcccaaaggaaaaaaaaagcttgcagttcttgagaatgaggaggctgatggagttgtacaaggacgaggtgacgagcatcaccg

SEQ ID NO: 32109 - DNA, 1595 bp, Oryza sativa
agaaaacttttgactatatatagtccaattgtcttggcagctatggcaccaaataatgttttgttgcgaataaaatgctaaatagaagtcttaacaatgccatggcaagtgcttgcatgtagaggtgactgagggtaaagcatccacttgggttttaaaaaatgcatgctttctatgcattggagattatttacagtgtcatatctgtaggagctagccgatatgggtgctttggtaaatggtctgcctacaaatgccagcaaatgtcaaaatatctccagatttggcaagtttttaaggtgcaatgggcagaagagcacatgtgggttgtatgcttaacagcatgtctcctcaactgtaaggagttcatatgaggcagcataaaaacatgcagactgaggatggtagcaagagctgcacaagatactactagacttctcatttgatctacacggtattgaggcgcccggcatacattgcacgagggtgtggtagtttttgcacactacacacaaagtatgcagtggaaggggttagccacagtttgcaccttgagggttctagcagatataaacaacagcataatgaaataacaccagaacagtcaaagtagatgaagcacaagcaggaagacagcagtacaaaaatcaactgatttaaaaacaaacatggagactttatggtttcacactttcactaaagcgtacctccggaagcgttgggtctgaacacttcgcttggccactccaagagtgtgtgttattttgacaggctggagcgtttattttatcccgtggatgaatcaaaactgatccatctgcaacaccatgaatggttgtgaatataatgcaccgcataaccaaataatacaaagctcaaacacaataataggcagacaatcaaatttggttctctcatcaaaccactgtttgttgtgcacaagaaacaagcagaacacaacacaacagagcaattttgcaagaccatagatattttttgcaaaggattgcccccgaattttatgaaaatttgttcaaccaagcagaacaaaacacaaaatttctacaaacagaaaaaatggttacaaatactatacgctcaaaactgcagatattttgatcaaactatcacaaatttacagattgaaggtgttgtaccacgaaactacagatttgaggctaagtatatatcagaactatttagtaaaaaaaaaaagaagaatcacaaaactacaggtttagttccaatttaatcacaaaacagcaacgtttatagcccaaaaataacagtagtgctgaggattaaactctaaaacctatagtttgtgataacatcaatattaaatctgtagttttacgatactttgccatatatatgtagttttgtgataaatttagtgttaaacccctagttttgtgataacacttcaaatctgtaggtttgagataatttggtagttttgtgaaatttacacgaagagtgaaaactaagtaaactactgcttagataaaacaaaaatcagtaagccgccgtccatcccccaacgcgcacacatacaagattttccccagagggaaacgatccacagaacatct

SEQ ID NO: 32110 - DNA, 2356 bp, Oryza sativa
aaaagcccggactcagcttcggtaacttagctaaggcaagtcacagcatgacatatatgaatctcggccgtcaaaaacgaatccaacggagatggcgcttaggcctgcacgcaggcaaaaaaaaaaaatctccgtttcagcctaacatgaagcccgcacacgcacaggacgcgcttagcctcgccctcgtccgcgtacaccggcgcagcctgagacggactcaacttcgcctcgccctcaggtcagcgtacgccggcgcttcacctcgccctcgtccggccgccgccgcgagccagctgggaggtgcgccgccgcgaccggagatgtgccaggccgccctgccctttcgccgtgaccgggggcacgtggaggcggccggccgccgggcctgacggcgcggtggtgcaggcgggcggccgcacagcccgagctcagcccgtggaggaggccgcgctgctcctgccgcgccgcacgtcccgatttcggcggcctcgactccacaatggatttcagcgtccgagcccgcatccagagcccgcactggtcagccgcccacttcatcgccggcgagaggtgacaccgtcgcccagcttcgtccagtgtaggagtcactggtggtagattttttggagaacgccacaccttttcctgtgcccgtgaggtgtttgtgtaaatgccctgccgtctgggatgatgctgagtcctaattgaaagtgaattgttattgtttggctttgtgagattggaagcaaattgattatgtaatcttgattgagattgatttggttatatgactcatatatgctgtaatttgaatgaatgaatgaatcagtaacttctgatgatattttctaaaaaaatttgagatgtttgagatgttgcccaggtctatgatttgttcaggtttaaagtttggaatggacttatggtattgtctggtttatactggacatgagttgtgctgccatttcctccttttcgctatctctgctgtaaatttttagttcatgctaggtgggaggtttcatgtcttgttatgatcagttgtcctatgcagcaatgttgctctgaatctctctctaatgatgctgaatggagtgccgtcgttgctatagtgctatcgtgaaatttcatggtcagtagttcctgcgcatggttgccctgatcaatagtgggtaggacatctttggagctatttttatgcgagattcctgcaaaattcctagtacaaattcatgcgttgcaaaaaagcccgtatgtctccttcgtttcttgatacgacagggatggattgtgttttggttggcaaaatccaaaaagagcaattttgtgcatgaaatgagaatgacagaatgccgggctagggttgcgcggccgcccgcctgcaccaccgcgccgtcaggcctagcagccggccgcctccacgcggtcccggttgcggcggcagggcagggcggcctagcgcctctccggtcgcggcgacgcgcctcccagctggctcgcggcggcggccggacaagggcgaggtgaagcgccggcatacgcagaccttagggcagtggcaaagccaggatttagagatgggcgggtgccatctacgagacgtggtaactcacttaaggttcggtgaacagtgatattgtagcgttgatgtatgatcgctaactcgacatcatatatgttataacaattagctagaagagagaatgagaacccatagatcataatttgccaatttaaacagtttgttccatgattttaattggagtcttgcaatcatttttaaaatgataaatcagttaactaagtcatttcgtaagtcctatatatatagctaggcagttatcctatatagttagtctcatctgcaactaatgatgtaattaatggctagattataagggctaattatcctttggagaagagatgggaggggaggtcacataggggttaggggggtgttggccgtccctggcccctacggtggcttcgccactgccttagggagaggcgaagttgagtccgtttcaggctacgccggtgtacgcagacgagagcgaggctaagcgcgtcctgtgcgcatgtgggcttcctgttaggctgaaacggagattttttttgcctgcgtgtgggcccaaacgccatctccattggattcgttttggacagccgagatgcatggtatgtcacgctatgacttgccttagctaagtcaccgaagctgagtcccaaaagcccatgggctttcttgttcggctcacgcgcccaacccgcgtgtgagtgtgagtacgcgttctgtgcaggcccatatgcggtgcaactgcaacacccacccatttagaccttgttcggtttg

SEQ ID NO: 32111 - DNA, 604 bp, Oryza sativa
ccgtgcattaaaacagagtaaattgccctttgccctttgaaccgggagacggcagtaatatagctggtttcattttactaggtttgcatcatattacattattattgaacacgaggattgtaaaatatgagtaaaacatactgagcttcttaaatttagaccatatttcacaacatgtttttctttgattttatgaaattttataggcttgatgatgcatcccgatgttaagtgaaatttattttaaaataacttggtgtaaagtgaaagtataagcaaccccctgcaatattacttttgacatgtcgatggtgccacttgctcaagggcctacatgtcagtgattcctaccgcaggagcggtgccacatagcaattgagtccatgtaaaaacaagtgaaacacgatgcaatttacatagtgcaaagtacaatttactcttaagaataatgaagatgatgccatccacatgaagaaatttcttgttggccttgcatttctctgcactgcattaaacaaacaaacgatcgggtcatatagatctcggatagtaatagtacccttgatggtcatagagagtaggtgcacggtgcacccaaattaag

SEQ ID NO: 32112 - DNA, 500 bp, Oryza sativa
ctatctataggcccattattatctatctgtgttatgttttagaacaagctggaaatgctggttgagctcgagcagtagtagatagggatgaaaacagtccggaaagtttccgaattcccgacgtgtttttggaaacgggaagtgtcggtcagaattttttcgaaaaatttggaaacggaaacgaattccgaattccgaattttttttctcggaaacggaaacaaacatgataaggctgctattcgttggaaaccgtaatccgacggaaattttcaagaaatgaattcaaaaacagaaatgaattcgttggaaaccgtaatccggctgtgggagaacttcacggcgctgcaggaggaccccgcgctctcgccttgctacgccgaccagctgcgcctcgtgtacgaccccgtcgccggcgactaccgcaacgtgcccggcgtcgacacccgcgtcgtctccttcggctccacccgcggcttccgctccgacgatcctgctcg

SEQ ID NO: 32113 - DNA, 537 bp, Oryza sativa
aaatagtgtgtagtcccggttcgtatctcccctttagtcccgggtgtccgaccgggactatgtatctgggactaaagatagcgatctttagtcccgagtgatataaccgggactaaagatctatcttttgtcgcggttggtctcgcgcgccgggactaaagatcggtcacacacgtggcgggctgatccatctttatctggggctaaagatctatgtacctctctttttttttcacacgcccccgtttgatgcatgtatatatatatatatatatatatatatatatatatatatatatatatatatatatatatatatatatatatatatatatatatatatatatatatatatatatatatatgcgtatgtatatatgtataaatacatatattacacacatatttataatttaaagcacttaacatttaacattttatgtacatatatattaccaaaatatatattaacactaaagtaaatgtacgtacatatatatacatatatatatatatacatatagggcgtgcaggaat

SEQ ID NO: 32114 - DNA, 723 bp, Oryza sativa
ctagattacaaacgatacgtcatcggcacatgtacgatcggctatcgtttatgaatttaactgtgtgtctttctttgtttattgttggttgcaggatcaaaccaactagcatgcctttgaactcgaaaccaagatttggacctgcactagagttaagcagatatctcaggccagtgtgtgtttttcgcatcaacatgcttttggcacgcccggtgggacacgagtgtgacaagcttccatcatggtggacatcaagtctaccgaggtggatccagacaatgtgattccaataaccatggacatgctaacatcagaacagaagcaagggtttgaagggatgataaatcaactgcaaaatcggtacttacattcatttgttctgactcgttcgggtacagtaattcaaagacacaaggtggatttgccaccggttgatgagaagcctcctttggggaaaaggtgttttcccaaaaaaaaggctctgtaatgatgataacttaagaagtcaaagctgaagactcaaacgggaggatgatggtgctccagagttcaacaatctacaagatcgatcagtgtggtcgtgacactgaaattttgatttaaaatttgattccattttgctctgaaaaattcaatttgaataattgccacaaaattcaaacctaaatgcaatttctttaaaaaaattcaaacatgctttgttgcagaaatcaaattgatgaa

SEQ ID NO: 32115 - DNA, 658 bp, Oryza sativa
atctcacttgtagcatccaagttatattgcgtgaaaaattgtgaatttgtaggtagtgatgtgtaaccatgtataggatggctagtaaaattcaaaatatttttttgaggttttttgttgcgtttaaaattcaaaaattgtatttcttgctttgtcatcagtgacgggtcgtaagttacaacccgtcagagatgactcatctaccacggacaggtgggtactatgcgacagtggtgacttacgtgtcacgggagactggcatcaaccaccactaaataatgactataaccaacccagatgggtgatatgggacgggcgcgtcatacatgacctgtgacggcgtcatgacaaaccactcttctctgccctagacctgctcctgtactagagcgggaccttgcatgccagacatgacctgcccctggacatcgacatgcgctcttaggacgccatcggcaagctagaggtctaccaccataccttggatgccccccatctcatacccgtggacgcggacgagcacgctcatgacaacgccgaagacctacttgcgctacaccatgtacacgacgtgcgtaacctggccgcacgagctcatcatgagcgcctggacggtaaggaggaagatcctgtcgccatatcgctccacgtcccgccg

SEQ ID NO: 32116 - DNA, 713 bp, Oryza sativa
cgtctcgaccagtgtggcggaggtgtccttcgcgacggccgcggcgagggcgtgcgatggcaggagcagcaggaagacgacgatcgtcagcgccacccgagtcagagtccccaccctcccggtgccgaggacggcgcccatgaatgaaagtcgtcgccttgctttgcttcgtctcactatcgaaattgtcttctttgctttcacgagttcttctgatctcagatgttctttgcttcttgcattggtgctgcgtctgcgagggtgtgttcctttatagccgtggccactgcagatcacgtccagtttcggacgccgattccgattggtgtcatggaactgaacactgaagccggccgactcggagttagcaagattaatgcggtcgacgtaattagaccattaatctgcggattcggaatcggcatttttatgggggtgacgtaatcaacccgtttaatatcctggacctaattagctcatccacgtaaattcagccgatctaagtgcttgcttggacctggaaacattatacactcgccaaacttccgcacccgtattttttctgtgctccaagggccttcctgggatcgtggaaattttatacgcgcgcaaaacctttacgcccgtattttttgtgcaacaagaaaacatgtaaaacaaaaataaatattttttggtaaatattgttttctttcggaatacatggtagactc

SEQ ID NO: 32117 - DNA, 572 bp, Oryza sativa
cgaatgatcaaacattgacaaacgaaaactcaaaaagacaagtaatatgggacggaggtagtaataataaaaagaaatactcctaatatatcaaatcccaatgcaattcatctctttatctactcctaatctattatattattaaaacagctttgaaaggaggccccacgttcgctgtgggagctagaaaatcacacattaatcggagaaaaagaaaaaagaaaaaggagagtctaagtagaagtacaatttaaaaatagctgaaattcagaattaaaaataagcaatattgaaagaggagtccatataggaacccaatatgagattaatcaaaattcgaaataaagataaaataaaatccaaaattagaaaaggacatgagagttcaagtagaaatacaatttaaaaatagctgaaattcggaattaaaaataaggaatattgaaataagtttccatataagaacccaatacgagattaatcaaaattcgaaataaaaataaaataaaatccaaaattagaaaaagaaatgagagtccaagtaggaatacaatttaaaaatagctgaaatt

SEQ ID NO: 32118 - DNA, 1117 bp, Oryza sativa
ccagcatgcatctcactgtgagatgggcaaccgagcaaggaggaggccaggagggagtggcgacgaggaaaacgagcagcggaaggtcggaggcagccggcgtgctccctccctctgtccctggcatcctccctcctccactccccacgagcccatccatggcgaggtgcatgcagcagcgcgggagaaactacgacgagcggcggcgcggcatcagatagggcagcgcgggagaagctgtgacgagcacgagacaagctgttggatcttgaactcgtgctcgccggcgacgaattcaccggtgctcgggagtgcggctacagagggggacctgggggaggggggaggggggatctggaggtcaccagttcttggaagggcgatgcagagggggagatcaagctcaccggcgctcgggggtgcggcaatagaggaggagctcaagctcaccaccggtcactcggggacgagagaaaggaaagaaagagctcaccgccggctgcactgtgtggggtaagagagaaggaggagaggaagagaggaggaagaagaagatgacgtggaattatttgacaggtgtcatcctacgatacgtcctcgtgtagcaaaaccacggtaaaacagcttgaggggataaaatgtccggtattgatagttagggggtgtattatatccggttttgtagttcgagggtttattttagacgaatataagaattcgggggtgtaaaatggacttatcccgtctgcaaagctagcctataaaaccgggggctcctagctagcgcgtgctcggctgctcgctgctatcgagcactcctcccatattaactacctctattaaaactattagttaatatacttaactacctttattagtatttagtaatgatagtaattaggaaagattgtggagatttttttactaacaaattgaaaaaattttaagttaaatttgaaaactttcgatttaaattttaaattagattaaaaaactttcgatttaaattttaaagtcaaattttgaaaactttcaacttaaatttgaaaactttcaacttagatcgaaaacttttaactcgagattcgaaactttcaagtccagatttgaaaaattt

SEQ ID NO: 32119 - DNA, 1555 bp, Oryza sativa
gcctccctttatttattatccttatcggtaatctatcctttttatcgatctctctcaccgtctctctctctctctctcgcacgcgcgcggcggcagctcgaaagagggatcagcggcgcaagaggggaggcggcgggtgacgggcggcggcggcgcacctcgccgacgggtggctgcagcaccctcccctccgcgggatccggcgggaggggaggcggcgctctcccctccaccggatctggcgagaggggaggcggcgggcggcggcggcaccctcccctccgccggatctggcgggaggggaggcaacgagtggcgacagaagaggggctcgccagcgacgaagcggatggtggagcatgaagagggctctcctccctcgtctcttgtagatttattttagatgttttggtcgatttgtggattagagtatgttcattctgtgatgtcaattgattttggtagcgatttgtggatgatttggggatttggggattttaaattgatttcggagcaactcgggcgatgacgcagtaacagtgctcagttgagtttggctcaattcgagctgagccggtcccttttttttttttggcttgagcaaagctaaaggtgtcggttttattttcttcataggtgccggttgctactattggtgccgaccaataggtgtcggttgggaaaccggcacctatagccgattcccaaccggcacctatggccctttctgtagtagtgcctgcttcttcagccagtctctaaggtaagaaatcgaagtagcgcaccatcatcgatgtcggtaaggatggcggaggccagccgcgatgatgtcaacggccacggaatgaggatggccgagagctttccacgacgacgagtgagagcttctcgaggccttgtggtggcgaatctgcatgctcgaggcccaaagacggcagatccacctgcgtcaagctcggcggcggtggatctagattcccaaggccctatggttgcaaacctgatgctcctgaggccggtgacggcggattcaagctgtggaggtcacatcgctgtcatcacgatcgtggtcacagtcgtcatcactattgtcgttgtggtggtggtcacggtcatcgttgcaggcccaattgatgtccctttgactcctaaggcccaccaactacgggcgtggtcgatgacggcagtgggcaggagcggagcgttggctgtgataggtaggtacggaggaggaaggccaggagagggaggacttgggggaggagatggggatgggggagagtctgctcgctcgggtgggaaggaggtggagtaggtggtgagagagccaagggagaaggagagatggaaaactttggctctctatgtgtcaaatttaatagtgcccccatattttgtatgccggtctttttaacccgcccataaaaatcgatttttagaggcggggttaaatctacgggcttcccgctatttatacaagtgataacaagaagtaatattttaagtccacctgaaaaataaataaaacgtatgtatcggccaaattgttttttat

SEQ ID NO: 32120 - DNA, 779 bp, Oryza sativa
tttgctcagtctgatctgatctgctaagagcaagttcaatagtatagccaactactagctccaattcatctatggccaatctaataactcattcatacaatagttacgtactacactattaatacctagtcctacctgtcatagacacactgcgtcttggggtccgtgctatagctggctacaaatctatagcccgctgctcttttctctcctgatttatcttcttaaaatatgtttgcagctggcttatagcctgctattgtacctgctctaatagcttgttctcagcagacggagaggacctgtgaaatttgttgacgaggccaaagcaagaactactcctttctttacatgaaaaatcaacccaaaatgtgacgatatttcttcgtataataaatttgaacatactccctccgtctcaaaaatatccattcctagcatcctaaggtggaattagggcatgttcagatccatttgaaatggcaaatggcaaataacaaaagttttggtagcaaaagatttaacattgcaaaagtactaattggtgtttatatgcatcttaaaattttgctattttagcactaaagagagagggtgtggtcccggagcactttttggcaaaatttgctaccatggactagcaaatgccaaatgccaaattgccaacttttgctactagtgtttagatctaaaatggcaaaaagtgcttcaaaatgacaaaacttttaccattttggaagatccaaacagacccttagtataggtggagaattattaaa

SEQ ID NO: 32121 - DNA, 1076 bp, Oryza sativa
tgtttacaggttttggtgtagaagttttccctgggacaggttttcctgcttgttcaggtattgactttgtagttgaagattcctgagcaaggtctgttctaagtgaggcaataagtgctttgatataatcagcggacaagatttttaaaccatcctgtccagcgatactcatgaaattctgcttgcttaaacagttcagtatagcgtccctcctttctagtgataatacactggtccctccatcaatgtcaggagaggtgtccttaatgtcttgcccagacattctacggagaattgccatacatggttgtagttgaagtggcgtctaacatcttcaagagttctcttgtccaatccacacttgacccatgcatgttctacctgtatgaaatgtaattaacagtcactctaatcagtacgaatgttttttcttttaaaaaaaaggatatacccaacatttgtagtcatatccaacaaaaggcaacattcaccagttaggaattaaacagccattgatgccacaaaatgttaggttctactagttggatcgaaaataattatattcactactagtcacattcctctctccgagtcttcatttgtcatgtcataacaaggaggaatctagcacctgctgttaaaggagagaggaggccaggagggggaggggagagaaggaggcaagccaaatttaacagtttgattctgttaagccagtgtttaaatcacaacaccatcacaatcaatgcaatggtgcacacctatcagactggtttggatgtagaggctgccattttctaaaaaaacaaacagactacctcagccataaaacacaagaagaaaatgattcaaaactctgttcacagaaaggttaaccttatgtgatctgtcatccaaagccaaaaaaaaaaaaaaaaaaaactataagacacaacacaaataaaatcatggttgcctttgggaatcacctacagacttcagcaaccttattcgtctgtctttcatgcaatttgggaaacacgagactacaagagtacaagaatactctgcatgtcccacaacaaataagtaaatgt

SEQ ID NO: 32122 - DNA, 901 bp, Oryza sativa
aaacggcttagctgggctattgcctgaccattagctgggctattgcctgaccaactagctgcaggagaaacggcttaacggcaggagagatgaatggaagaaaaataaaatcttgtcagagtaattgggttattgtctgaccaacaaaatgatgcatacttggtatagattcaaaaaagaaattatgtacttcctccgtttcataagtaattttgttgagttttgtctaaagtcaaacttgaccttttttaatataaaaatgtagcaatatctacgacatcaaattagtttcattcagttcaccattgaatacatttagtatatttccttttcttttgaaaattgttctccatgcaacaagcatttcaggagagttcacgcaggataggaacacatgatgtttcagtttaaaggttacatttgcccgttttgccagttcatgtggtgctttttctatctctgtctaatgtctatacatcttcctttctgtggttgtacaaatgtgtaaaagaaaaaaaagtgtcagactatcagtcagccggttatccctgccctaacatagaactaggaggtcagtttccttccatttcctgctaaattttactttccatagcatcccttccaattatgtgtagcctcagttttgtgcaactcttttgcttgatagaatcagaaattcaaaagtgaagaatgcagggtcggaacagataacaacccaacgatagaagatcgattcagttttaacctgttttggcgttatcatttcctgatgaatttttctcactgagtgtgcacggtaaaacataggtatgttgatctaactttcatcatcagaacttgagctagagctatctgccctcaggtgttgaatcgccggaaaaagattaacccgtggatcacg

SEQ ID NO: 32123 - DNA, 562 bp, Oryza sativa
aaaataaatttatctttaaataattattgtattggagtttgtcaaagtaaaaaataattatattagaaatagataaagtgatttatagttgcgttaagatttatgcgatgggtgaaaaataaaattattttactactaaatcaaattctaaaagaaggcagtctttgcaaaaaatcgacagttttcgacgaaatatttgaaaaattccaaactagtcgtaacttgacttccgggcgaatactcctacatttccatggatcccgcagcccacaggccgagaatccgggcccacgatcgatacggccctgcgggtggggcccaccgctggcgcccgaaacgctgtgcgcggcaaaaaaaaaaaaaaaaaaaccaaaaacccaaccgctgcacggttctctcccgatccgacggccaggatggatccccagcccccacgccctccaacgccacgttaccgatccgcgtactcgcgtctcattggccgcgccctcctatataatcccctctggtccccacccccacctccaacctaccaagccgaatactgattgctcgctcgctc

SEQ ID NO: 32124 - DNA, 588 bp, Oryza sativa
cttgctacaagatgaaatagaaatatccttattcttgatctgtataaattcaagaactatagaaaaaggatttctgtccacattctggtcagtaaatacttatggctaatggctagtcctaatcacaggtttgtcatcagaaatgaacatgcctactatattccctaggtggaaatatggatctttttccccatttcagaagataggtttgaaatacaaagtatactatatggacaaaacattactggagaaacaattgttacagcgaagaattcaattaccttggccccaagagccgccatgatactatcagcagcccatggcatgttgttgatccaaaccaacacaaatggaccatcaagggatcataactctgaaccttaaaactcaacagaaagaccttgataagaacacaaatactttccatttagtttttgacattttacagtgcaattcttgagttggttaatggcatattcatatgccttgctgcctggggcagcaattaaaaaaagacttccataatattttctcagtttggactgaagacatcattttcctacaaatatgccgatattcttgaacttc

SEQ ID NO: 32125 - DNA, 583 bp, Oryza sativa
tcctcaacaagaggtaaaacttgttatgacggcttgcgttctcgggattagtgcttccatctttatgatactctaatcttgtctatgtaattcgtcaagttatcatatatcttacataatctctggcattatcgctatttaacctattatcggctaacatctgtcggtagagggcagttatagttaaacatcgatgttgacttagattatataggatatctaccactctatgaaacttccagcggcttgattgtctagatattgttctttttttcatacttaatgcggcatcagttgagtttgatctattaagtcgtgcttagaatatcaatctctagcctgccttctggttgccaattagaatagtatcggggtttcagccgatcttacctgatttaactatattcaccctatatgcttcattgatatgttaaatctgccctttatattaagatcttgttgcatttaagtatattaggcctttgtttgatatattctacttgctttaacatcttagtatagagcggtatcggagtattagccgatacatgctagatctatctgattggctatgctatgaaca

SEQ ID NO: 32126 - DNA, 577 bp, Oryza sativa
gctctgctttcatttcttctctggtgtttgattgattgggtgtgttgatgatttctcatcgtttcaagatccagatgtggtgcacctacagatgcagtctagttgcaaaccctagctgctaggctgtgtttagttcacgtcaaaattgaaagtttggttgaaattggaacgatgtgacgggaaagttgtaagtctatgtgtgtaggaaagttttgatgtgatcgaaaaagttgagattttaaagaaaaattttgaaactaaacacagccctagtatcagatcgttagtgtttaatactactactatttcttctcgcccggcggttttatttttttgctttcatttggttgctcagttggaccgatggatttgccgattcatattcaacattattataagtactactccaagcatggcaacaatcagtctgattggttggtcggctggattgattgagcttgggtctggggattattattatcattatcctatttttacttggaacctatatttcccctggtttacatacacagccagtgcgcttttagcagtatgttttacatgctttactttacat

SEQ ID NO: 32127 - DNA, 585 bp, Oryza sativa
tggtttgctaattgtaagttagaaaattctaaatcgttatgagtcattcatgctaaaatgcattttcaatcatgtgatataaattaaataacatgatatggttagaggtaatgacaagcacaacatgtctatagatgagaagcccatgtatcagatgctaacattccatggcaacatttaacaatatcatcgacaagcaaaataggacctatagagagaaccatgattctagatcaaactgcactgaaaggaaattctgccattataagtacccgactaacggaatcagcccaccatttggggaattttcttttactaattagtttattaagaggcaagtattcgataagcaaaataggacttagagagagaaccatgattctagatcaacctgcactgaaaggaaattctacaattataagtacccgactaacggaatgagcccaccatttggggaattttgttttactaattagtttattaagaggccagtactaattgtaaacagattttcatttcatccactattatcttgtcaaaagttgaatactaaagacaatcctaggcacctggcaagtcttgtaa

SEQ ID NO: 32128 - DNA, 624 bp, Oryza sativa
tgttttagtttatctgcagctgggtagtaaaaggctagtggtagctaagcagcctagcagaagtgcagagaacaaattaactagagggtgccccgcgcggtgcggcgggaaagctggaaaggacggcataaaattgaagccaaaaaaaactgtatatatactgaacataatgtagcaatttaacaaccatgaatatacacaacatataaattccgtatatcggttgagattacataataaaataaccaacttagttttagttggatcccaaacaccacatgcaacaatgcaaaaataacataacaatagcacagaactgtagcaaatttaattatattctttccagataacatatgtaacatattgtgaaccacagacatgatgcaatctaatgcattttagttgagaagagtcatgcaaaaggcatatcaattatatgttccaaaggggccaacaatagtaatactggaatagaccaatcattgcttaagcaaatgtggttgaaaaacaataagcatgcatctttatttgtatccccatccactggaaacaacgtcatagtattttcttttcttttttttttagaattacccctataaacacacgcacgcaaaccctacccct

SEQ ID NO: 32129 - DNA, 614 bp, Oryza sativa
ccacctcgctctggcgctgtcgagcgccgccgccgcagcacccgtcctccgctgccgttgccatcgccgagcgcccctgctgggtccttcgccgccatcgccgacggccgctgctccgtcctccgttgccgctgccatcgaagatacgacgttggtgacggagccggcatcaatgaaggcggtggcacagcgagaagaggagaaccgtatgtcaccaggctctcgagctcgccccagatcagtgccctctgtccttctgctcgtcgtgaggacccgccaaccatgacgacgcctcattcctcctttcttctgtgctcagccacggcaacaccaccaccatcgtcgttcctgtcgttgcagcccggtgagcgttgatgggaccggcgacgttgagtagagaggagaataagggtggaggtggtggcggcggcgacgacgacgtcttggatgtcggtgccggtgggggcgggtgcggcgtccgttgtgggcggcgttggagcggcgctggcctgacacagcggagagtgccacggggcttcggttcctgtaacctgagggggagatgatgggggagtatgggtgccgacgcaggcgaccgtggtcttcgtcgtctc

SEQ ID NO: 32130 - DNA, 571 bp, Oryza sativa
aagagggtctaaaaagcatgtgcaaatctaagaggggcatttgataattgtcaaacataatagtgacaaatagttaaatgtcccgttggcacaagaagcgctagctttagattattagatactagaagatctgcacgccctgttgacgtgccgcctaatttagcctgtaatatggttcatctgcaaaatatatattaaatttgcctatctctcattttatattatttgtcattgtagcaaaatttcacatcaaactaggagatgtgcaaattacactgctatgcttattaactacattatagttttcaaaagcaatattaactttgattaacagttatacatggcattgataaaatgtgaagatagaataccgcgatctaaaataataatttcaaatgtgagaatgaccagtaatattttgaaacatacagagtaatatattaatggaatttaattttatgtttccttagaattatgagaaaaaccaaattaagattgtaattaatgatgaccaatagtttggcaaatagttagatatttccatattggaaagtacgaattaccccccgaa

SEQ ID NO: 32131 - DNA, 652 bp, Oryza sativa
ggtaggtttaggtagtataaggtttagttgtttgctagtcgttgctagagttgggtagcataacgacttgatttggtatcttctttagccggtgtcaacagacagcatgacggttagaggaataggaagtttagcggtgtggaagtgttactccgacaaccgtgagtggcggcggagtggttaggatcacacagagctcaagaactaactgtgcggcgtgctgtaaaggtcgagggaatagtgagctccgaccgttgtacgcatcgaggcgtggagtgtcgagagcagcacttcgaccttgggtttgggttttgccgggctttacaaccaacggttcaacgtcggggatagtaaaccgcgaacgtccccatggaaggcgtaaagattcaaccggcggctttttagtggcttaaggggtagtttgggataaaagaaaatatttgaaagacaaatataaattcaaaaaaaccggggggtatttgaataaattcaaataaaatagcaaattgcgtttcaaaatgaagcatttgaaattagatgaatttatgtccaagttttactggaatcggatctactggttaggagatatgggcttctaaagaatatgatttgaaataaatctaaaaatgtgaaaatgcactgtgtataggcc

SEQ ID NO: 32132 - DNA, 684 bp, Oryza sativa
gtcacatggtagagcaggaggtgagcagtgagggaggggattggcggtagaggcgaggtgagcgggctatcggcaatggagtacatcatctcagattctcagtccgctccccacttacgatggagtccgacagtcgacagaagcatggcagcataggcgacagcactgtggccttctccctcaccctccattgtctctgcatgtggactgagaaggaagaggcgatctagcacaaatggatgcgtagcaacagcggaggaatgtaaaattggcagatccagcactaaaataagcaatgtagtcacattttcaagttttcatttgcaacagcagcatcatgcaattgcttccatagccttaccaacaaatataccatccttatttcatctctaatttcatgaaaaaattgtctattgttattcttaatttgtgcacaatcagcaaaaattccgttctgctatcatcagtttgatgggtactacttgaattgcttgaataataatttaacaatgttattttcttctccattgaaaatctatgaataaatcaaaactatgatcatgaagctcaattcttgtaaatcacatcatctagatgcattactgaaatcagagacaaagattatgaacagaggcacggggcgaggactcaccacttgttctgctagctgctgctgctcgcccc

SEQ ID NO: 32133 - DNA, 1112 bp, Oryza sativa
  unsure (1)..(1112): unsure at all n locations
cgaggcctaccaaaccgatctcgacttacccctcccccccaggcgcctttctcttgaagctaataagtggcaaggtgccctagcccctgttgttcttcgttgtcttagcaacataaagttcatgccgtggagacgtctctgcctcctaaccttttgtagatatgatgcccctgctactacccttctccaaactcatggcttcactttgttgtctacttgtgtccaccacgtcctaggccatcctctaaagccacccttgttacttnncctaccttcatcacctcctaaccctcgaaacccaaacatataggttgaaacatgtgaatatttaaggtgacggaaaatccagtaatctccttttgcattgttcacattatctagccactgtcttttaaaaacatacgaggtaaaattgactagcggatatttatatgcatttttaatcactccatcttctcatggttgttctctttatttgctgctccgtatgaccctgcgatagctgtgtatctagaagggcatgggtggtccgattgatagaaaaaaattaaacatcacaaatataactatgccaacatatacaatacatgtatatctaatagaattggccaaaaatgcatcatgatatattactatcatcttacaaacatcttaaaattaacgttaagtaagaaatttgacttgaagaagcttatacggctacaaaagtttgaagaaggttaccccatcatcttatnctgagtttattcttctgatataactgtgggaggcaatcaagaagcattcttctatgttccatattactaaagaaagatgtaatattttcatctttcttcacgtcttaacaatccgtaatacaataagtacattttgagatgagaagaatccaaagtaaaaaattgaaaagaagagtacaagtctagaagacctattcagctaatcaataatcacttaccccttggccacttgcctttctttcttgatgtgtccctgcacactgtgacaccgtgccgtcaccggccggcgcactcgcgtcccgcccttgctgccttgctgtcgtcacttgatcactataggctaggcggcgggaacgtgtaaataggaaaccagga

SEQ ID NO: 32134 - DNA, 506 bp, Oryza sativa
tttgggaagccatatgccgcaatttatcctcctggtggagctttttcacatccgttcatgcccctagtaagcatttcattttgttcacctatctatttttcagaacattgcatttaactaaacatggaaggcaccatggatttgagtcaactatcacgctttggaattaaagcgatatccaatttgttaaaatgcttgcataaagccatgttaacatggaaacttctctatgagcagaactaacacgaatgatttctgccgttcgaagtattcatgatatgtagttggaacttggaaaacctatccttgcagacgaattatctctacatgaaaataaattcattcatatattgccattttttctgtagaaggaagctggattttttatttttttttcttctgtggaagtatatatgtatttttaaatcatttgttcaattgttcttttctttaatgtctttcttgcttcacttgtgtgaacgttctgtgctgaattgctaatcgtt

SEQ ID NO: 32135 - DNA, 649 bp, Oryza sativa
gttggtttatttgtggagctaagtttccaatttaaaagactgtatatatccggttgggtctctaggtcgggtaaaaaatacatttttctaaaataaaagaaagatagtatagatagaatggctggattgatgagaaaatgatctcaacagaacctagtagaaagatagtatggataaaatggctggattgatgagaaaatgatctcagcagaacctagtagagaagaaaaaggaagaaagaaagatggtgcctctggtaaccaataggcgaggatgatgacattgattagtgacatctgtgctgaagaaataagagcagtaatttttttttgagaccaaaataagagcagtaattgacaagctagtgtgagaagtggatggcagccatgtgtcttgcagttgcaggttggatttgatcaaatggaagtcaaacatatggcgatgcttacacacgacttttcaggcgatctgttgcatgcactcacactgccgaggagtaaatcaaacatcggactagttgcatttgttctataaacaaaatagtatagtagcaggggcgtatatatcgttggggcttgtcagggctcaagccccagctctgccgccaaatctatcatcccttgcaacatagtacagtactgatagccaa

SEQ ID NO: 32136 - DNA, 560 bp, Oryza sativa
acattgattctatagctgaaagctaatgaaatcactgatcaatggatcatgtcaaagtcatccctgattagcgggttgcgattaactggtggaggaaagtttctatccacaaattagaagtcgacatctctgcagaactggacctaatggtctacttacacgtgaattctcgcatgcagttcgtgatggtacaagttgtggccacacaaaaggctggacctgttctgttcatctcttgcagaggattttcacccgttttgtcttgtgtgaaaattgacattgcgtagtagtaaccggtaagccagcgatggaacttcagtcaacaggttgttctcatggagggattacttagcagtgtaggcaacaatgtattgaggccgtgttttctccttcggagaaaatgacgaatatggcttctgttcttaattagaactgtccttgttgctcatacatggattacttaactgagtagacaagttaataagagatcatatagagggatagtgcacagctaggagcttaggacgttcgaaaataacttccaatccaatcgattgctt

SEQ ID NO: 32137 - DNA, 1172 bp, Oryza sativa
catggtgcgtcatttcaaagttgttttaataatataatagatagatagatagatagatattgcttgacagatgtgtcctatcttacaggtttggaatcctttttgttggttaagaaagcagtaatcgcctgttgcttgctgctcttatcagctgtcacagacaaaccctttggcttctcaccctcttaaccttgttcacttttatccagaccagataatatatgaggtgagtgtttttagatgaacacaatgggaaacactgcgtatgcagtcatggaattatttttatctcttagattgttaatggcatggtgtttccttttctggatgcttacacagaaacgaaatacaaatagggaagaaaaaaagaagaagaaagggatgaagtacccgatttcattgtgtttgaatcttctctgcactttccagtttcatcgtaccatttggccatttgagccctttaggctcgtgcttcgtgtccaactttgtagccaccgaattactgcaacttcgtggggattaatcgagattttgatgtgcactctagtctatcttggctggccatccaacttgcccttgtcctctacgggttgcaagtggccacgcacagttgcgttggtctacgcaccgtagatcacgccgctggtgtcgacgaatttaacttggttcaagatgtgccatgtgtgccgtgtgttgccttgtccgggaaagatggaaattctgaatgtgtggtttactagtacaaggattatttcatccaaagagggaaaaaaaatctgcgagttcccttcagtagaaaatgggtagcagaacattattgttttaagctgagttctagatgtgtggacagttttccatattcagatgaaattcagtccttaatttttcttctaagaaatggtttggttgagagggttagaaacagctgcaactgtgttttttctcctttctcaacgaaaggcaggattgctaccgtcggattgagaaggcaaataggtatttataatacagaaacgagtttacaggaggctataagtactaaaactcaggcctgtcgaaaaacacaggctgatgaatgatgattgaatgaacagagacaactgggccttaacccagtgcactcactactctgaataatgatcaaagcacttatttgcatgcatatctaccat

SEQ ID NO: 32138 - DNA, 1009 bp, Oryza sativa
  unsure (1)..(1009): unsure at all n locations
tagctcgctgctcttctttctttctttatctttttaaaatatatttatagctggcttatagcctgctagtgtacctgctctcacgtacactacagtatatactactctcacgtactgtactcctactagaagtactccactccgtactctgcacacgctcttcgtcatcatgcacatctaatcatcatcgtctcttcaattacacaatatacagcctctcgtttttctttcaaaaggatataggagtagcaaagtactataactcgtacgaataacatgaatcgcggtatttctttgtctaaccagaaaacataaataaacttttaagggcgcgcacatatatattaatattgacaaccagtagtagtagtttgaatcgcgacgagtttgcttagaatgatgtgcttttgttggaacttgctaaagaatctaggattggaaacgagctaccaaccaggaagatatgcatgtccctacgctgatcaaagatcacctatgcctaattctcacaggggctctaaaaggattaaatacactaacttttgggggttacaagtaaaactaattacgtgttgtcgaaaaaatcgtacctactcccttctccacaaaatgaatcatntctgatttacccccagaagctgattcacttgaggatagagggtgtgtatatatagtagacaatatttactatgggacataaaaaaacgtgtaattagctaagagacacagtaaaaacatgaatttgttgaaggacaccacagaaaatcggtaattagctgctggacacttgtcagattattttattatatccgaataaattggagagataaacacatgtataactatagttttaccttcaattttttttctttattcttccttatcttctctctcattctttctctctttctccctgctctttcttcaaccgaggacggctgcacagcgaggcgtgggccagtgtggcgcctcggacggggaggcgctgcgcggtcatgcgcaggggttg

SEQ ID NO: 32139 - DNA, 780 bp, Oryza sativa
ctaaaatgaatcttagctgatacaagtaaattgaattaccaaacaagattaactaagatataagatagataggtgcttacattgacaagatcagagtatcgaagccctagccccgccatgcaaacatccttgacaagtataaaatcgtcaaaaaattataaaggtaaaatagggtggtaatgtgccgaatttgtattgattgtggagataaattacaatacccccaggtgtacatatttatacccatgggtagatacgagtccttattggacaagaaagaaactttactaaagataaaaggaaaacataaagtccttatcggacactaaacactctttcctaaagataaagaaaactaacaaactctttttaattaatagataaactgtcatgtcgcatcctccttgaactcggtctcttgtgtataaacttcctttaattgattaatttccttaaccgaatatagcaaaaatccgactattggcgacttgataattcccatcggccgattcgagtactctaaaaccgatattaactctaagccgatgatgacttcggggcttaccaaatttcactgttaacaaaaggttccagcggctactcaaaccccctctcctctcctagatccgacagtcgatggatctggggctaggcagtggatccaagggctcggggtggtagggttgccacatgcgatggagcgggaaacttggtcacgggaggcgggcggtggatcggggcgatggctcggggggcacgggcggtggagctcagccatgg

SEQ ID NO: 32140 - DNA, 756 bp, Oryza sativa
accaactgccgccggccaattgccgccaccatcgtcgccacaccgctgccgccgtcgccaactgccgccaccctccagatccggtcgagaggcgcggatctggggggcaccgccgccgccgccaggcactggccgtccagccacgggaccaccgtgccgcctccgcgccctcggccagctccgtccccgccgccttcagccaccgccgccccagcgccgcgcgcccccgccgcctcgctgctggggtcagagctcggcctcccacgccggatccggacaggagggggccgaatccggccaccccgccgcctccacgcgcatcaccgccgccggcggcctatccccccgcaccagatccgcgcaggagagcgtgggagccagcaccgccgcctcgtcatcgtcgtcggcccggttgcccacctcttcaaccgtcgtcggcgccgccacctcgccgacaccatgcgccaccgttgatctcgacatcgcagccgccgaagtcgccgccccggagctaggtcggagtcgtgggctccaaacgccgcgaccttggggggggagaaggccacgccgccgccgtccttgcggccgcgcggtttccggcggcccgctcgggcggcggcgaggtggaaggagggcagtgggggtggtgtggcggcggcggctgggtcgcctcccgtgtcgcccctgccctaggagcgacgcgggggcaatggtgttacagcatcgacgcactaaatccagaatgaatcggtgtga

SEQ ID NO: 32141 - DNA, 660 bp, Oryza sativa
aaccccccccccccccaaaaaaaaaataaataaatctaggggttatggtccaccaaacacgcttgttgcacgagtattgctggtatgcttagaatttatcacataagtcatgttctataatctattctgacttgcatcctatttcgtcattgtatctttttgatgcgtgaatactctcacgtttcagcatcatagcttgttttgctgctacagctcatgcaatgattttaatgagttcagaatcggtacatgaattcacatgttttttttatgttttacccaaacgaaacgacatttatcagggggaagtactagcactaaaaaaacaattttgcccagacctacgttttatttttatcaggtgggcttaaaatattaatgcttgttaatacttgtataaataacgggaagcccgtagatttagccctgcctataaaaatcggcaccgtcgatcacaccaacttggtgggccttaggaggcaaagggacatcaattgggcctgcgacgatgaacgtggccaccaccaccacgacactagtgatgacgacaatgaccacgatcgtgaagacagcgatgtgacctccatagcttgaatccgccgtcaccggcctcaggagcatcaggtctgcaaccacagggtcttgggagtctagatccac

SEQ ID NO: 32142 - DNA, 874 bp, Oryza sativa
attgaaatgctagtatattcgcacgaccgtgaattgttagctgtaaatttcttttagtaatataagataacttctcacatagaactgcgattgagcactacttgtcatttttgtttcttgtaatgtagcgtacatcttagtgtaaaatcctacattagtatatctatatactagttctacaacctacgtcccaaataacttaatattttacccatctcacacataccaataatgatctctactattataaaaattgaagatgtttttaccgatattttggtacgtcatccgtgtattagtcggtttttaggttcgtttgcttttggaaatacatatccgtatttgagtcggtttttaacatcgttcacttttggtaatacaggtggaatcatataagaaatttgtttaaaaaaactcgcatgctaacttgagacgatcgaactcctaactgcagctcatgattatctaaaaatatatatatccaagcgaactccccgcagtgaatttcatcctaactaaaccatataacaataataagattaaaatagacttcacccgttgtaacacactagcattttttttctagtaataataataaaagaaatactcctaatctatcaaatcccaatgcaactattcctctttttatctactcctaatacaattattttttacttttataaactctgatataatgattcctccaaaaataaacttatttagggacaaaatggactgagctaaaaataaacttaatatgagacggaggaagtagttaacacttactaataatcatttaattgagaagaatataattaggctaatcttgtgataatgaccatataaacatacacatacacactcctattactat

SEQ ID NO: 32143 - DNA, 833 bp, Oryza sativa
caagtttagagaccggccatgtatttcactctttaatttatcctgagcagtaatcaaagacacacacaaaaaaaaaagcttaagagcggttagaaatccgacctcaagtggatatttatacaaccataagttacattcttaatctcataactgaaatatataacaaacaataaagaaaaactaaaacactagcttcaagcttttcctccttgcttcaaacttcaagacaaagcagggctacgtctttccgccaccctgcctcctctctgttcttgttgccatcacataagctcctatgtttagttaagagcaaagaaaagggacggaactagtccgactagacaccttgtcgttgctaagcaccccacctcaatgcgaatgagcacggcggtacccatgttatcgtcaccgcagagcaccacacccgtcgagctgccgtagcttaattatctcaccaaaaggattgcgcgcgccgttgagccgccatagcttatctcatcgaagaaccgccacaaccacgccatcgtcactacaaaccgcgacctctgtcaagccgccgtagcttatctcgccggagagccacccctgacctgcaccacctctgccactctccctactgccactactgcattcgacgtcgctcctaacgcacttctccttcctgacggcggcccaacgtggagcagaagggggaagaggggtggcgccgatcaaatggaggggaaaggaaggaagataagttatataagggtcactaacgggtgggccttacaggataactcagcaggttggaccaagtcaaaggccacgtcaaagaaattgtccttcaaaat

SEQ ID NO: 32144 - DNA, 570 bp, Oryza sativa
ttatgcataagaacagatttgctcttttgatgttatgatttcctctttttatcccttcatgcaaatgaatataattgatgcatatttctgagcaaaactgaggccatatctttcatagtataccccgtattacatgattttggtgcagtgaatcttgaatgtggatttaagtgcaactgctgctgtctatgtttgcccttgctgtctatgtttgcccatgctgctgcctatggttgcaactgttagttaagtgcaacttgaatgtggttttaagtgccatttggacatataaccattcatggagtgtgtactgctatatatgttgctagacctattgaattttgtggacttgcatttatactcctcctgctgctgttttatgtcaatcatgcaaattctgtacccttgctgctgctgttttttaaattttcatgattgatttagtggttatatacctctacacttgttctttttttatgcataagaacagattttgtgcactctctctttttttatgcataagaacagattttctgcacttgttcatttttttatctacaataatatatg

SEQ ID NO: 32145 - DNA, 624 bp, Oryza sativa
gacctctccaccgacgccggcctgcaccaccgccgccgcactcactctctcgaccgccgccatccatctccaccgccatctccaccgtcgccgtctcgacctctccgccgccatctccgccgccatccagaccctcctcgccgccgccctctatgccgccatctccgccctctccgccgccctcgccgcctccttctccaccgccgcctcctcactcactctatcgaccgccgccgtcctctccaccgacatctccaccgtcgccgcctcaacctctcctctgccctctccgccgccatctccgctgccctctctgccgccatctctgccgtcctctccaccgccctctccgccgccgcctccaccgccgccctcgccgccggtcgtcctctccgccgtccgtccatcgacttccccgacctccccgaccctgatctccccgacgccgggatccccgaccaccgccgaccgcctcgacctcttcgccactgcctctcgccgccgccaccaggatccaggacgactacggcctgcgccgccgtctccaagtacgccgcttctccaagtatgccgccaccctcccccattcctccttttttccgatggatgaattgcattgtttag

SEQ ID NO: 32146 - DNA, 506 bp, Oryza sativa
ttaacaagttcgtcaccgtcgcctccccatgattatatatatgttccaagaatatcgaattctcgcttcgaatcccctctttggcttccccatgttttgccgagttcaaatattcgatttgaattcaaatcccgcaccaattgcccccaaatcccttaaagcgatttcctggtaaaagtctactttacctccctcatattcgcttgggccgaatccggccatggcctggcctgcatctcctctcccacgtgcgtcgcgcgtgaccactttctctctctctctctcgccgcttcctgccgacgccacccaaaatccggccgcgtcgttcgattttcacgcgcgcgcgcgatgaccgaccgtccgcccggtcgccgctgccgtcagcactgggctgcctgctgttgttgacggtcgttatcgatcagtttcgaccgtcaatattaccaaaatagaggagaactagtgatgcttgcaatttatatatactacctccattattttaatag

SEQ ID NO: 32147 - DNA, 597 bp, Oryza sativa
attcctgcagccctgaatagtagctacaaaatggattaagcataggaatgatccaatatatggctctctttttttaaaattatgtggtttaatgcatgttgagctattggctataggatatataaataagccagaaaaataaacatcaagttgcattcactacctgcccagatgaagaaagtatgcagctgagctgtgtgccaaagactattaaagtacagtgtgaatacatgcatggaaagtttgcgacaattgaccacttaattatatttagtggaagtaattaacatctactagaagcaacgtgacagtgcaggaccaagtctaaagtgtctttccaacctcgatctctcgtaatcgagcttagctatagctctcatgatttaactgctataaatacctcagcaagcaacaagtctcagcacaagacattaattaattagcttgagaaactcatctgctggatcgagcttctctgttaattaatggcgtcgaaagcctttgcactcgtgctgctggcggcggcgacgctggccatggcggccagcacggcggcggcgcagagctcgccgcaggacttcgtcgacgcccacaacg

SEQ ID NO: 32148 - DNA, 536 bp, Oryza sativa
cgacgatggatatctctgaggcaaatgaaggctacgcgagctgcggctcggtaatcgagatgtctaggcaaatgaagactacacgggtcggtgcccgttagtcgagatgccatggcactggactagtacgcgggtggtctcacccctatgtgtgtggcgcacccggtctagatcttgttgctaggggctcaaccctggcctgcctgtcccgggataccggccgtaggcagggttgggtcggtacttttgttcacggctaggatgggtgaagggttatgtcacatctttacgacgggttccaaggccatggaatgcggagtaaagatgtgtcttgtgggtaaagatgtacacctctgatcagagtaaatctattcgaattaggccccgggaaggcccccccccccctttccgggggaaattattgggggggccccccaaaaaaaaagggggcccccccccccgggggaaaggcccccccctgtaccaagtagtgttttaattcttaaaatttgctcaacaactaaaatatggaatgg

SEQ ID NO: 32149 - DNA, 543 bp, Oryza sativa
aaatcaactgtattgaagtctccacccgcggtgactgccagcgaagtccgctcgggagagccggagaggatcactgcggtgacctcccaaccagcgcggggctccgcgtcgtctccctcctgatccggaagcggcctggcctggtagtccactccgtgtggataccctaagaccacgcacatgccccgcagctccaagacgaagccagtcatgtccaaaccacgacgggtgacgctgccggccatctacaaacaaaaacaaaaagaaaagcaagatttcaaatgtcagattttgatgataagtgaagcagcaagacagagagagactagacagttttcacaaataacaaaggatttttatttttgaaaatattgctaaagggcttttgggggaaattttccccttttaaaaccggggccttttccggttccccttttaaaaagggggggggggggttttttccccaaaaaagggggggaaattttcgtttgatccaacttgtacgaccggaaataacccaacgggcgttcctgacgtgcgtgc

SEQ ID NO: 32150 - DNA, 2361 bp, Oryza sativa
tgaatcgtgctaatggaaaacaagtgagtagaagataggaagagggagtatcgaacatatacctaaagtgtgtatttggtattgagggttagaaaccctttttcgtcgacatgcaaaacggagcacgcgattagcgcatggttacctgagtattagataacaaatatttattcatatggtctctaaggcaactcttgtatagaaaattttcatagatgatgcatcgtttcacaattcagaaagcatgttcgtggaaaactagagtgtgctctaaacctccgcttcccaacctttactcccccattttctatgcccgcgcttcccgactgtataacggtgtgtttcttttaaaatttttatactaataatatgaatatattttcaactattttcagctaatacttagtggcagacacacccactgggcagggtgggtcggtcgtcccaactacgatccatattgccccacacccccaaacctcatttataatcttgtttctagcacatcagttatccttatcagtccactattgaataatcctataaattaagtattttaagtaggacaaaaatatttatgaaaattggtgactgaatgattattatctctgtataagtagtaccattttcaatagtttggtaggattgatagaaataagcagtaccattttcaatagtattatttctacatataagtcatacttgcacattactttggtaggattgatagatccattataacctacctcttaacattttgttataatttttatccatatttacatatgttttgaaggactttgaaagtattttgatactttgataattgtatcatttatggcttagaaaatttcagcttaaaatacgacttatataaagagaaacaaagaagagatgctattaagcagcaatgcaaaccattttcaatattttagggttaaaatgaccaaaatatattttaaccccaatgatcaaataaaattgtccgggggggtgaaatggatttttttaaatatgaatattcccaaatgcctataaatttgtttttaataaataattttatgttcaatcattttcatccctaattcctagcatgagacatccagcgtctctcatcttcgtgactaacctactacctcttctatctaactctgacatttgttcgactattaattttcgtgtgtgttgttgtgcctgtgccatgaaccggcgattatggtttatgtgcgttgtgccattatctaattaggactagctagctctttactagataccggtccatctatattttaaagctatgtgaccagcgtccgtcactaggaacagagtttgccctggttatccatagggcaaggaacgtttacccacccttaaattttaacatggctaagacagttttaagattttcacatgtaaatatgtaattgtaaatttatactattatatttatgcactgttggagcctctcctactgtatttttcctaaaaaaaaggttttttttgggggggacggcaggacaacagacttttggagggccaaatggactgcaggggggcaacgttcctaactcagtgccaacgttttatgaggacagaagtgcatgaacagctttatgagggcattcattatcatttaacgtggtttagctacatctcataactctgtcagtttaaacatcgtttgctgctccctataagtgtgctacagccgcttcatgctctgatgacaatgctgccatctcaacttgttctactccatgattcgagcaaaaaaaaaaaaacttgctaggcatctctaggacttcctagtgcaaactcttgtttcctagaacacagaaacaaattgcagcaaaaaacattgcacacaactattgaagcaactagtaaatctatggtgttgacataccacatatatctaacaatgctctctctcagttagaaatcatagcatgagaacagcaacttcccaacatcatctactagcctacattgtcacgataattcaaatacattctagcttcaatatccggcagttccactttgtaagttgaatcgatatgaacatgtaaattagaactttccatcatctcctgtaaccctatgttcatatcgattcatcatacacttacctagctaggcttctctcttaatttcagacaagcaggcaaatatgtatgttaggactgggatgcattatgaaagattaggtataggaagtacggacacctcgcaccaaataagttgttcaagcaagttctgatgccacgccacgcaacattattatacctccaagtagtgataggataatttcattctttgtcctaacatattctcaaagtacagctagtgtttcatttacca

SEQ ID NO: 32151 - DNA, 525 bp, Oryza sativa
gtgggaggattcatactatggttattaatattttattggctttgcttgtgggtttgtaatatgcaagcaagtcataatcatgcaaccaataagtaatactacctccgtccaaaaataagtttagttttgcacggttcatatttaacgtttgaccgtttgtcttatttgaaaaaaaaattatgattagtatttttattgttattagatgatagaacctgaatagtactttacgtgtgactttttttaataaaaaattcataaatttttcaaataagacggacggtcaaacgttggatacggatacctatggctgcacttactttgggatggaggtagtaagtaataacgaagtcctgcaatggatattgatggctatgcatcgctctagtaggtctaatttgaaacaggtataggatgtttcctgttcatttgatggcacatatccccaatagaagctaaaattatttttggaacaaaacctgatcactgattgtaatagcaaaggaaataaaccctatgctgctg

SEQ ID NO: 32152 - DNA, 1086 bp, Oryza sativa
tgggttccaatcaacaatttaatttagcacatagtgactataaataggacttagacttttggaaaaaaaccaaataatggaataggtcttagacttttggaaggagggagtacggaatgagagaattgctccttgaaatatgtgttgtgaagtgagaagctcctctacttgtatagcctgcatatgatggttgtaatggtggtttccaacgttggttcacttgtaactgtcattgagagcctatggggagccgccatgtggaagatggcggttagaggtgccaaggctggttccgtcgaattacctccaccgcctctggccaccgtttttattgtgtgtatgacatgtgggctcctatggcggttgaggatggtttggctccactttaggtcggttttgactgacgtgtggtgcatgccggctcatttcaactttattttatttgtttattccttgcatacatagtatttctccaagacaagtgggactacataatatacatgtaagaaatgttagttctcccttcatttattgaggtagttgacagtcaaaatcggtacttaataaccgtcatatcctcctaggttaaccaaacttctctattttattctataatggatttagatcggttaggtacataaaaattcattttccatagccaaaacattcatttcattgaggacagtaggacaaggaacaatagctcaggttcaagtagatcagttaggtaagtaactagattagttatgtcaatttgctggtattatgttgctctatgcaatatatttttttgaagaacgctctatgcaatatattcacaactctcattttcaaaccaagaacacttactggtttcaaccaacctgagccatctaacatggttgtaatcctaccatgtcttagagagcaaacaccaccagttgcatggaaaaaggccaagagcaagataagggaaagccactatgttctgttgctcctgacatgccagctatgggcacaaggaacagaaataagagtcatgcaatgggcactagttgcaaaagaaagattatggagtaaattagagatatggctagctgattaggt

SEQ ID NO: 32153 - DNA, 847 bp, Oryza sativa
attcctgcagccttaaatatactattagttattcctcgtaaacaagcgatttattaatatttacatttctcgatgcccatgtagccaatcttgtgtggaagaatggagagtcacgcattaaatccgagaaagtcattaagaagataggttgttggattgaaatatgcctatcaaaaataaatttttcagatttggaaatatgactatcaaaattagatgcagggattataagttaataattactccctccgtcccaaaatataaaaatctagtactggataggatatttcctagtacaacgaatctggtattaggaaatgtcccatcatattataggttcttatattttgggatggagggagtagataatttggttgtgttctagtatcaagttttcaacctctgtttttttttcacgtgtatgcttcccgaactgctaaatggtgtgtatatttttaaaaatccataagaaagttgctgtaaaaaaatcatattaatctattttttaaaaataacatacttatttaatcatatgttaataatcgatcccgttttccatacgcaggttctcaaactcttctaccgaaaaagccttagtacatattgtacacttcgataattcttgctcaccactatatgtatatatatgtgactgttagaaacttagaataattagtgacgccacacaggtagttgccgtagtggagcggatgtgaattgtattatccgtgcggatgaaaaagtaagcattgaagcaagatgatggccagcagaaccggttggtttatttgccacgtaggacgatctgtctgacaccacttgcaagtgtgtgtgacgtgcagccttc

SEQ ID NO: 32154 - DNA, 2100 bp, Oryza sativa
agatcgaggtagcgctggattcaattttattatcgaaaaaaaactagcttcattctgagtacgcaccatatatatatatttcaaatacacctactcacacgcgcgcacatccatataagtatgtcataacacacgtctaaataagattaaagacctgatatcatgtactcccttatattaaaaaaaaactttattatgtcgagattcaaacctagaattagattttttttcggacggaagaagtagcacacaagcatgcacgcgctttaatggttgaacatactaccatatctcaaaatgtacaaatttattctactcactccatttctacatatgattatttctgagttgtttaaaaaaatataaacatttatatattgttttattttttttcctcttcagctatcttattggttaatttttaaatcgcttgcatttcactccaaccatttgatatgttggaatgcttagatttccatgtgatggatttagtattaaaaaatgtttatattttgtacaaaatttgaatactttaaatgtttagatttccatgtattggaattagtataaaaaatccttatattgtgtaaaaattggagtacctggatttaaactctgaaagaaaatacgagcagcctgtcgagcagatatcatacgtttaatcgatctgatgtctgaaaggaaaatacgagcaacgtcgtaactcgtacgtgtatagccgggcagatgctggtggacatgttccatatataaaagaaaagactccagctatcttaaaaagtactccctcgtaaaggaaatcgtttaggataatgtttaagtcaaaccttgaaaatataaattatgaataactcttaagttgttgagtttgaaaatgtaaaaattatgtgaatagatttgtcttgaaaaatactttcataaaagtatacatatatcacttttcaataaatttttttatagaaacaagaagtcaaagttgtgttttgtagaccatgtcgctgtccaaaacggcttcctttatgagtatggagggagtatgctaactactctcgttttggtttcatatcgttttggtttcatatttcaagacggtttgattttctttgtttcatcaagtacataaaaaaaaatctaataactgaataatttaattctgacagtaggtttgttttgcgttggaaatgttacaatgtttttctataaacttgattaatttttttagaaaacaacctaaaacggggaagagagtatgtcgttagttttctctatacttctgtaaaatcaaagtgtttttcattgttattctatgatgaacaattggcattgaagattattggttttgatatttgaagattattggcaaagtgattttggagatgattgattttcaggtgatgaacagggttactgtttttatcgggaccgggatgaacagggttactgttggaccggtcagaccggcggaacaacggcggtcagaccggcgacagcaacaggaggcggcgacaggttttggtgattagaccggtgatctataccggtcagaccgatagcttctagacagtcagaccggcgcttcaccttcggtcggaccatgatccgtcgaatttgagagtaacttttaatttcgcaaaaagtttaggttttgggtataccaaccattcacacctccctctggttaacttagttattgtgtttcgatccaacgagttcctctcctccacacatgtgagttacataaatccttttatgacaaacccatgtcaacaaccttcattgtaagaaatggctgttgagggagacatgagatatattctaaaaaaaatgaaagaaaaataaaaaaaagaaagaaaggaagggagacatcagacatgagatgcccaggtggattagggtcggccggcggccgtgatcgaccaacaacggcatgcatgcatgcaaggggtgacgtcatgacgagatacggagggtggggatccacggcgggccgcccccgttcacactatcgccatttactaatccgcatagggttggcggtgggcccaccctccccgccttagcgttcacacctgttcctttcccgcgcttccgattcggggc

SEQ ID NO: 32155 - DNA, 2471 bp, Oryza sativa
atttgatttgattgtgaaccactatgatgtctgttaatctgtgatgtttttgtgtatttgatttggtttgatgttgaatctagatgggggaaatgggaggagaatgagaagctactgctaccggccgaaacggcggtgggcggtggctgcctattttttttaatgccaggtgctattttcgcaggcggaccagttgtccgtctacgaaaatcaactattttaacagtcgttcagttgcagacggacaattggcccgcctgtgaaatcctgtttaggccgcctgcgaatttctagtagtggcgtcgacgtcggcgagcacggcgatgagcgggcagcacggctccctgctgggcggcggcgccgcccccaccaccgcgtggatcagcgcgttcagcacgctcccgcacacccctagcttccccacctccaccggtcacttgccattgccatccgccttctccaccgccggcggcgcggcccgcggaacgatcggtggcaggcagttggatttcccgagtttgcacgccgccgacggcttagcgccggtgaggcacagcacggccaccgccaccacggcgacgagggcagcgtgcgccgtgatgctgctccctgtttgcgccattaattcgctacagctaagctagcttttgcttgttagttgtattgtgcttattcttcagctaacttgctttgatagagtatttgtaggggattataggaggatatgtatggctaaattaggcatcggtgattagcctgcttaaataaggagtttcatccaggtattatgcaggggactttgtggcagtttttgccatcttaaatggaaaagattcagttgtcatatcgtgtatctgtggtaaatacacggtatgagaaccgaagcttttgcccagaagataggggtaattattcacgtaggattattttttgatgagttggagaagagacgatagaagagatagcatgggtaactataaacaggtacaatagcatacgataagccagttataaatatattttaaagagataaaagaggagagagtagagcagcgggctacagatctgtagccagctgcagcacggattccaagataaaacgtgtgtatgacatgtgggaccagattaatagtgtagtaagtaactattatacgaattggctattaatttggctatagatgatttggagctagtagttggctatactattaaacttgctctaattggtcgtgtggctgcacactcagcccaaggacggagtcctcaccggagtcgtcgatgttgcatcccacgggctactgccctcgtccatggacaccgacgccaacgcctacgtcctcgtctgatgtcaccaccgccatcctcgcccacgaacgccgacgctgccctcgtcctcttccgccaccaccttcatcctcgtccgcgtccgttactgacaccatagtgtgccactgtcgatgcccttgtcctcgtccgtcgtgtcctccaccgcgctgccgctgccctcatctattgttggtgccaccgtccttgtcctcatttgttgcagctgccgactccctcgtcctcttccaccgcgctcgtcgcctccatcagtcactgctgttgcgctcgtcctccgtgtcctctgccaccgccgccatcatccaccatgaccgctgcagccagcgctatcaccgtcttctcgagctggcgaccaccgagcataaagaagacaaggaaaacggtaaaaaagaaaaataggcactgaagaagtggtgggaggaagaaagagaagggacaggagaagatagcaggccccacaaaaatagtagactaatatttgtgtggtagtataatatttttattgtatctttacaatccgcttctcctctcttctctcctccaccttagtatttagctggcttatagcctactattatacttgctcttaattacaacagcctgcaggctagctgcttcatgcatgtcacagtgatagtcgtcagtccgattgagtatgcatagctatggtcggcctgttagtgtggtgacatggtgagtgtgtggctatcctgctcagtcccaactacaatctgcctccttccaatcaggccttcttctccgccaatcaactcgttgattatccccgtcgcttcgtggttgaagttctggtttttataaatacatgactatgaatctgtacagtctatcatcatgatctccaggtcccttctagccaaacataaatatttgagctctgttttgccaagatgctttaactctagttctcgatgcatccagttcctagcagattctcaccggtcactaccatctccttcctgctagcaccctcacttagcaaggataaatgcatgtaatgacaggaacaggctggtcaggctctatagttttgacgtgtttatatatggggccttccccagcattccacatcaactacatcactactacagaggtgatttttctggaca

SEQ ID NO: 32156 - DNA, 816 bp, Oryza sativa
cgtgcgtcgccgccgcctctactccccgtcccatccagatttgagccgccgccgccgtcttctccatgttgccgacctccccaaaaccgtcgacgccgacctccgggccaagtcgccgacgccgccgacctcctccccaagttgccgacgccgccgccctcgtccccaagccgccgacaccgacctcctacccaagtcaccgacgccgtcgacctcctccccatgttgccgactccaccgccctcatccccaagccgcctcctcgccgacctccgccgccggcctccccgaccacctccccaagccgccggccgaccatctcctccggtaagccattttttacttttttatattttgcatgttgtgatatatgcatgttgtgatgatttttgatgtggattagtatatgatgtggtgatttgtgagatgagatgagataagatgttgatatatgcagggatgatgatttgtgatgaggattagtatatgatgtggtgatttgtgagatgagatgagatgatatgttgatatatgcacgtagggatgatgatttgtgatgtggatttgtatatgatgtggtgatgtgcatatagatgagatgaatgcatagatgagatgatatgttgatttgtgatgttgatttctggttatgtgcatatagtgagtttcgcattttagggtatttgtgatgttaattagatggactttgtgaattaaatggaatttatgatgttaatgctgcttttagtatatgatgtggtaatttgatttaatttgatgtttcgcctaattttccatctaatgtcccgtgagggg

SEQ ID NO: 32157 - DNA, 631 bp, Oryza sativa
tgataggacctacactagagtaaagcaaacctcttagacctttgtgtgacgatgaatttcatgtaaacaagtggtaacattttacaagacttctaaaagttataaatacggaattcgattagacaataaactccaaaaattacatgtttgatttttagaggtcccaaagaatatgaaaagaagtcataacaggaaaaaagaacagaaataggggacgacaagtaaagggtgatggttggcgtaacctttaaaaactataaaattgaatcctgctaatggtaatgtttgattttttaaaattctaaaataataggatgactatataaaaaagcttaaataaaaccatacgtaaaaaataaataattttgtatgtgctagctgcacaattacaccgcgccacctgctagttactttgaaaatttcgttttcaccaggggtagtagcatgaagcatacgatatttggggcaagtgtgttcttacccctgttttgttttacaattgtgattttaccttttttttagggtttgtgattttgaaataaagcaccagtttacccttcctttggatgactgtttggtgaggtttggttgagtgaactaaaaacaatgatcaatataataagaaaacatg

SEQ ID NO: 32158 - DNA, 635 bp, Oryza sativa
atataaaaaaaaagaatagaaatgttggagctgtgctgaactagtcgtcgtcttcgtcgggctagctagcgtatataagagtcgacgagggcgagcgaattcattccatcatccgcaccaacaccattagttatattacccatgaacacactcaaattctctccttatcaacttcggttcatcatcatgattgtctccattttcagatactttacatttcttcgatgctttttttcccctgatgatgcctggctgtttctagatgatgcaattcttgttccaaatcctagcttataagcataagcgttgtaaacatttcttgcctcttccactatatcgaactccattccaatgtatggaacaattggtggggaacaaacaacatccttttctttttcatcattttcagatgcatcttcatccaattgttcatcaatttcaacagtcacagcagccacatctgtgttgtcaacactttccacatccacaacctagtacacaaaaaagtttcactaagttacatactgtgttttcaaagcaaaatatcccccctacatttgtgatatttcaaatccaaggacaactcaccaagtcagtttcatgcccagaggatttggataatagcacatcaagga

SEQ ID NO: 32159 - DNA, 1320 bp, Oryza sativa
ccctagcacgtgctaaccgtggggggtaacctattatcctgtgcggttggtataatttgaccgcattatcccgtgcggtcggccttattacaccgcatgggataatacattatcccgtgcggtccgtataacccgaccgcacaagataatcgattatcccgtacgggcaggccgaccgcacacgaaaataaagattttcccagacgaggagctgcaggcgggccgggcaaccgcacgggataatctattcaaccgcccggaaaaatgggtattgtagtagtgcatatttagggcctcttatatataggcaccgggaacatgaggtacatggagtgatgtacacaagcagatcctctgatcacttacttcccactgactttgaatcactggtacgtgggttgttgggtagatggcccacatatcagtgacccacgttagagaaaagtaacttggaggatctcaatctgtaatatactacttctcataatttggtttataataacaatccattgattccaaatagttcagtgaatactacggattagtctacaaatgcaacacatatagtagaatcaaagtagcaagtcgatcatggcacgctgcaatggaacacttcgggctagacccttttgttttatgaaagaacatgcgacccttcttgccttaatgagcaaatataaaaaatggtgagtgcatcaaaacatgtctctggacgaggggttctgttttttctggaacttgttgatggatgtagagtggagatggctagggacagtgttgtggatctgagagaaagggtggtcatggcggccatacatggtgaagaagaggatgggaaagttgagggcaaactcttaccgaggcgattttggtgtgacggagatgtggagggcaaggtgcgggagtgtcttagcgatcatcgatgacattttagtagttagagacttagaggcagggcctatgtgcgaagagagatagagatagagagatgggggacttgacatgtggacctagggtatttcaaagaattcacatgatttctctcttcaatttaaccgaaaataaatattctaatggacgcggtgtccatgatctaattttcatgtttacagagtgtttctccccaaagtcacttcatgtagtgttctacagctaaaaccgtgaagtcatgatgtcctgttgttaacagtgaaatttggtaaagcccgaagacatcatcggctgagagtcagtgtcggcttccgagttctagagacagccaatggtagtcattaagtcgccatgctgtcgtgttcctggtggaatcggatcagtcaaagg

SEQ ID NO: 32160 - DNA, 3994 bp, Oryza sativa
attcctgcagcccgcacaaatattcaagcagatagggtgtttcaaaatatataagaaattctcttcattttctgtcgaatgttatttaacagttgtctggaaccaagaataaagccaagcagtactactagtactagtgtacttcgatgacattggcagctaaccgtgtcaccggtagtttgattctttaagataatgaaaaatcacagcctttgcttccacagttacagcttattattaattaatactacaatgctcacagcataaaaaactgaaagtgccaaagtattaagatgacaagataacataccaaaacactgaggtaaaaatttgtatgaacgtcgagatccgtcatgcaagctggatattgtccatatatatattcttaatgcttagagatattatagcaatataagatgggacccatagtcctatattcttttatgtatagcacaatatataatgtatatggttttcttttgatcttaagttagggctcactaagaaaagggaactctatttagcaggattaaaagagcaatatgttgcaaaggcttaaatttttttttatggtctagctttaagtttaaggttcgtcatagcaatattctctcatttgcttctctcccaatgtataaaggtagaaaaaatattactttattgcttgaggtactttttatgcaactagaaaggtagcccgcgcattcgcgcgggcatgtttttatttcgtttcgaaaacagatctatcaaaataagtttaaattaaagtgaggtattttgcttcttaactgaatgttcattgtattttttctttaaaagtcttgagaaactttcattgctcataaatatataatttttaccatcctactatctcctttttagttgatcaaatatacatatcttagatagtgcttcttatacataggaccctacaatatttttaagaaaaatacctagtccatatgagtcttaaaataaaaattagtaggaaatttataatcatatcgttatacgaaatgctattgattttgtattgacaccttagaggcatttacatgcaagtcgtggaatttagtgtattcatttaattattattgacctttgtctcttgatgtgtcaaagggaaatatgacttgtatgactaaaatagttcactgtgtaaaagcttcaacactatcttgtgggttaagtgctccactaaaatagttctgtgtaaaaacattacaaaagttatttctacaggtagcccatgagtccgaggcaaaaggcttatcacataggaggctgcacatttgaggaacatgtaaaaagtcttctcgtggaaatcatttgtttaggagtgtgctgaacataattgtatattcaattaaaaaagttggaaaagtggcttaaagttgtcatttcacattgattggttatgaaaataatggtatatacaaatctttgtgcccatatcattgtttcgcaacaatcaatagaacttgatagttacttttggtattccttttggtatgtagcaaattggctaaatattttacaacttattgtatcgtttacaaagatgcacctgctttatttctctgtatactggattgtctcattgtttattaatggatgccttgggcgcatgcgacactatatatatttggaaaaagtacgaagcttgcgcccgccccctgcaccgccctgcctcgccaccgctgccgcctcgcctcactactgcctctgccgtcgcctatgttggagagaagagagagagtgtgtgtgtgtgtgatagattgggaaagagatagaatagagactgacaggtggggtctatctatttttttataaaagaattgctgactggactgccacgtagaccaaaaccaccgtggattgggtcgaggggggtatttcgtcctgtttgcataattgggggtgaagaatgtccggttttcggattcaagggggtaatttcggtcgaccgcgatagttcggggggaggggggtaattcgtactttttcctatatatttcaaataaaaagccttctcgagtctaaattgatttcgcagtgtgggaaactccacgtagcttagcaggaacataatttcatagctaaaaatactccacatgtgtgattataatgtagtgtggtttgattgttgtcatgatttaaatattttttactctaaaatttatgattaaacattaggaatttacataatgcaaacgatcacttgtgtgattttattttagctaacatgcattgggcctttagttattatatttatattgcataatcctaaatacgaagcatacaatgcttatcctattttatctttcttgtttgaaagaattagccatttatacaaccatggtagtttaaatactaaataacttttaacttttaagtttctaaaataattggtacaaaaaggttttagctcggtcatctgtggtacacatatagtcccaagcaaatttgccccctcacgctgacagtgtcccgggtaatgtcgatggggataaaactgtgaccgattaggagtattaattttttcagttccagaaagaaaaatgaatctcagttttttagaccactgtctaatgttttcttccgtaagtgtacaaatgaagctatagccgatctcatatcctttacattagatcgatgtatatggtccacatcattatattattttatatagatctaatggttaaaattaattggtccatcgatttaaatatttttattttttcttagaatttgcaggattttttctaatttatcagagagccacgtgacgatttagtagcgtttgtagtatataatataagacacgtataattatattattttgacttatgggggagtaatttcttttggaacatttaggtttattctaatttaattattgtgaaattatgtttgatgataaaatctatatcattatttttttcataatattttagaactatttaaatggcacgtaaaagtcagaaattataaccataatgtgacattctttttgaaagtttaaatacaagcagtttagatgttatattttttttaatcatcaactgtgcttgtctattcttctgtctaactaatatattaaataaaaataggaataagaaataagagagggaacaaagaaggagagagagagaggaggcataccggctgtcaagtacgtacgtacctacaacttcacgtatagtcggataggaggattgcttttttttttaatagattgatctaatggctaaaattgctgggtccaccgaattaaataaaattttaatagattgatctaatggctaaaaatactgggtcctccgaattaaataaaaatcaatggtcagatgttttgcttttttcctagaatttttaagaatttctctaatttattagagtgacatgtggcagtttaagagtgtttgtagggtacacgtggcagcttaggagcgtttgtaggaagtttaatggacttctagtatataatagatattgtggatgtccttatacttttgcaactaagtttagattgaactatggtactttttgtacaaaatgtggatgaccttatatttttcccttatgtattaatagtggtgtatcaacattttgttcctcggggtcactggatcacagctaactaaattaattatatcatgctaactagtactccctctatcccaaaataaatgcggttttgcactatttatgtccaacgttcgatcgttcatcttatttgaatatttttatgattaatattttttattgttattaaatgataaaacatgaataacactttatgtgtgactattttttttaatcttttataaatttttcaaataagacggacaatcaaacgttggacacggatacccacggctgcacttattttgggacagaggtagtactccctccatctacttttaatagtcatatttcatcttggcacacagaccaatgataagtaattctacttatcatccatttaaat

SEQ ID NO: 32161 - DNA, 1710 bp, Oryza sativa
atctctcatgttgacccaaaaatactatcatctcacttttatatacttgtcaagctgcttggtgatgagaatctctgaaagattaccccgattgatcaagtttttatcatctgttcatcttctgcacatggtaaaccattccttccttgtttgtacatgtattctgaatacttcattgagttcattctggtgtagtaggaccgaacatttaactttggcagagccagcagcaggctttggtcactgaagtctgaaggtggctcacatgcaagaccgttggtgagcaatgggaatctgggtctgacgaatactcgttcatattaaacgacaagtcttgacgaaatgaagccagtctgcctgccagtgagctcaacatgtctgattttagcttcccttttcttttttttcccttaaaaatggcagatttagagtaacccttttcatcatcctttcttatcagcatcctatttttggggaggcgcatagttcatggaggtactcccaacaaggctcgctgtgctcaggcttatccgaatgatgcatttggctacgcccgccttcatggtgagaaaaaaatgttttcctttcctcttgcctttcacgtgctttgtttcgtccccccaaagaaatctctctatcggcagacaaacaactgaagcctgcattaaaaagagcaaaaatcattagccaaaactattcttcctaggtgcctttttccaaaatgaatttagtctagatcccatgcaagtactgatctgtaggtcctgggcagtttaatgaaggcgttctggctctttttttttctttttacctgccctctattgggcttagatgtttgatgtttcgttacataagatatagtgggtaagaaatggaatccgctcttcatgaaacacaaactgcaatagcaaataggagacggatttttttgtcttgcactcttacctgattcttgattcttccatgtagaatgcgcggcataatctgattagggataattactactcccattgcttgctttcctcgacacactcttcaaagagaacaaagcatttttaccgtaaagctgcacttttgcatcattttgcctgcattcttatgtccgtcccatgttatgtaatcaccaatcagacccacaaaagattctcctttctactagttgtccagaaatgacgcagtcctcaactagttcttgctcttttctcgacgtcatccgatggccatggaggtggcggagctgctgaatgcctgaaccggatcaggccatgtccggatttagtaaaaccgaacagtgagcctaccattttcatacagaagcgagtaaaacgacccaactaacacgcctacctgtcagtgggccccaccccgcactggacccacctatcattaccaaaccttttcgcccaaaaaaaaagaaagaaaaacctgcgtcgaggctggctggcgctcgtcgctgctactacaggccaagccacccacccacgccccgacgccattaatttccccaaagcacaaatcacaacacgcggcacgaaaactttgcactgaaatcgattcgagaaaacaataaatctaaacagaaaaaacctattgattttttttcttcgtgaaaaaatatagagccaaaaaaaaaaaaaaactcatttccgctcggctcgggtcacctccccacatcacccaacacgagctcaccaccaccaccacctcact

SEQ ID NO: 32162 - DNA, 1356 bp, Oryza sativa
aatattctttagatgattgtccattctataggaatttcgttggatagaataggatccaatcctttgctttaaagtccttcatagaaaatttttctacaggattaaaatcctcaaaatttatatgtttttcctacaaatcaaaggccctagtactgatggtttatgatctcagggttcagaaacctgaaaaccccatgccaattgatggaacacaatttgtggcgtgtctattgaagttgtcaagttgagtgaattccgtgtatctccaaattttacccaaaaagttactactagtagctagctaatgggtaaaggcggacgattcatttagctcatttggagttcaacgctcctcacgtagaggttcccaagttgtaagtggactgtagttgtttttcatttacaagttgtaagtgtacattattttatttaattgcgctggtcaatattcaaaatggagaactctggtttgatatcacattgtgatacattcttcgatcgaaaagcttaagccgatgagcaaatattgacaaatcaatcatacttgttaggaatggaggagattttgtagaattttcacatcgatcagtaatgaaaaaaagggaaggtatacgcagttcggacctttctcttttgccaacgagttctcgcggtgattagtacttttatttcatgatatatgtatcctcgctgcacgtaggaggcctcatttggaacgtggaattttagagaatttttgcggtagtttaatttatcatatactcccttcatctaaaaagaatcaataatgtatctaaacaaaaagaatcacatactcttctagattgatttttttttaagcacggagggagtactccagtgcagcaaaatccatgtgttctaaaggagcttcgaatctgttttactggaggttttcatgaccgttgagattgttgaattgaggtgtacgggtatgtaatgttcgttcttcatttctttccagacaagaagactacggtgcagttatcactgtccagtcctctcctcgctgcacaacagtaagtgtcctgttcagcactgttctatcacgtctgtgaggctgcttttctcgtactacaaaccgatccgaggtgcagttgacattagcactgccatgccacgccacgcaggatgcgactccgatacgcgtcctcataaacagaagggtgaataaccaaatatgaccttgaactttcacttaaggatcaatttagtccttcatgtttcgtattgtccaaataagtccctaaactttattgtgtgatttgatatagtccttggacccactaaaaatgccacgtgtgcatgccacatcacctgcgcatgcaaattcaacat

SEQ ID NO: 32163 - DNA, 692 bp, Oryza sativa
atggtggttgatgagatggattggtgaggcagagcttcggggttgtggggttatggttgttgatgatcgatgatggacaaggaagggattggggtcctatttatagggctagaaggagtggatgagttcggacccgtcattgccatggatgagctccatctttggatagggttggggcggcaaaggctgtgagagggcggccaagatcaatttgagtggcgggaggccacgtttgaatacttaccggcgaaggattggcttgactgcatgcgaattcggctggcgatgtgttggcgccaatccgggcacgacgcgcggcggcggcgagggtgaaaatggctgactcgggggtgaatggtttgaattgtgagaggggataccaccgtctatcttcaatccaaccgcgcggcaagaattggcgcaattcacctcgggtagaagcaaaatcgcattcggcggcggctttggacgagcgcgcacggcgtcgagcggcgatttcttgcggcggtcgtcgtcccggctttgtcgttgtcaagattggtgcggcgatgatggtctgagggcgtcgaacggctagcggcgcgccaaggcgatcgagcacgcgcgatcgatcccgagaccgacgcgcggcggctcggcgtgcggcgaagtcggacgccagagagcgcgcacaaaggggaggaaggagcaaa

SEQ ID NO: 32164 - DNA, 898 bp, Oryza sativa
acgtgaactttcgatgctatataaccaattttgcgtaattttaaatggcaaataaagaattctctctctctcaaaaaaggaaaattgtcggtggcattgccgggacgcatacaccaatctacttactttaccacgtatgtttatcttctattcatatttggaatattttcagtggcgttacctttacgcatagtgtaacaacaactttatacaaggggactttatatatgagtattattcataaactactttttttgtgaaacataaattgatcgatataaatgtgtcttttgtgtgaagaaagtaacatcatatcatttctaacaaaaccattcgtatgacgtgataaaaatagataaacaaatcgcattatttgagataaaaatagttaatacaaatcgcattatttgagagacgcattgtaagttggcaacaccatggttacctcacggttactgcaataatctcgtacagtaaccatctctattttttaaaacctcacggcttttctcgataaccatataggttttgttaagtaaccacgataccatcatgtcagtaactcctaccaaggctacctcacaattaccgcaatgatctcgtacagcaaacatctcagtttttttaaacctcacggctaaccaccctaccaaaatggtgaggaaaccctatctaccgctgcatggttttgagtctgtaacccctaccaaaatggtggcctggtgggggaaacctttgctacagctgcatgatttgaactttgaagtggcgcgtctttacgtatagccgcagccagatttcagatgggattttcttggatgccttctgtggtcaaggttctgactataggcagtatatatggccaatttgggggatccacactagttatagagcggcc

SEQ ID NO: 32165 - DNA, 741 bp, Oryza sativa
tggaaaggaggaactaacagtcaagctgtcaagagctaagggctcaaggcaagtgactatgaggtaaatagcgattgatcgcacttttttaggactatagcacagcaactatgccacatatgccccctccacataagaacccaaacggccaaactatcccctcaaatgtagatagcatggcccactgcacagtgaccaaagatcatctctcatgaaatcgcgtggtggcccatctgaccaaaatctagccaacccgcgttctgtccgaaattaagcacgcgggcccaaaggcgtatcaggcccacgcaagtcacgcgacgagtatacaacgtaaaccgttgatcgagcgatcagccgatcacgaccgttgaatcgaaggaggcagcaataacgtacaacaacgtaccggaccaggaagcagactgcagtttttgtaagctcgtcccaaaatatcatcatttttagggttttacaggtgattaggaaaattgattgagtaaattaaagcctctcatcgttccctttacaactgataagccatataaaaatacacgaaatatcaaaaaatagtttacaagtaaaatttttatacctaggatcttaattatttaaaaggtaatactgaaaaataaactataattaaaaaaaatcttaaattaactttaaagtttaaattttggttgtgactcataatgtaacgagcaattaatgatgaagcaataaaatggttgtgattatagg

SEQ ID NO: 32166 - DNA, 2184 bp, Oryza sativa
ctgttccgccagacaaagagccaattggggcttggtaaatctcctttgtgtgcaaaatcctcgtcataccctgggccaccctagagtccggctcagaatttagggatgtgttttgtcagatcatgagcagttcatccacctgagcctggcagcagaagacagcctgggagcaaactgctcgctgaaagctccactgcaaacctgcgccactgggaaactattttgattccctcgagggattgaattcaatcgtttgtttaaaaattatctacacagttatatttttttttcaaaaaaaaattaataacttttatacaacatgcatatgatactttacaaaatctttcaagcttaactcacgcatttagatataaaaaacatattcagtaaataaatagcagatgtatttgtaaacaaacttagtaaatgtatacttatctgaatttgttttttttctcaatgtgccgaatttgaacttgatttaaaatcaaaggctgatagaggtcgctatattatatatttggcattttattcttatttttttataactatttacattagatttaggagagaaaaaaaacacgagagacattctcgaaggattttgaatccattccaagtagtagccgtagttgcatggatgggacgccggaacgggatggcatcggtagcagcacgggcatatgcacacgttctgtctggtgtgggcaaacaccgtcccgtgctgatttatcacgatctaacccgtactccccgttaaaaaaaccaatctagatgatgatagaatactactagatagatatgtccagattcgttgtactagatggtgtcgacctatctccatataggttgaattttgtttggacggagggagtacgtgttatcccatctgtaagtacaactactaccaacaattattcctaaggtaaaatgtatgatttcgctcccttctcttttgaatggtggtgaatctgttaacccatcttcttccgtttggaaagtatgatcattttatacgtttttcttgtgagaagaaaaaactgcacacttgcattgcatctcatgttatgtaaaactggtttgttcgtacacttacatacatacctcgcatgttgcaaataaagaatgcagaaaaaaggagagagaaaaactttggcaatttgtgggcaccggagatgccgggaaggtattaagctactataaactaatgcttgtttcagttcatgcttatcagccatacctgcagtgctcagcaacaccaatttggtgtctaaaattgcttccctttggctttagtttttctttcctacctttgattggcaatggcacgcggacgctaaggactattcgtttctgcattttctttacgagatttccgcttaaagcagagaggaatggaattatttttctccttcagtgggatccttttgatctgatttaggacggttagatgctgacaagcagtgttctttatgggggaatcattagcttgacgtgttaataaattatcgaattattctgttgtagtttcacatcatgtgatgcttagccatgaggagaaattctggggaaaaaaaaccctattgctgtcttgcagaattggtttttatcagattatcaggcaatggtgatgtaggatagatgatcctgtctgttgcattgcagctttcatgacccaaaacatgagtaaaatatggaagggaactggtccttgttttctgcttttggacttgtcccctcgaactaccaatctctctttgttttatctcacatctaactacaccttagtttggtaagactgaatgtctgaatcactaatatctgatagaaaaacaagggcaacaccataagaaactactcgaactagcaagtagcaacaaatctatggctcactgtcagggaaataccatgcaaatgtttatgatttttttttcaaaatatttgacaatatttatatagcataacatatacaattccacgatattccatgactcgactccacgttcttttccacttacgtattatggatgctaggctttcaaaacttctgaatggtatagttgttacaaaaactttcttcattggcgtttcttaaatattttttgaacaactttttaatatttaattccttcgtttatgtcctcgaataacttgtcttttaactcaatttcatccataacccat

SEQ ID NO: 32167 - DNA, 545 bp, Oryza sativa
atgaagaagaatacaaccataatcttcatgtaagacctcacattgaccttgacgatgatccccaagagcctgtggcatatgctcgttcagatcatacggaaggcataaccttgtaaccgatgcatttgtacttatctattgtaatgaatgaagtattttgttttattgttttattgcaaagacttgatatgtgtagtcattaatatggctaattttgttttattacaaatgaccaaaagaaaagttgtagatcttgatgagaggatcaactttgttgttgaccatatttccatttgaaatcatttagtatccaaaaatgtattatagctaataaaatgaattattacacatcagctatatattttgcactcacagatacaaaaacttcaaatgaaagatggaaaatgagtcatcggtgacgggccttagtttatgtccgatagagaataatctatctcaatcgggctttgccgtagggcctgtcacagatgactcatctgtgacgggctccatactaatgcccgattgaaatgacatttatgccc

SEQ ID NO: 32168 - DNA, 1246 bp, Oryza sativa
ttaacctttttctggtaagatagctacatattcttgttggcttcaatactgtacttagtctagctttgtttagttcctttcatttggtgatggcctgctcgaattaatactcgatcgattatctttggatggatatggcatgatacgagctgggttgcctgaacgtcgcatgcagtgcagctagctgcaccagccgatcgagactcgagaggttggccatgcaaagcattctctgtagctagctttggagtgtggctaaagtcaacctgcagggtgcatgactagttgtatatagtttcattacattgaatagttgtttaagattcttcattgccttaattatcacgcacgatcttaattttctgatgcaattatttatcctgtaactaaacacaagcaataagtataaatgaaccggtacaatctaatatccattaatcatgtcatattaaggatagaaattactctgccatccttaaaaaaaggttgatttagaaagtcaaaggcatgagaatatatatgtaatactattggaaacacacgtatatttcttctataatttttggtgatatgtgttagtcagtgtgcatgatatatccatctgaaacatgtgtacacatgatatgttcttattgatacataaattaaattggtacccttcatgggttacctccatcagtttgtgaattgcatgcacaaactaaaaagaggaaaaaggcaagcaccttaaagtcacatgctctcgtttttcaatgtcatttctaagagcctcatcggttgctcatattatctaatagaccattttggcttattggggaataaaaattaatttataggtaagacttttacatgtgttttgctaaaaaaaatactacgttgaaaatacattaaaatcaagtttgaaaatttaaattttggctttggttttggcttattaggccaaccgatggggctgtaaaaaaaacatgatatttctggtaaaatatgggacataatctattatctataaattggatcaacctgtgtgcatatgaagagagagagagagagagagaaatcctactacaacatataaatcactctaattaacgatgtaacgttatagtgtatattatcaaattttaagtgaatatcttataataactatttagatttagatgacatgtacgaaacagaatttaaaagttttatcctttaatttacataagttagcagatataggaagaaatgacgggggatttgagca

SEQ ID NO: 32169 - DNA, 1044 bp, Oryza sativa
ccccctcccctatactccatatactcctccctcctctcccctcttcctcctccccttcttctcttcctactacagtacaccacatgaattttttaaaaaaacaaaaaattagaaaaatttatgtataaaaatactatatataaaaatttgaattcaaatttaaatttgaatcgggtatgtaaacttttgacttataaactttaggtgtataaactttagatgtatagaaatactatatatagaaaatatttgaattcaaattcaaatttgaattcaaatttgaattcaaatcggctatgtaaacttttgacttataaactttaggtgtataaactttagatgcataaaaatactatatatagaaaatatttgaattcaaatttaaatttgaaattagatataattcaaattcaaatttgaatcgggtatgtaaacttttgacttataaactttgggtctataaactttaggtttataaactttagatgtatagaaatactatatataaaaaaattgaattcaaattcaaatttgaatcggatataaaaacttttgacttataaacttttggtctctaaactttagatatataaacttaaggtgtataaactttagatgtgtaaacttaaggtgtataaactttaggtatataaatttagtaaaatagaaaagtaatgcggtgccaaaaaagaaaaccaggtggagggagggggagggggattgatcgctacccccgtcccaggcgatcaatcgccgattaggatttccggtccaaacaagaacgtggttcgtgcatgattgtcctgaaacatttcagagaacaagatgggccaacgaagtggcccaagctgagccctttatcgttgaattcggtaaatcatgttttgatgtccttctggcattagtccactctcagtttgtgatatagtactagctaaagacccatacgttgcagcggatcttataaaagataaaaacaaaagtaaaaaaataaatttatagtataattagttgattaaacatataatgtcatctacaaaagca

SEQ ID NO: 32170 - DNA, 663 bp, Oryza sativa
cacttcctaattcttgctctccatgcttcacccaacatgtatagccctccatgaatcctcgttgtatcatatgaccatgtacgtcctctccgctatcaaacatattctcattcttgcaatctgcacatggacaacacatgtaatcactgtttcttcttttccgatcctcctccgcggcgttcataaaatttattatgccctttctgtactccgtagaatgacgtttcaaatttttcgcatacatccaacttcgatcaattgctacaaaataaaaaaaacaaattacatgcacatcttataagatcagtattgcaaaagtaagacgtgatgaatttgctcaattaatgattaatattactcacttgattgatccattttgatcacttttgggaattttctgttttccttggaaaaaagacaaaaaatcgccccatacagcctcccaccaaaatagtaaacagtgggatacagctacactaggtggtggggggtatttatactgtgcaacaaatatctgtaacggccctaaaacaatcaaccgtgatgggcatacaagtaatctctatcgggccttaagaaaagcccgtcaaaaaagagtgtcatctgtgacgggcattaaacttatctcaatcgggcctctagttggagcccgtcacggatgac

SEQ ID NO: 32171 - DNA, 631 bp, Oryza sativa
ctcaatcgggcacagcgtccgtcacaggctagaagtcaccgatgtgaagagttatctcaatcgggcaaacggccgtcacggatgaatctatgtcaatcgggccctaagtaaagcccgtcaccgatagctttgacccagacgaccagtcaaactatagcccgccacagatgacctatctcaatcgggccacaattagagcctgtcacagatgatactcatctcaatcgggcctaaactagagtccgtcacagataactgctgacctcaatcgggcctaaactagagcccgtcacagatgactataatccacaaaaaaaataaattttgttttttggctagcctcaggcctttgctagccatgcccgctgcataaataacagaaacaaacacagatatccaatatccccagctccccagcatcacccattcatatacatatgcattcacatacacagacatcaatatatttcacacaagttgtaccatgttaatccgattaaacgatcttgtaaccgagttaatccgattgttattaccagattgagttgggcgacaatacttacaaggagtagcacttaaggaggcttgtgtccactgctcggagcctgtagaggtcgaatagatccttgaa

SEQ ID NO: 32172 - DNA, 979 bp, Oryza sativa
aactttatcaagtccaattctcaaatcccaaaagtcaacaattcatcataaaacacaatcatatcagtctcaacagtatatgacaaaacataatctatgaaataaatgatctatgtttaagataggaatcatattgataaatcctaatacagaaatttaggtcaggctattattgtgttgtatgggctatgctatgggtctggaaattccgagaaaatttccagaagtttccaatcgatttcgagttccgacgaaaccgctcttatcattcgattctgtttcggagaaaatattttcaaattcaattccgtttctgaaaaaatccgaccgatatattccgttttcgaaaatagctttatgatctgaaaagttttcataccgtttttacccctaacgactaatgtcagatgtgacaaatttagttacaaacaaaatagaccctaattaagtctctttgataatgtatccaaaagtgcttatacttagacaaaggtgagttttttttaaaggagggcaaaagctttgcctcgtatattaatagagatagagaaaaaacaaaacaaaatcagatagggaaatatttacagggcaagccaaaagatagacaaaggtgagttaactttcgatatccacaaagtcataacttcttaggctctatttctttcagcttgggattattataatccagattattgggagtaagctgaaagaaacagataacttattgaagtagcttattataatttggagcccaacttattataatttgataagctcatttaggtgagttttttctagattattgggtgaaaaattacccaccatgccacccccactctctatttagacttgcaaactcaataatctaggctctaataatctaggaaagaaacagctaaccgtttattctactacaaattataacaatctagcttatagtaatatgactcaataatttagattataataattccaaact

SEQ ID NO: 32173 - DNA, 1355 bp, Oryza sativa
tgcatgcatattgatttccaaccaaactcaacaacaaaatcacccacattcacaaaaacatcatagaatcatccacaatttcaacaacaaaatcatccacaaatttacatcacaaaatcatccacaaatacctagattaattagatcatcaattatcagcttcattctccatctctagaggatcaaatacctagatttattagatcatcaatcctgtagcctaccgccgccgcactgggcgccgctgccgcctgccggtcgaggaggaggagaagaaggagtggaggaggatgggaaggagtggagaggcgtgcgggcatgcgacgatgccgaggagataaggaagagagagagagagcgagagatgcgtgggagagagatatttagtcccgcttagtaataccaatcgggattaaagatataatctttagtccaatttgttcggaggcctgacagctattaaaccgagactttaaaatgatcttgttaccaatcgagactaaagatcaaagagagacgctgaacttttgaactgggactgaagaaagcttactacactattaaacttgctctaattaaagtataaaattttactgctcataagggaatcttttcctaccgatatgaagttttagtgcatatgtagtttcgtacgtactatataaatgtatcaactgtagtttcacagtatccctttttggttttggataaatttgcaattctaatactgacaacaattacttatgcagttgtagcctctaccgtttgagctgaattaaacggtacagactatccagagtgctgtagcaaaagtactatataaaagtttttttttttttgattctgctgtttgatcacgtagctgtgaatctgaattgttgatcatcaaaatatcaaaatgaagggctgaatatatatatacagtcctaagtgcagtcatagttatggctggaactaatctcaatcctcgaggaacgacaatacttatttttctttgaaatctgttagcacgttttttaaacatctaaacgatgtgtttcgtataaaaattttatctgtaaaattagctataaaataacatataaagttattttttaaaaatatgtaataactaaaaaataattaatcatacgttaattccctttctcttctttttacatgcccaatacccattaactctatctccatcttcaccatttcaaacacctctctgcggcgagaaaatggacatttagccacgtccaaaacagggtttcactaaaatgttatcccgaaaacgcgtttcgctaaaataccaatatgaagcgcgtgctcaccgccactttgccagtttggaccttttgtgcattttcgaa

SEQ ID NO: 32174 - DNA, 1171 bp, Oryza sativa
tgatggtgcctgatcgaccgaaatcttcagtatatgtacaggccttgataacaagtgcaaagcaaatcatgctttgcagtttgcaccatatcccactttaattcctgaaaagcagtccagagactcacaccgttgacggaggcgttcgttttgttaatttcttgcactgtgctgtctgccaatctactcatcacagaaaaggtttgagcgctcctctcccagaaaagctcagtggtctcgccgtcaccagaccgagtgcgacacacgttgtgttggagaaagctagtctagaatccggggcccctctcccggagactacactgctagtgcccgctgccctccgtctattggtttcgcattctcactgtagctcgagcgagacggccgtcgtccggccccggcctacctctacctgcgacggacgcgtcaccttcatgggatcagcgctcgacgccggatcggctccccctcccctcccctcccctcccctcccctgccttacctccgcgtggtggcgcgcgcacgcgtcccgtacgtactcccgtgaaacggctacaggacaacgacgacgccagctcacgagaaacgagaaagggacatatgattaattaagtaggagtattaactagaagtattataaactttaaaataaatttatttgatttctaaaaataatctacatatttctttctaaaaaaacgtactccctccgttccaaaatataacaactttagccctcaagatttgtcccaaaatataacaacttcttccccaacattctcttcttaaccaatcacaaccctccaccatttactttttacacctacccccactactcatccaatcacaaccctccaccattcacttatacctactttcttaataactgtgtccaactctaaaactccttatattctgaaacggagagagtaccatttagcatacttacagaaaatgagagagtagccaaaatgaaaagtttattcaaactcagccttatataagagacaggtgtcagcgataaattaattgatgtttgatgacatctctaaggtcattcccaactcaataactaggatgttgtccataatactccctccatttacttttgatagttatatttcatcctgacacacagaccaatgataagtaattctacttatcatccatt

SEQ ID NO: 32175 - DNA, 691 bp, Oryza sativa
tgattatttgtattattgtttttagtcaattctataatttatggactttaaatttattttttcgatagaccatattttctttcttacaacgaatttacttctaatgttgtaacaatttacttgcattttatgctaagttacttttatgatttatgtaaattattatttctactacagagagttagaagtacttctattacataactaagttacttctgttacatataattacttctactacataaacttatttctattgcatagctaagttacttctattgtatagctaagttacttctgcaatttaaatacattacttttaaattaataaaatatttgaatatatatcaaatatggatcttgcattgtcacatattttatgtagagtataatgatgcaaatagatcttaaaaataatacaaatatataagttattaaagagcttaaatctaaaagtaatttatgaatatgacaaaagtaacttacatatatattaaaagtaacttacatatataataaaagtaatttatatatatatatatatatatatatatatatatatatatatatatataagaatataattatgtaagatcttgttgtaaagatttaattgcaacgaacacaacggtataatcggattataaatcggataagtattttaagagatacttctctaaaaagaaaaaaa

SEQ ID NO: 32176 - DNA, 638 bp, Oryza sativa
cctgcagccagggttgtgtttcacgccaaaattaaaagtttggttgaaattaaaaagatgtgacggaaaagttgaaagtttatatgtgtagtaaagttttgatgggtttgtgtgtaggaaagttttgatgggacttcttacacacaaacttccaactttttcatcatatcgtttcattttcaaccaaactttcaatttcggcattaactaaacacactctcaactccacattttctttagaattagactgacctccacattttcttttcacggaaaatatacacgatgctaaaattatttgatttatagaagtatatcttttattttgttttttattagacttaatagtaaatgaaaaaggaaatatgtgtgcccaattgtcatacttataaaacccaataaactcaagaaaatgttgaccattcagtttttaacaattttgttaataaaaatttgaattttcatctattgtttctaccaaaattgtatttttaaaatatttgaattatgttacatctgtcaccaaatgtcttgttttagtttttttctcaaattcaagcctaacattttttttaaaaaaaaaaatctagcaccaagttttgaaagtaaaagaaaccatgttcaaatcgaacaaagct

SEQ ID NO: 32177 - DNA, 835 bp, Oryza sativa
atataaaacggcacttgcacggcacatttgacgtgtaacgataccgatttgtactgcttggacagttggaacaatcacccaaccattcgttcatgtgcgaaccaaccgtttgcttgcttcaactccacaatgccctttgtgtgcctacacggcttccgtgctacaaaactctccactcggcagctgctttttttcatgcagttacagcacgcaaagagttgctttcagtccaggggattggcaacaaggaacaccaattgcatgtggtgcttgctgctgccacaggcatgctttgccttagagcaagtttaatagtataggccattactagctccaaataatctatagccgatgtaatagccaattcatacaatagttgcttactatactattaatatctgatcccacctgtcatacacacattacgtcttggagtccgtgctgcagctggctatagatctgtagcccgctgctcttctctctcttcctttatttctttaaaatatgtttatagctggtttatagcctgctattgtacctgctcttaaggcaatgttcagaaatcgatattagtgtatgatcgccgttaacttgatcattatgtggtgaggtgatcaattgggttccagtttagttgatgttgagaagtggcaattcggatttcaatggaaaatcaagaagagcagatctatcgtcggtgcccagaaatggacaaattgaggccacgttcatcctccctagtgcatagtaggacacaagatccaaaatattttctccaaagcatgttcttcattaatccgtataactagaatattaagtgtgtactaatatatat

SEQ ID NO: 32178 - DNA, 568 bp, Oryza sativa
tgaccattgctacagttaatttgaaataggaaaggaaaacatctgcaaatacatgaaaaagaatgttcttgtacaccactctaactaacatgctttactgaagatcctttgcataagtattgcatcatataagatgggtacagaatacacacccgcttagttctaatttgattcatcactcagtcatttcatgacagctgatgaagagcaatctacccaccgagcaatttagaacaactggaagggtagcagaaattaaacaattcttagtcaggcaatcaatggccttgcagttgcaagggctgagaattttgttagtgcaagcttaagtcgcccattttcagatttgatataaaattagctgtccctgtcacctcgcaacaacataaatttgcgaaagagcaaacaaaatctcagttaactgaaacactctctacaccaaaccaatacgaacattacaggagcagacacagctaatcatcataatggtcagacatttgtgccacattgcaactgaaatacacacacacagcagtaaacctgcaaaggaggagccactgaccgcgtc

SEQ ID NO: 32179 - DNA, 588 bp, Oryza sativa
gagtaacaatgatgcgtgtacaatgtgatacaaggagggcactacctctatcaaggggttactaatgttccagattttataagacatagtattcgagtactcaaaaggatcagtgcaaactctattcatctggtcaccataatctagcaaggttgagttattattctctaggaggaccgaacctgtgtaaaatcctatgcttcctgtggtttaggaagcgatcacaaccattaatccccactaccgaacactatgtccctcacaaatctaccaactacgaacattgacacattatatgcttattttaagagtgggtcaatttcaaatcttgtgattaaaaggatttatgtataaatgatgtcagacatagattattttgagaacttaagtaaaacccactacatactagccagtgtcattgttcgataccgatgacttactcctatctatccaccattttaccgtgcaccaacaagattgttttattactcaatagtgtcattgatctataagagttttttttatgataggttgtaagttactcaactttaatatatatacattgacaaatcactattttatactccc

SEQ ID NO: 32180 - DNA, 785 bp, Oryza sativa
ataaatgtgccgtaagcatgcatcatatatagattagctagccagctagctgccacaaaattaaatcatgaacatgtagttgtgtgtagtatgttattagcacaagaaatcatgtactaggtgtcatgtactgtttagtatatatgtgcatcttatgtatgcaaacatgaatgcatgcgtggaatattcaggatatggaagattgtcttcatgcaccttgcgatctacaggtgcagctgatgcactgtcgttgctaatccctttgtgacacgtggcatggtgacgtgtacctaaccgatcagacagacactcaggaccccatggctcgctagctagttgccactctacctcttacactgtactctgtcgtcatgattgtggacaaatgggacgataattctctccaaaaaaatagaaaaacatatatagggaaacaaatacttcctccgtcccaaaaaaaaaagacaaacactggtttctgtgcccaacgtttgaccgtccgtcttatttaaaaaaattatgaaaaaaaattaaaaagacaagtcacgtataaaatattaatcatgttttatcatccaacaacaataaaaatacgaattatgaaaaaatttcatataagacggacagtcaaagttggacaaaaaacccagggtttacttttttttgacagagggagtaggtagcaaaatgtttaaattaattacgatatacgcagttataaatgcaggagagtcttttaaccctccatgccgatgtcccctcatttctccacggcattaaaataa

SEQ ID NO: 32181 - DNA, 597 bp, Oryza sativa
ttagaagagaaagcaacggtgtagctcacgctttagctaatttggccttacgaaccaaacattgttctgttttagcgtatgggatgcccctgcttgtattatgaggagctattgaaccgtgaatctcaacaagttgttgagtaatcaataaagctttctcttcctcacaaaaaataaaaaggagtatgaaagaacttccaaactgccgctaagtagtagtactactaaagagcctaacgtattattgtcaagtcaaaatgcaaacgaatatacctgcctgacttcaagtgttgcaactgagaaaaatattttctacatctataggtgccataccacctagttcatgtgatttaaatggttatataaaagatttgtccttgcaactgcccttgctgcatgaacgcgagcccgggcttgatgccagcgatggcagttcacaggccgagagagagagaaaaagaaaaactgaaacggatacgaagaattgcgccgggcggccggggggcgaaacaatcccgcgatcgaggacaggagcacagcgcgcggccatgcatccactgatccacatgccccaaaccataggatcgcgccggcttt

SEQ ID NO: 32182 - DNA, 738 bp, Oryza sativa
cattggctcagttaatcagtgattagcagtttagcactactaagtaatttcgaaatcgaaatctttgtaaattaaacattttgaatttgaaatggtgacatagctcattccccaagaacaatgaggagaggaaaaaaaaaacaaagcatggagtggtgcagtgatgttctacagtacttcgattgagcttgtaggcgtgtgcattctctgaattttttagacccttcttcgtgtcaacatgttggagtgtgtgaaggtgtcattcatgtagtacagtacaaaatggcctggctgactgtctcgtcggattctgaatttcaggtcagcaaccatcgattcagaattcagagagagagagagagagagagagtgagagaaagacagcatttccatgaattttctagagcaaatcattttatttcgattcctactagcacgtttttcaagctattcataaaaaactttctatataaaagttgttttagaatatcaaatatattcactttttaagtttataataattaattatgtgctaatatttctctttttatgtgtgtcactttaattttcatctttatcattttcaaacaccacctgaatgcatgtgtgacttcgatgtattcaagggattgaggtaaaactgcacaacagcaattgtacacaatctaaagatttaacggccaaaaccgattcaccacattaaaatcgaaacaatacattttcatagtagggctgcag

SEQ ID NO: 32183 - DNA, 698 bp, Oryza sativa
tttgtgtcggccactgaaacccaatgtctccttaaaacaagatacagtggcctttgtactgtgattgtatacatgttagcgtgtgattactaaaatataagattgtagcttgtggttggttaactatgatactgaactgtcagaaaaaaaacaggttttatgcataagtttgagactttgggtctggtgaatcagtccagtggtgtgtacggatctattgtaatctacaagttttatggccttaattgtaagattattatatcttgctgttgtcactcaatgactttatgatcatcatattattctgcaaaaaagtactatctttgcttcagttatgtgtcttcgtttcttgatgctatgttaagttgcttcgaagtagtgttgtagaaatttttgctctgaaaaaattgatacaacacaaagcatataagaggccatttgcttcataatttgcttcatacatctaattgttctcctgacaaacgggtttatatatgtttcttctctttactttatgctgtcgcacatgcatcctataatacagataagagataattaaatcttactactacaatataatttgagagctaatttgctctgaactgtactccaaatctatgcaaaattctggaatttccccacatatctgacctgcttattaccacctgataaaaatggctagctgccacatgttcaga

SEQ ID NO: 32184 - DNA, 1226 bp, Oryza sativa
ttccgactagcttcacaaggtgatgggctagatgacttgggttcgaagcctcaccccttctaattatttgatattaggtcatttcctaatattcacgttgaattactcattattgctgtaagtcattttagttttgttgtaagcaaacttacgtaactttgactgagggcttgtttggttcgtgccctgggcatctagcatgagaaatttgcatgcctgagaggcacgagaaaagttgattacattgcctggtcaggttgtgcacagctacctgagaggaaagaaacactattagcagattcatgaacaaactaattgcatatattaaggatgaaaaacaagcggaacacaagggaaaaaaaatccccaaatccatctactatatgtctttctttatagacatatcaatcacataattagataagatagatcaattgcataagttaaaaagagagcaggagaaaagaacgcaaggacagaaatcccccagatccaagcattcatcaaatcgctttggcacaccggcgacggctgctgcttcgtgctgaagatgggcccggccggcgacctcgcagtagcttcgtgtgacactgtgccggatctgacgacgacggcgccggcaaagacgaggcttcgagcgaattagaaggcagcgacggtttccgagtgtccgcgacaacaacggcatcagaggttgggatttcgagagacgatggcggcggaggaggaggcaaggtcgtgcgcgaacgacgacgccgacggaggctggggttccgcgcgacgacggcggcagcaaatagcgatggctcattggctttgtgctacatgaaagaagataatacacgttcgctgctacgcctgaaggtcaggctaatcacgagacagcatgcatcaggtcaggcaagggcaaagaaccttcaggctggtaaccaaacaacacttaaaatgtgccaggctagtcttaggtcaggccacttcttctcagggtagcaaccaaacagcccatgagtctataaaagaaatacggcaacatctgtaatactccgaatataacaaataagagaactataacacatatttcaaggtggatttaatggtactaatttaatattatagctgattgtgtatttttctttaaactcaattagaattagagaagtttgatttaggatcaaattaaaatgacttgagttcacacaatatggaaaggaatggatacaatggtt

SEQ ID NO: 32185 - DNA, 1192 bp, Oryza sativa
ccccaagggggtggggaaaaggcaggccgcacggccacgtggccagatgggaaggttatttccctctaccgtgagtacccccgagcccatatcaccgacacaaggttatcaaatattggtggcgttgaatgtacttagtttagtgcctctttaaaatttagtagtgtttttatgaaagaaaagtttcggaggtaccttttttatgaaatgatattggtaagattatgtttaatttcaagtagcaataaagcgaacatgctcttaacatttctcgcgtgattatatatgtgtttatatgttaagcaatttaaaattgtcaaaaccatgctatgtttggtttattactacattgtattctcaataacaaaaggacgctacataagttataaaaaacatcatcaaaatataatcatatgttcttccatatttaaacttttgctacggtgaaaactttcttacatattaccgtacaaaaggtatttatttacaataacaagaaaccatacttaaaaaactttcttcctccactcaattttatttggcattgggaggatacggagtatcacaacatatttactgtaaaagaaatggacacttgacagggctgatttgtatgaaatcaaatatactctaaagatcattttggaagtccaacttacccccaccccctcaacttatgcaaaaatacgaattaaccctcattttcaaccctccccctccccctgtagtttgtttctgtacccttcaatggctcatcggctacctcaagccctccacgattagctacacacttggttgccacctcccttgttgaaccaaccaccattattatcatgcgtcttttacctgacttgtacatactcaagtagtcgatgacatctcaagctcaggatgagacagggataaagtaagaggaggaagaaattgaggtcactacaacctcacttgaccaaagcctagctcgagtcaaggcgaagctcacctagctctgtatcgtttgtggagagctcatcgaggatgctgtggacgaagaaagagagatagacgtcgtctggtgctccgcatccgctcacgttgcctcaagccacgcttcgcccgcaacccagtcatattgcctagagctccatcacccatcgtgaatgcgtcatagttctagtggcggaaacaataggggagagttatggagtaagga

SEQ ID NO: 32186 - DNA, 559 bp, Oryza sativa
  unsure (1)..(559): unsure at all n locations
tggcttaggacgagctgggacccagggtcgggttgccagttcggtctgaatcatcataggccttgggttaaggcaggttcgtgtgggttcacggccttgattaataacattgtttagttctaggatcgtgtttacaactagctttggagncaactaaattcctttaaatgctgtttactgcaactctaaccccttatgttataattcccttgtactcccttgcatttattttgcatttgtgggtgtgtcttgttgagtacggtggttgtactcagtcttgcttaattttcccaagcccagatgaggagttccctgaagatgaaggcttcggtgtctagctcgtgcctgccgtcaagtgcctgtggtcgtcgccctagtcttccgctgtttttcgttgtctttgagtgtgctgggccttcgttgcccatgtaataattatatttacgcttccgcttgttaaactctgaattgtatcaacttttggtgtaccttgcctcctgggacaaggaataatacacgcacgtcaggaacgcctgttgggtgatttccggtcgtgaca

SEQ ID NO: 32187 - DNA, 550 bp, Oryza sativa
aattaatcgtcaacgccagaaacagaaaggcgcagccgcaaacaagtccgaggagaaaaaaaggaggaagttatcgtacgcatgcaggcaaacgcggcaaatttctcatgtgatctcacgtacttgatcatgttgcatataatcacatcatatttgtcgctaatttgatctggttatataatgcgagtacacgtacacacggcgtactacgtgttaccagaaatgctcctgcatgcccaaaccaaaaactcacgtatatacaaatacaccctgtatggacaaacaggtcaaggcttccgttgacctggttaattacgcttaagaatccacttaattagctaataatgacatgcacccgcaggtactctccatatcgtgtgttcagctcagcgtttacgattccgacattaccttccgtttcggtcaggcggaatttggaatttcgtgaaatccgtagaaaaccgtaaattccgacaaattttataaatcaaattactgagtttgccgacaagttctcgaaactggtcgattttggcgaaatcttgatcga

SEQ ID NO: 32188 - DNA, 571 bp, Oryza sativa
acccatcggtcggacgaaattacaagtttaatacactgtcgaacaaccgtggtttgacagggaacctgtccaacttacctcattaactgttgcagtttgacgggttagtggtcaaaaaaaaaaagtacgtgctacagtactcggtagggacctatcgaacaagggaacaggtagtgttcgataggtgtgatgctacagtgtttttcctttcataaaaattattttatcacctgtcgaactgtggttattcgataggtgccatgtcgaaccacggttgttcgataggatgctaaacttgcgattttgtctgactgatatatatttgtgcgattttccattaaaatcgtattattttcaaaaaaattccccccaaccccacccccataaaaaatgatattattttaaccgatttttttaatttggcggtatttgttcacatttcaccaaattttgttaaaaaaataattttggaatattgtcaccttcgatacaaatggagaaaaaaacgaaatattaaaccctagttctaggtccggcctatttggggatcctctagagtcgacctgcaggc

SEQ ID NO: 32189 - DNA, 1473 bp, Oryza sativa
tatacttattttttgataaaaagtgttgggtattcccgggaatcatggtggctccgccaccgaaagtaagatgatgtggttttatgaaagaacaaaagaagaaagataatttagaccatatatctaagggctaaaaaattgagatgatatggtttaatgagagaaaaaaaagataattcgaaccatagattaatcatctaaagactaaaaataattaatgtgatataacttaatgagagaaaaaaaatagcataaactaagtgagaatgaactatataggtatataagatagcgaggacgctcagcaaccttctggtgccaaggagtgatgttgcatacacgaagaagaaagcagatcacaacatatgctgagaagcaagctacaactgaacctttgattgaacagcaacagctagcatcaaatagatgcatattagtattattattcagtatgtagaagtacgattgacactaatatagacatgagaagttgctgctactagatagatgcatggcttttgttcatctttcccttttgttcagactctttggagttttagtaagagcaattttctgtagctgaaaggctacgtgataatggtatgcttcgtcaggctgttcttggctaaacctcgaggattcttttttcgaggatagaggatttttttaatcgctctactttctacatgccgaataaattttctggatgaaagccaccaatttggagcgcttgctcatgagagaatgtagcattgttggtatttggtcacatataaattaatctgtaagcgcacggataccactataccaccactataagtatgccaacggtatcgaatcacaggatatgtatgtgtgtatatttaagaaataattcaaccaaagacaacaatgaatagtaagcttaggataaagaggattcatatgaattaattaactctaacaggagttaatcctatcgaatgcttcgggtaacggctctcccttggtctaccaagacgagtccgccatgtagctctatgatatacctaaacgtggagagatacaagggactgacagagctatcaccatctaccgcctacctcactttctatagagcacacaataaacgaaggtaacctttaacctagacactacgtatacgttattaattaattactactctagcctcgggcaaaaatcttcttccttatctagagtctttgttctagagcactcagtataaactaagcggcgaaaccacaacgatgagaatatatctgacttaagtaagtaaactaaatactaaaatgatatcacaaataacttatatcgaagaaacattctcgagatacaagattggagagaggaccaacaactgtggcgctccttcagaactatcccgaatgtaggccaacatctctagaacatcccagagagaaaaccgccattcgggcactccttccgaagcttcccctcactctcttcctatat

SEQ ID NO: 32190 - DNA, 609 bp, Oryza sativa
tagcataagttacccaaataatcataagcctcaacgtgaagcaataaatgtacggaaaattctggtctttctggcagagatccaactttgactgatactgcttcagactctttcttaaagccagagagctctacaaatcctcacgagcaagaatgaatgggctgtgtgaaaggtcctacaaaggaagcctatacatctgatgctgaagcacataccatcgccactaatggtgaagaaacttcagtggttaacaactccagtgaaggatatggagtaataaaaaagagctctgtagaagaacctaacgttacaaacttttggtctgcttcatcgacagtaaatgatgagacccttcagtcagattcgagtgaaatagttgatagaagtcagcttcttccatcttatgaatcatctgaatctaaagattcttgggaagaattagctggtggtagcaataacagttcaaataccctggcaaactttcctggtcatgtgatttctggaaaagctacttgtgattttgagcgaaacaatgtccagtcagatacactgtttgatatatcaaaggtcagacccgataaaaaggaacaagacagtgaacctttgtct

SEQ ID NO: 32191 - DNA, 1064 bp, Oryza sativa
atcgtgcaacgaatactacatatgcagttcaaataaaaaatattatatttatatctagtgctgttcagattaatgccattttaaatcatatatcattttttttaaaatgtcaaatttgtgcaccatttagtttttttttaccaaactatgctaaatacataagaaatcctgctaaaacttggtaatattgctaaattgtcaaaattttgacaccgccaaaatttaaaatttggtaagatttaaattaactataatctaaacataccatttatatagaatttggaattacaagttggcttatatcaattttaatccatcttgttaaattttataaaaaaaataataataagttactccctccatttcagattataagacgttttaactttggttaaagtcaaactgcttaaagtttaactaaatttatagaaaaaaaatattttcaacccaacacaaatttattataaaaatatattcaattattgatttaataaaactaatttgatattataaatattattatatttgtgtataaatatctactgaaggagtacttggtagaccgcatgcggtactttctggtataatgaatgcacattggtccggcagctagcgatcgagctgtgctagtgctaccgctactaggaggcgactctgcgccagctgtcatggtcgacgccatgtccggcggcgtcctcgtcgcgctcatggtgttgctgctggtggctgcgcctgcgctgctctcgcggctggagccgcgccggcggccgccgcctgggcccgtggcgctgcccgtcgtgggacaccttgcaccttctggggaggccgttgcaccgcacccttgccgcggctcgcggctcgccatggcgcccgcgccgtgatgggccttcggttcggtcccggcgcgtcgccctcgtgtcgtcggcgccggcttgcgaagagtgccttggcccgaacgacctctcgttcgccgacaaagccgggcttccgtccggggagatcctgtcgtacgaatggccaccattggcaccgccagttaggttcgtactgggccacattcgccg

SEQ ID NO: 32192 - DNA, 829 bp, Oryza sativa
cggatccctgcacttaatctaattcacggaagtcatccctctgctctagacatagcagagctagccatggctgagctcgatctggagctcgccggcggcaaacggtggctcgcttgaggttgaggtcaaaagataaaatgaagagcaagctctcgcgattccattcctctagttttcttggttagaggacatcggagtagcgccgatggcgagtgtgagcggcggtggttttggggtgaaagtgcatgtgcgcatggaagtcgattacaacgaaaaggatgcatgcatgtggtcttctagacttcaggatgctcaccgtgggtcgagctagggttgtcgaggtcttggcggcagcggtgacttgtggaacggctcggcgacggcgctcctcctcgggtgaacgacgacggctcgaacgggacaatgagctgcttcaagcaagcatgcacgagggttgtgaggtcaaggagatggtgtatgcgcaaggaatcgaacaatggctcaccgaggcagcggtaatcgacgatgacggcggaggcgatcctagattggcgccggtgaagaaaaggatgtgttctccgtgttcttgatgtttccggctggggttcttgaggcgttttgaagaggaggttgaggcaatgacaatggcgcagcagctttctctgaggtgaatgagaatggccggacgacgatgatggttgaagcggcggcgctccggtgcgtgctccagggcgttgtcgacgtggcttgcgttcccggcgatgcactgcacgagaggggtttaggtcaaaagaggaaatgctcggcattgtgtggagagatgggaacg

SEQ ID NO: 32193 - DNA, 718 bp, Oryza sativa
  unsure (1)..(718): unsure at all n locations
gatgcgccnaatgaagaacttcgcngcaggccgcgcggncgactctagaggatcccccgatcgatcgtcttgtatgtttttttacatacttatatcatcattaccaattttttttaatatagtatctatttaattgttatggaaacagcgggctgctatgattacacgtacgctagcagggtgtatagaacaatagtcagacatcacatcccctaacacatcgccactagaaatttttgttgcggagcagagaaagaagtagcagactgcgactgatgccgtggtatatgtcactcggtgcgtaagctaactagctttttcccgatggaaaaatggaagctgctactagtatactccctccgtcctaaaatataataatttttagccttcagaatttatcataaaatatagcaacttcttcaccaacattctcttcctaaccaatcataaccctccaccattcactttttccacctacctcccatactcatccaatcgcaaccctcaaccactcacttctatctactttcttagtaaccgttttcaactctaaaacttattatattttgggacggatggagtactctttatgtcccataaaaaccaactaatactgatgtgacacatcataatactattaatatttattatatctaaattcgtaatattaggatatatcacattcggtattagattggtttttatgggatggaacgag

SEQ ID NO: 32194 - DNA, 503 bp, Oryza sativa
cggcccttagatgctatccatctgccgccggcactctagaggatcccccggggcggtgtcgagggtgatctcgtcgtgcctcctcgacgccgtcatccgctcgctgcgacgccgcttcttctaccagcgctccctgttgctgccggcgccgaggcctctcccctcctccctcgcactcctcgccaaggtctccgtcgccctcgcgatccaccagtgccatcgtccttgcatgctgctcccgccacctccttgccggtgagtgcaggtgggtcctcctccaccaccgcagaagaagaagaagccggcggtctcagtgcctctgtcaccgcaacaccggcgacaacctgctctagaacctctacctcctctctttcgccatcaacttcaagatgaagttgctgaagcgcagttcctggagatggtcaccgccgacttccggccggacctcaccatcttctgcgtccgtgccacggccttccaatagagtttctaaataaatggca

SEQ ID NO: 32195 - DNA, 724 bp, Oryza sativa
tggctttagaggtttaggtccagaacttgcctcatctagctagtgatgtataaaatgagtattttagttaactaatctaatcttagttcataattttagagtttatattattttactacacattttataattagggatgttctatgttagttacttaacacaccaacctagaaatgtatatgagttaagtttgataagttttggtggaaggggatggactatgcattcactggtctaacaagttttatttgggtttcattatagctagagtgtatttctatatacatttatatatatacatattgctcaatcaatactatgtgattagtacctatcctataaatttaaagtttagagctataacctgtacagaaggttccatattttattttaatatgttgaagcccactgtttgctggttctatagatatttggttcacttcatttagactaaagatgaattttctacaaattttacaatttaaggttgctctatgttggttattacttacataagtatttagaggcttttatcatacagtaagtatataattttattttataatttggaagtatatgttttggtgattctacagaacttgggtttactcaaaaaggatctaagatgaattttatatgaacttctaaagttcagcttatataaaactagttatttttaaagataatagttttagaggcatttgatgcagaatgtgtagatgtt

SEQ ID NO: 32196 - DNA, 526 bp, Oryza sativa
tgaatcaccactaggatgccctaactattataggtttaaatgcaattagagtatgctagagttctttgaaacaaatttctatcattatgttgacataccaacatcccaaactgtaagatcaatatgactctattaacactagtaaatgataggaagttggaggtttgtcccatcacctcatgtctatttttccctttttattcaaagaacttattggatttgtgccttatggcaaaagctggagatgcaaatcatatccattatcttaaaaaataaacttaagaatttacaaaggaacgtttgttactttgatttagtattggatatggtccaagtgagtggttagcaaaaatatcatagagggcaacccatggatcggatgtccacctaatatttcatgtatcttagcgaagaactactattgcctattgaaactagcatgtgtgttgttcgtggttccttctccagtagtttggttgatgtacatattattgctaatatttataaaagatatccatgtattaat

SEQ ID NO: 32197 - DNA, 1480 bp, Oryza sativa
  unsure (1)..(1480): unsure at all n locations
attgagccaaatctgtcaaattgaatccaaatttatcaaagttatctctaatatatcaaagttatgctcgttaaattatgttaaaaagtcaaaacaaacaaaaaaaactttgatacatttgggtcatatgagcaagggcaaccaggacaattcgccccttagttaacaccgttatcatgtcttcacgaaatagggtcgtcaaccttttatttttgattggaaaaaacgaggtcatataagcaaactaaaaaagtagggttaaattggaagttagactttaaaataggatcaaataaacaattgccccaagattacttcatacaaagaaagcattaatgaaatttttttgattggtcttatttacttatttggattacaacacatgaaaaaaaggtgtttttatattcaacaacgtatccagcttatttgaatgaaaaaaattaaactctacgatcaaaatcccataaaattcaagttgtatattacaatgtaagaatccagatataattcaagttgtatattacaatgtaagaatccaaatataaaacaactaaagattcaactattttagattgtatcctctatctatggtgaggcggtacacccaatgagaaaggatcgccttttccatgatgaggaagcgataggcagaggacatgcgtgcaatgagaagcgtcgtagatgaggaaccgcgctatcgctaatttcttctgctagcttcccattccttgcttctctgcagtggagctccaataggtttacctcaccaatatctgccagtagtttctcgcggcactactaccttctgatcacgtgcgagtattgccgcagagatgtgtatttcgtctagtaaatttgaatgtgtgtagttggtttattcccaaacgttgtgctgcgattgtcatgttgtaacaattttatgtcatgagtctagttcacatttgcatnttagatttattgaaacgtccagttcacaatgttatatgtgttagctcaacatgtgattntggattacttatgtgtcggtatgaatcatatctgtgcagttttgaagcaatgagcactaggagcagcgatgattctaaatgttcgatgggggagatatccgacgatgatatcgaagaatacattgaggatttcatcgaaggattcattacatctggacttgtacgaccgcaaaagggcaccacgtcgcgtgcccctactgactggccaacagtgggtgatgcatacattacaaaatattgctcggtgcaggagcatgttctgtatgtgacctgattaggtgattttacctaggctagtgacatccttcagttcaagtacaacttagtgtcttatgaggttagcgcactggaagcggaagcggtaggcattttcctgtgaactatgtcagggggtgaagctaataggagagcaaacaataggttcgaaagatcgggtcaactatttccaaatatttttaccattgcttcgagcg

SEQ ID NO: 32198 - DNA, 868 bp, Oryza sativa
  unsure (1)..(868): unsure at all n locations
tcctataactgctttgtcagtttaatattataataataattaagctttcatgttttacatatttatcatatattatagttttttatattttatatataaatanataanntncnncnccccgggccatgatgaatacttcttcttgcagcctgcagtcgctctagaggatccccgctcacctctaagctcctcatccccgaacactatcttaccctcttactccccccatccccaccccgaacacttaacttattgggatagcattatcgaagatatcaaggttattgggtttggaggagaagctcgctgaagcccgtatcgcacttcattgcataaacgttttgagacttaattaaggggggttatcatgttttttttctctcttatcgggttcacttcatcacttgtagaggatggcagtggcccgtcgagcagctttgaaagcccaaaaggttttgccaagttgggctcccgtccagagtccacacacctctcactcgatatcgatcatctcccgcctatattgcaagggaattccccaaactcatcaaacacgtgcgggttgaaagaaatcccaaattagtttctcatcagggtaacttcttcgaacagaattagtagtagcagacttggcgtaattgtgccgtctatccacgtagaaattgattatacttcagagaataagcgcgatccatacagcataaaataagcgacgcccgaaatttacaggaaaaaatatttggttcgaagggcaaaagaagataaatatttgctcaaaaataacgcattaaggcagaaccttctttcaaaatatggagagcgggatcattcaaattggatcatacgaaaagctttaagcgcaaatatt

SEQ ID NO: 32199 - DNA, 736 bp, Oryza sativa
ctgcgctttgagtgacaatcccatcgtgccagccgggcgactcttaggatcccccgtggcatgccatgtagataagaccacgatcaaacaacgctttggaccagaatgatacaataaactaagtttagggacctcaatgtgtgttttacaagttcgtgtacctaaatgaaacctcatgacaaatttaagtaccgctagtgcattttactctagctttaattaattacacaatactatatcaaacttttggatagttgatcgaattggcatgataaggtatcactttagaaatcatggaattgtttttgttaaaaaaatgaaaataagtgcatctcttcatctcaaaagccatatgtaagaacacttggtggactactaaggctgtgttcggatgccccttttcccaacccctctccctcgtttttcacgcgcatgctttttctaaatggtgtgtttttttgcaaaaagtaaatatacgaaagttgcttaaaaaatcaaattaatccattttttaaaaaaaacttaattaatcacgtgctaataaaccgctctggtttccatgatcacattccagatggtaaacttgttctagcgaacaccagcttagtaagaagaaagagcaaactttcaaacatgatagttataaaaaagatgtgcggtgggaggatattataccctaataaataatatgggggggaagatcccccgaatttggtgcatttccatttcgaacttt

SEQ ID NO: 32200 - DNA, 503 bp, Oryza sativa
  unsure (1)..(503): unsure at all n locations
tgttagagaaaataggatgcagacagactcagaacgccatcttctcgagcacatgatctacacaagtagccaattctgcacaaagttaagtaaactctaaactatatacattgaattttgcttcccaatagcagtgtagaagataatagattttctaattgcttttctttgtatatgctcattactgtccttggtttgtccttattcataacaagattgtttgcccatcctttttctctacaagatgggcacatttaaatgaactatttatcatataatccatgatggagataatgcgttgaaagctcagttagtgctgttgcttattaatttaagttaacctttttcttggngggtgccgagcagnctgtctatcaaagctcgccccttggggnnggggagngtaggatgcatagacaggatgaactaggngcgtgagnnnggtagaggtgaagcaagggagtaagatatcttaagtatcaattacgaacagtggagagcgt

SEQ ID NO: 32201 - DNA, 758 bp, Oryza sativa
  unsure (1)..(758): unsure at all n locations
tgtggncgccttcgnctttcattgacaaacctcttcttgcatgcctgcaggtcgactctagaggtcccctgtgctgaactgaatgtggtgcttttgcatggtggttgtcgttatgaaatttgtagagcggttaaacaaactatcagtttgggaacagcttgcagggttcaaatagtcagatgaaaggagaaatggtagcaggatgctactatggtacgagcatggcagatcatataatccgtttattatcgaacgcgaagataaactaggagatcattatacatcattattgttcgcaaaaaggaaaccaatgtccaaaatttctatgtgctctacaattgatctcgaatcaaagacgaacagagttagagctattccaataccattataaactacacaagaaacaagtctcttataggtaagggtatctcaacagtaaataatacttcacaaaaaagatgttcattacatgatgattttactactacagctgccgggaagattgccagtgaccgctcaagcctttttacattaccattcctccatcaatagtgaggacctgtatggtgacacgagagtatgagaccttcagaaggtgaaagggtcatcaaagaacacaaagaaacaccaattcgcctagtaccatcgaaaaatcacctgagttggaaaatttcatcgtatatgatattggcatgtggttttagaccctacatggtattcttatggacaaaggatttttacaacctaaggattctagg

SEQ ID NO: 32202 - DNA, 1450 bp, Oryza sativa
  unsure (1)..(1450): unsure at all n locations
agaacaagcctgaaaaagcatgcaataataacgaaatcatttcacacacaagaaagattgctcaaactaaaactaaggaggttctgactaagaggaagggatgagcagaaagcgatgcatctttctagaaccatcaacatctcaatgtatagatgagtgtcaaatcgagacttatacaagttgaatgataatctgatgatgcatctatttgatgctagctgttgctgttcaatcaaaggttcagttgtagcttgcttctcagcatatgttgtgatctgctttcttcttcgtgtatgcaacatcactccttggcaccagaaggttgctgagcgtcctcgctatcttatatacctatatagttcattctcacttagtttatgctattttttttctctcattaagttatatcacattaattatttttagtctttagatgattaatctatggttcgaattatcttttttttctctcattaaaccatatcatctcaattttttagcccttagatatatggcctaaatgatctttcttcttttgttctttcataaaaccacatcatcttactttcggtggcggagccaccatgattcccgggaatacccaacactttttatcaaaaaataagtatacttctaatatatacacatgtacacatatttgtacacctaaatcctcaactcttttatccaaacacagcccaactagtctcttgcgatgcctccaaccaacccgacccactccatcatgacccatcagacatcaattgacccacttagccaccacttttccagacagccccctctcgctctccctccatgacccatccctccctagctcggctccctcgcgccactccccatttgcaaaccctaggtggcggcgcggcgagacagcaatcggcggcgggagctagaccgtgctaccgtggagggggaggccattgccacggcgggcagcgcccgacactccgccaagctaaggcggtcaggtcggttgggtggccggcggccgcgagaggcagggacgggcaacggctcagcgcttagacgggaatacccaactttgaaatcctagctccgccactgcttacttttctatttgaatcatcatcttacatactatttaaatttaaatcacatcgaatgatataaacttatgtttttatgtttgtgtaaacttatgttgtttaagcaatcttacatattaaaatacttaatattatagtaaactccagccggggttccatctttacatagagttcgtttgcccagttggnnnacttggtcgttcagattgggatcaaaatgagatgacgtgatggagtagccatcacnatatactattaacgctaccattataccattagcgnttaacgtataaggttataccataaactgattcagaatacacattagtgttggacgcattagtacgtatcgacttgctgct

SEQ ID NO: 32203 - DNA, 604 bp, Oryza sativa
tgatatgaatatttcccaaagtctatagttgtaaaaccacctaatgttacctaattagattgcgaagcatctacctaaaattatactagggataccatgagtagagtgtccactagttgaggttttgtttgtctagggtgaacaaggtaataataataacaataacaataataatatggtcctaacaaaggtaaataggcatggttaaataaaacagtgataacgcgggaatttaaataaagcgataatgcaataatttaaatcaacataattttataaactgggattcaatatgatcaagatgatgtgtcttgccttgctcgttttcccaatcgacggcttcgacttccacgaagagcggatcttccgaagctgcagcgtctacatgaccaacggaaaagaaaaaggctttaacactaaataacttctcataacagcataaacaaagcacaaaaatgggttctttacattttaaggaaaaattagagacttgaactgtccaatttctagttcaaatggccaagatatggccatttgaagtagatatgctcttttaatggatatttgcgaatttcttcattaaattttcaattaaaaatatgtt

SEQ ID NO: 32204 - DNA, 719 bp, Oryza sativa
agtccgcacatcctcaaatacaaagcacttccctagttagatgtaggttagacttcccgttcgagaaactctaccttctacctgccctcaatttatgcacgattaatgaatgccacctgggtggaagcgagaggtggaaatggaaggtcttagttcggaggtgggatctctacctgatagttgcattgccattcatgatgatcccctggcattcgtccattcagccattcaccattcacccattcaactggaattttggttgaatgccggaattgtgtccacaaattgtggatggatagttggttggctggctggatggctggctggatggctggctggatggatggtgaatggctggcggcggttcggttgctttgaagcatttgttgctatctaaattccatttaaggtcgtaccttatcgcccagcatcatcttattctctatttgtattccctccatctttcagatacggatgtagccttggatgtgcccgtgcccaatgaagaggaagagcgcaacatgaaacgtaagtacaaaagtaccggacacccacccagatcccaatagaatccgccaaatcctgcgggaaattgtaatcccattcaccagctcctacatttaattaacaagagaactattgtatttatctaacacctggattatctccacctttcatttgatccctatttatagattacgctgcgttgctaacgggcc

SEQ ID NO: 32205 - DNA, 733 bp, Oryza sativa
acacatgaccagcatatttcctcatagcaaatctacgaggtgggaaattaggtccattatgtatttcaaaataaacagggtagaacccatgcaaatttggattatttggtttccaaaagagaaagtacttgaattgtattacaatactactactgatctcttcattaatcattatggtcgtatgcatgaatgaccaattgaacacatagaggaacacactagtaacctccacaatgaacattttctttattgttgttgtttctctcttccaatgcaatcacaatattaacctatccaattgtttagacatctaatgtattcagacaacttttcaaggcctcattaaaaatagaatttatacacagtttaagaattgttgaaaatacataaataatatcagagggtaataaatcaaaacaataatagcagaagaaaggctctagggactaaaatactacaagcacatgggcccatgaaccaaacaagtttatgcagcatttttttcgtcatttcggcaaaaatactcgataattgtgcaacatgatgaataccgctgcaaagtgtcatagaaaagcactggacctacaattatcaattatgcaggcatatgcaactcgaatggctttggcattaaacacaggaaaaggctgtaagacgagaataaggcatactagcaactcaattgcacgtcttccagatattatgaccagtagttgatttcactagtagaggc

SEQ ID NO: 32206 - DNA, 697 bp, Oryza sativa
tggtagatatacaattattctgtgacaactttagcagtttgaaaagtgggcccatgataatctagtaaccagtagctgaaaggaactgagcctcataaagaaacatcacacattgatcatatgaaatgcatgtactcataacttattatacagaaagaatgaaaagaaatatagatttgatggaaataataacctttccatcttggtaaatcgttgcagaagcttcaatatatgccacagctcggtaactattagaaaaggaagtaagcatatgagcaaatttcaagatatgccctagtgcatgaaaattttcttatatatcaaagttatctttcagagtatcagcagacagtcactaatgactaatctacaatcacacctatttatcaagtttgatgtttcttggagggtcgcccaaacattagttaaaccacaatattatgttttgtaaagttgttagggatttcataaataaaaaaaaatgttagggacttcatcaaaaaaatgctagggatttatacagaactaattagttcctacttgatccaactaggtaacttctttgatcatttagtgttggacacgtaatgttagggacttcatgaaaagaatgttagggacttcatcatttagtgttggacacagaagtattgagatagagttgcccatcaggaggattaaatagttgtaacaatgg

SEQ ID NO: 32207 - DNA, 530 bp, Oryza sativa
ccctcttgggccggctcggcccatttccctctccctctctctctcctctcccgcggcccatcggcctccccgcgcgcgcgcgccgctgacaggcgggcccgcccgccactcccgctgacgggtgggtcccacctgtcatcgccctcctcccgccgcgcccgccgccgcgtccgtgccctagcgccgccgccgccgcgaatcccgccgctcccgtccgccccgcatgcaatcaagaggggggaattaatccccgcgatcccctcccccgtttccccctctttcccctctctctctccctcggattcgctcggaatcaatcccgcaaacctcgccggcgtattcaatggagccgagatctccgcgcccgtttcctctctctccggccgctctctctccctcccgttgctatataattgctccccgagctccgctcttccgtttccgccgctcgccgctcgctctcgccgtcggaatcgtgctcgcgccgtgctcctctctctccgccgtcgccgccgagctccgttccgtcg

SEQ ID NO: 32208 - DNA, 661 bp, Oryza sativa
tatagggcgaattcgagctcggtacccattttgcttcttgcagacccatttgcttaatatgaataaaaaattgaaccccaagggctccttgctttcttttggtggggtcattatcaatactatggattattattcaggtatttttcttaataatacaatgtgtcccttaacacaataaaatgtttaaaacatccagtatgtaaaagtggcagtctgacccctattttgttttgctgcagctctttcaatacttcaaaattcttctgttgtttccagctctacatatccaaatcgctaaagtctctcaacagagttactctggtaataacaaacaccaattttgtttgatcagttgatctcgttggcttttctatgcactgtctcaatatagtttggtcgccattcaagtctcactacaaatgttgaacttggcctgacaccaaatatttataaaatgctacctgatatttttaatatttcatgtttcctgaccaaaataatcttgtgggtcctcgtataagttaattagtgacattcttgaagctttgttatgccacaaatgtcatggggggaacttcatttaatgatggaaagagcaagaactcaaaaaaaaaaacttttgtcgaaccaaacacgtcatgggtgcttatcttcaaaatca

SEQ ID NO: 32209 - DNA, 647 bp, Oryza sativa
tccaaacatccgatgtgggttttagtccgatctaaacagggtctagtgctatggctccttcatgcattccacgtttcattgctctctttctatcgttaccctctctacccagtgaccaactcaccatagctctctatatcgcctatcgtttgggaagtttccacactcccagccatagtgatagcggcatacacggatgcatctagcgcagccgccgctccctcatctcgatcgcccgacggagacctggaccgaggaggtgatcgttggcggcgcatccccgcacgagtgccgactgcgcccgtgcatctcccgactcggctgtattctcctgtccctccacggatccactcccgaagatgcttgcttgctgttgctgaagatacatgctggttggtgctgctaatgcattcttgatgttcttgtgtacctgtatagtgtgtcgtccgtggatccggaagagggaagcattgatgccgttttattttacttttgcaatcactatttttttgttcccctggccttttccttataaactattctgcatttatatttttattcaactgaaattgaaaactaaagaatgtaaattctttgattataaagacgacagatagtttgaagtttttgaatctggatgtggtgct

SEQ ID NO: 32210 - DNA, 725 bp, Oryza sativa
gtgttccgtgtgcactgtaagtaaagttactgcagtgctgagatattgaagagcttcaatggtaccatcactccatcagaaacagtaagaaactcttccatccatgtgacatgttctattattctgtaccctatgcattttgtcatatagggcctgttgtattcacaggatcgaattctttacgcgggtaatttgatataaaacattagaatgacctcatttggtgggggtgcctaaggggattgaattacttgtgtttatcaaaagggattgttagcccttcactcttggcagattctctctgggaacagagtttggcacaattagctacatggatagttagacattgacacaggctacaaaacaacagttcctactgaaatcatcgatgcaccccaatctttagctgttttgtcataataaagcatagtgttgggaattactagagtgaaactcgaatcaatagtgctaatctgagatagatttaagccacatgcacacctgatggcctaaaaatgtgggtggctgttaacaactgagtcagaataaagctctgatgatagcatcatgggtataaagtggcgactatgggagttagtagacttcactattttcctttacctttctttgatataaaccttcatatgtagtcatatatcagggttgctgcatgttagatagaacacactgaaaatccaactcatcttgagttaaagctagagttc

SEQ ID NO: 32211 - DNA, 611 bp, Oryza sativa
aataaataataggagggaacgtacagggaggcagatcgcggcggtgctagggtttggcccgggccctaagagcggtaaaaaaaggagattggatcggactgagtggaaaaatacggggataaaaaaaccagatgatgaaaaaaaaagaagcctaatcggacataaaaaactggcgagaaaaatagacggacaaaaaaaacatattcaattaaaaccgattcctcaattaaaactgaaaaccgatttaaacacggatgacttactaaaatctcagcaaaaatatcttcaatttttacaatagtagagatttagacaaagaacaataatatcatattgcatgaaaataataattcatgaccgtcaaaaattatatataatcacttcaatatacaatatctcaatataatatacaagatatgagggcaatatatgtctgcaaaaaaaacaatgatccaaagttatttgattaacttgttgggggtataaaggcgggaaacgtgcgtgtggaaaatgagggagagagaagttgggaataagtagtataggacgccctaataatgttacctccccaagcttttttttttccccattttgtttaaaaaacaacaaac

SEQ ID NO: 32212 - DNA, 2667 bp, Oryza sativa
tcggtaccctacccctgggattaaacttccaaaatgtggacaaaaattccgaaataccgtattataaacataagattgtaaacattcaaaatttgtccaaaaacttaaagtctgacatttcagaatttttatccaaaatttgaaagtttttgtctcaggggtattttggtcatttggatgaaagtgtacagtactaacggagactaaccggatggcggtggtaaatcgtagaagttaagcaaaaatcgatggcatattatagaacgtgacaaagtcagtggcaaattgtagacctatgacaaactcagtggcatacaatggattatctctaggttaattataccactacatgggtctgccttcaccagaagatatgctccctacctagctaccctcgatacgatgtcatgcattgaggacctcattttttttttcatgttttagagcatatttcttccacgtgagcaaaatgttcttttctcagggctaggcggctagcaaagttgatggatggaaccttgacgacaatagcatttcttagacaaataagcgtatacgatggcatctcctggaactggtatcaggcacttatcaatggtcagagataattgaggtgtgcttcatgccttttagtggaaatccgcgtagtaataatatcctattatgtgtattaatatacctatctttgtgtgtatatatatatatatggggaaaatatattatatgtattcatatgactttaaattgtatttgtttttgtttttctccagagttgaaaaccatccaagctctgttttcgtccctagtagttgcatgtttgtgaattatcaataaatgatctgctgtggctggtgtttactttcagaagggctagtcatgtttgtttgaacttgttatatctcgtttgtgctgctagttgctgtcaacaacggaaagggcaaattaattgcattggtagttcaattgtagaattggtaagacaacctgcatctctgatcgaggtgagttgtgcattgaagactttaagccataccaagggcattaatataattgtttctgccaatataaaatgcgtagggcttgaagtaaagcagtttaacaaaaggttcaagaaagacagggcaaaatgatcatactggaatttagaacagcaagcacctgcccaacaatctcaggaagacgatttagtcatagagaacagaccagcaattctctgttgcccaatgcataaaatccacaccttccgttctgaagaaatgctcacagcctgtgctgaaaaatggggcattatctcatatattaagccgacattcaggcagatcttacagtcgtagatacagacgccagtgctctgagaataaaccgaacccaagaaaaattacatcatcccaagtcgcggctagcaaatacacccatctaagaatttgtggtatgcatctggaggaataaacatgctcatggtagtacagaagtattgctggcaattagggcatacaaacgatacaggttttaactggtgatcgccgatacaaattgtagtaatcgcatgcctgattcttcttcaggtaaggcttcatggttggaggagtgcagcaatcagttcggtggtacacagaatcacgaggtcgcagctcgagtccatcccagttcactacccaactgtgtttctttctctatatattccattgccagcatgcgcagaagaattagacctgtgaccagactgaggagttgaaagaaaactttagtctggggatatccaagaagacaattataatccaagcacataggaaactaaaaaagatacccgtgaatcagtagacgagcagtaacatatgttatttacttgttttgttacagaaacacaaaattactggtaagaaaaagaaaaattatgcttccaaaggtggtgttttgatccgcatagacattttatcgatcttctattgctctacagttggaatcaggagaggatagaatagggttgcttagcagaattaaatagtctgaccgctattgtggcaaaaaaatgcacattcacaagagttggttggagcagaaagtcagcttgcaactcagtaatcaatgttagcattgacacacttcaacatagaattgccacattccccaaatacttcagtcaaggtgatacagtcaatcaaggagtaaaacaacaccaattcttcaaccaaaacataaatcaagctgaaggcaacaagtatattctttcaatcttaaggccatgacagcatcaacatgattataatttatatgtcatagataactgggcatatgtgcacagcagattaatacagcatgaacagattctgcatagtttacatacagaactcatatttttagactacccatgcacctagtagatttaagctaaggtttacttaatgatacccaacaaaataaatgataatgctgcttgtctcaaaccaaattaattgcaactcaaatattaagaactcttcgcaatatttattacatgatactcaaatattaagatcttatagctgaccaatagaatagacactgaaaagcatttcaatatgagacatcataaagcatggaaatacgggaacaccatagcaaagttctttatcagaagagtataatgataacagattgcaataccttatcaaaagtaaaagtgagaca

SEQ ID NO: 32213 - DNA, 600 bp, Oryza sativa
aagaagaggaggagagagaaagaaaagaaaaagaatagaaaggctgacaggtgggccccatgaatagtaacctttcatattttctagatttaattcaaatcctattctttaaaagcccatatctcctaaaccgtagatccgattccagtgaaacttggacctaaattcatataaattcaaatgcttcattttgatgcctaattgctattttataattttatttgaatttattcaaatatcatttgaatttatatttgccttttgcaaatattttcttttaccccaaaatacccattagccactgaaaagctgccggttggaactttacgccttccacggggacgttcgtgtggtttactatcctcgacgttggactattggttgtaaagcccggcaaaaccaaacctaaggtcgaagtgctgctcctggcaccccacgcctcgatgcgtacagcggtcggagcttcactattccctcgacctccacagtacgtcgcgcagttagatctcgagctctgtgtaatcctagccgctccgccgccatccacggttgtcggagtaacacttccgcctcgctaaacttgcacaaacctcccatccc

SEQ ID NO: 32214 - DNA, 639 bp, Oryza sativa
cctgcaccccagtttgttgtcgattaattctgataccgtggatgtgttagacacgattggttttaaagggcactttctcgctggaaaagcaacgaattcccttggtagtcaatgatgtcctcttcgatgcttcgtcatggggggctggaaattttctttgcctttcttctggggtaactgggactggatggtaatgaaagtaggcatccaaaggctccaagcagtacaattgagtttgggagagtatgagtcttgagaaacaatctagaagaagaaaaaaacttgtttctagcttctagtttattttctagagttcgtaaatataagggctcgtttggattaaaggataggaacgccataggatctgaaaagtataggaatagagaaggaatttaagcgtaaaacagaataatgaaaaacaaaggagtacaaaagttgagggcatgcggatcacagtaagttgactgtctaggacttgcatgtacgaagcaaaaaaagagcttgtgatggatgattttttcctggacttttcctgtgaaaccagcaccaaaggaaagggaattttttttggatagtattcctccaaaaataattaatcgtatgaagcgggtgatcgctgacccccttccctatacgtgc

SEQ ID NO: 32215 - DNA, 590 bp, Oryza sativa
gtaaaaatgcatcacacttttagagtggcaaaaaaatccacaacacagttcgacaaatacaaagctaagagcagatatatgggatatccgatatatctaaagtgatgtacccagaaagttatcttaccaagtcaaagttgatggattcaaaagcctcaactagtggcaaaacctgcgcagataatgaaagcaaaatatcaaaagcatacccaacacatcattaatttcacccactgttacagaggagggaataaaaggcaccacaaagagattagttgagaccagctgagtagtgtactccaacataaagattttcctggacgtttgactatctcttaagaaaaaaaaaaaactagatgtcaccaaagcgattaataagcagcgcacaaactcattgttaactcacaatctaatttccattggccagattgctggaaagttgtaacattagcctgaaatcaagtacccaatgaaaaatcctaacttcctgttttctcaaacaaagaaacctatagcctgacacgcttctacatgccacattagcataccatagaaacagagcaattaactatgcaaatatgttatggaac

SEQ ID NO: 32216 - DNA, 651 bp, Oryza sativa
ctgttgcctaccactatgttggatgttttatactttcagatttatgcagatattgacagcgtgaatttggtatttaatagccgtcaacagacgccaacttcacgctgtcgacccggagcaacagatccggccatggggggaggaccaaatccgtgcttctcggcgttggagttggacgccaccgatggcttttcctcggcgtcggcgccttgccatgcatgagctttctcttgctggcacctcgaccgccttgaccatgagcgagagagagagagagccccatcaaggtcgttctcgtagctgcctgtttttgctggcagcgactcgggcggcggcgaggcgaggcgggggaggggaggagaggggggaggggggcggcacagcttgtttcaccacccgtgtcgtccccggggcagagcgaccgggcattggtatcgctgcattttttttctagctatagaattggtgcatgtagtagtgagcactatatagaattggtgcatgtagtagtgagctctatacatgagttaggggttgtttagttctcaactaacattgttataacttattttagaaaagtgtggcttgtcatatttttttttcctatagattgtaagttgtatttgtggtaaagttaggtaaaagattaaa

SEQ ID NO: 32217 - DNA, 878 bp, Oryza sativa
ccaactttatgaagacccaaaataggaccacttaagtgctactccagaatcaggctagcacacgtagacacagataatatcacagccaacatcacaaaagaaacctaacggttattaataaaatgactacgataagattatgtctacagtttaaatttattctgctacgaaggacctaggaatataataaagtagcagtgaaaataagataaatacgtagaagctccattcaacttgccacatgtagtcaattgtgacacacaacctattcctcgtcttcagcagcaaactcttcaggaaacaataaaaacatttgttctataattgggggcattacaaggtgagtatattctagaatactcaacaagtacacagaaatatgcatatgcatggctaacaaagaaggcaatggctatttcgcataaacaacaatttttagttataaacaaattatgaatagatttaaaacaacatttataaataacaggtgctaccaaccattcatcgacacatgatctatctgcacaagaccatatagctatattcattaaccagcacacagctcattcctggttttcacaaactgcccctcatgagaaatcaccaagcatgtccatgaccactgacgcagctattcgaatagattagtttaacactcaacagatattgtacagcttgacccataagatacatcatccttttaacggcaatgcgcaagtgtcacacttgaggttatgtgcagccaaggaatatgtaaggaggctctttagacactccgccccaacactgctttcccccaatgagacagctttccctcacacagcacacaagaaactacctatgggtaaccttcacacctatcatctaggtactgccag

SEQ ID NO: 32218 - DNA, 562 bp, Oryza sativa
attttaagtgtatgtaatttaatatgtaagatatggacttatagtataagatttatcttttttaaaaaaatgtggcaccatagtagatgggtagtttagtgaacaaccataagaaatacgccctccatcccataatataacacattcacctaaaatcttttattttatattatagtacggagggagtagagaatttgttgtatgccactgattttggccatattctatattatattaatgtatcaatgagtttgtcaagttctacaatatgccatcgtattttgtttaacttctataatataccatcgtcattcagttaggctccattagtgctattgtacaattttatcctaatgaccgaaataccccgtgatgaactttccaaatttggttaaaaattttctgaaatatcaaattataaatcttccaaagtttgagagcagcaagtcattgcaatggctgctgctgctgatattatacaaccaccagtcacatcaaaacgcaaactttctcgcagaaagccgagaggaaagcaagaataccaccaagaacggccaaaagc

SEQ ID NO: 32219 - DNA, 834 bp, Oryza sativa
cactggtgttcctgggcctgacccagtgctagtcttgggccgaacggagtaaaaacagaaggaaaaagtgcaccaaaggtccctcaacttgtcatcgagatacaaaaacgtcctccaaccgcaaaaccatatatgcggggtccctcaactatataaaaccagtcacccgaggtcccttggtggttttcaacctggttttgtctgacgtggcggctgaatcagcgtgggacccacatggaccccacatgtcagctagccacatcatcaccctctcccctcctctctttttctcccctctctctctcttctggtttggtgctcttggcaggccagtgccgccagccgacggatggcaaggagaccgactgggcgacgcgggagaggaggtccggcgacgtggcggcggtggcggtgatggcgacgacgacgcgggagcaggggagcaaggcagcggcgacgacgatgacgtgggagcaggggagctctcgccgtcgtcaccgagggcccaaccacgatcttgtagcaacgtcggtgcggcgatgaaggggaacctggcgaggagtgctagggccatgtcggcgccgacgtgcaattggtctctcccccctatccccccacctctacaagctcctctgtctcaccgtctccacatccgcctcctccccaccccgcgccggccgctcccggggaccacccatgccaagccccggcccagcccccgcctctcccccctcctcctcctccttctacgttgcgccctagcctcctcgacatggagcgtggctacgccgcccgccgcgccaacgtcgacgtgttcctcacctcgctcggcgt

SEQ ID NO: 32220 - DNA, 608 bp, Oryza sativa
tgacatgatgtggggttgtgtcttgtgggtacagtggtacacctctgatcagagtaaaactattcgaatagccgtgcccgcggttatgggcgggtctaacaatgtctttcgtgattagtctcacacctctcatcattgtaaaagatgcttaaactggtaataatttgtttagctcctggtttggaatggtatattcctggtttggagatagaactgtgcagccggggtggttgttcagaatggttgggcctatacaacagggtatgttgtatagcgttggattaatattgtttaattacttaactgttttatcaaattctcaaatgtttgctaaatgctgcttttgcaaatgcaaccctattatgccatcctttgttatcctgtgcacttgcatatttgctgcgtggcttgctgagtatgtcatatactcaccttgcaatcattcatcagaggaagagttctacaatgaggctgatggagtggaggaataggtgtagctttggtcaagctgcctgtggagtagagccgtctgcgccgtttatttattttccgctgcttagatccttattgattgagaggaactatctacctctgtaatgacattttat

SEQ ID NO: 32221 - DNA, 743 bp, Oryza sativa
tttttaccaaagtgatcatatccttttttttagaacaagatttattgatttttagaacaatagtagtcatatcctagagatctagaacacctgaagactgctaatgcagagaaaacatggcaacaatccaatttcttcaatgagtaagagtgaaagcacagtacaataggttatttgggtgaaaaaggttagcattacagcaagaaacccatcgcatatacaacagtatgattgaaatctacagagagtagagataccttggacgagtagggataccttgaacggtccatttcgccctatcaacccacaaagagaatattcctgacacttggtccagagtgccttcaagatcggtggaagtctctaccatagtcctcagtcctcgcgaccataaacatcgatgatacctgacaccacagtcagacggactcctaaagaagtataatgtatgaagcatgctcagattgagaaaaaattaataaaaaaactaaatgatgatgcaaggtcactaccatccagactgtttttggaaagcaatatagttcctatgtgttgagtgtccatggagtcttcctctttgacagtatcggtaaagaacacaattattttctgtaacaacatatgcccacaactcaagttaaaatcatttttaaaactgcacgatcataatgggaatagtgcaaaagaggaaatacaccagctgatactagttagaagaatacatcactaaataattctaaagc

SEQ ID NO: 32222 - DNA, 557 bp, Oryza sativa
aataggaaaatatctagtatatataaaaaaattaattagtccttcatatatatgaaaaacatatttcttttatatattaaccaatctgcatattcgaatgaaaagggatacagttaaatttattaccctcactatatgctgtatcatgaagggtgaaaacacaatatgcaataatagaggatatcaatggccagttcttgtaaagactcttctgtttatgtgaatcttcttcaagtgtacttcttgagttgtcaatcatttcaatttcaccttcagtatctttatgcttatgaagtgtctcctggtaatcaagattgtcaatttgataaatattttccctcgcggtcatgtcttaataattataatctcacttaaaagcttcaagtacacaagtcacagtttttgggcagtagtcatgcaacaattgagcaaaagaataaacacaaattagtttgttcatcctttaatcatattttcttttagacataatggaaatcaagaaaatatttttttaattagtggaagtgtttcatgttgggtaccgagctcgaattcgc

SEQ ID NO: 32223 - DNA, 527 bp, Oryza sativa
acatggtcgataattgaaaccgaatgtagccaggccaggcgattaaacaagtggagagattccattccattctcagactgcgcgcgagctagtgaccgaccgaccgcgcgacccggcggtccagccagttggcgcgcgcgcgcgagcccttaccgaccgatataccctagttagcggcgcctagctgcatgggcgcacgcaccaaaccaaaactagctgcgaggaataattgtcgctcgattgcttgcttgggttgggttggcaaccccaacctcgcgcggcccaccgcgtttcatttcccaggttgcttccgtgcccccagctagcctagctccatttcatttcatattcccctctctctggtcacggccgttttcattccatccctgcactgccactgccactgctcccccctgcaacttggacatgtggcttagctactcgccgtcccggtctcggatgatagtataagcgtgagggtttgggcaatctaggcaggagaggtgactgctagcgaggaaagggag

SEQ ID NO: 32224 - DNA, 657 bp, Oryza sativa
ccccgccggcacttccgctccagatactcctcgcgcgccgcgccacgcccttcactcagcaagcccgccttgcgccggagctcgggtacgtgaccgactgctgggagataagagatcgcccgagcccgggattaaggcagaaaataggggagaggaggaaggagtctctgctactttggcggcgtttttttttctctattgctcatgaaagccggcgtgatctagggttttgggcattggactcggtgagtcgttccaggtgtggttgcaagatgttgtagtcagacccagagttttggccgtggcaccatgtcaaagagtgggggattgtgcgcaagcctgacgccaatcctcttgaaaggagcaaggggacatggctgttccgctgatttcgtaccttcgtgagttttccggttcccctccatcatcgttatgtgcttttgttatcttaggtcctgttcagtttaatattattttcaaccattttttcgtaaagttaccaaaattttggctatgtttagtttgttgccaaattttaataaatacatatgaaatcttgctaaaatttttgacaaccttaccaaaatttggcaatgtcaaaacttggtaagattgaaaatgatagcaaagtaaacaagcccttatttcccttggatg

SEQ ID NO: 32225 - DNA, 826 bp, Oryza sativa
gcacttgtgcgtgggaatcatctcgcgcggccggggagaagaccgcatctgaatcctcacagcgacgtcgtggtcagtcagccgagccgttgtctggcggtggtagtggactcgtgcaaggtccaactgatcgatcatcgcgtgacttgactagacttcacttttgagagggagacttgcctggcaatggtagctattgacttagacttcatatttcgtcaactgagatgcaaaagcgctctgtagaattgaattgcagatggagcagttaagcaggtccatctctgtctctgatttggagccctgctttgtataagtttaagggtttattccacgtaaattgttcaatagatctaatagctagttttaatgttagatttgttgattctttggtcttctcattctctttggtgatcggtggctatcgcatttgtaaggtctttgatgtcgggttgcccattattcaattggcagcatcggctttatcgttcagatcaccggtgtgtttgatgacgttgtttgaggatttataagatggtgatcgatttcgtttgtatacttctatatttttgtttgtacaggagttgatcaaaactgtggctacgctcatcagctcgtatctcttatgttattctagcaagcagactatctttatttcgttttggtagttgttcttatttgactattacgtgtaaaaacactaataatctctatacaaatgtaatgtacattgtttcaatgagaaaaaaaaaagatccaaagtagtaccaaagcgcaatgctaagctggttaggtagcaggttacaagttagctataaacacgtgg

SEQ ID NO: 32226 - DNA, 518 bp, Oryza sativa
aagtcgggagttacctcgtcggcgccagctcgggccatgcggttgtagcgggacacggcgcccgcggggctgtgacgcgcgacgtcggcgagggcgcggttcaagccgtagatcgaggcgcccctgccacgccggagcaattcgtcgaacacgtggcgtgcgtcctcggcgccactgccccccgcgcggcctcctcgcccttggatcgagccgtccgagcgaagggcgccaacagcgcgggaagcggcgcggcgcgccatgcccgccctagctgacaggtgcagcagcagcgccggcggaaaccaacgccgcaacgcagtttgtcttatacggagaggtgggcggcaccagtggaggatagaggggaggggaaggaggagatggcagggatggtgtaggagatcggcgacgggcagggcgtggagagaatgagagatcggccggcgacgtcggggcagggagatcgcgatcgatcttttctgcgcggcgctcttggggaaaaaaaagccagaaaaaaa

SEQ ID NO: 32227 - DNA, 840 bp, Oryza sativa
ctcacagtaccccaaatcagaaagggaaaattgaaaccatgccattataattttgcaaaatttaagatatgccatcctgacccacatgtcattgactcatgtgggtcctatatgtcattgagatatcgatggcatatctcaaactttgtaaaattataatggcatggttctaaattacccaattagaaacccaccattgaagcaccgatcatgagcctcggcggccgcggcggtggcggctaccagtggcgctagttcatcacgatcgagccttggagtgtgtgcccgtggccgttctgggtgcgcatccacgagactgagtctctcggcctcacgcgcggcgtccggccatctggttaattagtcatcctcttacacggccatgtactggttgtatgattacctcttttcgatttttgcattcaagagtaaatgagtaaatcccgtgtggtattcttttctttattcatacattgcactgatactgcctcaggcgatagctgtttcgtgcttatgttttagaggacaatgaccgaaatatgagcaacagccatcgtagcaagtgcttgtaagctaatttgtctgtccattctggcctgttttctcaacatagcaagatgattaaggagacaatagacaatagtgtgcacataatctggaaaaatgatttagttttactgtaggaccaatcaccatacaatcctaatttttgagttgcagaaaaaaatataccaattgtaaattgtttgacacgctctattaatttttttaaggtaactagtaagatgagggctactcaagatgggctaagtcggtcagctgcaagaagtgatggagtgc

SEQ ID NO: 32228 - DNA, 964 bp, Oryza sativa
ttaacagggccttagtttagcctacgtaccatgcgcacgctcgtgttgaagtcacatgattggtactgacaccgtgacacggtgacaccgagtaatcgtggcaaaatcatgaaactcggcgacgcgtaatgttgcttgcaatcattggtttcacggggacctccattgggagtttctggagatgcgtagatggataagcttaaggtctcggtcacaaactcacaatcacagcccacttcattcccatccttgtcggtccatttgatgatccaaataatctcggcctgatttaacgattagcatttacatctaacgggccaatctagtgaaattctgtaatgtgcaaggcccaatcacatatattttctcgtggcctagcacctccgtaaatagtggagtaatgtccttgttatgtcaaagccatagcggcatagcgcgcgccctgtacttttgaagcagggcgagaatacttaagctaggagtctcttttccttctgcccctctccccgaaacgacttgcatatgttaagcaagctagcgttccttctgagccaggatcataacttgttaggactggttcattctgtagagaccatcagcaattatgtacttcagcgcagtgcctaaggcctagtacaagctttcttttatgaatcttagtagcatcaagtattggtttgggcttgtttaaaattttcattatgtggttctggactcactgtgtgagtttgctattttgtgaactatgtaataattggttgtagctcgtttgagtaaaggccgggatatttgattctattatctaaaaaaaatcaaaaaaagaaattctaccgcagttagcctattgggtgtgtttggataatggaaaataggaggtgggattgagattgagaaatgaatatagggttaggattaaatggaagaggaataatgaatgggtaagatttaaagatatcttttgggt

SEQ ID NO: 32229 - DNA, 600 bp, Oryza sativa
tacaactacaaacaagggagtagtagtcgtagtagtgatcgtcaagtcgtcaaggagttaggcatgcatgcgtgattcttcatcgtctcctgagtcccgatcagccagatctgcagctagcgtcatggagtacagtagtagtacattcaaattgccatggtcccggaggttaaccccgttccagtacctgtcccaggttggccacctaatcgagtgctcttgtagaggtgtggctgtgcatgacagttttgatcgatcatctccctgggcaggggcaggggcagggcatgctcagcctgactgcatctcaatcgctgctcgtctcaatagtcaatcgtaatcgcaatattgccaagatgtttctgaaaccgagcctgtttatcctgacctgtgtgatgcagcatggggcggctagctgatggcacatgtaagtttgtgtctccgtgaatgaatgctgtaagctatagctagctgtaatcgtccggatctcgccaagcagatcaatcaaggcccgaaatcatccttacccgtccctcctcggccggtctttcagctcaaaaacccaccgaattaaacgcgaggaatcctcacaccagcacg

SEQ ID NO: 32230 - DNA, 537 bp, Oryza sativa
aaagcacggtttaaatttgttatagtctactacttcctccatttcatattataagtcgttttgattttttttagtctaacttatttaaatttgactacgtttatagaaaaatatagcagcattttaacacagaacaaatatattatcaaaatatattccatgctaaatttaatgaaactagtgtggtgcttaaatgttgctaatttttttctataaacttagttaaactcgataaaatttgactaatataaaaatcaaagcgatttataagaaaaaaaaagtcaaaactactccctccatcccgagaggtaataacctattaccgaattatacattacatacaactataaatctagacaacctaatcgaattcgtgaatctagataatatctaatccaatactatattcttatattttggaagaaaagaagtgctccctccatctcataatatagcaacttagtaccagacgagacataccaatttgttatattatgggatggagaagtaggaaagaatttattgcaagtttgcaac

SEQ ID NO: 32231 - DNA, 741 bp, Oryza sativa
gggcatgtaacaaagtagtacactccgattgtaaacatgtacacaatctgcatttcttggttatgtgcgttgttttctacccaaataagtggccatgaaataacgaagcattccatgtagatgtgaaattgcatttatagcttctgcctttctatgaacagtaacacaaatgccttcttcaattcaaatctttgcatgcttgtgtacgtccaattaatactctctacgtataaactgcctttaagcacgttacagtgcttcatttagtctcccacagttgttgacaataacaaaccaagcgaaaggaataaaacaatgtcacgatactgttctctcatatgcgcgcgcatatgatatatagctcgggacaaaaccagatgaaccatttctgtcagcataagaacaaaacgcacagctaaacttttagaagaaacaaagaagcaatagcagtacttatgcaagtgtacaaacaattggtaccttggcgtttaattcaaatccaatgttcgacaaatcacacggccggttcccataccgattcacaaatgcaaagcttacaatacttgagcaaatctttaatttgctctctggtgtgttcagaaacgaggtactaccacttgtgatgaatatgaactcataaatggtactcgatctactataattcctggagcgaagtgcatatgcatgtatagctattactcctatatcatggatgatgaagatcatatatatgcaacctgt

SEQ ID NO: 32232 - DNA, 742 bp, Oryza sativa
tttcttgtgcatgctagcaatattttgaaggttatttgtctctagcatagcttgtatgtattctagtattttcatgagatttagattttgcttttaagggagatgatgcatgacacttaaattctatacttgaattaagcaaatatgcaatgttgatgctagcatatggtttgatttctaaatgctctatatatatgctttattaatttgttattctacaaatagtttaattgctcattgtgaaaaagagaataaaaatataaaaaaatgaatatcgaatccttggaaacagtcttgacgacaaggacgtatttaatgtgagcaaaataatgggtgctgaatccctggaaacagtcttcacgacaggggcgtacccggaataaaagagaaaaatatgagcaaacaggctcaagaaaagaaaaagttaaaaaattctcttggttattttgtgctaaaggttatttgagaaagagtgataaatgcagtaggtatatgtgtttagtgtttatttttcaacctatgtgcttgttaagatattgcattataaatcgtatgaaatcatgaactttgatagttgattcaagcttaattgtaaaatctttggttcatggttatactttaatgcatgctcgttatgttatcgatgggttcatcttctttttattgcaacacatgacatgatatgctatatgtatgctaagctcttatatattaatgaccatacttctatgcttgaggaatc

SEQ ID NO: 32233 - DNA, 555 bp, Oryza sativa
ggtgcccagcaaaaaggcaatgacaggttactcctcaaacataaactcacctatctacacataactaattagcaatttaaaggcatttcctaatctcacaactcttaatttcatctacacagtgaatgagttgtcgacgtgcaatccatctcaagacttttgcttatatatatgtacaaagctatgtcccagctagaagacagatggcagttgtgaaattacctaggactaaagaaccaagatcttttgttcatggctttttgtcatgattatcattgtatataagtattgccttacctaccttccttagcattgtatgatccaagatgctactgcatctgctaccaatgctatagaacatagtacatatatgcatgcattctagctgaatgacttgcctttatactatctaaatagttccagtaaaatgcctgccgttacattaacaagggacattttgacacccttcttcacaaatgctcacaattcaatgcttcaaactaattcattctttttcaccacctcaatcagcaaaaaaaacacagccaatttccc

SEQ ID NO: 32234 - DNA, 564 bp, Oryza sativa
gtgcacagtgctcccactacagacgtggtcttcaaagcacccattaaaatccacccataaacaaaaaaaaatgttgtcacacaaggacaagggaacgacatggacatattctcactatgtgcatcaaacactggctggctgtacacagcaacagcgagagcgagccatacaccacgcccacccaaaaacaaagcaacaacttattagctgcttgtgtttttggtcacctgcttgcgtgctctttcgtcaaccattcgcttgccatggtgggccttgttgagtatgtctgccattggtccattgcactgcccgtatcgatgattgccagagccacacgatgatgatcgaacggcgtatgaaccaagcaaccacatgactcgaaacccagccaaaatccagtgccggatgacgtgtcggcacccagcgagggccacgccagggcaaaagccatttcgagccgcaaatcccagctggtttgaagtatttaaatactcctattcatcaatattgtattaacattattaaaatttcataatttttaacaaatttttgttgtttaccacg

SEQ ID NO: 32235 - DNA, 744 bp, Oryza sativa
acatctatatgacagggaacaaataggtcgcaggtttggtggtatgaagaaaccaaatgccaattaattatatccatatgtgtagaacttatttgtccaaccatacttatgaaaagaaccataaagtgatgactgcatactgaatatataattaattaattacacttagacataaacagttgagttttaaggacataaccacataatattgttagcttttctaaagcaaagaaattcatattcaggagagtttatgcatgttgataataacaaatcaaataaagacaccgtcaagtcaaaagacatatgtggggataatcaacataacttatgtaactgctaggtcatgaaaaacattcaaggccatctgtcccagtaccaatatgttgtgtatagaaaatgttgaggtttgagtagatctggatgaaaaaattcaggggaaaaaagttgatgtctttcttgttaaaataagaagaaatatccaaagtctctatgtttccaaatagcaggtaaagttgcagcatgatgttttatccatattctgaaacaaaagtcaagattctataaggtcgtcacgattaattatcaagaattatcaattgagcaatattagccagactactaaccttgatgcgatgcatactttcagtgcaaggaagcaattcaaatattaacaatggatggtattttagattctaaagatctatattctctttataactgtttgccatgcgggctgcagga

SEQ ID NO: 32236 - DNA, 738 bp, Oryza sativa
tgcacccccaacattctataataagctacagggaactgaaacaagatacgaccaattgtttccttcttttgacatactccaaaaccatcctaatttccacaactaagtgaactgcgcaaggtaaactatctctatctaccataaacaaaaaaaagttttatctttagagatctagggtctgtatttagggaccttgtgtgagatgctcttacttgtacaaataactccgattctcctaccaattactctccaaaagtaatccttctatataatgatctaggagtaatttcaattggccataccagttcatctggatcatgcatgattcataatcacctcccagaagcataaccattgattgatttcacaaaaaatatcgcatcagcttcagtgaaatttcttctgaactcttcccagtaagctccaccttataattcttgcacatagcatatctattgcctcttcatcttgtgacttatataatgatgggaacaaaatcctcaccaaacatctccccagaaggatcaaggatgtactagttccatattaacttctttttttcctctcacaaaaatctctctcaccaagatttgatttcatgcaagtatgtaactctttctagaacagcaagccaccaacagatgacctctgaaaaagaacctctttgattcagatacttcttcctacgcaagatatgaggaattcttctccaggtttggaatccacttaacaaacata

SEQ ID NO: 32237 - DNA, 592 bp, Oryza sativa
ctggggaggagtatatcacgagctgacactgctgcagtctgcagagccaacgaactactccctatgtctctctctaaatataagcaattttgcttgaatgtggcatatcctgatacaatgaatttggacaggagctgtattagaatatgtcacatccaaccgctcctgtctagattcgttgtattatgatatatcacatccaaccaaaatcctttatatttatggatggagggagtagctagctagctagccatgcattaatcttcactgctaaagcctgtaaagaaatatatgtggccagagatatgctcctgtgaataatactccctccgttgtttctaaatatttaacgctattgactttttaaaatatgtttgactattcatcttattaaaaaaaattagtaattattaattcttttcctatcatttgattcatttttaaatgtacgtatatgtatacatatagataagacgaatggttaaatatgtactaaaaagttaatggtgccaaatatttagaaacggagggagtaatagccgaagatattcttctgaagaaatgataatactatgacgagcatcattatttg

SEQ ID NO: 32238 - DNA, 644 bp, Oryza sativa
ccctgctcttaaggttagccatagccatatttctcttgtgagtttacttcccaatacataaagttatactacaaatattattttagtgcttaaggttaactttacatgcacattggagatgcccttatgcctttaatttttaaggtcacggtaaattttttgcagaaaaggagagcgcctggccggccaccagctcactgttgcaaatagtagaaactcaacaattttatgaaaaactatactagaaacttgataactgcaccacacctgcacttctcatcttttgcaaattaaataaattatcaccttcagcagttcagttagttttagtactatagcacattgctaagctggatcttaatcaatcagtgtataatcatccatcatcagagataatacctgccaaaggcaaacaccacaatgatacaatctacaaagccccaaactgaacagattacgcaaagatatctctcccatgataatatgatattatgcacagatccatcaaaaccacagtgtcatcacactatctcaatatatcaacaatcattgcctgctttaacactgaccaagattaggttatctttacgcaaagagctttgttttttcatagctagattagtgcaaggattaaacgacacctc

SEQ ID NO: 32239 - DNA, 572 bp, Oryza sativa
cttttcagcgttgtatgctcgtttattgctatatgaatattctatctgccctcaaaaaatattctatctgcgggcaccctaggtaatataccgtccagtgtccaacgtgaccatcacatgtatttggataagtaggataaaaatacatttggtgatcacgttggatattggatagtatattacctagggtgccccaacactatccatctctctttccacaatcacatcatgcatatcacaagcacattctaactatctaagctaccaagactaagaaaaaaaagacaaaaacggagcccaaaacaatcatcgaagaagagcttatcgtaaggccgcacaaagtcttcgacttcacgagacaagtgttatcattgccgagcttgtcgcctagcgacatagcagctccaacttcacagctgttacatcatcattgccaaaggtatcgccaaaacgaacaaaacaacaccaactgcttgctttggacatcaacccaagccaaccaagcaccacttcttgcatacacttcttgcaaacagctaacaccagcacccctagagactacaacgtgttat

SEQ ID NO: 32240 - DNA, 583 bp, Oryza sativa
ataattataaaatagtctagaagtatagaacaatgaatgaaaaacactaccaacacatataacgctatggatcattgatgagcacggacaaccgtttatactagcgcgtaccatctataactgataaagcataaaatgcattggacaattcacatgtattcatctatgggttttccattctgttcaaaatcacacagacaatattaggtcaaagtttaaaggctagtagagagaggcgatccttcgcttaacttcatgtgtagttagtgtcactaacatagcacatcatactatgcatgtctctagtagggcagtcgcagtctcgcagataattatggccccgttaatatggggaataggtcgagcttattaaccgcacgtaaaattgatctaaaaaataatttgtaaataaaacttttataaacgtgttcttagcgatttaaaagtaaagattaaaaaataaaattcgaaagtaaaataaaccttaaaatcaatttaaattaaatttaaggtaaaaaatttaaattttactagctgataagtaagcggaaagatgaggctcttatcctttttttctcgtcgg

SEQ ID NO: 32241 - DNA, 570 bp, Oryza sativa
cccttacattttcttttaaaaaagagaaaaaaaagaaaaaacatgaagaaagcaatcataaaacaaaagaaaaataccacattctttagttaccaatgcaacatcttttttccaatggccaaatgcctttcttttactaattctttttatttatttcctacggagaatgtaagggtagctagatggatgtttcaaatgttgaatttgcatgcacgggtgatgcggcatgtagacgttgtatccaaggactatattaaataacataataaagtttagggacttatttggataatacgaaataccaaagactttatggatccttaagcgaaagtttaaggatcatgttgtttgttcacactttaattaataacactcattatttaatcaataaaaacaagaacaacaacaaccaaaaaaaaatcatcttgtaaaaagaaaatttccaaggctaccattcaaccagctgtccagattcaacttaaccctgtcctgtgagacgctctctaaccgccaaaacgaccagaccagtgtgtgcgcctcgccgttgacttgaccacgtgccatggcggg

SEQ ID NO: 32242 - DNA, 923 bp, Oryza sativa
atggattgaaaaggaagggaaagcatcaacatttcaagaggtagatttggggaattttatgagtctgtttatattagcaccaaattgaagagctattttaacatattcaagtactccgttgtactgcgccccggtcgctaccgagacaacatcaatgccattatcctacccacaaccgccatgccacaaccgctggatcgagcagtcaagcaccccatgtatttgcgtaaaccctacaatagtctacatcgatccttcttctaattgtgttgaggtaattttttaaaaaatcatcctaaaattagtgggctgcaccaattaccaatatttttatgtataatagttttgaacatggtgtttgctatttgaaatatgatgttgctctcatgaccaatgaagatttacattaactacttcaggttagatttgtaaattatgtagtttttccttaatgcataatcattggctgtgtttggtgctaaatactgcagtttcttttaattttgtaggaaaatctgtaagaaattggaataacagagcaaacctgaacattttcttggtatgtacctatacctggtattcatattgatgctattttattaagtgaatagccaatatgttgatctttcatctgaacctgaattactagattacaatgaattcgttgggttgatacatgagcaatacacataaattttatagcatacgctcttttataaattgaacataccacgttgtctgctacaggtcatgtgattaccggtatatcatgatcactttttttaattaggatttaaggaagttggaaagtaaattatgaacaattggtgcctacacatgctttggcttctattcacacgaggtaattagtcttgatttagactaaatataaagggaaccaattatacttttctagaagtgaa

SEQ ID NO: 32243 - DNA, 566 bp, Oryza sativa
tcgagttgccgtagccgcaccagttgctgccggggcactgcttccagcgcccaggcggcggcttcggcggcggcatgatctcctgcgccatgtgcatgcacgcgctgctcctcttgggcaccccaggggagctctcccaggaaaacggcacctgcgtgcgcagcggggaggcttcgcggcggcaccgcacgctggccgcgtccgccgaagcgcacgaccggcgcggcgtggggagcggcgagtcgagcagctgcgggagcttctcgccgtcggcgccattgcaccgcagcccctccttgtcccgcctggtgacgatttccatgggcattgcgccgactgactgtgtcggcagcatgcatcgtctcgggcgttcaacgtgtggaggggacgacgtataagagtacacgcgaagactgtaggtagaggtgcttttcccgcgaaaagtggcagtagcggcggttggacagtaaccttcgtgtatggttgtgtgttcatctcacgtactgttcttttgcctctcgctagctcgttcccgtgatcaaggtgcatgctcgatggccttaatg

SEQ ID NO: 32244 - DNA, 544 bp, Oryza sativa
atttacattgtgcttacattgtgaaacggagagagtagtaggtactataaggtactaaattttatactaaaattttggtatctctttaaggactgtaaaattactcctcccccacatttagagaaagtttgtagcaaccatagcttattataaaatctttggttcagtttagagaagcttaagattataagaatccgttggttggtaatcaatttgaatatgaagaagttgggttatataactagtttcttttctgaattatataactagagattcttggaatcttaataagaatccggactgtttgggggaattggagcatttgaaagaagtagcagtagctagaagctctttcaatcagggcctctagtttctccgcgcattaatttctcagttgcattgaaaaaaattgtagtagtagaattcacaaaataatctagatgtcagaaactgacaaatccagattttcgctgactactcgtaaaatactcataaattaaactgctttgaattctctaagctcccaaacagaggacacctcttt

SEQ ID NO: 32245 - DNA, 2767 bp, Oryza sativa
  unsure (1)..(2767): unsure at all n locations
tcagacggcgtgtgacgtcagcaattgcacggaacgggacaaagtgatcaatcatgcccacttatctcagccagtgagcggaaataaaaacgatgcaaatgatcgacacctctgaattgatggattgaataactaaataaataagctgctggaacagctaggaacgactttgctatagctaatactagctgcataatctcgatcacatgattcatgaagtacaccaaaaccgaagtcagcctcttgcaaagcttattagggaacgtacgtactagctaaatagacaaaaaaaaataaaaaaaataataaaaaaggcaggaaatatggtcaccatataaaaggattaaaataaagagaaactcgcagttaacccattcctttctttgcgacgtgcgtgcgttgagctagccaactcgatgaaatgccaattattcaaccaaaacgaaacgactcgatcaaacaagcacaacacgcaaagtacacacacagagagatatatatgcaatccatatccaatcaatccgttctatcgatcgagaaggggaaaaaagacaaaacaaacaagaatacaagccagagatgtcgcatggttttcagggagcagcagtataataacttcagcagcaacgcaaacgcaaacggaaacgacgcatgcatgcagcggaattcactccccaaattttcaaccgatcgaaacaaacccaaaaaaaaagaattaatccagacgggaagagatagagatcacgaggagatcgagaggagaaatcgataaacacgggggggatggattatgacgatgaatacgcacccgctcgcttcttcttcttctgacgacgaacacctgatcgaatactgcttttgttcgattttggagatcgatcttcttgagacgagagagagagggggatatatcgctagctagctcgctcttgtggtttcgattaatacggagaggaattgaagaggatggatgaggaggaggattaataatggttgtggttttgttaatcgtcgctgggtttgagaagctagctagctaagctagttgttggagggacccagcgaaaggggagaggatnncgagtcgnntgtgtactcgtgttgttgttgttgggagaaatggagggtaggtggtgaacaactcaaaacacacatgcacacacccgtccgcgcgccgtcgcccatggccctctctctatggcatgtgggccccacaaaagatgaggccattgaggatcctttttgtcgtttgtggaactaaaactttggccctgtttagatggcactaaaatgtaagtagtctatatttaatactctaaattagtgtctaaatacatatactaaagttaagtcactagatccaaacaccacctaaattatgggcctacttgtaagtagagggagataagcttagctcttttttacttttaatggagggattaattttacatgaattctgcgtaatctccttcatttctatctatctatctatctacctatcctatcttatctatcattgttattgtatttattgttcaggtagttttaaaagaaactgctatattctttgaaggttagaaattatacaacgtaaatcacagaaatagaaaaaaaatatctacttcctctatctaaaaaaatcctgtcatgagaataaatatagacatacattatatccggattcatctccatgactccaggaattggttttatgggacaaaagaagtacaacattttaaccgtgtaatcaatagttatacacaaaatgaaattgtggatatgcaagctaacagttgtatagtactaacaccacatcatctcagatctagctccagataaaattatgcaggaaaatccactaggtaagctaatacccataaaatttctacatgtgcaaaccaaacatccgctcaaattttcccctactattttttttggtattataaatatatttatcccttattagtactaatccatgtacaagctatcaacactacattaccaatatctcatagtgccgaagcttgtcaagtgcgaagcttgtccagcacttgacaatgggtagagataaaaatgccattgttgctctacttttttttttcaatactcctacgaggaggtagaaatggttttataagcttaaagttagagctttctatatactcctattttggattacatggtttggattaacctctcgtgtgaggaggtggacacatcaattgatcaatcattcaccaaaacgaaaggcgccgatcgattgcctcacctcaactgccgttagttcacaacgacacctatattttagcagcagcttagcaaaaaccttcgctccccaatcgtgtccgggcacgtgacggcacgccgttgccgtacaaagtctacgaacaattcgtaacgtgtgttcttcagacgaaaggactatgaatgttgtgtattgcaatttgcatatatcttatgaattatgtcgatcgtcggttgagaatgtgagacggagaaagaaaaacacaactgatgcaaccgtgagagaaacattggtcaggcctagctagaggaagagatcccatcttttcatttatgattatacttattagccaaaatttaaattttcaaccttaaacttagagttgattttggggggttttttttcatcgcagtttattttccagagtttgcttttcgtttgcaatgttgtttggcttattccctaaataagccaaacgatagccccgcaaatctgctgtaattcacaaaagatttgcgcatc

SEQ ID NO: 32246 - DNA, 697 bp, Oryza sativa
ccaatgtgatagggacttaaaagttttagtcccatctaaacagggcctcactcgcaaagtcgcaaggcaccactccgcatagatgtgtatctgtgtgcgtcttctatttataatgagaaaaaaataaggaacaaataacctcccgtcctagcgaccttcctcacttttctctctctccagtctatatatctactgtcagcgaaggggagagagagattggggggggggagaagaaaacaacaaatcacaaccaccagccagcagaagtaacagctcatccatcacagccaaaaaaatacaaaaaaactaaaaaaaaaggaaaaaaacatcccgggcccacccgcctccgctcaggtgggccccaccccgccaggccagcatcaccaccagacctccctcctactactactactctctctctctctctctcgcgtcgcctgcgtccaattcaattcaactgcggcggcgacggcgagcgccccacgcaagcaaaatttccccagaaaaaaagcagagcgcggcggcgacgacgacgacgactacgcgaggcgacgcgagagcggaggagacctgagcgcgcgggagcgggatgatgggaggggtggcggcagaggtggtggtggaggacgctgccgcggcggcggcagctgtgcccgcggcggcggtggcggggacgggagcgggagggggggaggag

SEQ ID NO: 32247 - DNA, 515 bp, Oryza sativa
attcctgcagcccctaagcgcgatagtaggttttacaaactattttttcagggttaatggtccttaatgaagggttctttccatttttaccatacactagtaaaaattatggggttgttcagattggtgccattttaaactttaccaatttttgataaagttataaaaaatatgcatccatttaggtttttttttaccaaattttaataaatatataagaatcatgtaaaaacttggcaatatcgctaaattgctaaaattttagtattggtaagatttattttgactataatatgaacagtccctacgagagtcagacatgtacactcttagcttgagacaaatgacaaatgtactctcagataattatgagtggccagtcatatagtacacacctctagtcatggacgagttgaggacctagctaccgaccataggttccgtcaccattgagagcagatatccaaatacaccgcaccacatgcgtttcacgacaccgacggcaaccccccccc

SEQ ID NO: 32248 - DNA, 1471 bp, Oryza sativa
tttccttcttccttcatttttgcatatatctaccaagtactcccaatcaaggatcgtaatagagttgccccgtttgtttgagcttaaaagccattgctaattttgaactttagaattaattatggtttcctttgtcgaatttgaaactcagccttgattttttaaccgccacgagtacaagtgtaaaaaagtcttatcctaaaattacttttcactatatcggtggtgtatcttccttgtcttgtcttatgcagccaaaaaagaaaaaagaaaagccctccaagcagaattgccataaaatctgctgagtttaatttcttttcagtcttccacacgacaaattgagaagcttaacatgcatccacgcacatgtctgatgaatgcgtgagaatgagacatctatatactagattgacgattttgcatggcaccgtggtcaccattttctggcaacgcaaatagtacgcttcaccgacaaaatggcacgcgggtggcactctgaagcctctccatcaacctaagcgcctagcctttggtccttctcaacccctatatgcacttggcttaagtacttcggtcctcccttgtctagtggaggttgtacactcgtactcctattctggttcccattaaaatgaaaaatacgtacaatattttctttaaaaaaaaacacaatgcaagcacacatgcatactctatcctatcctatgagcacatctgaaagagattttttttgaaaatttttttatagatggtttaaaaaaatatttccaaaaactgaaccttttagccacgccagtgtcatactttttggaaaggactattaataaaattaaaaaaaataaaaagtctaaaaaataaaaaaaatactccaaaagactagttcggtatatcttaaaactgactagttcggtacatcgatgggtctatcactaaaagaataattaatcataaacgcgaacacccatatcaaatctaaaatcttaaaattgggtgagctggttacaccataaggaatctaactgaatacactcgctttgcaaaatatgcacaatttatatgaatttgtttctttaaatataattcatcttacaactcgtaccaacttaaccctctttatttttattcttaattttcttggcctgattataagttgtctgtctttcccagacatagtaacggagatgatgaaatcactaagttaaagctgtggatttagaggttgtacataaagtgcctgattatacttctttttaatccttcctcacaagttaaagatgtggatttagaggttgtacataaagctccgaaccctataattaatgtgtttatgccttgtgggattagtacccatatgtcatagataccatagatacgtggaaccaagaatcatgaaacgccaccatacgagaaattttttaatcttttttttatcatttttcattttaaaactatattctaaaaacttatt

SEQ ID NO: 32249 - DNA, 1504 bp, Oryza sativa
ccatttctatgagactatcataaaagtctggatgaagggcctaaaagacaagcaggtagcaagcttgattttgccagttttggcaaataaatggccggttgtggtgaagggcttgaaagaaagaaaactggaagaatggtccaaggtacactcctccagctgttgaacaaggcagactcagcatctgtccattcatcattcatcaatgccatgcaatgcatgcagacgcttgggagttgcaggaacattgcggttttttattttattattattattattatttttgcagctctgaacaatcagcagcaattcagcagctctctgccaaattagtgtggtggctactgtgcactgtagtgctggaggcggcaaaagccggatcggactgctcattggcatggtcgaattggtaataaatagtagtccgaacaatcacttctttttaagtttatactccctccatctacttttgataaccatatttcatcttgacacactgatcaagaataaataattctacttattatctatttaaacatgctactagttattcctcgtaaacaagcgattcattgatatttacatttgtcgatgtctatgtagccaatcttgtgtggaagaatggagtgtaacgcattaaatccgagaaaattattaagagaataggtggttggattgagatatgtctatcaaaagtaaatttttcagatttagaaatatgcctatctaaaatagatggagagagtagttagaaataaagtctttttaaacggttcttttcactacgtagtactactcccgtttacgaataactatctatcgacaatggatatactttttacatatatttttttaaaagatagcatcaaaatgatatgtttaaaagtgcaatattaataaagtacagtcaattacaaatctaataatagaactctgaagccacatagtttgattatctgaaagttataggtcgaagatacgcctcaatgtcaaaactgaagggggcagcaggaagcaagaagctagaagacgcgaaattgcagcggcgattctttgcatggagtctgaggcaacgtagggtgggacagatggctgctagggagctgaatagaacaaaattaaggtaggaaccaacgaacagttcatcgttataaagagatttcatgtccaaattttctagttattcttacccccagttaagtcaaagtttcttgcccctttttttaagtcaaagctataatacttttccgtgtaattttgagtgaagctattgggatttggtatataattctttgcctttttgttttcataagtacattaatattgcaagaaactttgggaagaaaatcaaatttggtgtaaaacccttgctttttttattataatacaatactatttttctactccctccgtcccataatataaaggattttgagtttttgcttgcaacgtttgaccactcgtcttattcaattttttttgaaattattatttattttattta

SEQ ID NO: 32250 - DNA, 975 bp, Oryza sativa
gtgttactattcagcatgtctttctccagacaaaggggttcatgcaagggaactatacatggaacattgaggactccaaattggacttaaagtccataatctgttctccaaagtttgatattggtgaacataaatggtatgcacacatggtaccagtaagttttatgtttgtttttatatgatttgaatgagtgtgttattagaacactaacagtacttgtctttaaaaagagaaaggtgtttctctttcttttttttaacattgtgtagttaaaccatcatatatatttgtctttgtgctgtgtgttatgagctagtgatcgcatgtatttatttgtgaaacttaggaaatgaaattctttttaccatgttagcaagctggattgatgccaatatatatttttaccatatatatgtttttatgatcattgtattgcaagtctcctactatttagcttatccctaagatgtactttatttctcatagcacatcttagactttcagattttcagttatgcgaccataataaatggattggatttattcttatgtcaggtaccttcgtgttgatccatatggtgattatcgcaaccgtgactatgtctccatctacttatgccttgatgataactccaacatgcctccaattgagtccgcgatcatggcagaattcatcatatccatcctgaaccaaaagaacggaaaacactcgcaacagaaaggttcatcatatcaactcctccagttttcaattgcattagaatttgacgcatttcgaaacagggtttacatttacaacccatttgttttttgtggcgaattaccttcatgtatatcaattttactttctccatctcttatttgtttttgtttttagtttttttttggcgaaccacagcccggaccgtgttttcttgcaaaggaattgcttggggatggcacaaattcattcggagagatcagatgaagaacac

SEQ ID NO: 32251 - DNA, 4113 bp, Oryza sativa
acaattgacctagaataattaaggcagatggtcacatcagactatcatagcacgtactccgtagtacatctgtggaagattggatcatttatatatgctagtactccaatgtactcccactatattttgagatagagccatagaggtagtggttactcacttggtcttaaaatgtaagtatttataagttatttagtcagttaaatattaagaataaggggaaatattttctttcttttacctttttgatcaaaatttgaattttgaattgtttaggtcccctcctaaatacttgatttacttgaaatgcttggattcatgtgcattggaatcaatgtcctagaactgtttatattgtgtataaaatttgaatcctaaaaatgtttatattttggaatagagaaagtagatgaaaggtatacgcttgccaaattcacttcagcagatatcaataatgccatttcagctttggttataaccaaagcggttttgaacttttaagtttgtttttgaataatttctggtgaactttttacatgtctctttatcaatcaagaaaatagagtttggtggcgaaagtaacaaaagaaccccttaagttaattttattattaaattctacaatctaaattaatttggctcagtggctgctctggagtctggatccaaccaacaaatggctctgctaattaatctgcagctcatgtcagatggtagctagctcttgtggattaactgtacactattcaatctctaaaaggtgcactaattaactttaaagaatttttcaccttatgttcttgaatcttgaactttcatatgtttggactgatcttaagcatgcaaaacctcgttttcaaatttgattttacttggttgtccatcatcgatccatgcctgccttcaggcccactggccactggcctccatgcataggcagcactgctatctgtcaaaaaaagaatgaagaggccaggtgaaccaagaaaagagaaaaatgcacctctgcaaaatgtgatttgcatgatcatagtttatggttttaattacgcctgatataaagtagatgcattgtatgcattatgctccagcactgtaagctactacatgataatcaatgctattttaaattgaaagtgtaaaatacaatggatatggcactgttcgagggatggatcagaaagcagttgcttatctttaaccaaaagtacaattattctaatttaataggtgcatatgggtgtaccttttacaatatttaatttgttaattcagtaacaacatgtctgcagccagactctcacaaaaggaccaagttgttgtatactactgctagcatccgggtatcatggaaaacaaattctttttgttatctttcttcgcctttttcttcctttaaaaatatatatccatgcatgtatggcttggaggaatcgtgcgtgaatattcgatttgcttcctttttttttctgaaaaatgtgaggaggatattcgtttagccaagaaaaagatctgaagcaaatgccagtgctatctttaattaatttgcatatccccacaagacattgctatcactagcaatgcaaactggttccaatcatagatgatgacctgtatatctaactgacttttatttccaatgacattttctcttcttttcttcttcaaaaaagaaaaaaaatatatttttaactaggttccactaccttacttttcttgaaacgggatctagaatatcgatgaataattttatatggtttaatttttttctggtgggtcaatttttcacgtggaaacgctagttttttaggcactacagtatgtttttttatggcaagtccgatggtgaggggaaatggggaatggaggactccgattttacctagtaattaatccctccgtttcataatataattcattctaatattcattaacattaatatgaatatgggaaatgctataatgacttacattgtaaaacggatgaagtagagattaaacattaattcatatcagcctatcaggtatattggatcattcattaagtatattaatggtgttttgctgtctcggtttcctggattttgacatagacatggctggcacccaattagcccagcctggtgttaattagctggatgactggatcttactatacatggcaaaagtgttcaccactttgatgtcaattattggagagttaattacccatatatatgcgtagtatatgtgattttgaaagtgtccaaacatgtagtgcaattttattgggagtaattaatacactgaattaaaattcataaaagaaagataaggtgttaccaggtcagagattttactttacttaaataccacatagcaatgtgaatacgtgtggtgaaactataccactttgatttatggacaaagttactgatgatagttacactaaaactaaataatgcaatcaacatggcctcagtaacatggataaaaaactactaaattattattgccgaaagtaattgggtgacttcgtcaagatcttactgttgtacgtgaagtgtgaacagtaccgtaccgtctaattttataaaggatgcagcgtgagacgggtatattaaccactaactcgcactaggacggcttatcaaccatttacaataaagcattaaagccttcttcatagtggagaaatgtgaaagcacttttaaagaaattacgccaaactatataaaattcttacgttgtaagaagccccaaatatgtatgattcactgattcacacagcattggatgatgatttagatctctctgatttaagttaggtgactttaaagacactaacatgtggaagatatggatccttccttttcctcgtaataaaccatcacataaataaaactaaccatcctaaagcctcaacaatcgtgaaaaactgtagatatagttcttggaaaattcatatctttctttcggaattacaaaactagaaaaaaaatactcccatcgttttaaaatataagtatttctggttatgaatctggacaagtgtttatctagattcatagttaaaagttgttatattttaagataatgtagtgcttattagaaagacattacatcttttccacaaagacttttctttttttactatgaatttgaataagtatttctctaggtggatatcctaaaatgaaatactctattcgtctcaaatatagcaacttaatacaacattagacaccacttattaatatgaatctggatagggataacgaatctagacatgattcatggcactaggttatatctattttattttagttaccgttatagtaccttctctatcttaaaaaacaaatcatgttcagatttatagcactgggatgcatcacatcccgtagtagtttatttttatgggacgaaaagagcacatcagaatcatgtgctttgaaaaagatcaaaaacaaaaaaaaagaacatccaaaggcaaattccttcttgggtacaaccatgtactctagtcctacaaagtaccacataattcttgccacttgccatctcttccctctccctccccatttgttcgattccccatttggccttttcctagaaccatcctccctcccccacaaaaccccccaaaaaaattacaacaaaagcaaaatggatttgaacaaaattcaggatgaaaccttgaattcaacactgcaccctcctactagtagtagcacctctaccagttacttctcaatccgtaccaaaatataaacacttctaaaataatatcaagccaaatatttttaactttgattattaatagaaaaaaaataaaaacaaatcaatcatgtaaaattgatatttactaatttatcattaaacaactatcatgctccatatgtaactttttttattttaaacatcgtacttttatagatattattagtcaaagtagtatctcgaagactaagtgtaaaattgtttatattttagagcggggagagagagctacccatcttcatcagctaatgatccaaaagaaggcaccaaaagaagaaggaagaaaaaaacacgaaacgcgcagtcgcgtctcacccccatttgccgcacgttgcccaactcctcctcctc

SEQ ID NO: 32252 - DNA, 1672 bp, Oryza sativa
aggtcctaattttctttttgtccttcctggtgacaagaaaaggagaattaagcagccgtagccctgtagatccttttgcttgtactttttctttatcaactataaaaaagaaagaagctggacaatgaaaagacaaaaacaactctaaagttaatctaaaatcaaatcctaaaatttaaaatcagcttcatgttaagcgcacacttaattatagacccactggctataatttatctcttaatttcagtgaacttttggctccaaggagctcaattatttagtgattacctgctaaataaagtaagagttccacatgattccccaaaattagttaatactacagtacatggttgggtgtgcttcaattcgtacggtcgaacaatagtatacagtggcatctcttctgtctctcatcatcctataattatgctctgagcctattgatgctgatgcaccaatggattattacctgcattgtctccctatctctccattgatcgatgcatgccatgttacacgggcaattttttttttgaaaaaaaaaaagccggcagagttgcacatatatttattgtattttctgttcaattggataggcaattgggcgtatgatctcgatgcggttttatctagcacacaagccctccactctaacacaccagcatatattatccgtaagtttgtaatgatttttttaagagaacattatcatcaatccggttttatcatcacattttatatacattgttagctattaattctgcatatacttgttaaactggccaatagacattttggtctcgtgctcttatttatgctatccttagaaaaaaaagtaaggaattattggtggagatgggatgctacctaggaggaatggtatcgactcaaagcgtcatattgacggtatcctgtggttataatagcaactctgttttgggtaacctccactggacaatattttcttgaactccatttctaaaagaatttaaaatatatttgattcccttatatttttatttttaaaatatctgttgtgtcagccctccatcagatgggtggaggctggagggccattggagctcaatccaaacgcacgccagacagttgagatgtgagaatatatttcacttatatatagctaaatcataaaactgttaataaaaaatcttaattagtagactaatgtacagaaaaatcgtaataaaatctctcacggctatatatcctctcgcaccctaaaattcctccctctcaccaaggagattcgaattgagggacacaagccattttattggaggaatatttctaattattcctaagatgaaataattggtcatacctacatgctaattgctaaacgtatgaattgatgaatcatgcatgatttatgataattattcgagactacaaacgaactaattgacttattataagagttgaaaaattggcacgctgccctgttaatccataccgtacaatcctttgaaagaaaaaaggacatgacccagtggcacatatatatatgtcctccagtcaaagatagcacagtgtgaaccctcgtctactcctcccccaatctttgaaccctagcttgcaatatgcaggagatcgagcagctaactctacatgagcttaattagcttggaaaaagttttcccggtctctatct

SEQ ID NO: 32253 - DNA, 564 bp, Oryza sativa
aaactacgatatactccctccatcccataaaaagaggattcctagcatcccaaggcaaatttagtgagaagtaaaatgactaaaatgaccctcatcaatagaaaaggtagtactggtgataggtaggtaaagattatttaagagataaaacttctcgttttatgtgttgaagataggtaggatggtagaagttggttttttgtgggataaaatttaaactctagaagttaagttttttttttgggatggagagagtatcaggcaaggtctccggttcctgcagcttgtccatcagctccttatgccacttgtctgggcaatctccttccatttgtagcagtttccatctttgcacccacgccagggctttgtagactacctgcaaaggtgatttagcaattttattttcaaaaacccactcatttctatttaaccaaatcccccaacagaaccaagcaacgaacacaattgtgaggtttgtttttagtttcttctttagcatcctcaagccatcctcaaaatcatttggtatttctgacagacccagagttactgtcaacacac

SEQ ID NO: 32254 - DNA, 656 bp, Oryza sativa
tggtgaacaaaatgtaacaaaagatgtttttttatattagtacattttagagaggtgcttagtgcattaattcagctttagctatataattaattaattaatgcaccaaaccactgtggggggcagtagcatgtaaatgctgcttagacagtaagatacgttaggatgaagctaacagttcaattggagcagagcagggttgagaatcagtacttggaaaagattgattgtgagatacaacaataataatatcgtaatcatcgagccaggtttttttagaaaaataaagtattgcaatcatatatgcacacgcatactaagactgagtttagatccaaaagtttttcttcaaacttctaacttttttatcacatcaaaacttttttacatggctgtgtttagtttctgaaatcggggagaagtttggggaaagttggtagtttggaaaaaaaattttgagagtttatgtgtaggaaagttttggatgtgatggaaagttgaaagtttaggggaagtttggtgtgaactaaacaggaccatacataaattttcaacttttctgtcacatcgttcaaatttcaaccaaacttttaattttgacgtgaactaaacacaacttaagggtcagcggaagagtaactttttttaaaaaaacc

SEQ ID NO: 32255 - DNA, 506 bp, Oryza sativa
aatgtgcatatatgaggtcaatttgattggagaatacacatgtaccattgaacgacaatacaaacaaattaagaacatgtgcttacgtacgtacgtacacgtagacgtacagaatttgcgaatcaaaattgaccaattaaactaggtgtgatctcgcgtgcatgcaagctaagaagctagtgctagagatttcaactaattttctcaacgctaactaactgactaacgcacgctcgtgcccatagttttgatgtgtcgtcagatcaaaatcgcgtgcccctgttctaaactacgtacagagtacatggtgatatgatatttcgttcaattcaaacattgattcattacattatatatattttcccaattcaactgtttaattaattaggttaattttgcccgtgtttatatataacggccagtactaactagtacatctcatacatgcaattaacctaattaaatcttgacctggcatgaatcagagtaagcgcagaaaaagaatg

SEQ ID NO: 32256 - DNA, 857 bp, Oryza sativa
  unsure (1)..(857): unsure at all n locations
agagggtgaaaaaaaactgaagataatgttattggattggaattttatcaaagatagctataaaaataaattaaatatataatactattggttttattcatgtgagatttgaaaacgtgtatacaaatatgctatacttttttctattaatatacatacgttaaaacgtgttatttgtttagcgtacaatgcgggctatattaaatatagccataacatttatcgcttgaattatacatatcgcttttggtgatatccttacacatttaatgttatgataagcctcgttcatttattttttccaaataatactcgctacatccctccgttccaaaatataaggtatttgggctggatcggacacattctaatactataaatctgaatttaagattcatagtcatagaatgtatcacatccaatcaaaatcctttatatgttgggacggagagaatatttttaacaacatattatggtgcactttagcccctaatgcttatgtattatcacaatncaatcttctccctcagtaatgatgtaaccttgcacgtaaataggagaagatcgtnctcatgagggtggtgatgggccacaaaagagagtttggataagtccaaggggttacaaaacacaaaaaaatggtgatccaanagtgaaaaaaaatccgattaaaaggcgtccaaagtggaacttcgattacatatggggacttaagtgggaantcactcaatnaaaaccatgatcacataacatgtgcattaaaaaatatctttacactttttacaaatattataatcaaatgtattagtaaaagggacgatatactcgtagctagaatagtatgaaacattttaccc

SEQ ID NO: 32257 - DNA, 575 bp, Oryza sativa
tcatgctccatcataagagaatcacagctagcacttccatttcaatgatgtttttcctaacatgacatgactgcagaggatacttgtgattgatcaacaacattttgcagcaacgttctgtcccgataacgctgcaatggaattgatcaattggtgttcctacttattggaatgaatttcccattgtggaaaaaaaatggaaagactggtacaagctgctgaaaaatgaactgtcgttactcaagttgaaacatgtgcgtaactatcagaattgttgtcgacaaaaccgttgggatttgcaaggtaaaagaaaaaaaaatcctcagctctgtaaatgctattgctgaactaaagttcagaaagccatagtgccgaaagatctcccaacacctcagatggcctactgcaacaaattcaaaacaatgcaaaacaatgtaacattacgtggcccagcccatcatggcccatctaagcccatactgtatgcgctgcaaactaatgttagttcaggcaattactctgaattttctgatagacgaacctgattttttcatgtcaggtgccgtgcttgttca

SEQ ID NO: 32258 - DNA, 562 bp, Oryza sativa
tataatatttattgcttacaatctttctatgtttgtaggacacgttctttttacagtgatcttaaatgaaacctgcataataaaaaaaatgcaaatacataagtgcctttaaacaccccgttttagaacttgttgatcttttttagtccaaacttactatttttgatttaggtcttaattctcaggcgtgtactgttaactgacttaatcccactttagcagctaggacaagaatgtgctcaacttctcagagttagctgaagacctggtatctgcacatcatatacaatgaacactggcaggagcaagaagttatactaaccactgctatcgatgttgacttccccaatcgtgcagtttttgggacctttagtctttccgttggcaatcttcaccagagggggacgagaagaataactggagaaggggatcgaggcgctgcagactgcagaggaggtcaaggggatctctagtggagatgcaaaagacgaggcgacggcgattcgtaaagtaacgttctatgcgtgccgccatcggatggagccatgcttcgaattatacc

SEQ ID NO: 32259 - DNA, 974 bp, Oryza sativa
aatccagaaagaagcagaaggtagccgggccggatggcttctaattgtgcctgggattgaagttggtcccggggttgtgcttcatgctggcgtcgaactccaccttgggctcgccgttcgcctgatgaacgccattgactcggaaggtgttggtagccattgccgccgtcggcgccgctgccctgggctgctgttgctgcagcagcaatctcctgctactcctagcagcaacagcagctactgcattgttgttgccgtcacgcaacaagccggtgctggtctttggtgatgcagcagcagttacagcgaggagaatatggagcaagaagatggcagcgaacatgcggtgcaaagccttcttcttcatggtgatgatgctttgttgatcaactgtgatgtggtggtagttgcagtactgtgtgcgtgtatggcagttgggcatcaagggggagcaatgctggcttatatatattgttcttgtaacttgtgttacacagactagcttgtttgtagtagtaacatgcagatgcaatgtgcaggcacgctgcatccactacttgggaacatgcagagaacatgccacacatttccctgtaaattttagcttctgtggaatattttgttaagaagacaggagccatgcatcaagtgggtctggaacatgccaccctgagacctcagttttgttttgcagacctcaaattgacaagctaataatagtgctgtttctctttgactgaaaaatctccttttccttgagcgtctcagatgatctaatccattaaaatgcttcacattaagcatatgatccataattctttctagggatatatgcgtgagtgccgaccatgtgagagatgcttctatttgactaatagcatctcttgcagagttgcagtcaggccggccgtatacaaacaaccaaatacaatacgttcggtcatgtgagcagatcggacattcatttttttcaa

SEQ ID NO: 32260 - DNA, 560 bp, Oryza sativa
tatggaatcacatggataatgcatttcttcatattccaaaaaaacatcaatgcataccaaatacctgaatctgaagacagcttgagtacatgactattattattatgtcattgcagttttcatagtttcaaagtttcccacaggcaactgtaccacaaactttgacaatgaggtagcaactattgttaatgttttaaatatgttcaaaaactatcttttttgttttttcgttttttgactagcaaagttcagccactaccaactcctcttttcaatccacgtaagtccacagatttgatcagccatttgtcaggtttaacttccaagttggttctagcccctgtcaatcattctaacattcttggacttccatagtagatggcatatggaacatgggacattagaagagtggaaatcaacttgtctacatttctaattgtgtcacatgctcattgtatgactgcaaaagggccttctgaaatgaatagaaccatctgcggtctctgaacttaaaattggaatgttctaaaggtcagcaaggagctttatgattacctaca

SEQ ID NO: 32261 - DNA, 653 bp, Oryza sativa
gtagccatgcaggacagcaagtgaaacaaatttcccagattatgtgccgtcaaattgaggaactatattgaccgggcatgcatgaaaataacgttcatgcgtaatgattgatggaatataatggcgttgccttgcttgggtctaaacgtgaaggaacatcgatcgatcatacatgcgcgatagcgatgtgactcatttaccgctgatctgatctgattctgatcgacagaaatcactgaaatgcatgcgcatgcgtgcactgcaacacaaacatattgattcatccatggatcgatcgacagatatatctagcttgagtttgaatgttgcatatataataatactagcagctcatttatgatttctcgatatatatatatatatatatatatatatatatatatatatatatatatatatctgatgctctcttgcgtgtccgtttgcactcgagatatgattgatatccacgaattgaagaagaagttgcattgcttgcaagatatatatgcgacagtaatcgtcacatctgtcctggagaatataatgcacaagtgttcattccagttccactactctactcttgatttctcactcttctatagatctttaatttctggtattattccctaataaaaatctttaatctcttc

SEQ ID NO: 32262 - DNA, 525 bp, Oryza sativa
ttttttggtcatcgacagatatcatgtgatctgcatgctattttctttttaacctgggaataattatttgtaacatcaagaagatcctgaaagaaaaaaaaatcaagtagtgcgcagtggtggaaacggaacgtgcaattagtagtgctctattgtatataatccataggattatctctactaatgattttttcgtcattgcattgctctcatgtgatctgcatgctgttttgttacttgggaataatctgttagtattataaagaaatattatatctattcttgtggacagctctgaaacagttcgcatttgattctacaatatccatttctatttgcaatatctttgcacatttcatcctttctaagttataccaaatgaaaaccagaagtttgcatcgactgctgttggcagctgtctctgtaggactatgttacatggaaggacacatgttttaaatccaattcatgatttaatggtgtttcttctgaacattgaaatttgatcattactacagtaatacc

SEQ ID NO: 32263 - DNA, 684 bp, Oryza sativa
ttaacaaccaaaccgtactgcctgtactacaagcaacatgtcactctttttttttgtagtagaatttagagttgagaatattaatatttctgcatcatggaccactatatggtacataaacctagtgttaattgttgtgattgcatgtctgtctgctgaggaatgtgaacaagctggacggacatcatggtggtgacagaagacgtcagtcggtctaatcgacagtcagtcaggttgggccgaaaagaaatttttttttgagtgtcacatcggacgtttgatcagatgtcggaagggattttagacacgaatgaaaaaactaatttcataacttatctagaaaccgtgagaagaatattttgagcctaattaatcaatcattagcaaatgtgggttactgtagcacttatggctaatcatggactaattaggcaccaaagattcgtctcgcggtttctccctaactgtgcaattagtttttaaatttatctatatttaatattacatgtatatgtcaagattcgattggatggttttaggaaaaagtttttagaaactaaacatggcctaattatctgggcaactaccgtcttgcagcagactgtctagacaaaaatgtggtcagaaaacagactcgtgataaaccattttggtgagtatgatctactacaaaacaaataattt

SEQ ID NO: 32264 - DNA, 616 bp, Oryza sativa
aattcgagctcggtacccgtgttcatagagatagcatatgcatttatagaaggtgagtatacacgtatgtatatgagcgtctgcacgtataccgaaatctgcaaaaataaagaaagagaaagaaatctgaatacgaccactacttgtgcacaaacggaatgcgcacttacatcaataataatgtataaaaacagaggaaatatctgaaatgaaaaaaaataatgaataagtgtatcaaaattgactcgtatggtggccagcttgaggccctgacgcacaaaaatacaaaaaaaacagaggtgtcatcttcagttaatgctgatgatggtgattagcaacccaaaaaacccatctctgcgctgcacttcctttcgttccccccctccgctataaattacaaaacttcaggggctccacttcgctgcctctactcctcctcctcacctgcacctgcaccaacgcgagagatcatggcgaagagatcgtctcctgatcctgcatcatcttctccatctgcatcatcctcgccgtcgtctccttactcctcttcctccgaggattcctcttcgcccatgtcgatgccctgcaagaggagggcgaggccgaggacggagaa

SEQ ID NO: 32265 - DNA, 693 bp, Oryza sativa
cagtttcagatgtaactgatgaagttgtggttacagataagtgtctgttattattgtacaaaataagcgtaaatttgatcatatctttgatcttgctctaccaaaatggcacctcccctgcatcagtgatgaagatgaagttgggtaaaacgagaaagccattagcacatgattaattaaattttaattattataaacttgataaataggtgtatttgatattctaaagtaatttctatatagaaaattttcgcacgaaacgtaccgctcaatagtttgaaaaatatgctaatgaaaaccgagataaaatttgattcgaacatggccagtgtagttaatcagaaaagaacaatgtaagtaagtttcagttgccgttggtcggtgaccttgcctgtagttaatagtaagtcagtcaagtcgtgtgcttgtgctgttagctttcgttttaactggtgtgctatcaacttgcctagtcgtccgtgtaccttcgctttcttcatttgtccattaattgacgcagtgcaattgtgctgacgacaaaaacgaaatcgtccaacgaggttgctgagagttttctgcccccgtctcttttataattttattcaccaaacgttagcaagcagtctgaaactttgtttgattgtcctactccaaggttatgttctagctggtgtcattcatctcttttcaaaa

SEQ ID NO: 32266 - DNA, 630 bp, Oryza sativa
gtaccaaacaatggcaacagtaaatatctcgtaagaaaccttaacaagataccacaataacaagaacaggtgaaatatcaaatattttgcccaatccatggatgcaacccagttggaatagacattgttttttaataatggaataggacactgttgctggagtaaagtccgttgaggaatcaaataatatgagttacagattagcataggctaaagaccgacacagttgagtaaagacaatatattcagattatggttgacacaggattggataaaaagatatggacctgaaatttgataagaccgtaacagcctagccagttaagagtttcacatcatgtcatatttagaaaacaaggaaactaaaagagtgcagctagggcagaaaagaaccataactcagtaaattgatttccaagtggtattagcaatggataacatttcaatgttgttttgaaggaaaattggtatgatttgaccatttgatgctaatgcccatctaagcacgcctggctatgtgctattgcagagtaataggaagccctctacaacaagagagggagactactggttcattgttcgtcaaccaattaagtagtactaagtaggctgcaatgtatggatgtgaaa

SEQ ID NO: 32267 - DNA, 662 bp, Oryza sativa
cataaaaaaaaggaaaaccctacaataacttataattctccaggtaaggaccttctgaccccttccccccctctttttttttgtttcttttttgcaagtagcagggcagaatgtgatagaagagaaaaacagtaataggatcatagtaccagtggctgacttgcaagaaaccaaactttttgcaggcacaataaatccatctaaaattcaggagcctaatctttgggactagaaccgatgagtgagtattcctaaaaaagatggagttgtacagtttttattactcgaccatggaagatcacaaagacacagaagttagtatggttcaagggcgcatctgctataatgtgagagtccaagattttgctacccctgggctaacagtacagtgttctaggcttaattttggcaaaaaaaaaaaaggaaagaaaagaaaaaaaaacacagatagcagcctctgagatttgacgaatattgtcaatttacagtgcttagattacttttagtttttccgatgacggtgcttagactacaagccggctgtacaatggagtcatacaagattatgggttcagtcttaatagtaactcttcaactctgaggctaaaaacctaaacaagcaaatgctcaacataataaacataaaaataaaggatcgaact

SEQ ID NO: 32268 - DNA, 650 bp, Oryza sativa
tttttttttcttttttttgctttctccatatttgtatcggatgagactagatggcgcattgccaccgtgctgctttgttccaaggataacaaatatgggctctttagcctgggaaagagagaataatttggttcaaggataacaaatttgtagagaatatctgaatttgatttaaggatttgtgaactgaagttggcatttaaacttgagaaaaattaaggctcagattatgggctaagaatttgaatttaggattgagcagatccaaatggagtccaatccctattaggatggatgttgattatttgtggatatgtttccctgtaaatctggaatgttccccattaggtatattgataaaatgatgatgagaagaaaaggttggaagagggaaacttgtgtcgtgtgcatagatgagaactgtgtcagtaaccccggataaggtaagcaactgttttctacttttatctctggatgtaatgcacaagtcaatgtgtggtagaataggtggttttggccatctcaagccatagcttcgatgcaggagcagatgcaagtgtcacttggtcctcattcgatcttggtctgggccggtccaaagtggtggcagagatgtgcagctgcaacgcgcacggggttagcaatagaaa

SEQ ID NO: 32269 - DNA, 696 bp, Oryza sativa
tgttgtgtcttgctggaattgttgggttacattccctgtttgaacagtgactctggaattgttgggttacattccctgtttgaacagtgactctggaattgttgggttacattcccagtttcaacagtgactagtcatgaactggatatcctagtcggtaaggaggtcttatagtgactcaacttgaatttatgactgcaccttcactgggctgctggaatttcctcaacctttgtgcttgttgcaggaaccgaattaccagattgatgttatctacggagtgatggaatccaagtatccaacaggaacaggtcctattaccatcaggacccagaattataacatgcataataaacacgaaacaggagaggaggcagtatagtcaagcagtataattatattcttgagattgattaattatcggcaactagctggcttaattacttgcactcatccaagtccatacaaaagatatacagtaccatttcagctttttagcccatcattcgcttcaactcaaccggcaactgggcttaatttacggcccaaagactggtccaatcaaaagtgaactatgacgaatgggaataagtatatttttcatccctcatctcttgcccctggtcgaatcgcctccttcaatagcaaaaccgggtataatgactccctcatctttgaaaaccggtgcaaatcgac

SEQ ID NO: 32270 - DNA, 617 bp, Oryza sativa
atttcaaatcaaggtagagatcttataatgaacaaaatatagaataagctccccctcaagatgtgcatacatatggatatgaaggaatgcatatgcacataatcaatcaagatcaatgagggagctcacactatattttggatccacaagagagaccaagttagaatatgtgaagtttaatacatacctcccatcatttttacttttatatccaaataatactagtcaaagaaagactcataaaaacgttagtctcatataattagatttgtcattaatcaccgaaaccaaattaaggcacttgaacttacagggaggcggtgagggctcggtgcgtaaaggtggtcataactgtgtaaaaaaaattgtgcccaaatttttagtagcgtaaaattgtgcccaaaattatcaaatgtggcaaaagaatgtaagttttgaaacattttttttgttgaaattgtagtttttcaaaattgcaagttgcatgtataaaatatgggcaataataaggtatgaatgtctttttgccaaaatttaacatcgttaacttgttcatctaaaatagagcaaaacttggtttcgtttttttaaaaaaggagggaaaacaaaaccctaaa

SEQ ID NO: 32271 - DNA, 540 bp, Oryza sativa
gatatccaggtcatcgtggtgactgcccacgtcgcggatgaaggtgttgaggctctgtggaggctgtcatcggtggtgggtgaggaggaaggcgcggtcggaggtgacgtcccgccaggccttgcagacggcacggcactgtgggatggattttggcggcagcaggagcagaatctccgacataatttcttcagggaggctggcaatggtgagaggcctgcgacgctgctgttcgggcagcctcaccgtctccgccattgccattgatcccccagctgacaatttggactaggaccctagtgctgctgcatccttggctccttgccgctctgaaactgaaatgcccaaaaattttccatggaaagagaacacattaggattccagaccgtcaagaactctaaagaaaatacagctcaagatgggtgcttggatctcacatgaatcaatcatctcgttttgtgatccgctattcatcctccctccgaatcgtcagagcaagtgactgatcataactgataaacaaacaagcaattaggact

SEQ ID NO: 32272 - DNA, 534 bp, Oryza sativa
tgttgggctcttggcccacctacattgaaatatctatctattatattatattattaaaacagctttaaaagaagcaccacgtttgctgtgggggataaaaattctcacattaatcggagaaaaaggaaaaaaaagaaaaggagagtccaagtagaaatacaatataaaaatagatgaaattcggaattaaaaataattaatattgaaagaagtttccatataagtacccaatacgagaataatcaaaattcgaaataaaaataaaataaaatccaaaattagaaaagaaaaggataatccaggtaggaatataattttaaaatagctgaaattcggaattaaaaataagaaatattaaaagaagagtctatataagaacacaatacgagattaatcaaaattcagaataaaaataaagtaaaatctaaaattagaaaagaaaatgagagttcaagtagaaatacaatttaaaaatagctgaaattcgaaattaaaaataagcaatattgaaagaagtttccatacaagaaccca

SEQ ID NO: 32273 - DNA, 761 bp, Oryza sativa
attaaaataagttagtcacacataaagtattattcatgttttatcatctaataacaataaaaatgttaatcataaaaaaaattcaaataagacgaacggtcaaacgtgagacataaacagtgtaaaactccacttattttaggacggagggactactactaaagagaatcccataaaaaatgttatacaaatttacaagctcaaaaaactaaattaaacaaaaaaaagtcaaaataattcatcgtgtcacattcacgtacaaaataaggcgctgaaaattttggtgagcagaaaattaaataactagaccaaaaaaggcaacatatggcacacaaaaagagaagagaactaaattagacaaaaatttagaagaaaattagaggaacacatagctaaattagaaaagaatttagaagagcacaaaattaaattagacaaaagaaaaggagaagagaactaaaatagacaaaaacttagaagaaaataagaggaacacatagctaaattagacaagaatttagaagagcacaaaattaaattagacaaaataaaaagaaagagaaataaaatagacaaaaatttagaagaaaattagaggaacacatagctaaattagactagaatttagaagagcacaaaattaaattagacaaaagaaaaggagaagagaactaaaatagacaaatttagagtggagatgcgggggatcgaaccccgtgcctctcgcatgcaaagcgagcgctctaccatttgagctacat

SEQ ID NO: 32274 - DNA, 662 bp, Oryza sativa
gtattcaaatccaattctgtttgatatgctaagttcctaattttaaaaaggcatctagaagctgggtaaaaaatacccttctctagaaaaaatggttcttcttactgacaggttagaaaatacacttctctaaaaaaaattggttattcttactgaccgaaaatacccttctcagaaaaaaaaaggtttttcttactgaccgtgcaaaatccgattatagctgatattatgatgactcatgtgttataccttatgcagcagacaacaattttggaaaatcaatttgggttaccttcacttgttgataaggccacagctaacacaacaaatcttgtggcatctgcgtcatcttccatgacacccgatgaaataggagaggggaaaaacaatccagatgaggtaatgccattggcatccatcgcttgtttattttagaaatcctatgtaatgtgagtgctttgtgttatctgctgcttgcatagcttgaatgtagttttgtgaatttcacaggtgtttgtatgtatatgtggagagaagcttttattccatacaaacttcaatacaacggcagtaaaagaacttgtcgtatttgctctccagaggaggaacatcaagtattgtgatatttatgtaacatggtgcggaaaagttctgaaaggaga

SEQ ID NO: 32275 - DNA, 1759 bp, Oryza sativa
  unsure (1)..(1759): unsure at all n locations
aattccattgtattttgtgttggtatcattaaggtttttattttggctgcagaaatagtataaccatactttcatctatatattcaagctcttatagcagctgatggcaatgtgtatcattttgtactgcttttctctatgatgatatttgtatggataaattccttctgtgctactggaaggaaatcaattcctttgcacatttcgttgagagaatagttaccgctccctctattggtcagaccgtgctcatcatgactggtcagactgcgccctacctcggccagatcatgcctcttgtggccggtctaaccatctcactaactgtcggtcagaccaagtaccaggctggttagatcgggctacctatagccgtcggtcagaccaagtacctggctggttagatcgggctacctatagccggtcagaccaacaccctggagccttttcctgattttgtatgccacaactaatggtaccgatgttaattgttatttgattttgtatgccacaactaatggtaccgatgttaattgttatttgccacctataatactgttggtcatgttattccatatacacatggtatttgcaccgataattgctataagctaaaccaaaatcatcaagaagatggattggctcaagacgcgtagattactttcaaaactctgttgcgcctttacattttaggccataaatataagaggatgatcaattaagccctaaaggctagtaataattcaatgtcatataataaatgttgatacttgtttgtgatcgttgcgaaactttgtaaagcttgactgcatgcacgcattagtcaattttataaagatgtgcattaaggggacataaatgtttaacaattagccgggtcctataaccttatttcttaaaaaaaagaactatttagacttcattaatatgtcaaccattgtattacaataaggaccaatgtttacttgtataagtatagagttcgtattaatgcaatcaaaatcagctagtaaattaatttcgaatggaagttcccacaaccagattaaaatagggcttttaaattttttttacttacatattgtagtgtgattntgaacatnnttcatatttngtgcatcacatagcattttgaacgagcaagatataatcgtctttttgtttcatttcatccatcatattgaattgggacnattttattcttgctgctactttgattccgatattgtttttccctattttttggttttcattatttcttttcaaatattttttatagaagttagtgggtccaggattgctaaactaaaaagtaacaaaacaagaaataatattatttcaacttaacagttaacctttctacccgtggagattttgccatatgcaaacaatacccttgagtcattttcctatcccaaatccaaattcatgcccccaaacctaaggcaatagcagctcagccaggcggcgaagaggaggtgatgacagcggcagttccgtgtaggaaggaggcccagccaggcagctgctccttgtagggaggaggcgacagtggtggcccaaccaggcaatggcagtggcagctcctcacagggaggaggaatcggtgatagcctggctaggcggcggcggctccttgtagggaggggtgacggtggtgacgactctgcataaggaggagtcagtggcctagctagagttcaacgcaggaagacggcaggtcagtgcgatgagatggcggcggcttggtgtggggagg

SEQ ID NO: 32276 - DNA, 651 bp, Oryza sativa
actagacaatttcttgttgtagattgttaaacacaaactccgacagaagtaacgggcaaatctcctaatatcaagggataagaggccacgacaaattgtttatcagagcgagtacaataacaggctacaaattagctatatgcacatgtggagaagataagataagagagagaataaaagcggtctatagatttggagccaactgtaacatagactccaaagcgttatgtgtgtatgagaggtgggaccatattttaattgtgtagtatatatttatatataactattgtttagatgagttattaaatgggctatatatgatttgggtaatagttggccatactattaaacttgctctcaggtgcaacgagacacatgctttagtaattaatcgtttaattgcaagtacagtgatgtgagttaagcagggatgcagtcagcatcaatatgggttcattgggcattttttttctgtattgataatgcatagtgcccatattaccaaatttattacgctttgatacttgtggtgttaacagcacgtaccattttgctgctatcttgctttctgaggtggaagaggacggtaggtacaacagcattaaagagaaggccacatcatatggatctggaataaaaactttccggaca

SEQ ID NO: 32277 - DNA, 1770 bp, Oryza sativa
taagagaaaaaggaaacaatttccacttaagagtttcatgtgtcatgcctatgatggataggcaagaacacactagctcaaagtcctgaagatggaggtatgggttttcactaataccaccagagaaggtttgctctcaaaccatggctataaagccaggaccgatttcatagccatttgaaaggattggttttgaagaataggatgactcacaaagattagcccgaggagcagaaatgttttgaattgtgggttgctccatcaaggaaaggaataaaacaagaagaagtaaaaataaagatatgaggatgacctagactcggataaattagcaaccgttccccggcaacagcgccaaaaatgcttgttggtatttcttacgaccacagataaatccgcaagcgcacggaataccgttgtagcacttcaccttcaggtgaccccaaaaagatatcgaactcagggaatgtgtgtaatctacctaaggctgagactatccaaggacagcaactgatggtaggcacgctagagaggactctctatgtatttttaattatttaagctaagtaaaggtaattccctatctgttgcttcaggcaccgacccctgcttgtctgccagcgtggttccggctatagctctatgatgtatccgaacgtggaggattactaggacgggattcagggctatcaccacctgccaactacctctaacaaatccgtgggatacacaactaacaaaggtaatctctaaactagacaccacgtctaagttattaattactactctaatacttgcgcaagagcttccttctctatctggagtcctagtactagagcacttagtataaatactaaacaatgaacccgcaaagatggatatctatcttacttagacaaagtaattaaataacataagaaagaaacacgaatgcttactttatagaagaagttctccgaacccgaagcagagtgtaccgacggctccggtactcctccagaattcctcctaggaagctacactccttgaggtagaagtcggatgagcgccaaacttccgggcactcctccagaacttccccttactctctaccttattctaatgtacaaaagatacaataaagcctcttgtaattcaggtcaaagttgtgtgttggaaatgagagtgagctgcttcttttataggcaggtatgacggttacaacctatgcgaaatgaccaaactaccccagaaccgccattaggatgtgatcaggaccgtccacgtgaaatttggcgatcaacggctaccaaaatcgttcggccaaactggaggttcggccgaacccgggacggctccattcggcccatttttcgttgtggacactaattttgaggccctcagcccattggcatgatagttgggcccatttggagttgtttaattgacttatggggcctccaatccgtgtaaatgtgtcctgaatgcgcggaggtgcagtttgtcgcttgacggatgtgttttcttctcaaaatactcgcatacacatatttcaccaacactagtggaaatgattagtaataatacctaccactacgttggataccatgttttatttcgttatatgcaggtattgatggtcagatattatgatttaaggaccgtcaacaccaaacaaccgagtgatttcgataattgtagccaaccaagtgacttaatattaatatatagtatatgcggtgtgaatccccgatcaacatgatccgagtgatataccgactgctttgcaaa

SEQ ID NO: 32278 - DNA, 648 bp, Oryza sativa
aaataccaacgttgacctagattatataagatatccaccaccctatgaaacactcaacggcttgattgtctagatattgtccttcttttcatacttatagctgtattagtttagtttgaccttataagtcgtgattaaaatctcaatctctagcatgcttttttgttgctgattagggtttcatcggggtttcagctgatcttacctgatttaactactttatatcttatatgcttgattgatatgttaaatctgccctttatgttaagatcttgttgtatttaggtatattaagttcttgttgcacttaggtatattaagcttcctgtttgatatattttgcttgctttaatatcttaatatagagtggtatcggagtactagccgatacatgctagatttatctgatcggctatgctgtgaatgcttataatctccttgttaatatatatttcgatctaagtgatttatactgtctcggcatggcgaccgatctatcctaatcacttgatttaagtatatattgacggaagtattatataccattaatagctatagctgatcgaatagatttagttatttcttgcttatttatgactgccgatcaattcaaatatgacattggctcaaagataaatgatacgtcat

SEQ ID NO: 32279 - DNA, 666 bp, Oryza sativa
  unsure (1)..(666): unsure at all n locations
cgcgacctgctgcccgcctgaacatcttgatcttgcggcgctccttctcgagctgatgcacgcctccacccccgtcgcctccttggccgccgccgctgccatccttacagcgctcttccttggccgagccgccgccagagcaccgccgtcgccctgctacccggctgtcaagccgccgccggagcaccgcggcttgctgcccgcctacgcgtcgccgagcagccgccagagcgctgcggccttctgcccgcccgcgccaagccaccgccgaagcgccctcgtcgccttgttgctcggccgcgcgctacggttggcccgccactgccgcctattcgcccgccgctgccgcctcgctcgatgggtgggacttggagagttacgggagggaggtgaggaggtgggggtaggttagtggcagtttcacgtaaatatgtcaaataattaaagggtagtgggtcctttggggttgagtggagctgtggagcanaaaaacccagctccacccccttagttcattttttaggagcaactctacaaactccactctagaaaacttaggatctggaccgtttgctagcatttgctacaggattaatctgctacagggatctactccctccatcccacaataaatatgcttctggaatccaaattttggcctaaaat

SEQ ID NO: 32280 - DNA, 509 bp, Oryza sativa
tcctctctttttttttctttgaaagaatttcgaagcaagaggcataaatgaggtggagtatttattttgtggataatggataaaataaatgatggatgagagatgctagcttccagtgtagaaatttagcataatgtgtgtatgtcgagtgtgcgtgtaatcttgatcatgaaagtacgaaaagcatctcacatgggtcacaataatttgacaaagctcgatgtaatgtcaagcagcatatatatatatatatatatatatatgcttatatatgctgctatatatatatatatatatatatatatatatatatatatatatatatatatatatatatatatatatatatatatatatattacatggcgtctctgacgcgctaggaaatagactcttccctccgtattttccgtttttttctcctcctgccgcacatccctcgtgcactcatccagtagtaaaaaacttacttgcctttttccgcatccacatgcatccatcgtttcccc

SEQ ID NO: 32281 - DNA, 589 bp, Oryza sativa
ttcctgcagccctccacgtctcctcctccttttgacagtaccctccgatacctcacaagtatcatgcttgataccttggtaccaaggtctgatacctagatatcacccggtaccttaggcaccgggcatcaggtatcggtcgatacctagttggtaccaaaggtaccaggtaccaggtaccaaccggtacctaaggtaccaggtactaggggagcacatgtccctcacctcgccgtgcctcctcgacgccatcctccgccgttgcggcgctccctctcccacgtctccctcatcgttaccctctgataccccacaagtatcatgcttgataccttggtaccaaggtctgatacctaggtaccacccggtatcttgggcaccgggcatcagttatcggtcgatacctagttggtataggttccaaccgatacctaaggtaccaggtattatgtaccaggtactaggggagcacagaggaaagaaaaagagagagtcacttaaaatattccgttgcaacggtatccgccctcaataaattaatagtcacgtacttagaatttgggcgagcagtcagcaccaatcacgctgt

SEQ ID NO: 32282 - DNA, 528 bp, Oryza sativa
acagcgtgattggtgctgactgctcgcccaaattctaagtacgtgactattaatttattgagggcggataccgttgcaacggaatattttaagtgactctctctttttctttcctctgtgctcccctagtacctggtacataatacctggtaccttaggtatcggttggaacctataccaactaggtatcgaccgataactgatgcccggtgcccaagataccgggtggtacctaggtatcagaccttggtaccaaggtatcaagcatgatacttgtggggtatcagagggtaacgatgagggagacgtgggagagggagcgccgcaacggcggaggatggcgtcgaggaggcacggcgaggtgagggacatgtgctcccctagtacctggtaccttaggtaccggttggtacctggtacctggtactttggtaccaactaggtatcgaccgatactgatgcccggtgctaaggtaccgggtgatatctaggtatcagaccttggtaccaaggtatcaagcatgatac

SEQ ID NO: 32283 - DNA, 957 bp, Oryza sativa
aattcctgcagccaaactcaagctagggatggtacaattagagttcatggtctacttgaaaataatatgcatgcctattattcttagctcattacttgttgctggtggtgatatatccaatagggaccccatgttatctaggtaattgatgaatgagatatagtctgatgatagaaatcctactcttcatgttgcacacttgggaattttataaaaagaaaaaaatatatataacgatgataaactcctcattgatatttctattcctactagagccataggttgatcagtcatgattagcttgctacatacgctgcttgtcattacattgagcattgtcaagttttgtgacccttgtgaaatgcgtttcatactttcatggtcaagatcacatgcattccacatacacgcacatatgcttgacttctacactggaagttagcatttctcatttaccgttcatttcatccatagttcacaaaataaatactccttgttatttatgcctcttcttccaaagttctttcaaaaaaaaaagagagatggcatggctatgcaaaaaagaaagaaaaaaaagtgctcatacaagtatggagcatgatgatgaaaaaaatagaaagaaagaaaaagaaaaaaagagatagccatgcactctccaaaatttcaaaagagaaaagaaatagaggaggaggtatacaaaaggagttatttttattttcctttttccactcacaaattcatcatacacatacacatgcacattcttgaccagaaagtatgtcttgcatttccgtggatcctttatttgactttgcaatatatgtgatacaagtaatgctctactcttttccataccctaagctctacataaaccttattagatggtaggaaaagaaaaggcacagtcatatgcctttgtaaggaatcatacactttgagtgatcaagagaatctatt

SEQ ID NO: 32284 - DNA, 516 bp, Oryza sativa
ttaggcccgattgagatgagtatcatctgtgacgggctctagtttaggcccgataaaggttagtagtcatctgtgacgggcgctagttgtggcccgatagagataggtcatctgtgacgggctatagtttgactggtcggtgacgggctttacttagggcccgattgagatatattcattcgtgacggccatttgcccgattgagataactcttcacatcagtgacttctagcctgtgacggacgctgtgcctgattgagatggggcttaccgcccgattgagatgagggtatccgttctagtgcctgcctacagcccaggtctgagccaataaaaaatgattctgttttttatgcatggattttgataatgggtggtagtcatatgtaatttagaaaagtagtacatactctgatacagaatcaccatcagatattccattcagataacaatcctaagaattgaacaacaattcacaatcgaaaccaaacatcccctagttcagattaatgagct

SEQ ID NO: 32285 - DNA, 547 bp, Oryza sativa
catcccagctgaggcctgtttggctgtttgtgtttcgatgtggaataggccccaaacccgtccttccgtggaatgcagcccacgcctggatcaattcccacatccagcccaaatatgcatttagctgttcgtgtattgctgtgtattgcggctcgatccatgccgacccacgggtgagagaataatcctcacccgaggcctggaactctctcgcgtgcacgccgcagctcgcgactcctcctgcaccgccgccgctttctccaagccgtccaccgcctcctcgccgtcctgctgggccaccggcgccgccgccttctccgagctgtccaccacgtcctcgccatcctcctgtgccgccggcgccactaccttctccgagccatccaaccgcctcctttttttctcattcggccgtcgtcgttgtcgcctcatcgccggcgtcgccccggcagcctactcgcttgatcaaggttcaaagtcctctcctccttctcctccttcatctcatctcattttctttcccatcttctttcatccacttgttttg

SEQ ID NO: 32286 - DNA, 582 bp, Oryza sativa
agataaaaaaactactgatttgcttccagcctaccagatgaatgatatcttgaaattttaactgtaggattgatcaatacccagatttttcttatatatgtacctgggggcatcacaaactggtcagaaagtcagaatcagaactgcaagaacaagtctatagacctgaccatggaactagaccagaagtctagagattctgagaaattgcatacacgtgtccagtgcctgcgaagtcatgcattcagtcagtcacctatgaaaaccaagacttggttatgaagaaaagtttcagggaagacagactgctgaattctgattgcttcttgctattctttgacaattcgaatcttggggtgtgtttatagttcacgcgaaaattggaagtttggttgaaattggaacgatgtgacggaaaagtttgaagtttatgtgtgtagaaaagttttgatgtgatggaaaagttgaaagttcgaagaaaaactttggaactaaacaaggccttgatcaatatttagacagacagatcacatgagatgtggaacctgtcacggtcagatcagattgaccaatgagatgtgg

SEQ ID NO: 32287 - DNA, 563 bp, Oryza sativa
tcaccatataagatatagattttataattattgcaccatgaaagttttgcttattagtaattcggctaatgtcaatgggcaatgtgatgatttattctagagttgttttctttagaaacattggcattattaatattttgcatacatgctcaagccgattacttacatttgtagtttattggaattcatgtgtgtgaggcatatgactttggtgattcattattcaattggctaagtgttttgatgccatgatgattattgtttcaaaagccatttgaattagtattcatctagacatgttagttggatgttatagtttttcatatgtctagagaggaggaattttggtccaataatttgatacaccaagcatctggctattatgtgaagaaaaattatatactaaaggccgatgcttgattttaaaagtttggacgaaattggcaaagtcatagaccaagggcggtctgaccggcattgcacggcccgtctgaccggtggtaccggcggtctgaccggctctgcataccggtctgaccgggcagacagggtggtctgaccgg

SEQ ID NO: 32288 - DNA, 655 bp, Oryza sativa
gcccgtaccataaggggactcttgcaaccataacacgctgtattttatgcgagctagggtatttccgctaatgggcctaggggggctggactctccgcgcggaatgcggcccaatctttttggatcccacaagcgtcctagaacaggattcaatctaatacctaagtcggatttaaccaaagtctgagcaattctactaccttcattatttaataaatgactgtgataactattcaaggggaaaatgataagagagtagtggagaatcggtttttgcaatcaattggatgaggaaacacataaaaatgcaaatcgatatggtggcggcgctaggattcggcccaatggaaaaacagaaaaaaaatagcgaaaccagaaaaacggtgaaagaaaaaacggcgcacagaaaataaaacgaaaaaaaaagaaaacggacgaaaaagcccggaaaaacggtgaaagaaaaagcggtgaaaataaaataaaattggaaaaggaaaaaaaaaggaaacggacaaatttttttttggccgtgccgggcttcctttttacaatcgttttttgccgcaactttttgttccgcttttttaagtaaggataggaatcggtcagtttttttggccgcacttttttttcgccccgggctttttttaat

SEQ ID NO: 32289 - DNA, 524 bp, Oryza sativa
ggagccacatggttcacaagatcttgtgagttgggtgaaaaggatggcattttcctttgattccttcagatggaatcaaatggggagaagagtttgattaatcgcaccgagggagatggcagcagggcaggagtagttgattacttgattgcagtgtcatcaactcattatgatcaatatactatttagttaagccagatccagcctcttttgtagtacagggtaggaccaagattgttatggattaagaattaatgaggctacaagtacatccaagtcgcccttgataagatgacagcatctctaaacaagtactagtactactctagtcttagtttgcttagaaccaggtctttccaggctatgtaaatgaaaatatgcgtaccactgttctcaaactatttttttaataaaactctctacatcaatatttgcttagacaatttgttcatgatatatatatatatatatatatatatatatatatatatatatatatatatatatatatatatatatataaa

SEQ ID NO: 32290 - DNA, 718 bp, Oryza sativa
  unsure (1)..(718): unsure at all n locations
agtctgggatgttcccactcagcaactagccatgcttcaccgcaggcggcaggccgtgttggattagacagttctatgcatagtttagtaactgatcacgtcttatgttttatcacttgcaattgatattctttaacaaaaatgtaattatcacttctattttccaaaggcaatatatatatactcttgttttcctcaaaaaatatatgtactcttttattatcgtttccctgcagataaaaaaactactgattcgcttccagcctaccagatgaatgataccttgaaattttagctgtaggattgatcaatgtccagatttttcttatacctgggggcattaccaactggtcagaaagtcagaatcagaactgcatgaaccaagtnngtattaagggnaaatttttccccctttttggggggaaaaacatggaactagaccagaagtctagagattatttgtcccaagacaaataatctggtcattcatgatatcagattcatgctgaatgagcatgaatgatgttcagctgatgtttgcttgggcttttttgatccgtgcatctactgactaccgttagacaacacagcagatcagatggcattgctactttgcttattatatccagctagggcagcttgacacacaagcgaaaaatgttaccatgtttaatttgcctatacaaaaaaaagaagtgctttcactttgatatatata

SEQ ID NO: 32291 - DNA, 609 bp, Oryza sativa
tgacatggtgagcactcaaaaagaataaaatcaacatcacatcacaaacaagaaataagacactcatagcataaatgaagtgcaatatatataaggagcagctaagagcatctaacagtcattacatccacacaactagagaaatattacatgtccacaagtccataagagtagaggccaaaggactgccaggtccggaacttccggataaaatacccggaacttccggacaagctgacaggaatatagagcgagggagctgccaggtccggaacttccggataaaagaaaggggaaaattttccccccccccggggaacttccggataaacagacagagcaggcagcaaacaacaaaaacaaaattttgaccctcttcgattgcaattttctccccctttggcatcaaggcaccaaaaagagacaaaatacaagggaagaagaggatcaagcctcatcaccatctccatcagaaggaatgatctcggtgtcgccggagtgaggtgagtcaatgtcttgcccggcggcgtccactgcctcatctggatctgtaggcacattctctgtaggtgcatcggactctgggtcagggatatcatcaccaccatc

SEQ ID NO: 32292 - DNA, 688 bp, Oryza sativa
tgaccaccacggacatcgtcttaccaccaagccgactcccgatccatcaccgcaaatactatcccgaggcatcgagtcacctacacatgaatcaaacaaagaaaccatattccgagaccaagctatcaccaacttgactcattgttagcaaacaatagtaatacatatgtatagtatccatctagaagtcataaacatgaaacaaactcagatatccaaagaaacaacccgaaaccgaaaccgacacaacgttggccgtcgcatagcaccggtctgatcagccacactagcccggtctgaccggaccccgtaaaatccaatcatctcaaaatccacttcgtagattaactccaaatatcaaaaccaataatcactgatgtcaattgttcatcacaaaaataggaatcaaaacacactttgatcttactggggaaatcgccaccaccgccgctgccgatctgagctcaactcctcgccaccctcgaagctcctcaaaacttctagaagatccttcgtagtccctccaagctatttctgttgtcccttcaagttcgattcccccacaatcgatctaaagatcgggtcgtcgtagccattgctgcttctcaactatctcaggctcctccaggaaagtccaatccgtggtaatcctcctttaatcctctccttctgcgcctgacctattttt

SEQ ID NO: 32293 - DNA, 538 bp, Oryza sativa
  unsure (1)..(538): unsure at all n locations
ctttgtttaggttttcgattgtttgcgtatagtggcggttatcggattttcgtcgatcgcgggttttctcgaagattcgtgaagcttcgtgaagaccttgagcaaggcaagtcaccctttgatcaattgctcctataattggaaagtcattattattttgtttgcaacttgcatcattagaatcactcacgtttaacttgcttggcctcggtttgcatgccaaaccgacggacctacccagtagtcgcactaattcctgtaggttgtaccaccctgattccttgtcgctccacccttgtggtacctcggtattcgtgctctctgagcgcgtataccaaatatcccacatacaccgttgtttgtcgaaaacttgggaaatgggtttgtgaagccttcaaaaacccgacattgtgtggtggttccccggggggtgggtggttttnttgagaaaaaaaaaaaatgaattgtgaaaactcacgatgcgggggttgtgcctatgtggcactgtcccgtattcgcatataaggaccgattcctg

SEQ ID NO: 32294 - DNA, 585 bp, Oryza sativa
gttaaagacacaagattcatacctcttggcttggagaggacaatgttgttcttgacttcttgttcccttatttgattgctgttcttgtgcacaaaatagcaggggccaactattgtgggtcctctgatcctaatccttttgcagcagcagctgcagctccatgcctcccatcacatggcagacctgctacccgctggagcatatgttcagaattcagaacgactggatcagtgaaaagctctgttgagtagaatatcgacttgcgaaacgggatgtcaggcagtaacagttttgacttctaccggagattctccttttggatgcaagcactctttacgcatggagagaagtgtactccgtaagtcctttctactacccctagagtactaatcttttattacggctagtttaatagtatagcctcactactagtctccaaattatctataactaatgtaatagtcaattcatacaatagttgcttactatactattaatacctagtcccatctatcatacacacattacatcttagaattcgtgctgcagctggctacagatctgtagcccgccgcttttctctct

SEQ ID NO: 32295 - DNA, 575 bp, Oryza sativa
taggggtgaaaacggagcggatattatccgatccgatccgctccgaatccgtccgaagtgaggatatggtaagggtctgtagatatccgtccggatgcggatgcggatgcggatagatgcatgcggatgcggatgcggatatggtatcggtaatatccggcggatacggattatccgctattttaaacggattatccgataaacgttttggcggataatccgaatttcacagcccatataaccactcaatttggcccatttgacatgagcattttcatcgtgtaaagattcagcccatccatgtccaccttatccatcaatctatccaggagttcagtccgtgactcaaacgacgtcgcgtcaaccaatttttttatcgagacttctcttgtttcagtcctgccacgccgccacctgacgccctgacttacgtgtggaacttctatgtacttatgtgatactgttttttctaacaattgtgaaacttttatgtcttgcgtgttatgtgaatgcgatatatcgtgatgtcaatactgtatgtgtcgattacatgcttttggacagaagacaaatca

SEQ ID NO: 32296 - DNA, 640 bp, Oryza sativa
ggagggagtatacacgtatacaaagtttgtatatgcctatacaaattttatgtacgtgtatattttttatacatcaaaactatatatatatatatatatatcatattttttatatacatcatatacacacgcatatatatactttatacacaccaaggtttacggtagtgtatatagagtatacgcgcacatataaagtatatacatacgtactccctccatcccataatataaggcatggtcaaacttagcacggtcttcaaaactaatttttgacttataatttctcatatgctataaggtttattgcaacaaaattataatcatcttaaagtacatttaaatgttaatctaatgatattaattttagcaaataaaatttaatttatattataataattgttggtcaaatgtttttaaagttgaatcttgtaatatgagcacgctttatattatgagatagagggagtatatactaatgggactagaggggcaggactgaccgcgcgggtgcagccccgctcggctggtcgccgatcaggcatcccttgcacagctctagatctcatattcaagttggatttaaagtttgtatgttaaattatactacctccattttttaatagatgacgctgttgac

SEQ ID NO: 32297 - DNA, 718 bp, Oryza sativa
ctgcagcccgttaccgatatctacaatacgcacttctagattagtacaactaaaaccctaaaatataatgcattgattcaaacaaatttttaaagaatacacactatttaactcaatagtcacatataggatctatgaatattacctgaaatcggcgtctgaatccggcagggcttcgccccttctctcttctcctcccctctcttctttttttttcactggaattgaggagagaagaatgagggctgggggctgggcagcaggccttttataggcagcgaggcctgccgcccggccagagggcggcaaggggccgcctgcaaaatagccggccccgactgacttttttgcattcgggccccttgccgccccaccagagggcggcaagggttttcctgcaaaaaaccctccctccatcaccgcccgttcctcccatgtttgccacgtcagcttgccaccccagaggtgggcggcaggggctatttttgcaatttttttggtcgatagattatttctgtaaatattaaaaaaaatctaaaaccgaaaaaaattccccatcattatgcatctcaccaattgcaacggacttcacgcaagccatttgctcctttatataatagcaccaaattatggaacgatgtccatctgttctcctcaactatttcatcgtctaattcacatccctcaaccacaaaatcacatatataggccttccaac

SEQ ID NO: 32298 - DNA, 765 bp, Oryza sativa
ggcagtggcagcagaagaacatcgtacgccggtcgctttcccctcctcccccacccgtcgccgtcgcaggagaggacaagtgtgaccaactggtgacacccacaggcacgtttacctgttaccgcaagagagacgttttttcctcgcacgggcacgcgtgcgcgtgacgtttttctcccacaactgctcgactcgatcaagatgacggggctgcttgctgctacagtgttgttgacgcggccccctttttttcgctgctgattgatgcttgcgcggggcgggaaactgaggcttcgtgaagcttcgagacgttggccacaaagcgtcgcatcgcacgcaacctggcccccgccacgaagtgggccgatggcgtcttggcgcatcggctggctggcggccgccgctcgtgagtctcgtggcccctcgagcggtcaagccacggagggagataagaaactcatgatgcgtagacgaggttcgtcaccggagcgttcagggccgaataataaacgagcgcgcaccaaagccggtgcacggctgcacgctggtcacacgttctcaccgcgagcctgtgtgtttaccattcgatcgggtcatgtgtggagccaaaaaatggtttcgatatttagaatattattttaaggattagttttacataagcagctatcttttacattctaaccctttcgaaaacatatttcagaaatggacgccaaactctacactagatattgttgacgccgaagttaaaccgcccacgagaca

SEQ ID NO: 32299 - DNA, 630 bp, Oryza sativa
aaaagtgagaagaatatatcaatatactcagtgtttatctgtgttttccttgagaaaaaaaaacagaaggaattcactacaaaatgaactttgaagcaagatggacgtgattattatgatcaattcatgtataaaaaaattcatgtcagtactcatattcccaaaaaaaaaccaattaattcagataatttatttggctgggtacacaattcagattaattttgtactgcagggattagctaagtccaagctaacataacctaacctacttgtgaaaactaacaaaatgctcaacaagaaacaaaagacaaagaatgttttttttttcaataaaactgggtgaagaggatcactcagaattaatatttgtaagtgtcataatcatctttagatacatacacattaattcactgtaatttctagtgtgaaatatttctcttgccgaaagcgtgcaaccattgcatactgtgatgtttgcgtgcacttattgaccacttttttcccataataaacagcaaagcaaagtgagaacaaatgagcattgtaacttgctccaatatattttttttcttgatggccatacacgccatccttttctttttaatacaaaaaacaagccgtctattttcg

SEQ ID NO: 32300 - DNA, 813 bp, Oryza sativa
cggcagacgcacagacgtccagcgacgagcaggtgggattgggggccccttgaggccttgttcgctagctgtgggaaataatccaaaggaaaaccaacccatgtggggtttgggttgtccccgctccccacactcaatcccttccccccaatccccttgttcccccaatctcctggcctctattcccctgtttactagctgggatttccttgttggctagcagtttggagtagaaggtgggattacaggtgagattagaagggattactaccattcaaattcagcgtgagaaactatcatggaaaattcggataaaatttaaaaagctggaaggtcacgaaagtcaaaataattcagaaatgacaagataaaaaacgatcatgaaaatggaacagaaattcaacgtgcaaaataattctaaaaagcgtaaagatagaaaatcatggatttaccacagatggattctaaaaatagtcgagaatattaaaaattataattttggatagattaaattctacaagcagtaaacatccaattgccattgtgcaaagcaagctacaaaataggttctttgaacgtaatatatctctatccgatcaaactaaataatatatctatgtctgatcaagcaagtgttaatcctgtagaaaaaaaaggttcctgcaaccatcacagctacatgaattaagaagcagttaggaaaaattgtccttcatccatcgcatttcacaattcaagcggtctctatgaactatcttgcaaaagattccttccaatgggcacaactagcaaatgggccatggaactacacaa

SEQ ID NO: 32301 - DNA, 663 bp, Oryza sativa
ttttgcggacaaggccccaataggttgcaggtgggctgtaacctatccctcgtgcaaaaatcgccaaagtgttggattgttcattcaccaataagtaatgtgagctgggtttcatttttgtactttgtagaggtctcataaaccaccatgaccttgctgcttcacggattgttagtcgcctttcctctcaatctttattgggattctaaatatcaaacctaaatgtcatcgtaagagaggtttattcatagtttttattgtttcatcaaccgctatcacactacttgctagctcgttaccctatccctctttagcatttaccatcattgcgttctatattacattatttcccttgaactctcattttttatataattttgaaatttatcttacttttatttcaaattttaatcaatgtcatgttgtgttctgcgtgcatgtttttttaacataattgtcattgcaaacgccaacgctccctcctttcccgcgtgcgccgccgccccctgcctccgtgcgccgctgccgctccctgcctccgcgtgtcgtcgtcgcccagctgcagctcagtaggcgacgaggtgaggatggggatagggttgatttgtaataggggtattttggtcacttcgtgctagcaatttttttctttttcctaaatga

SEQ ID NO: 32302 - DNA, 628 bp, Oryza sativa
atgaccttgtctctatctgtttgtactccacaagcgcttctatatacaccacacaggccgacatatccgatcgtgcactttctatctctaacataaccatgtgcaaaggcctctacggaacttgtgcatgtgatgcatgattggttcagagctgagagattacatagcggtagatgttactatcgccttgaccccttgaatcaatagctattgataatatccagaggcagactagatctgatccaaatcataagtacctacctcatactgaattttctgatctgacacccccaaaatggtagcgctataccaaaataaaacactgccaatctgatgtgcatcgcagcttcttgctctcttgaaagaaaggatattatggctgattcttgtcacactcgcgttagacctagcagacgctcgcattaccggttcataggactcaagacctgattttatgtcatagtccgcgcctaagtggctatgaaagttagatgttacatggcgtgttactagagagatctacgggatgtgaattatctgaccgattatgctaacactgactgatgatctctggcagaagcaagtcatgctgatggcatatctgactctagcaatcttttgcatgact

SEQ ID NO: 32303 - DNA, 665 bp, Oryza sativa
agttgcacgagcatggagaatccaatgactggggcccgaccaggttcacatgaggggatccgggagcaggaaatgcaactgccctttttggatcagtaaatttatgcgacaaggatcacggccatcgcccaatgggctcagcacggcagctctccataaatgtccatgcttctgagcgacgcatcctgcgcttacgacgaccactgaatgcgtcgatgctgagcgactgacactagtactgctaagcacttcaatgaggagaatggattaatggatttgactacggcagtcggcaggcgagtttaaggcagaaataagcagatgaagctagcaggcagatggtacatgctcctgcatggtgtaatgaagaaatcgcccagaaggcgaactccgaaatgttttgcgtgagatctgaacatctctgcaacaaatgagtgcgttttgacctggaatcttagcattttggtagtaatggattagtcaaaaaaaggataaacatgaccctagccaaagtttttgtttgttttttctttgattcaagctgaaatagcatgagaccggaacaaatccatcaaaaagcattgaaaatgcgcgctttcttagctggacttgactaggagattgacgaacgatacagcaaatcagctcagcgaaaaagcagacga

SEQ ID NO: 32304 - DNA, 571 bp, Oryza sativa
tacgggcagaggccggagatgtaacacatttctattatgtaaaaaaaatatacatgtttttattactctaaaagtaaaagctggaaaataaactttgattaaaaaaacctaaaatcagctctaaattaaaaattaaaaattaaaattttggctgatatgtataagaattagcgtaaagatggggccggtgaatccctgctgctgcgcgtacatccaactgagttttctgcgatggacggtgacactgctacgcgagttcagagaagcttgtgaccgccatttttctcaattcagagaaagtagtaattcagcagcagagctgagagaacagcggaggagaagcaaagctcaccaccaccaatggcggcgatcgccgcgcctccgccgcagcctcacccacccgcgtccgcccaccaccaccaccaccatcgccgccgcgcccgtctcccccgcctcgccgccgcctcctcctcctcctcctcttcccgcttccgccgccgcttctcctcttcctcctcatcctcatccccttcgtccgcgccctcaccctccccctcctcctcctcctcct

SEQ ID NO: 32305 - DNA, 627 bp, Oryza sativa
gggcgaattcgagctcggtaccctataaaacatgtacacctcaacaatagactagattaatagtaaaccacttcaatggtatgtctacatgagtatctatagctctctaatccattgcctcgtttttctctatagactatctccatgttagtagatagctttgctctctctctgcatttaatctcttccaagtaggaaaatatgctgacatggatctcttgtagagagcttatagataaccattgtgggtgcccttaacacctggttacacctgtcatacacacagcgtcttggagtccgtgttacagctggctacaaatctgtagcccactactcttctctctccttatttatctccttaaaatatgtttataactgacttatagtctgctattgtacctgctcttagtgatgctctaaggctgtgtttgagggagaggggattgggaagatacgcaaaacgaggtgagccattagcgcatgattaattgagtattaactattttaaacttcaaaaatggattaatataattttttaaagcaacttttctatagaaaatttttgcaaaaaacacaccgtttagtagtttgggaagcgtgcgcacggaaaacgagatgcttttctct

SEQ ID NO: 32306 - DNA, 570 bp, Oryza sativa
gggaaggttcgatcctcggcactagggtttgggtttttggtagtggtcttcgcccgcacacggtttccgttgagttctcgtgtcgcgtgaggctaccagaggggaagaaggtgatgccggagaggaggaagaaagcggcgtgggggcagtggccctgcggtggggaatggcttgctggcttgccggtgctggcacctatggcgcattacaggcagacgcgctcgccaagcgtctcgcgagtgcgagtcatggggaattggggattgtgtgcgatggcggctcagtggattggggaaaggtgggattactgtttgagtctatgtgtttggaggggcaaatctaatccgttgtattttcatctgataatcggaaattcgactgatttaggggttaagaacattcaaataataggtagtcaatctattaatcgttttggaatcaaggggcttgcagattcattcatgcagcatctagcctttttggggttgattggtgcagtaccagccataacatgtcattactctgatcttggcttctggggataatctagagtcgacctacaggcatgca

SEQ ID NO: 32307 - DNA, 848 bp, Oryza sativa
tcatattatctattatctagggagtaaataccataaaaatatatttcctaaagaaagtgtattatagaaaaaaaaactaactcgacacatatactctttacaagttatagagcatgctgcttagaaaatatctaccatacaacactatcgagttagtgagaggaactatttctacatacagttggaaaaggaattgaagaagatatttccatgttttttccctaatattagctagtgcaaacaattcttttaagataaaactgatctcatgttatcatttctttttggagtttagttggacaagttacatagagttgtcttgaatgattgtgatgtgttggtggttggtctggtggtttagccaagccaggaagtccagggggggcacagggctaggagaccaggaccaccataagtatggctcaagaatagagattgatggttcccaggcctaattacctcatgatgataaattgaatatttgaatttactagttatcattacaattatgaatttcaaatctcactgattgtccatatctcctttttattaaaaaaaaacttagaaaacccatgctcccctgtcatggaaatatgttatcgatatattcatttttttcgaacgcacaaaataattgcacgtcaattatattagaagaaagcagagtgtttgatacacaacgcaatcagcccaacatgcttatcgatatattcgtaaagccgagaaaatcaagacatttgaaaattaacacaacggctcaaattaattagtcaaatgttactatatctgatatttataaacaatccaggtagtagcatgtaattagtgggtgagttgaactttattaa

SEQ ID NO: 32308 - DNA, 1770 bp, Oryza sativa
taaaatttattatattacaaaaataactaaaaagaactcaccacatttcgctttgaaggctagagattctcgcattaataaaacagataaatatttaaacggttagattgtgatgggttcaaattataatagtgtaggtggattaatgcagttttatgcaaatacacagttatatctaattttacttttaacataagagtcgttgtatatgaaatccagttataactttaagttttattgtgagaaaatacaattgaatctatagaaataaaatatagagttgcatatcaaaactaattttacttcaattaccttagttccgcacaaaattgcacaggatatcccctagtctaaaataatatatcagttaccaatgtttccgactaaagtgtatagacatcgtacattagtaaatcacaaatatgtggcaaacatatcaacactcacaatgtaattccccatagatcgagtgaggggatgaggaaacatgggcggcgtgaatggattaaagcgaattagtttacatttcttttttatttgttttgagtgtaaagacagatgacccttgtacgtaagagagtagagttgacatttcaaattcaaattttttacatcttaaatttacattatacgtgcgggtaatcggcatgcatgtatacgtacgtgccgacattacaaacctttgttctcactttgatgtttaccggtagtggcgttgcatatgctgcgtacaacacgacaccaatttttttgtaacgaccactgtttttaatgtttcacagcataacacagtcacatcgctctccgtgtgtcgtgttggtttatgaggctaaattaatatatgtttcgttcgtcttatccgatcaatcacacgttttcctctctattaaattaaaaaaatggacttggttttctctcctatttttaaacgaataccattgttgtcccagttaaacgacaagaaaacggttccttcaagttttcatactagtatacatcaaattaagtagagataaacttggttcctgcaatcatgaagagtgcaaccgcatttctccttgtcatttgttattaaaaaggaaacaccttccaaacaatcaaaactggaaattttcacttcggtttgatgtgaatgccaggttgcttctattaccaatctacgacttcatcgtttcgcttagtcagggaataaacaaaataacatatttgcaaatggaaaataatttgtgaatagttatatatatgtgtgtgttcttagcgatttaaaaacaaaggctgaaaaataaactttgacgaaaaaacctcaaaatcaactctaaatttaaagttgaaaattcaaattttggctaataagtataagcataagtgaaaaaaataagactgctatacatggccatttttttaaaaaaacaacggtctggttgaggttgtacacatgaacgagtggaactttttttaaaaaaatggaatagtatatcacgtgctaaggagaaagagaaaaagacaaaagcgcaaatggagggagtttaactagttggagatatatatacagaaatagtttccattttgcagtcaatacaaagggtaaaaaacttgcggcctcgcagaaaaaacctgtgtaccagggctaccagcttcagattaataaatcattgaaattttcttttctggatgtggattagccgcgatgactacttagggcaagaaaacatcgggggcccctgtgacacggagcagttaataagacagcatcatcgtcctaacttcttg

SEQ ID NO: 32309 - DNA, 500 bp, Oryza sativa
ctattaaaattcctctaagtagcaaaggccgtgttcgattattagtgttagaaactaaccctccagcacgtaaaacaaaacggttcattaatacataattaattaagtattagttatttcataaaaagtgagttaacatgatttttcaaataactttcatacatatattttttttaaaaaaaaaacacaccgtttaaccatttgacaaaagcacacatgtgaaaaacgagagagataagtaggaaaatacgatgaggaatatttcctccgtatcaaaatataagtatttttagacttcgacacggttctaaagatgcttatttgacaaacgatatttataaaagtaaaatattttaaataaaaagagttacatactgtgatagtttatttaatgataaatctagtaacatcaatttcttttatgattgatcttttttattttttttcttattaataattagagttacaaatatttgacttgacactatgcttaaaaaata

SEQ ID NO: 32310 - DNA, 502 bp, Oryza sativa
tgttatccctttctattaacagagttagtttggatgtaaggctatttagaaccaccaatttatggctaaaggcaagcaagattcaatctatacttgacatcttcacttttatatctcatcccccgtttctcctgaatggccaccacgggtagggcgtagaacaggctgccgaatactccacctcctgtgtcccactcatacctaatttgttcgctcaccggtgctcataacatatgatgtgcttctactggttgtataaggaatctctatatgaaggtcattaaatggaacccactattcagggaaaaaaaagtattcaagaatgttttatgtaaggtgtttacataataggcagatcacctctccgcaaaattgaaggtcgcaaagcatgtatggtatttaatataagcggcaccaacatagtgaaatgcacaaaacaacggattgtggtgtaatgtgaaaaatatcctcataaatcacattgaaataatgctttatatcc

SEQ ID NO: 32311 - DNA, 598 bp, Oryza sativa
aaagattccaaatgaactaaagctcatacacatgtcccatcctacagcaatgggggacctaagaataactttctttgccattttctattgggttctgggggttggctttaattagagccatatatatatatatatgctgctgtttcttttcaaaaagctacttatgctgcagtggatttcggttgaaaagcaaagtaggctaatatatttcaaaatgcatgaaataccaaaatagtctgcctattattattatgcacccatgtatagtccaaaaaaattacataatttctataaaagtggaggtacaaaatatgaggatgtgactttttttcttaactaattcattcttttcattcttaagtgtacaaatcctctcctccaaaactctatttataggcaatgtcttgcccacattacatattagtgatgggccaaactagtgggtaactaggctaaacttctacatgccagtggttttctaacattttcccttttctaacattagctctcactgcgagatgcattcgcctcatcaaaactccgtaaaaccccactgagaaattttggagaaaaatgagtacatcgcatatgtttgtaa

SEQ ID NO: 32312 - DNA, 564 bp, Oryza sativa
tcattggtcctacgatttttttttagtatacatgtgttgatttttaggggatttttttggagtatatatgtggtaatcgatttttccatacaaccccgttcatgtctcacctaaaaatcaacatgaccacatatatactccaaataatcgtagcatcaacgagcacattgcacacatttaacactacaatcaacaaatcccaatttgcaacggtcaaaatcacgaaatttgcaaaaaataaaaaattggttctaagggttaccctccgatctacaaaattccaccaatcaaaacgaaaaaaaagaggccacaatggaggagaataccttgctcttcgattagcccaaaaaatctcatgaaaaacggctccaaagtgagtggatttgaggaggtaagggaggggggagagagagaaagcgcaacagccctgctcaggctggggaggggccgaatgggtgggtagggggagggggtggggcccgcgcagttaagtgttgcccaccccccgaggggagcgcgccggtatggctggcgccaggggggtggggggtgggtggacggggc

SEQ ID NO: 32313 - DNA, 541 bp, Oryza sativa
ccttcgatctgccaaggctgaataaagttgtcctcgatgagcctgtccatttggttaaatttgtgctggttctttattggaactagaccatatatgttagaaacttttggactctggtcttgtctttgtctgttaatggatcttgtgaaaattgcatcagctggtccatctaacatagcactgctaccataaagatttacccttaggtccgttgtcatcaaaacttcaagttttttttattaatatttagtaatgtgtggttttctttacaaaattctatctactggatgcctttgcactaaaattgactatttagttatttaaaatcttggaagttaaattctgattgaagtaacatgcttggattctatataaacaaaaaatgcttttgaaagtcaaaataaaaatgcttgatgcttggcaacttggcattatttgttgtggggttctattaggctacattgtgagctcatgggttggacttctttaacccatgtttaccggagtaataatcacatgaaattcataagttggccatgag

SEQ ID NO: 32314 - DNA, 513 bp, Oryza sativa
accaacggtcaatggtggcctgattgagtttgcagttttatgtatatgtatatatcaccaacaaaaatgtcgttacaatgaaacagatggatggttggttcagtatatttcttttttttaacaaagaattaatagttcagttttacccgagtgtcagatttattactcaatacaattcttataaaaaaatcctttagttaattgtcttgcgcactgcacatactaccaacatttggcaatttatattggtatttcctttgtattcacaccacaataattcgtgtagttgctactgtctaatttgttatactccgatgcagagttatattttatctaatgttatattttattttcctattactatttactagaatatgcaagggaaagaggaatcaataattaaaatattgatatggcaacttgcttcttgctggtgaataaacacttgaacaattctagcagctaacttaggtgcggtcaatcacagaatatttgttattgatcatatagttt

SEQ ID NO: 32315 - DNA, 520 bp, Oryza sativa
ataatgcaactgttagaacacaggcacaaatttaaagcaaaattaaggtaactctaatctggtggacaatgtccatgttaaaatttacataaataaaatgtccatgttaaaattggctcaattgaaaagcaaattaaagaagcccaaatagagagctccatattctacttttctgtaacaagtgatatcagagcattttaaagaagtacggacacaattaaggggaatgctacatgacaattaagaagatgtacatcagttaagtccagctttgcgatggaggacgccagttggatgaatccatgtcgcgcggccgacctagttgccgccgaggccagtggcgttcttgacggcgtcggcggcgccctcctgcgcggcgctcgccgcgccgtgcgccttctccaccgcctcctccctcctcgcctgcgcgtggcccgccgcctcgccggccttgtagctgagctggttggcttggtcggccatggcgataggggtaccgagctcgaattcgccctatagt

SEQ ID NO: 32316 - DNA, 533 bp, Oryza sativa
cgagctcggtacccgcacacatgaagtataaattaaatgcaatttatcctcaaagaaacaatttgaacctggacctcattctagaattcgccagtttccacacgggcaagttaaatagttagctgactgagattttaccctatccaagaagaatatatggacaataatttacagtattgctcttcaggtgtcttaacagaagtatagcttgtactagtatgttacaatattagatgctagttcatatgtaagttaacattgctaacataagccatagaatggatgtggatcctgctatgcactaatgcacatgctacttccattcaatcagccacaatttgatcaaacaaacgatcatcaattgactgcagcaacaaagttatacttcttatatcatcaaacaagttcttttcttcaaaatggaacatatactatctagaagacccctctggcctcccctttgctctcacaaggcagctacctgcatcctacatctagtttcaggaaaaacaaaaaccaagcttagcgtatca

SEQ ID NO: 32317 - DNA, 518 bp, Oryza sativa
acaatctggattctatccgctcgttcttgcatgtttatgaagtgacatatcacatattaatctactccctttgtcccaaaatataagcatttttagctatgaatatggacaactgtgtgtctagattcatagccaaaagctgttacattttgggacggaggtagtatcttatcaaatttttttcataactatttggatgacatacaagaaagagggattaaaaagagtttcccgtaggttcacaaattttgtaactctgaacaggtaagtcatgacaaattatcagatgctgtatttgcttaaatggtcactttatgtgttaactgtgaattttattcaggtctataaagcactatagagggtaaatataattttcttcctttaattttaaaaaaaaaccccccttttttctatcgatgagagaagtttgactaggacaaactaaagaccttgaatttgggaaggagggggatttctagcttatgtttcttttttctggtaatgctcaataacatctg

SEQ ID NO: 32318 - DNA, 1256 bp, Oryza sativa
tccccataaaactctatactccattctttttaaacttggactccaatccaaatccaagtacaagttcataccaatttgactcacatcagcacacaatagtatcgcatatgtatagaaaccatctaaaagtcataagcatgaagcaatctagaaattccatgaaaacaacccgaaattgacttcaacccaaagtctgttggtctaaccgtcaggctacccagtcagaccgaatcaccaacagtctaaccagcaacacctgtccaatctaatcgacctccaagagccgaaagaagtaattaacttcttattccattatgtaacgaacatggttatcatgacataaaagaaaaactaattgactaattattgagcttcatataacattctcacatgttgcacataaatcacacatattgttggttagtgcgcatatgcatcaatgcatgcatccaagatacaacattacagcatttctccttcggatacaatacttaatttacactatatttctccttcatgcttcctgcaggggtatagtagacaacatcaaaatgcggtgttgctcactcactttaagagagagagagagagagagagagagagagcattagcttgctcgagtagtcccttgacaactttacaacgacaatatactgtcgttgttggatgctgccttgctagctattgccagtaaaaacagcacgcctttgaagagtgaaaagtgcttcctcttttgcccttctacatacctaggagaaagtttaatactatagccaactattggcttcaaattatctttagtcaatttaatagctaattcatataatagttacctatcaatatatactacacaatcaatatctggttacacctgccatacacatatgtatcttaaagttcatgctacagctggctataaatctgtagcccactgctcttttattatctcaaaatatgtttatagttggcttatagtctactgtacctgctataagacgattagcctttttttttatcttaaggattaaagttatgataaagcaaaacctagagtgagtacatgctcctttttttcttttttttagcctctcccatgcagatgcatgcgtgtggtgttgtctgccattataatactcatagtatgtagaaagactatataagatgttggctgttgcaaaacaccttttcatctccggtgcgtgcgtgtgtgtttgttgctccgtgtggggaaagattagctagcaaaaactcactta

SEQ ID NO: 32319 - DNA, 591 bp, Oryza sativa
cagtaagaaaagtgagcaagtaaattaatcttatttaaatttgcctcaagaaagtgactctattgatctgatcaagtgatcgatcagccgtgttcccatcttgaagtatcaccatcgagaattggtattttgagatccggggtgtaaattaatccctctatgtaacattgaccgcgattgaatctagcgatatcgacgagtcatacctgtttttctacggcatttccatgaaaactaaaaatcccagaacatattttcctgcaaccatagagttcacgaagatgatcttacagtggtctgagttgcgggacgaagcctttctatattaaccctaacatgatagtttatttttcatattattttttgcctttttagtctcttttttagtctattgttagcctgttaagtgatgtaatggttgtgtgcattcctcgtttatgttaaagagtcacaacttctcttattttttaaaaaataaaagcatgttgtcagtattacaattacatgttcccatccacacttataattattcgaaatagacaggggttagtcctaaaatagacagagcacgtcacgtggtgcaacagccct

SEQ ID NO: 32320 - DNA, 526 bp, Oryza sativa
attcctgcagccccaaggcgaatgtggctattccacttctgaattctgttctctttggatttgtttgttgactgaacatccttgtcaatagagaaagaaacttcctgcataatggttccagatattcaatttggaaaaaaaaaacgatgcctaacatgcttatgatccaaacggagggaaggcttgaagaaacgagctgggatatagatttggaagtttgttttaactttgattttcagatttttttttatcatagtatatttcttattgattttgaaatcgctataagaacgtagacctagagaattcaagattttggccaacagaacgtcaagacgttcattcgaaacgcatgaaattttcctcaatagccttcgaaacgcatgaaattttccagtatcttcgtagtaggtttgatcagttcctaggaaaaatatctcccttaaaaaaaagaagaagaaaatcctcgcgtgcaaggagatgcacggcatggacggacgcgtgatcgccgtcgacagggttagca

SEQ ID NO: 32321 - DNA, 532 bp, Oryza sativa
tattgaattcctgcagccctcttgtaaccactaggctacaggccctttcgctaaaaaatgaccattaaattaacatatagctatgtgaaagtgtcgctcaggaaaaaaatattaatatttggtatatattatactatatgatatataagattttgagatttgactgtacatttttcttataataaattatatgtttgaaaaaggagagagtacaaatgtcataatgcatttataacataagagagagttcttattttgttatatgaaatcaaacagtacctcggaccatcacctactgtttttattacaaagaaactgcatactggctagaaaaaagtgtgcataatttaataggaactaaaaagcaattgttaaaaccaaaccctaccttaactaatccatcatattttctttgattaaggaaaagaaagaatatctctagttttatagtgttggttcttccctcgtctacgtactcaactactgaagcacaaatggtcgttgtcaagaagagttaaacttagcagttaga

SEQ ID NO: 32322 - DNA, 502 bp, Oryza sativa
ccacatatttatcctgtatatatacttatatagttcatccccactaaatatagttaatattatttctctcttctcttattaagtcacattaccttaattatttctagtcttttaatgatagatatatagttcaaattgtcttttctttcttctctcttaaaaacatgcaatctcaattacttttagctcaaaattatatcaaattgttttattttgtacgtattatgtaacttaattttctacagcaacgcgaccagatgttcatatagtatcttataaaagtatgagcagtactagaatactaaaactggagaataccgaatgtacttacttataaactgtaggggaaattaaagcacttaaaaaatgtcctgaatttaatcatattaaacatttatataagcatctacgtctagttcataaaaaacgcgttcgcgaaaatagttcatataaaaagacctatccccaaatttatttattctttttaagtttttctcccatt

SEQ ID NO: 32323 - DNA, 576 bp, Oryza sativa
cagacacgaagaattcccatactcgctcgcatcaacaaaaagcattgaaccggatcaacaggcggcgggcggcatcaccgtcaccggaggcgcacacacacacaaccttactgttgaactcgaatatcgacagcgtcagaggtggagcctccacgccgcgctctgcagattgaaccgccataggtaaggaagctaggcgaccaaatctgcaggggcggcggatccaacttcaattgaacccccccaaactcttttttgcgggggaacaaacaaactcaaactgttattaaggctctgaaattaagagaagaacttcttgcagatctacaagagaagctagggttaacgaacgcaagcgaaaaaatcgagggcgggagagagagatgaatcagagagaggaagtgcgatgctcaccaggatcccctccgcgagatggcgcgcgcgaggagcggaggagaggagaggagacgggaggaaggagcgcgcgcgacagagaattttcggtgtgggggcgcaggggaatagaaatggggaattttcggattgataggagtatatatatacgagtaaagatat

SEQ ID NO: 32324 - DNA, 598 bp, Oryza sativa
tctctcttctctctcacgggccggcagtgggctgaaggaggcgcggtggcgcacctgcgggcggtggagggcgccgccgcggaggctcgcgcctggacgaagtccgcctccgccgccggccgcccggacgaggttcggcctccgccaccggccgcccggaggaggtccgccttcgccgccggccgccgaccggacgaggtccgcctccgccgcctgccgccgaccgggcgaggaccgcctccgccgccgactgcccggatgaggtccgcccgccgctggctgccattccgagagcatgcgcaagagagagcaggggggatccttggcgccgcccgccgccgccgcgtcctcccgccgcagccgtccgagctgcgggcgcctcctccgccgcccgagcttcgcctccgcctatcgccatcaccggcccgagctctgcccgccgccgtcatctgcttgctctgcgagcgccccctccaccgcctcgacgagccgtgcaccggcagttgcgggcttctcgagcttcgccgccccgagcgccggcagctacaggctcctcctctgccacccgagctccgcctccgcacagggctgcaggaat

SEQ ID NO: 32325 - DNA, 543 bp, Oryza sativa
ctttccccatgttatcctcttccttctcatccccaacctctcgttcaacttcttctcaacgtctccacgctgcatacgcggctacggcgtcatcagccggcgccggtgccgccaccgccgctgtagacggcggggctgccgtcgcggatggccggattctggtgtcgccggcgacgttcatcagcggcgtcgtgtggcagacgcggtggccgtgttcctggtggcactggcaatggaggcgtcgggcggcgtcgaacggcgacgaccgcgcgccgctgttcttcagcttctccccgacgacagatggaaaaggaagcgtagggtggtgctcgtcgccggcgaggactaccatgcgctcgagtggtggccggtgcagcagttccgacagcgggatgcggtgagcgccggcaaccacattggcggcaacggggcagcacgacggaaatgcttgagacgccattacctgagagggttctgagctcggcgacgaaagtgaagaggctgcacactacatgttttttgttgcacatagtgtgttcctga

SEQ ID NO: 32326 - DNA, 1318 bp, Oryza sativa
tgttgtagacatcgataggttaattagcatgtatatatggagaagcttttgcaaaggaggtatgcatggtatatatgagtagcaaaagtaaataaagctttctggtgtcctctcaaagaactatacatacacgttaacacgtaccatttgttttcactctttttgaaaggaatccctttgtgactcaaaagaaaaagaaaggatataagcagtactagtatatgataattatacagtatatacaattatctatgagagaggagaaattacatgcaatatatagctaggaggatatatatcaatattacaatatatgtactcatcagtactacccaagaaacagaaggaataattagtgtgttttggctgtgtttagttcagcgcaaagtttagattttagttaaaattagagatgatgtgactgaaaagttatgtgtgtatgacaggttgatgtgatggaaaaggactgaagtttggatccaaactttggatctaaacacagcctttgtcgaaacctgaaaggaatacacgtactagctagctagcacgatgcccatgtatgcttttatatattctcacaaataacactacaacaaaaacctggtatagaggaacttttgtagaggcgttttgcaaattgcttctaagatcagaagttttatagtgtagagacactttataaaggcactttacaaattgtctagaaaacttttactctagagacatttttagctcagtttgttagattttatcttgtagaggcattttttcggcactataaaatgcgtctaatatgtaaaggcattttgttgagacattttaaactatatagagacactttttagaatgataatgtgtactaaaggactaaatataagtaactaaaggaactaacataaaagtaatgatatggagtctagttggttagtgcatttaagataaaaatgatttaaccgagagatcgtgagttcaaggcttgacaaaagaaagaaaactattttattctcatttttggattggttttatatgtttgtggtacaatttaatgtctctagaaaatgcctctaccatcttatagacactttataaaatgtccatttgtttacagagacaattcaccataagacacttattagacattttttaaaatgcctctacattgttgtaaggcatttgaaaagtgcctcgacagcactagaaaaatgtctctacaaagtctttttcttgtagtgtaataaaataatatatgcaccttttttactcattacacatattggacaattatattgatcgatctactgtacacaatacacataac

SEQ ID NO: 32327 - DNA, 903 bp, Oryza sativa
  unsure (1)..(903): unsure at all n locations
cccccctctctctctctctctctctctctctctctctctctctctctcacacacacacacacacacacacacacacacacgcacgcacgcacgcacagaccaatttctgattcattgtcgtcttgctaggtttagcctggcagctgtttgatccagagtttgtcagttgggagctagtggtggtgggatttttctttttttttttgtttttatggattttgttgggaaaagattatgtttggggttacatgttataagctgattgaatcaactatgttatcatgttaaaaatgctagttatgtcagctaatcatgattatcattctggaccgatgaactcattctttgtttcaggctgttgacagtccaatgtctagcttcactcacttcatctcgcttccgttgggtatccacccacaacttgttgataagctgaatgaattcaagaggtcaatcctgacttctaatgaatataaaggtaaggatagggacctaagtgaagttctatacttctatagttctatggatgaaatgtactattaacacaagcaattagaaaggcctagtgtttcaatagaatgcaagttcaagcataggagtctgtcagagtaaaagaggataataagggcttctgccctggtctaaaatctttgctgattttgcaagtgctttatgttccatttttgatcccccccccncccccccggatttctggcaactctagaaagccacttttggactttcctagtgttgtgtctgtgtcaataatgcatttttatataagtactccacagcccacacatgtgtaggttgtttgatgaaggaacacacgaccgttttaggctaaatagaaataatagtaaagaagtttatatgcatatggatttttgtaaataccctcca

SEQ ID NO: 32328 - DNA, 958 bp, Oryza sativa
tccagatttggactgataagctagaccacactattccattttaatttcccgacatgttaagtgcacccaccaggtcaccaccactgctagtgctttcctgccaagttttcagtttctacaccctctataagttattttaattagttttttttgaagttaaacttcttttaagttttgctaaatttatataaaaatatagcaaaattttcatcagaatacaaaatatattgaatatgtacatttaatagtgggtctaatatatgaaattaatttgttggaattgtagatatagccgtatttaatagaaacgcagtgtcgtatgacatggaacatttggagttctaatggttagtaatgtgataagattcatgtacagatctgagaaacagcccacttaacacgcaacggcgattgcatatctcgatcagtttcgtcagttaattttctctgcaacttcctgaacttctgtttcatttcgtcatttccctgaccaacccaaccgatcgtcatcagcacgttcatcacggtcagcgtctagaacactgtggatatatgcttgatagtacagtagtagctatagcttggcgtgatcccaaattaaatcatccccatacctgacgcgagaaactccagagactagcagttcgtccagcccttcaagcaactgcagccatgaccatgaacatattcagatatatatgccctcctagatagctgcagctacagctagcaccgcatgtggcgcacatggagtgaagctgttcatccgcggatgaatccaagcgacgcccatgcatacgattcgatgcatctcggccggcgctctggtgctgatcatggttgtcaatctcaacctgaaagaggagctctatgttgtcgccggatccaatcagtaagggcctgtttggtacagctccaacttctatatataactccaggagttgagtctggagtggag

SEQ ID NO: 32329 - DNA, 591 bp, Oryza sativa
gttgttttgaaaaatgccatcctgagaaaactattaaaatgtgtttccgttaataagccttttgtaaaatgaacacacgagttactccagaactcaacttgttttgcaggtgcaccgatccatgatttttcgtttgacgatctcgtccccacggaatgatgtactttcatgagtgcaatgaattcatacaatgattccctcgcggacatcatctgtgctgactgccgaggcttttggtggtaatgtcatgaatcatgaagatccaagtggcgtctcttatgagtttatccagttcattattcagtctaaaggcgagctaagttgctttggatgagaccgtatagtttctgggaactgaaatgtttgttcatggggtgaaggttatggcagaagcactcgagtatttccatgtagggattgtcgtatatatgtaatcttttgaagggtaatcagtgatgtaaataataagagtggcataaattttatcaaggagtattaaattgattgtgctgttttttgggggatatgcgacagttctgatagaatactgttgaaggcaatgaaatgcaagtcatcttacacaactctgca

SEQ ID NO: 32330 - DNA, 688 bp, Oryza sativa
taaactccgtaccgttcgtttttttcattcattttaattattgtccgttgcaggcttgcagcagtcacatgagtgcgtataaatgcaccgatttcaagcccggtgctattaatcaatagattcttcttcactgtggttcgacaaacaatgaaactagtataactatagtataactaggtgattcctcacgctttcccgtgctttgttgtaaaatttactaaaaaattctcaatatgttttttttacaatcaaactaggattacgaagaaaaaaaacaaaacattagggtttatcagtcaaataatactcgtgctttagtgtgaaacatattgataagtatatgttaaatattgtaaaagtaatagatagatttgttgaaatattgtgcaaatgtatgacggagacggatgatggttggatgcttgtattttgatttgtataattaaataaattgtagatcatttgtatgcttgtatgagattaaatatataattattgctagtgggtgatgatgtggcatggttgtatattaagctttagatttagtgtgctttaactttacagaaagcatagatttcgtataaaatatatgttgcaaaaaagcgttgttcctgtccatgaggttgtacctcgcggtacttgtaaaaacacaaatattaaaaaatgatctaatatcaaataattaaaa

SEQ ID NO: 32331 - DNA, 554 bp, Oryza sativa
ggcgggcgggggccggatggcggcggagggcgagagggcggaggcgacatgggacctaccgtttggccggcctcacgcgcgcgaggctggcaccttcgcctccaatgaccaacaacgagcccacctgctacgtacgccgccgccttatcatcctcctccagttggctcctcccctcctgtgagccaccggcaacgctgccctagatgtgagccgccgatgctgccattttcgattggggtggggcagggttgaggatcgggggaagagatggagggatggtgagagagagaggcgccagcggtacggagctcggcgagggagctctagggcgcagggctggctatgatggggaccacggtgacgtgggcaggctggtgcacctgttgctcccaaggctgcggcgtggtgttgacctctctgccgacgtcgccgtctccgactcctgtccatcgaccgaagtggggcggagcggcgggcgaggaggatgccgccccctgctccgggctctccttccccctcataactcaccaaccatgaagctcgtcgcctgtag

SEQ ID NO: 32332 - DNA, 582 bp, Oryza sativa
taatgccaatacaaacgccacgtcaacaccacgtcggacggagactaagtcaacaccgccatgtcagcgaaaccgccctccaaaccacccggggagtcaaaattgcaccggttttaatagtttaggggtcaagatttctggttttacggttcagggttacggattagattcgggtcactttaagggagttaaagtgaacttatttctaatataaacgatcatgaaagatatgcatctattgggctgatccaatcagtgtgcagcccattaggatatatctcctctcattatcggtccaattgaatcctcagcacccagccccacgctccccaccctccagtctatcaggccaactagctcaacggggattgcctgtacctttattgtgtaattatagtacaatcacaatacaattagattgtaatttttatgtaattacaatgtaaatgtatcttcaactttaaaaaattttctccaaaacatgttatttctatgaaatgaaggttgtggggactgaggtgtgtttggttgagctgtggcttttgaaaaaatagctgtgggctgtggcttttcgaaaagtag

SEQ ID NO: 32333 - DNA, 537 bp, Oryza sativa
agtttactaacaggactataattcgacaagctggtgtgcttattcttgtccgtattgtcattgacttgtcaacaactagttattgtacatgcatcctatgaccacttagattattgcaacaagtacttgtcaggcccagcttgcgcctgtaatgtccggaatctcgataaatttatcccgtatatagcgcccctacgtcggccggcccgacgactgtaatatacagtcagtcaatggtttcaccaataacaatgtatggtatactgacgtttcccgggaaaaataaggctgatgcaacggagggtaaaagggtcccaagcgtgcccacagccacaggaaactaagagcatcccaacagcattccaaaatttcatccccaaaattttgttttccaaaatcctaaaagaaatttaaggtgtgaaaataatcatctctccaagagatgacctataactaattctctataactgaaaagtggaccctataaaagctaccaacaaaaatctgtttcctccctcctcccgcaagtgatcatgc

SEQ ID NO: 32334 - DNA, 631 bp, Oryza sativa
aaacacagcttttctaccacacaggcatggatttttctcagacaagtcagtcaggtcaccaaccaaacaagcccgtagtctctggagggagcgcagggattggagcccccatcctcctgtctcatcctcctggctggggggaagagcaggacgagcaacatctaagataagctccgggcatctgtagagaattagttgttgtaaaaagttggagaggtgtgctgggaagatcagcatcccatcgtcatcttcttgatccatggctagctggggtaccactccctcttcctccaccagatcctctgctacttgctgctgctgaatagattcgactgcttgtgtatcctccagctcaacagcagttgtttgctgctgttctacagctatacacatccgtgtaatcttgttgcagttcataagatacaactctgagagctttgggagatgagagagaagctgtgacaatgctttcccacttccatggtgctagaaatagataggtactcaactggaacttgcacttatagtcactcaaactttctgacagatggaacacgacacttgaactatcaagtctgagtatcttcagtgaagtcaacatttgaaggtaacaccccgccaaaggtgggca

SEQ ID NO: 32335 - DNA, 655 bp, Oryza sativa
tgccagttggtggcagcaaaatccacaggccagccttccttagccatctcctcccatgtcggagaggatgacatgttggtggtgaagttggaatcgaggagtttgggttgtgtctccaacacctgcaatccatcaccgcgagggatctagatgaggaaggagaggaatacaagcttacatgttgggtgaataattatttttttatatttttaataatattattgactagattgccacataatcagattaatgccacatgtacaccagctaggaccaaaacccctcttaggttgaggggtgtaactcatcgggtttgaaagattttgaggcacaaaatctttggtatttgaattgaggggattgtcgacgtgggatacccctagaccggataaatagggtattggggtacgttggtacgaggatctacacgatacgacgtcaagcaaacaagaatatagagattatgctggttcaggcccctcgtaatgtaatagccccaatctagtttatatgagattgatatggaaaaccacagagtacaaagagaacagatgaattcggtgttaccagcgagatccttgtcgagatgattcgacgagatctcgggtgagtaggttttgcgtcctccagcccgtagactatggtggatgtgttg

SEQ ID NO: 32336 - DNA, 565 bp, Oryza sativa
gatttaacaacccaaactgttgagtttaggaaaaaaaatcaaatgggaaatagaaatgggccagtgtgtgggcgagcgcgccttgcgggccacgaaaccgtgaacgacatgttccggcctgcccacgagtcccgcactaatcgatgtaccccttcgtctcggcccgccgccgcctcctccgctcgagccgcaccgcgcagccgccggcccaaaccctatggctcgcaaagcgcgacccgcggagcctcctacaccggggcggaagggcaggaaacctctcccctcccacgcgccgccgaccgaagccgccgccgccgccgccaccgccgccgcctctccagccgcagccaccgcctctccagccgcagacgccatggaggccgaagcgggcggcgtggccatcgtgtacgacgcgctcccggggctgacactggcgttctcgccggaggaggaggagcacctagagggtgcgactgccgacctaggcggcgcgtcgacctccgcctcggctgcggtggtggaggaggtggaggacgccaccgcggcctactccgtgttccgcaac

SEQ ID NO: 32337 - DNA, 594 bp, Oryza sativa
catctagcgtggaggaaaaaggcggtgcttccgaccacggccgattcgaatgatccagtgagaaaaaaaaattccaattatttcaaggggaaatgctcatgagggtgagaggatgcaatttgtggaaataattttattttggttgagggaagatcgagtaatcaacgttggaacaggacacatatagatccttccattcttctcttccaataaattgggattgctccgctgctgtctgggcaggaatgcagctcgacattgttgccttcctgtcagggtgaagcaacaggtcctcatggaccgtgtacttccatctgtggcatcggcatgtgcccagccgaaccaactgcagtaccaccattcattcgagcttgagaatgtgcagacgtgcagatggtcgagctcgtcagcgtgctgacagccacaagctcgagcctcgaggatggcatccggttggcgttcattggaggaggaagaaaagaaaggagaggggggctggaggtggaaaaaagaaagggcaccggctgtatttcacatgttttttttaaaaaaaaagaaaaccgaggagattctaccagagttgtggacggaatg

SEQ ID NO: 32338 - DNA, 703 bp, Oryza sativa
tcaccgccatcgacgataatcaactcaacagctgttgccctgttaaattgatctgccttggttcaatcgaccccaccgactaactcgaacagtaccagccggaccgaaccggtttttttttctttctccaaaaaaccggaccggtttcttttacttggtcaaccaccagtcaaagaaaaacagatcgatcctgtctcccttcttcctttggcttcctcgctcctcccagaaaccgcgcccgcgccgcttttcccgatgcgccgccgcctcctgctcctcacgctgccggccccgcaagaagcaccatgccccccacctcagaaaccgcctggggcgccgccgcctcccgccgctgtcacctgcgccgacccaccgattggatcgccaatcgcttccgccgccatcaacccgagcaccatgtctagtcatctccctgttgaaggcagccatcgacggttccggccgccgccagaagtgttcgatccaccgatcaagactccgttgatcgccgccgtgctccaccttgcgccaatgcccctccctgggcattatagcaggctacgcggtgtggagcacctccatcgcgcctctaccatggacctcccgcaggctctgataccacttgttataaaaccagccccgaaatcgacatcgatagctaaatacggaagaaaactccataggagatccaaaacgatgacga

SEQ ID NO: 32339 - DNA, 660 bp, Oryza sativa
aaaaattctatataaaagttgcttaaaaatcatattatctatttttttaaaaaatatagctaatattcaattaattatgtgttaataagctacttcgttttacatatgtgaggggataccatgaggaaagagttatctcctagtgttgtatatattggaaaactgtaattttgttttgtggaccaaccgactatatttcttctcaatatatttgtcaacaacatagacgaagtttttgtccatccatgtaattatgaacggccagaacggatcaacaggctaaatacagagtacttcatttgttctaaaataagttaattttaggttctactttttatcctaaataagtttactttttaatctatctgtcaaaagatgagttttattccttcaataagcatacccacccatcaatatttgtcgaaagatgagttttatttctttgatacacatactcacccattaatatttccttttcgattgatgaagaacatttttattttttttcacttcattttaatttgtgtttcaatagctaaatgattttgctattcctctgtcgcgtgattttttcttacgcctcactcgcttttgtggtcgttagatgcttagctgttctgttaatccctaaagccatactattttttatttaccatattt

SEQ ID NO: 32340 - DNA, 595 bp, Oryza sativa
ggccaacaatggatcaaatcgtaaaagatctcatggtatacgacgatgaagattatcacccagcatacttttgaccacttgtaatcagaatatatatatatatatatatatatatatataaataaagcgagcaaaggcttagtcccctgcccataggtcccacgctattcttagaagaaaaaacagtaccaaaatgcaaatatgtcattctgtatcatgtgtgccttacaacatgaaatagaaatgttagatatattcttttcattttctgccttgcatattttgtgtgtacttggcattttcagatgcagcctagctggtatgggagattaactacatggctataaaaattcatttcatgtttgtgtggtacaaagtatgtcctttgcgctattttgtctaaattctctgggttttctgaggttgtataagaattttttgtttattgactatttgtaaaagaaaagaaaaggttatgtaacttaaacttccagacatggatatacagtatagcaacattatatttgtcttctagtttgataaaccataagccacataacaatctcatgaaaattttagtgaattttgacaaaca

SEQ ID NO: 32341 - DNA, 658 bp, Oryza sativa
aaaaatatataataaaaataaaaatatgttcaatattaaatttgaatacaaatttcgatggattaatttaggcttggtgtattgtgacaaaattaggggcaatagtatatttttcctaattgcaaaataccctataaaatcaaaaatagttggctagcattgttcattagccctctaggtgtttgatttggttccctaaccaccacccctcctctgccgcgctccccctcaattctcgcgccgcccctacgtgcgccgcgacgctgccgccctctgctgcgccgctgccttgcgccccgcgccgccgcgcgccgtcttgtcaccgccgtcgccgtcgcgccatcgccgtcgcgtcttgtcgccgccgccgcaccgcgcgtccccattgccgctgccgcgccgcgccgccgtcgcgtcgcctcgcgcctcgcgcccgcacgccgctcgcccgtcccgtcaaccgcgacgcgagcctgccgtctcgcgccccgcgccgctgctgtgcgccgtcgccgtcgcatcccgtcgccgctgccgcgccgcgcgctgtcgccgtcgcgtagccatcgcagcgcgccgcgagccgtcgccctcgcgctgccgcgccttcgaagccccgagccccgtgctgccgcgcgccgtcccatcgccgtcgcat

SEQ ID NO: 32342 - DNA, 551 bp, Oryza sativa
ggattattaagttcatgtacaaatttgcttcagtaggcatcttgaactcttgtttctttggtctttgcactgaatcataaattgagtgagggctgatggatgggtttgtttgtatattagaccaagtggccttactatgcccagttccctgaagtagccatgccatggcttggcttatccagtttgatacattttgccatggtggtggtttattgctcttttagcaaagcagttgtgctggctattctttgttggacaagtttagtttgaaggcaggcatatgttctatttgtatgtggcttgccattttcataattttgtcagcagaactgggacaaacttattattgtaaaagggaagattattatttgaacaatctgtatatgatgaactgattcccgttactggtataaactacaaagacatgaactgtaacaaaactggtgaagattattaatattttgtgtctgtaaacagggaaaagcccaccattttccagtttgtcagaaactggttgcattgtatttttagattaattgaaaatttacatt

SEQ ID NO: 32343 - DNA, 689 bp, Oryza sativa
  unsure (1)..(689): unsure at all n locations
caaaangggggcgaagaacaganccccgcgaccgggatattttattgagacacgaaccggcacaaaactttgttggtttttaaaaaaatcgngaaacccaccacacaaaagcccaccattttncagtgcggcagaaaccggttgcattgtatttttcgatgaattgacaatgtacatcctgatgaaacatacactaagatcgggcgacatgagaataagaaagggatcgagccatcgaggagaccaagaaccatcaagaattgaaatactattctcgggaaaccgaaacaagggtgtaaaccataggcaaccgatattcccccctgatgactgagaacaacccgactggtcagagaggggccgactgagaaggtgctcgggacacacaacagccaaatcccaactaactcacacaaattgggcgaacgggacctgggcctctggctatcaaggagaaaggcgcaagaccatccccttaccgtggaaatgggttataacaaggaaccgccgcggcaaagaatcggtaacttgggaggacctgaccaaacggcacgaactgcacagggaaggggctcctccacaataaaagctcaccccccaacatggaaagagaagcccaaagatatggggctgttcaaagcaacccacctagctaaaaaattcaaaacatttaacaggagcggtgttac

SEQ ID NO: 32344 - DNA, 674 bp, Oryza sativa
gtgtcctgttccaacgttgattactcgatcttccctcaaccaaaataaaattatttccacaaattgcatcctctcaccctcatgagcatttccccttgaaataattggaatttttttttctcactggatcattcgaatcggccgtggtcggaagcaccgcctttttcctccacgctagatgcttagtgcgcgaggaagtccaacagcttggcatcaaccatgctcaatctaacagctccgtgctccaggccatctcgcctccacgggaccatggttccgcccttgtctctttctccctgagatcgaactccactactgccgccctccaacatgctcctgcagccaccctcgagttcgctcccgcagccacaatagaccgtgccagctgccgctgctgagttcatcgactacaccatcctacacctcgcctaccgctgtgccatggaggatgaagaagacgtaggggcaagggggaataagtgacggaagttctaacggagtgttaaaagaagtaacggagatcacttttgatgctattgaagtgaaccacaaactttcgatgctataaaaacaaaaacaagaactttcgatgctatagaaccaattttaccttatttatatgattcatgttatgacagtatgatacttgtgtgtttgtcagtatatctgattgt

SEQ ID NO: 32345 - DNA, 739 bp, Oryza sativa
cataacttcaaggggacaaggaggtataattttgtgtgtgtgcatgaaaagtaaaggggaacaggatgttggtgaacagtgataatgttcccacgttgaaacaggataatgtcccgcactgaaagaatgagatatttatattgatgacttcacagatggagcacttgtgagagatgaagcagaggccaaaatcttcaatgcataagggtactccaaggaggtcacaaaaatcaaggactgagaagaagaagactccaggattgctaacaacgttgacatccatcttttccttggttggctctagctaagggaatgacctcagcctaatagagtgtgtttttctcttcttatgtaattcaggtcttcctgaactagaaattctcctctggtatcctaaactatgtgtcctcactgttgtctctgttctgtaaaccagaatatccctttagggtgttaggaccctcaacattctttgtagaacagtttcttcatctcagtctgccatttctcaaagtccagattttagataatggtgtaatgctaagaatatctgttttttccagttctcccagaaaaatgcctaggcttagcaccagattatgctgtttgatcctgctaaaatactgatcctttatctcttgaggcatttaaacccttccctcaagactcaacataaatcctccctctatcctaacacctattcacttcagctcatactgctggaaagccagcccccaag

SEQ ID NO: 32346 - DNA, 534 bp, Oryza sativa
ttgcctggtttttttttttttgtgcatctttcagctctagaaccggctggcctgcaggcacaccagtagtgacttcacatctttaatctgctagtgctagttgtctgagggtaaggtttcatgctcaaccgctcaaacaggacctgcaatgcaagtgtcgtatttttcttctcacattcttgtaacataacatcagtgcttggacagcatcgaccaactggtctttcttctcccttgcccggtcttggatccatggatcgttttcctgcagctttctgatcgatgcaattaagcttgctttgccttcagctatcgtcagtgcttgactgaccatgcgagtataacgtatctgcctcttcctggtcaatatcgttacctgccatggacaaaatgtaaaatactccaggaaaatccattatatatctatatgatacccacaaaaccttatttttggggtgtactcctaatcttattgtatactccctccgtactcataaaggaagtcgtttaggacagcgacacggtttccaaaac

SEQ ID NO: 32347 - DNA, 642 bp, Oryza sativa
agcagttaactagttggtggctaatcatcccctgaaacctctgacttgttttgcaggccaagttcggcaggagattactagatgtctgagttgtcggctatcctgaactgggtaggcaacttgctgcctggcagctgtggcccattatcaagccatcaagggatagaagagaccatgagggtcttgcttcagtgagagatgcaagagggagcaaggacatgacagcgagaaatgctgttgcctttgcaagcccagaggttggccctgattctgctcctccagtatcatttgccagtccccagcactgccatccaccagaggaagctgtcaagttcacttgccagatactagttagtttccaacccagatactagttagtccccagcactgaggcagatgtgtgatgcctttgttggaaagctggtgatcccagtggtcttttctcttttgtttttgtatgaacttgaacaactttgggcttgttttcaaaccaggttatataattacctgacttcaacataaaaaaaagtaacttcacgaatgatattattggaccatctttgtaataaacaagtgaactctgactaggcttgtccgcaatccagaagttggaaactccattaacaaagaatccatggatcc

SEQ ID NO: 32348 - DNA, 3230 bp, Oryza sativa
atatatatatatatatatatatatatatatatatatatatatatatatatatatatatatatatatatatatatatatatatatatatatattctccattatatatatatataaaattcttccatcccttaaaaaaaaacttaacgtggtactagactgtgatacatcctaatatgatgaatttagacatgggatatatgtcatattttaatactaagttaagtttttttttttttgagacgaaggaagtatgtatatatcctagataggtagctatatatatatatatgcatgcgtgggtgattgtgtggacaatattggcaggcaaattaacctagctgtctaatatgccaagctagctagctagtgtacgtacatgtgtcttagtgattgaacctgtccaacgatcagagccactgagatacgaagcagtagagatatattagctagatatagccctttgattaattaattacatgcatatatatgtgaatgatttgtcaggaagacatacattacattagttgatcgatcgatcgatcatatcatgtcacgtggaacacgatctcatcattaattatatttgtatatatagtcctggaatgcatgccctccacacatacggtctcacaacaattaagttaagctattctttggcagcatgcaggtgtagctagcttcgaatgcatttggacagacaaaataattagattcagagtttcaaacgaactcattctctcaagctcttttcagctgtttaatttctaaagcctatctacacgggtcatgattaattaatttaccaacctagctcgcataaatgtagttctcgatcgatcgatcgatcatcgcgtgaagatcgatgatggccatacatatgtatcatggtggaattaattctcaccattaactgaaagattagtgcacacgcatgcagatccaaagtaatatatatacatttggacagttatatatagagagagaattgaaaggcgacatagatatatagatgatccagacttattctgatcagttctaaagcctagtagctaatcagtacatggcctgattcgcgccaaatcttctcttctgtaatctctgcctgtgtcgtcttatctgtcccacttttaacctgactggcagcagagaataggatagcagaccaaacaagtcatgaaatggccctcatataccctttaatttagactgtttttttcctaagtaattaccatgtttataggtgattttagtgcggaatgttgggtaaaaagatgatgaattggtggcgaatccagaatcctttacttggcatatacacgttgttctgtcactgtgggatctctctacaagttcaattgagttttgagagcccatgcatgtttagaatgggtcgggccatatctcctttgcagtttgctcccccggcccgccaagtaagccgttcgctgcatgctgcgtgcctgatactatgggccgtcggatcgaaaataggcccaggtaaaagtggccctaaactccaaacgggcaccatgcatctgtatgctttctcggattcaaagtttgtgtttgctattactcctagagtattatacattttttacccacgatagaacaagttgataggttggttgatttagtacgggaacatataaatgcaataacttgttaagctggtgtgctctaatataaaaaacttaataatttagtattttagtgtagtaacttggctaggtatgtgctattttaattagttaacgagtgagtctttttccacgatatcaagatgtcatcacatagtactcatgtagatattgtcttacaatttttgatgtaatttataagaattgtgttgctcatccattttacaccacctgtttggattttttttccttcaccatctcaaatctcaaccgaaaaaatttctacacactagaatttagttgacatttacttactagaatgataaaaacatattatactcatacaaatctgcatgattatattaaaaaataggtacttaaaaactgaacgtgcatagccacataatgctcgaaataattaagttgttgcaccacttattaagttattgtactatattaaacccatttgctaagttaatgcactattacgcttatttctcaagtttttacattaaattatacacacctcaaattcatgtaccatgaatgcaatttatttatttttgaatgtgtatgtattttaatttgcataattgtacctgatttttttcctttgtattagtatacctttattatttatacgatccgcgcatgggtcatggatcccatttgttttgtgttttggtgatctgatctcatgaccgaacacgtacctaatgacgacagacaagagaagagaggcaggcatacaaatgccgcgcaggaaagaatctgttaatcaatttaattaatcaattaacatcaactgatagacgtactatgtgtagcctgtactaactaactaattaacaaatgcaatgcaggcatagatcgattggtgcacgtacgcactgtaggtgaaaggaaacctacatacatgtagtgtacaatttaattagtgcagcgagtggaccattgtacctgaacttgccccttctaattgccttttactgaggcaccagcttcattagctcttaatcattgaggcagcaattaagcagctgggaaaataattcgcaatccttaattatacataggaccagtgatgcaccaattcttgctttatttcattagtttcttgttgagagaatgagagagcaaattagcaatgcatctgatctactactagtagtatgtatgtagtgctacctgaatgcctgcaaaagacaggcacatgtgacaagaaattaattaaagttgcatcgtacactcccaacgggccgagccagccgtggtccatgcaatgcaatgcatcaagaaagaaaagattgaccttatgtgaccgcaactaattagatatcaacactgtatttctatcatcaaaccaacctaccaattaaacacctcgtttcaaatgtaattaacctgtgccgtacctacaccagtatgatcgatggggatacttagtacggtttaagagacgacggttttcagttaactgaaacattaactagctagatcctaaaaattctgagaaactgggaacatttttgttaggactgtcaagtgtgaagagatcagccacctgattagtgattaagctagtcgtgg

SEQ ID NO: 32349 - DNA, 2192 bp, Oryza sativa
gccatcgcatgcttcctttgcttctcatttactactccatgtggggggggtctagctactcctcacaagatagctagcgtgatgtgtctagtgagactactaccttaattaatttgcatatcaaattttggataagggattatctacataatgccaaaaacaccattcattagcgaagaaaataaaggaagtactgaacacttatttctactctactccgtatcggcgatattttgtctccgctgtacctagagtgtggtgtgtttagttcacgccaaaattaaaaatttgattgaaattgtaacgatgtgacgaaaatattgaaagtttgtgtgtgtaagtaagttttgatgtgatggaaaagttggaaaaagttttattgaaattagaacgatgtgacaaaaaaattgaaagtttatgtgtataagaaagttttgatgtgatagaaaagttagaagtttgaagaaaatgttgggaactaaaccaggccctattactgcaccggttggcttacgtggaattcaattgcaagtttgagcatgtatatagcccctagctgaccaatcctagctagtctttgcgggagtgattgacaagaacaacgcataattaatcaatcgttaaataaccagtactaatactaaccagggttaccagacttggctaatgcttgtcttgtaagctggaatccccagccttaaacctgtatacagacatcttatgctttctcagtaaagctgggcggtagcttcttgatccaaaatactaacctgcagggcgtcgttttaacatattttaaagagataaataaatagagagaagagcaacgggctacagatgtatagacagctgcagcatggactataagacgtaatgtgcgtatgacaggtcagaccatatattaatagtatagtaagcaactattgtataaattggctattacattggctatagatgatttggagctggtagtgggctatattatcaaacttgccctaattattggtatacgactggagactaaaaataatacacatgaaatcgagtggagtacgatacgcatgcatgtgcgtatatagggtgtgtttagtttacactaaaattagaagtttggttgaaattgaaacgatgtgacgaaaaagttaaaagtttatgtgtgtagggaagttttgatgtgatagaaaagttggaagtttgtagaaaaagtttagaaataaacgagaccataactgggcaggaatgtatgaccgtgcgaaacagtgacaggtgcgtatgtagctgatccgatccgatcgagtgatgtagaaaagcatcagcgagcgaggtgcaaattaaagccatagagacatagctttgcttagacgaaacaccaaggtagtagctagctaagtatccatcacccgctacaactggtatccctccttaaggggttcgtaagaattccaaatcaaaggaatataaaaattaaatgattagaatgtcacactcatttcattcattacgatttttaatttctaagaggtctcacatcatgctaagaatcatatggaattaacctgtaacactataatctaatttattcctataaaacgaataatacatatattaaaaaattctaaggattcaattcctacgataattctatgaaaaattctctaaaccgaatgagcctaaaagtaaattaaattatactactatcagtcgtatttagcactgctataactatttagtggaggagtaattagttttactaacctggtggctctattaagaacaaataaagacgtaaaaggcgctgtttgggagcaagcgaattgaagcgaccgacagttgttggacatctgcccgtgtactactactgtgcacttagtacaacggtgaaaacggtgctccccacggggtaaaacggtgaaaagaaaagaagaaaagaaaaagctcttctggtttaattcctaactttttcttgtaagtaaaacggtgaaaaaaaagaaaaagctcttctggcctggtttagtttctaatttttttaaaaactgttaatttttatatcacatcaaaacttttctatacacataaactttcaacttttccgtcatatcgtttcaatttcaatcaaattttcaattttaacgtaaacaaacacaccctctgtttctctttttcatcgcgcgtatacgtatctacggtggtgc

SEQ ID NO: 32350 - DNA, 640 bp, Oryza sativa
  unsure (1)..(640): unsure at all n locations
ccctgtagaataattaatagtttatctgcagaataatataaatttaattttaaaaaccacgtttgaagcgtaatgataaaattttgaataataaaaatatgtatagatgtttatctgcagaataataataaaaattttaaaaataatattaaaacccacgtttgaagaagaagaataaaaatatgtatagatgtttatctgcaaaataataaaaaattttaaaaacacgaaatctgcaaaataataaaaaattctaaaaacacgctagaaggagggcttgaacctccgaccttgtggttaacagccacacnnnnnnnnnnnnnnnnnnnntccagcttatggttacaaatttacaaactctgataatatcttacttaaagccaaagaatattctgccctgcacttgcacggactgaatgctgtcgttgacactggcatactactgactctattaagcttgggaaggaacatttgcaactgcgccttctctctctctccctgtgtgggcttgtttacttttttaccatttataaattttgacatttctaacatttggtaagatagcaaacttaattataacactaaggccgtgtttagttccaaagtttttcttcaaatttctaacttttccatcacatca

SEQ ID NO: 32351 - DNA, 537 bp, Oryza sativa
atttcccatggaaaatgctgcgtgggcattatgctaacatggatcaaaataatagtaactccactaacttttataaggctgacgcttattttttaaaaagagtgaaaacacagtgcaaatgcagacgtccacaactcatgcacatttacccctatatacgtatatgcacacactatctatatgagtatctcctgtaaactggattgacaccatatcttaagaaaccaagtcaaatattaaactttatcgttgatttaccacaaagtatattattaatacttttaaatatgagcgtactggtatatgttctctccatatattagatatgctcataatttgactaattaacaggtgttctactagtaagaaattaacattactagagatttccagcatattagtatactaacgtatactcaatccatccataaatataaatatttctagtgtttccaatttgtcaacaattcaaagaaccaatgcatttatatcgttgattggtagttgtatcgttcggtgtgatattgtccaataaag

SEQ ID NO: 32352 - DNA, 1104 bp, Oryza sativa
tatcacggcccagtggcctttcactagaagcaaaaacacaatcctattgacatgtatgactcttcctatgttctgtattcttcttcctctgtttcacactcttcttcctcttcttcctatgttctatattcttcatcctctgtttcacactcttcttcctctatttcatactcttcagacccctcagaacagtccacatctaattcagaatcctttaaatgaaataagcagatgagagaaaacaaacaattagtcatcggtacatatggtaaagcataagtaatattgcttataggccatagtcatattgaagcatgctaaaagattaataattggagattggactggttttgttaagggaacattgtgccggcaaaagaacttaattccagagtcttgtggatacaaaagagggcatgctagacaacaaattgaagaaaaatggagatattgcagtatatatgtatgctaggtaaaccatttagaaaacatgccatgctatgtatgaaaatactggaaataaataaatgaaatgtatcttgcagactttatattagcattcaatcatccatccatgcattgtgagcaaccattgttcactaacagtaaagacatcagtttcacgctctactacaataaatcattgaaacaacaaattatacatttgtcaaagcaaatgtacctctctttgtgactcccaccttgaaagtacctcctcaggtatgtccattccaagcttctcatatactgcctataggcatgcaagttaaatttgctaattggatttttctgtgaggggaaaaaaaataaatgaatcagagattaatttagtagttattacctttagcattccacgatgttcttgtatcattccacgctgttcacgtatcattccacgctgttcagtcacttcatggcgaagttgtgcattctcacgcactacagcattgtaagaattcgtagatccagatattccagatttcttatgtttaacagcagcaagaacttcagttttcttgaaaactccgttgcccattgcaaaccgtccatgtttcagtccaccaaaagctttatataccacattcccatctaactcactgctca

SEQ ID NO: 32353 - DNA, 1749 bp, Oryza sativa
acatgtgatgaaaaaaaaacaatcaaaagtgttgatactatatatgaactattgtcatttatttaccaggttttgttgtatagtgcagaatggaagagatcctccctgctgttgagcatagtcttcattagcaaaacgtgcatcttgacctcttttgcgcttctccttgtacttatctgatgtccaccagtgacaaaagcacttccaagcgtccacattaatccaatctaatttgcatgtcatgtactgctcaaaattgagttcaatggcgctggcattttttcctttgatccctttaccatagtacttcttcatagcatctacacgtgcctggcaaattatctttggaactctagcttgacatagttgtcaatattcttgtccagctcctccatgtcttcttcttgggtagtgaagaatgactggaaaaaaaaaggggggaaataagtgtttactatattatgtggtgtccctacatagctatgtgagtattggcagaaagctatgcaatcctaatacttggaatgggaccatagtagattgaacttctaacactttttctagcaatacagtaaaatcttttgaggaaaacacatacccagaattcatcttttactctattaccagctgtcatgccattatgatccttctccccaaagtagtgaccccatgacatggccaatctctttcttttacgttgtccaggacctgcatattctttaaccaacccaggatactctcgtcttaaagatgtaccaagcacagaacctgtttgtcgttccatctttggcttgaaatgtgtgtaagcgaaacccctatatacaagacgtcacattagtatatatagtgcaatacaaattttatacataacagataaataaagggatgtaaggagctacatatgcatctcccctgggagatatctcaatcctcttataattcctaggtcttgtaagttgtgttgtccctcttgtattcctttcctcctgataagttccacctccagcagcggtagaaatggtagacccactaacatccctcgaagatgatggttccccgcgtggatgcataatacgactcatctctgcaaacattttataaataacattaatcacataatttattcttactgattatgaatacatgaagtaaaaagaacaataatatgaaagttcattttctaggactgaaacaattcttttcatacagaaagtaaacatgctgagaatgattttttttcatcattgatatagaaagtaaaataagaacaaccaaaacagtggcatgtcaaaattcattcggatcataaatctcatgatttgtctgatcatcattttcgttttcctcctcgctgtcgtcctcttctatattttgagattgatgatgtggtgctgttgttgcctttttttgttgcttccttagtagttcaagctctttagggtcagtgatttcatctgaacagtcaacaactgcagtgctagcttctaggtcagctccaagatcaactataaatgtactgtccagaacactctcttgaaagaatggcatctcatttgttgtcccatcttgatcattggaatcaggaatcacttcaagagcaggcaatctatcacgaggagtaacatgataaacaatgcaccagtcatgcagatctgttcttgatgagcatgcatatggaacgtaataaacttgcttgacttgatttgccatcacaaaggggtcaaaatttgacagtcttgaggtttgctt

SEQ ID NO: 32354 - DNA, 584 bp, Oryza sativa
tgcccttatttagccaaacatatataattagttgaattgtaaactaatgctggctaaatcgaataatcttgccagttggagaggataccatttgttacaggggtagaataaaatctaatgctgaacatttactctgatactacaaccaactactctaaaatcacatattatattagtcctatcatataagtggcggagaagcaagccacgacctagcaccagtgtcttctgggttagttcttggtatgacaaaattaatgtttaccatgatattaagtcaaaagactgagtaaattgcgacataaagtactagcaaagaaaagttattacaaaccacagtttatgatattaagaataatggacagccgagccaccacccctgctaaatttgagctcaataatagggtagtagctattagtgtacaattaattaaattttgatcattacaaacttgaaaaataaatttatttgatattttaaaggaacttctatattaaaaatttctacacaaaacacattatttagcagttttaaaaaatatgctaatgaaaatcgagataaaatctatatcttaatcagaaaa

SEQ ID NO: 32355 - DNA, 3593 bp, Oryza sativa
tattatctaaaaatattttcaggttgatggtgctattaacgccctgaactccagtggcatatttgcaagtggccagcctatcaggttcaataatccttactataccggataaaattttacatgcacatatcactatgcatgtccatgtaaacaaccttttgtttgtgatctactttcagggtgtgcccttcaaagacgccgatcaggagcgtcgcgtcctactactccacatcagctaataccatgacatcgaactgaccgtcatctggcgtgtctccattgccgttcaattgatcgacatcgcctggagatatctgctacatatatatatatatatatatatatatttatttatttatcagttcatcatatgctgcagtactgcatgtatggtgttgcttcagctagttgtagtttcgatccctgttgagtttctccttcaaagaacctgcatactgtgaatctgtgatcgaccggcctgaagacagacagctgaaatggattgatttcttacttgtccctggtcatgtatgtgcatgtgtgatgaggagattgcttggttgtagtgtacctgagactgtatccattgttaattcctccagagagttgtgttttctgttgtctcagctgtgtaccaaatatttatacttggtcggctttaatttcttaattagtctctttattgatagcttggcatcaaatggtttcaccagcatgggtagtaattcttcttttctctgaacatggtgaaaattatagctgaacttcgaaagtgcaaggctgcagacacatgtattgatacttttctttgtaggttaactaatgtttatctatgtgactttaattgcttagaacatcaggcagccaaaagtactgtaaaggagaaaaatggcaaaggtcgatgtaagataataacgtcagtcaaaagagcatttgttttgtcactgactatctaggtatatatattcttgagtaattttttttaagaaacgacgctcacaatacgtgcacacttagagcatttgttttgtcactgactatctaggtatatatattcttgagtaaatatatattttttaagaaacaacgctcacaatacatgtgcacttacccctatgataacacacacatcttgaaattgacaaagttagaaaccgaatgagcaaaacatgaacgagatatatttatcttcaacgtaagtatgagttatgttggattgcttgagattcattcgagggtgtatagatcttaacatggaacaacaattgtaccctcttgttacatattataagacattttggttttttcatctcttgtctaactaatattcatgtaaatgtggatatatacatatatgaaacatatacataaatccatatataaatctattcaaaatctaaaacgtcttgtaacgcgaaacaaagcaaaagtggctagtactccctccgtccctaaatatttgacgccattgaacttttttaaacatgtttgaccgttcatcttattcaaaaacttttgtgaaatatgtaaaactatatgtatacataaaagtgtatttaacaatgaatcaaatgataggaaaagaattaataattatttaaaatttttgaataagacaaacagttaaatatgtttaaaaaagtcaatgacatgtcaaatatttagggacggagggagtactaaatttgaagtttagaatgaactgatgagagcatctccaacaaagggctaaaattaaagccccaaaaatcctatattagggacagccaaaaactaatttggcctataaaacacccccttctctgagagatgcctaaaattttagttcccaaaattttaaaatttgccacatcatcactggtgggcccttctcaactaattttgtgcgggttcgttattatgacgtgcgatcacggaggggaggtcgcgctggaagctcagatcgcgctggacgttgtcaagttcagtgttgtttgcaatttgcaaaagcttggatgcagcacacagccaatcaatacaggtttagggaaaaattgctgacggtgacatgaaagaccaaggcactgcacatcatcagttcaattcggatttgaggatcctgaagattgcagaatatttcattaatgctctgcttatgtgaaaactatgtcaaaatatatttgtcagtgattgatccagtcgtctccgccgtgttgctgcatgcatgcacttcgccactcctgtcgtcggccatccatgctttgtggcatgaggtgccatacaatttatttccgagatcgcgcggaggggactgggctttggtcaatcgcgagatcgcgagtaatcctagtcgcgtgcgagatcatgactgagcccgttcgtgaggctatataaggcgcagcgatatgatatctaacgaaggacacagtgctgcagacgcacacagagctgttcctctctcagcgccggcggcattagcttttcgctcaactaggcaacggcagcgagcagcaacgattggtgacaggtacaagcacttgtacagtgcgtataaactatacgagcacaggtaaaattttttgctagcaaccatgtttttgctttgttgaattttttttttatgtttttggtctcacaatgtttttatggaataaaaaacataattcgatatgatgaataaatatttggaaaaacggaaggcctagctaatgctctacacgaccgtgtcatcaatctgcagattaatatctagacgaccctcaatgttatgattttttccggtcaatgacatttttctttaatttgatctgacaacgtcgcaaggggaaaaacttaatttgttgtgatgaataatggtttgacagttgatttgatccaagatgagtcgtcctcgctcctcgtttcagcggcttgtggatgaatcatcgtctgacgatgacgacgatttttttttttgccgcggcacaaatcgtccatagctattggcactctgtcaatgcaccaagatatggtgggtctgtcatgggacataaagtggttgatcgcaatagagaagcacggcacttgagattataccaagactacttggacggaaagtcatcagcattgctaatgttgttagagcaggtacaatagcaggctataagccaactataaatatattttaaagagataaaataagatagagaagagcagcgggctgcagatctgtagtcagctgcagcacggactccaagacgtaatgtgtgtatgataggtgtgaccatgtattaatagtatagtaagcaactattgtatgaattgactattatattggctatagatgatttggagctagcagtgggctatactattaaacttgctctcagtgatatgcatttactcctcaacattgccagctaattaatttaatataataaaaaattatagtggaccacctatttaattgacctattatatatagatggaccacctcgctattgtctccatattataatataatctccaaacaaagcaaacgcagaaaataaaacagatcgattcgactcccccaattagtgcagccgaagagaagagaaagatagccgagagagagggagattaaatagatgaat

SEQ ID NO: 32356 - DNA, 620 bp, Oryza sativa
ttttttgataataaattctttcgtctgaactggaccgaaaatctaacggaaaaggccactaatcaacaagggcttgaaataaggtgccatccaatttctgaatttcatttcaaagatccactgaacgcagtggtggatcaaaaagaaatagcagtgtattctgagcaaactagatagaattacagtctttcccctcccatttatatatcgtaaaaaatttcagtggggttttcgtggggtctctcatagtcttcacgctaatagtggggactcgagacctgccgcccccacactggatccgcctctgactgaacggttaaattgaaaaaaaaacaaataccagttaaaaaaatcgacctaaaaatttacagtgggaaaaaaaattccacagaggtaaaccacccaaactagagccgtgattaatgccccagtatctgtcatcaaattgccaaagccgtgataatcactgtaattaaagtcagttaattggtttgaatcttctcttctcctccgtttccccgtataaaattcagtcgagtcccagccacacacacgcgcacccacacacgcattcacatctcgcaatctcacatcgcattgcgagagcggagcacgcggtc

SEQ ID NO: 32357 - DNA, 2375 bp, Oryza sativa
  unsure (1)..(2375): unsure at all n locations
cccacgtgtaaattgtgtaaagaatacgaccttagtgctacgagaattttaactcagttttcatttattttctgcacaattgacttgactagacatgaccccattttggggtgtgtttagttccatgtcaaaattagaaatttgactaaaattgaaagtttgaagaaaaaaattgaaagtttatgtgtgtagaaaagttttgatgtgataaaaaagttggaagtttgaagaaaaagttgggaactaaacaagggcttggtgctccacccaattctgtcagaactaaaaaacaaaatatcccccaaatatattcacaagtcatatgcttatcatatatctatctatctattatatactaaaagtccattaaactttctacaaacgctcctaaactgccacatggcatcctacaaacgctcctaggctgccacttggcattattaaatctcaccgtcgattttcacttaaattagtggacccgttattttataccattggattagatctattattaaaaaatttcaactttctctttatataatttaagcgctactactgttgtcatgtatgtacaggtttatacgatgtcttctcctgtaccacatggcatcctacaaacgctcctaggctgccacttggcattattaaatctcaccgtcgattttcacttaaattagtggacccgttattttataccattggattagatctattattaaaaaatttcaactttctctttatataatttaagcgctactactgttgtcatgtatgtacaggtttatacgatgtcttctcctgtacgtacttacgtgcacaaaaacaaaacaatagtttacgtactattcgctggaaagaaaagaaaaaaccatacgcatatacataaaaaagacgacaaaaaaatacatcataaaaatcgatgatctttaaataaaatataattttctaaaatatattacatcacaaatataaatatatatagttaaactaagatctataataataatataaaatatccaatcaatgttccttgaaccatcttctaaattatttttaaattatatatctaatttgtgattctgttgttttcctttaattaaattataagttatattgtggtcttaaatatatcacgacacatggggctgatatataatagttagtttttgataatctattatatactaaaaggctattaaacatccttaaaatgttctcaaaccgttatatggcattctacaaacactcacatctcaccatgtgtcactctagcaaattatagaaaaaacaaaacatctagccatcgattttcactaatatccggtgcacccatattttctaccctcggatttacttaaagaaaaaaaaaagaaagaccaacaccccaccgctgccatccattacgttacgttaggtatatgtacgtagttacgtactccctctgtttcacaatataagtcattctagcattttccacatttatattgatgttaatgaatctagacatatatatttatctagatttattaacatcaatatgaatgtggaaaatgctagaatgacttcattgtgaaacggaggaagtatcatatatccctgccctcaccctaatacataagggcaacatgccctcctattttcaagcattttcttaattaatattggaaaacatactttctaataaattattttaaacaactaaatcatctaaatagctatttttttatccgtgcacgggacgagattatttacaataaaatttagaattcaatacctacattaactacattttaaaagtaaaataaatgtattttcttgggtcatataatgatagagactacctattggtcactcgatacatatcaggaaaaatcacatagatntttaaaccatatgagtggcaacatttagctcatattagtaaatacaacacccgacacattttctaataggtctaaaattatatctatattttaaaaatagataactaaagactacgatccgttggaatatgcctcagaaaaaaatctccatcccttgtcctgctgtacatataccttatttgatcctctcgccttatattttttaactaacaacctaatattaaaaaaacatagctaaatggcttataatttctaaaattatatttgatttttaatttgttttaactattattttatttacagttaattaaataattcaatatccattatagttgtattttactatatagaaattaaaatactcctatgcagggcaactgaatgaaaatgaaaaattataacagaatgaaaacatgtattatttcatattaaacaatctacgcaatgaaaaccaattaaacacctttagagcacacttaggtcaccatatgt

SEQ ID NO: 32358 - DNA, 1792 bp, Oryza sativa
agaagagacaaaccaaataacatgtcagcttctttattttcagattacatagggcaatatcccatgtaaggatatgatcacaactgtatatacaaaaagtgatttgttagtttagagaaccatccttgcaaaactaacaactactagatgatcacatcatcataaattctagccatcgtcatcagtattgtcatgacatcatggagcttaccaactgcacaagctacattacttctggaaattatacaattttctccccaacggtattgtatacccaacaatctggagaatttctgcaagaaccagaatagcatttaggatgaaattacattcaaataaggcggtatataagcagaaaaatgcaataccacagtgcaatattatgaaattaaaccacaaaatcatctcctcagctaatcaactagactgaatattttcacaccaaaagggattatcctggattccaatattattagggaagaacaacttcaaagcatttgcataccctaatctttgtcaaaacttacaacacaggaactgaaccaaaccagcacgcagtgaatatttattttttagaggcagtagggagtaagatttcttttttcccgaatgcgcaagtgtatcattacattacattaatagaagatgaaataaggcacccaaacacgctaaagaacagcaagaagtacaggaactcgcgccaccacaaaataacacacatgaccaaatataactcaaagtaaaaaagaacatcgataaagcaaaaaagaacactactgggttatgcccaagacttgcaaacttttcaggatacagtaaagcgtatggattttgcactcaccattcagctctgtccggtgcaccagccgatcgcaatgcatctctgattcaccttcaagcagctcagagagtcccctcctcgtgggcatgtccatgatgtcattgcagcgcttcatattgcaatggttttgcatcaccctcaccatcttcgctatattattgttctgaaatcctgcgcgatatttaaggaagagtagttcattgccgatctttatattaggcatgacagtaagttattgtatatactgcagtgtacggaataaccattagctgaatcctttttcagaaggtctagcagaaatcttgccaggcgtagattattaaggagaaacgaaagcatataagaaccttggtaggccaaagaaagcctaataaacagagcgcaaaggcgggttacagtgctacgctaatttagtaggccacaagaacttaattactgcaacggaaacttaccaactcagtgcaataatctccaaaagatctcaggaagaaattcggtctctttgtgatccatgaaagaaatttttggaattaattcatctcttgacatcgcatctatggctgaagctggtaagtgcaaaactgcatcggagacagaaaaagcatcctgatgagaaacaatatttaaacctttactagtttccaagatgatgaaatcggtatatatcatggcgcatatcaatctcgtaggtcaaacacaattcgatgagttattcatgtcccctaaaaatgcataaaacagtaggcataaaggaagcaacggtaggaccagtaaacatactgaatcctaaaagcatcagctcaatgaaccttaacaactcttgtttggcaaaaaataaatgcatgctataggtggtaatttgagtccatcaattaagccatagcagtaggcagtgtgaaatttacttaaaaacaacgccgccacaaaaattcaacaagagtagaattagga

SEQ ID NO: 32359 - DNA, 3493 bp, Oryza sativa
gacgagattgatgatatggtatgacactgaccaacttaatcttgcattagtaggaacattttatttcatacattttgtagtcctattgtcaaaaaaatgtatattgattgctcataattacagaaaagcaacagagtagtgattgtcggtgatataggcctgggggtattgtgtctagagggaggaggccgcccccaaactcatgtggcactcccctgagggtggtcgggcccggggttgagcagcggctgccccctcccagttaggggtcaggccatcccgaccccctccacgcacccccccagcatgcgtgagttaggtgggcgcgctcaacgcccaactaacagcatttaaggctggtgctgcagccgcataacgccgcattattaaatgcggcgtgcaggcgtggctgacaggctgagtgacactcgattgaccggcgtggcagggtgagtgtgcctgcgcgctgaccgcctgtgcactggcccgctgtcaggtggcgtgtggccggtgccgtctagtcacatcaccatgatgagaaatcccttgccccgtgtgcaagccggggatgatttcctactccaatttaaattagggtatccattccttagtgggaacgggtacccaaagtcttcagatggttaatggggaatgacgcacacgtcccccgtgtcacccgcggtgatttgatagggccatgctggagcgtcgaaggcatgatttcctctgtcagagaaataagatgtgtaataaatgtaaaggatgtcttccttcttccctaggtagatcttttgggcccctgtggtaaccccttgaattataaaaggaggtctagacctagtgagagggggatcgatcactctctgattgaaccaactagtacacggtgttcctcatagaaatcaagcacacacaggagtagggtgttatgcttctcagtggcccgaacctgtataaacccattttatctcatcgttcttgaggggcccgaccccctccacatcactccttgcaccaaaccttgattctcacccgctgccccccgccgaactgaaaggggggccccttagtcccccgctccaggagttcaccctccgacagtaatgatgaagagtgagaagtgaagtctggatccttgcatgttgatgtgtgttgtatagatctagttcatatttgcaacttagtaaattgcaagagtaattgttgtacttctgcatggaattattgttaccatactgttatcttgatcttggatgtgttaatttgttaggacttgggactttacacctgatgttatggcattggcatggaggctggagccatggatggacttatattttcaagcaatgcctggaagggttttggattattcaagcacttgatgttatatattatgcaagctgcacttaagcacttaagcaaaattatactattatggatgtgttttggctggtttttccttgagagatcatgttcagatgttattttactatcgcattgctgcttattgtattgctgccttcttgttgtatgtaatgaatagggctctcgctaggctagaaatcgttaaagaaacatgccttcaacaacaccatgaatacaaacataacatccgacaattttatttcatttccgaaccgagtttgcactgactctgtaccaaatccgccgtccgaaataatccgatccacatctgcatccacatccacactagtccagatcccctagagttgggtataactctaccgggtggagttggccaaatatgtgccattccatatacttcaggggctgggattaagccacattaatttatactttaaaaaccagtaactgaccatgcaacaaataaactcgcatcaacaacttatcacgagatcatttttattgtataattagaacaaaaatttcatgcttcatcaattatctaaaaaaatcatacacattaatattgatatggttcactgtttgcatatatgtgaaagcactatgttggtatacactgcgagttgctttagagttgatcgactatatctgttgtttggggaataacaaaacgttgttctgttacttttttttttgggggtgagaacttaatcaaatcgctattatagagcaaacacatgaaaaaactaagtttcctcggaagccttaaccattaatttaaggagttaatttattaggtgaaattgatgatgaatgatctcagccgtaggaaacaatggatagtacagatttggccaactccactcggtagagttatactcaactccaggggatccagacccggtatactaactagtagctatatatcaggtgatacctaccagagtcatgcatgatacttgctaggtatactagctagtagctatatatcaggtgatacctaccagagtcatgcatgatacttgctaggtatcatatgataccccataggtatcggcacaattttcaattttgatttcggcccttttggtagaaccgaattctgggaattttggtaattttggactgaaatttactgaaattttgacacaatttaactgaatttgactaaattcacaaaaattggagaaaaaccaaaaatttcagccgagatattggcatgccggggggaggggggagggttctgaaatttcgaaaatttcgaaccaaaattttaatcccctggtatcagccgatactcgtcggtactagatattgatatccactgatatcgcccaatgctcattgtcttattggtaccaagaaaaaattgattcgtaccatacatgggcgtatagcttgaggatggtgagcagatcttcagtggcccgaggggaggagtgactgtgagatgaagaggacgtcagtgatggcgaagagctcatcagtgcccgtgaggagcatatctgcctccatcgcatgcttcgtgaaccgcttgtagttggtgaggtcgtgtggtgaggagcttcgatctccatgatctctagtcaactctcgccccatacagtcacttggatgcgggcctatcgggagtggcgggactaccttcacagtccaccgtacacaatctcatcatctcctggagaagtgtgtccatcctcatcggctccagcgattcatgtctgagggattggagcgtcccatgcaggggatgggggatggtatgtgtcgcctagcattcgcgagaagataatggaacacgagagcacgctacaccatgacctacatatggaagcacttagactgtcggtataaatggccattagagcaagtttaataatatagccaactactagctccaattcatctatagctaatctaatagctcattcatacaatagttatatactacactattaatacatagacccacctgtcatacacacactgcgtcttggagtgtgctacagctggctacaaatctgtagcccactgcttttctctcttctcatttatctccttaaaatatatttgcagctggcttatagcctgctattgtacctgctct

SEQ ID NO: 32360 - DNA, 1424 bp, Oryza sativa
catgggaaaattttggcattactgaaacattggtagagtagggatgtttggtttgataccaaatagtgttaaagtttggtgctgccaagattccttggatattaccaaattttggtcgcaaaccgagtactcctagaaatcaaattcctgtggcaataccaaagttgacaatggttagaaatggctgcaaatcaaacaggcccaaagtacacaactaaatattcatattctcttatgtatatatttcttttttgtttgaactggcaaattgtatccagaactatttcatatgtaaatttagattttcttatctgcttctagtttgagcacgttgttaaatcaagtctttactggttatgtacctatgtggcttctgacctgtgtctcacatgttgaggtccgttgcatctagacttcactggtggtaggatggacttatgtcctgcttaagtactgtggcaggtggcatcatgatcaaattgaccaaatgcgtagtgcccagaagaacaaaaaataactgttaaaaagttcaatttattttttaaatcattgtagtttttactaattaaacttttaatcatgggcactgtcattcatttatgctgttaatgaggtggtgctctataaaccatgattttaagaaatcacaccttatggagtgacatgaaaagatggagttcctcttaaaagttaaatatttaacacgttaactaagggattatatgaatcttagtcccagcaaaaaaccaggttttcttaaattttctatggttaatatttgagttgtttgaaaaaacaactccaacttgattccagggaaaacaaaatagattatcgaaagtaatttactatttttcaccaaacaagatattcactaggtactatcctgattacttggttccagtaatcttagcagttcacacttcagtctgtagcccaaacttatgttgccagtacctatgaggaaatacgtcgcactcatgggagaatgtgtgcacattaccaatatcattcaacctccttagagattcatgctcagcaccatatccatggaagcgcatcgtctgccgtcgtaactataacggcatggtcatgccgttggcaaatcctggacgttcctcttttttggacgattaggatttagaagggctccaattactaggcctaccaaggctcacgatgctttttttttcttaactcggtatcgatttcactttccccatcttcatccctcctctctctctccacgcatctctcaatcactgcaaagcaagagggccgattcagtggcttcaaccatgaatttttgctggcaatgaccgcaatatgctccctgatattatccaggtttgcttcccatcatttttgtcaattaatttggcccctgttgctagcagcaatcagtcctggaagcattggcaaca

SEQ ID NO: 32361 - DNA, 784 bp, Oryza sativa
  unsure (1)..(784): unsure at all n locations
ccgccacagccagttcttcctccgttctttccctagccgcccgcctagggttcggtcgccacngcgttctcctcgcccaatctcccccaaaaacctctctaatcgaaggtgatttgtgcgacattgagtttgggatcggaagagaaggtaaacccctctataaaccctaagttccccaaagttttattggatattttgcattgttttggttgtagacgtggtttgataatagttggctaaggatggattattagatggataatatgggtggggatgaagtgtggaggtggcatatctttatctatttggttgttattgatacatttgacaaaatgtatttgggatggatgtttggtgatgcactagggtttgatgggagatggatgtgtggtgatggcctaggatgtgggatggatttgtggtgattgagagggtttgaaaggggttgatgtgtggtgaagggtaggtaatttgtaggagtggagtttttttttatcaataatgtgtagtatttgagtaatgtactaatttattggaaaaattagacatgttgttagcttttgaagtattggtattgcaatggtaattacatattattttcaagtaattaatgtttatgcatgggttaaaaattgtagatggatagattggtccggcttcattatggtggttgtgtggtagatgaaagtacacatggaagccaatttgagggaatgacagttagacaattagtgttttttgcgaagcctacctttgaggagttaatgtctcgcatcaagcatga

SEQ ID NO: 32362 - DNA, 825 bp, Oryza sativa
tcatggatcggaggtcacctgaaaaatggatatgtaccacatgttcatatttgctgatgtccaatttgatatcccaataactcatgagaaaattaaatgctcatgagtcattaagaaaaaaaagagatatcaaaatttgtagagtaattagtttggtaattatcaaagatctcagctatagttttattgctgaaagtttatatgtgcaaaggcgtgaaattctttaccgtaagtttgaatgaccaagaactacattatgtgtgactgctatgtatgtgtaaacatctatgaaaactttatatatggataaaaaatagacatcataaaagattttaacagttataaaaaaaacagaagcccacgcaatcagcctcggtgctccccaccgcctcctccatgttcccatgacaacaacaagccgacggcctcctaaacagatcatcgatccggcattggcgcatcgcctccaacagcaataggtgatacttgttgacggtcgctatcgaccagtttcgaccgtcattattacccaatatatgaagactagctatgtttgcaatgcataattcccaaataaaatatctacttccactatgtgctatgctactaacatgtatgcaggagaagcacgcatgaatggaggagaatcgatggaaaacaaacgaacaatcaatcggaagccgtcgagaggtgattaaccaccaaagttgggagagaatgaacgtgaagaatgtgaatatattttgcgccgatggactcacatggttttgagctacaacatataaaatgagaaattattctgagctaaaacatggtgtaccataa

SEQ ID NO: 32363 - DNA, 4183 bp, Oryza sativa
ctagaaaaaaatatttacgagtgcaagtgaaataaaactaacataatcaacatatgatttccatggtgtcaaagagttaagtccgattaagttcacacgatcaatcgagaagcaacgttacgagatgcactattgggtttatgtgaatataggatgtgcgcgacaataggtggtgggtgagccccctctgcaaaaggaataagttcaccttagatccctcaattcgtcgcccactctgattttagtccttcagccgaaaaaccagatatagccgatccgccaactcacaaaaccaatgcaaacgagatctcttggcagcgtcgtcttcggttttggctgacgtggcgtctagtggcttatttgactaggtctttgtacgtagtactagcaaatagtatctgctggtcagcgaggatgtactacttaagcagtccagatacctttttactatcaagaggatccacggatgcaccagggtcattgtagaaggcaacaggttcatgagggagtggagttggacgtgggtgctacatgaatacaaatatatatggtcagttcatgacaagttgaaaagaggtacgcagaccaaacaatttgaaatgtatagaaacaatttcggaatcacaatactacagtcacataattgctttgcaactgacaataactatatcagtttcttgttgcaggtttcgatgttcatggaaacttaagtgaccaaaagattgtccaacagaagaaaaacaagaagctgggaaattaaactcaggagggatcgagatatcaggccaaattaatctagttagtatagagagataaaaaactcataaaaaaacacaactgaattcgaagcaattctgaacaaaattatattcgagcaagtttatagagctacaggagaagaagcgtaccgagaaggggttgacctgatctatctcgacctcctcgaacgggttgtcgctgtgcccccacctccctccggccgccatcgatcgcaactgtttagaatgccaactctcagaacgtctcgcttggcaattaagctgctaatataggtacgtagtacttgtatgcctagctacgggatggaaatttcgtcgcagatgctgtaaaaagccagtgtcgtcgtcctagtagctacgttgtcatatggcacacactcgatcggacgcacgccttgtacggcacgacggctctgctagcgaaatactagtattgtttcttttgttgtgttatgcacttatgctccctcgagctagtcgtggtcgatggatacgttcctgggccagagtagctagtaattggtgagtatggtgagccggccggccggcggggacggcaaaaacggtggcgttggaatttggttggcgcacaagtggcttcagcagcgtaagcccaagcaggagtagccaattgacagctttttccatgcatatgttagagtatatatatatgcaacggtacgtggagaacaaggcgttggcaaaacaaaattccctaataaatcatgtacacagtatttggtaaattattccgggcttttccattcatgtatgtatactttaggttataaaaaaaaaaactctcgattcgctctcagctcacatgctcaatctctctgaaaattgtcggacgatgaatagttcactgaaaaccaacaagaacagagaaacagagaagtgttttggcgcaccttttcgtttttcttctatttattctcctcagcccgtgaggttgttacatgcatatcagactccgactttactagatctaacaactgaacgcgtcatcccacgctgtagacccaactcagccactacaaccgaaaaagtctctaattgaccgacctctgaatattttagtccggccatgcaatgcacaaaggaatttgaagctaaatgctgttacaacatgcaaaagactaattcaaacaactaaacatgatagggcgtaaagattatttgctactctgtcataggttgtttaggaatttttttgactggggttgttgaagaatttaaaaacagatatacaacattctacagataaagctatagatcttataaattgttgcgaaaacgctagctgccaagcgtccaactcgagcaaaatcattggatgccatccacctcatgccattgccacctccctcatgtttgttttgcttggtgtcaacaaattttctaagggaaggccacaacgttgagcttccccgacctcacgctcgtgacgacctcctcctgctggttgtttctgcagccgcctggaccaaccatagttggtggaacctctgtcttgacgtggcttcgtgagcttgttgtcaatgagcacttgatcccgcgtcaaccgcctccacatcaaatttgcaccaaaaactcagatccaaccaaaggagtagaggaaaaaggtggatctagccattgaagtagatgaaaaaggaggatccgacaacaagagtagagagcaatgacagttccaactactggagtagagaacgatggcggatccatccattagtagaggaagaaggcggatacggtcaccagagcacaggaagaagacaacggtaggatgttgcattatgttgtttatctttactttgttatgttcgagtgtttcatcctctttttgttggatgctaggtacaatgcggaatgtattttcttcaatgttgcacaatagggccttgatgtttcaatcaattttttttcgatgattgcatctgtttgattttttttgccaagcgttgacacatttttcatcgagcgatgaaacatctaaaacaaattttgttgaaacatttttcacagatgatgaaacattaattagatacatttctctattcgtggtgaaataccatttgataatttgtaaatatcaaacgtcctggcctagttgtgtccaaattgctgaccttggttcatgcactggcgagtttgtcctccatcttttgtagattcgataaactttagcaatggcagcaacagccttcaaccaattagattttgggggttactgtgggggtagggaggggagaagaggggggagtttctttttttagaggtgggtcagggtggagaaaggcccaatggtgggtggcagcaatggggaggaggcgacaaagtgatagtactgttgaagctacttggtggggaggaggtggtgggtagtagaggcgatggggtatcgagaagatagtggctaggtggcattgggttatgatggtggatctgatggccggagtcaccgtaaacggaggaggctttgcttctctcccatggaggagggagtccttgccatgttcgttgggacaatattttgtcgtaataaagtatatgtgcaccgtaaagcacttatacgagcatattttaattatgtcagttgtaggaggctgcataccaaatatagtgcacctatggtcggtcacctgaaatccgcataatgcaaagggtggcagaaaaatcgtgtccggctctttaggaaaataaatattgctagaaaagattcctcttatagcaagagatcctatagttttgctacgcttcttctttcacctatttcatatggtagtacaggtcgaactgaaaaaagttattttccttgcacataagatctttcttgggttgaacatagacttttttttaatttactcactcatccattttctcatagcttataaaagagaggaatttcactgtttaagcatacatgagtacagttatacaaaaagtcccaaaatatataaaagagaggaatttcattgtttaagcatttagctagtaataagataccacaagtacatgaagcaaacaacaagaatagtttatggggatctaaaagaggaaaaatggatattaggactgaaaatggaaatgggattctgggataaaaaaaggaatgagatatttgggttgtaaataaaggagtgaaagagaccctccaaacttgatagttgaccatggtttctctagaaaacatcattttagaagaagcccacccttaacatgctggaaaggcatgcaaatggcaatgagcccctccttacttgggagggaatgaaataccctggttggccaatgaggatcctgcgccaatgttgaaaggttgcaccatgtcaccactgggtccagcagtgttgcttctgccgctacctctgaacaaactatagcccaatgagccaatgccc

SEQ ID NO: 32364 - DNA, 3236 bp, Oryza sativa
ataaatttaatttcctcagttcaaatcattctcattagtacattacccgttgtgtgggtcataataaaacccactaacagatatactagaaagtattgctctttacttctctacaagtagcataaaaaaattcagaataatgataggtgttaaaattcagtactgtactagaataactcagtaagagcatcaccaagagtatcccaaaattttgtttatgggaatcttaaataaaatttaaggtgttaaaatattgagccctccaagagattggctaaaattgactccctaaatctaaaaagtggtccctctacaaaactaccaactgaaatctgtttcaggctctccctcctgtgagattatcacgctcgcccgtgtgaccattgatcgcgggaaccacttggtggtcacctccctgtcacccctctccacgcagtagcacgtcagcaaatctgatcctgcaaacaatcaagcaaaccactacaagtagcagcatcagcaaagtccctaattaccaaccagaaccaacaacatcgtaccattttcaacaatagcagatcagtagcgtcaactcagatcagcaaacgtcgttcaaaaaaaaattcagatcggcaacagcatggcaattagcaatagcatggcaagcaacaagcagcagatcacaactagcagcaggtcagtagcatcaacaacagcacatcatcagcaacaccaacatcaactttcaacaccaccaccggcaccaacaacattattcagtaccaactgtagaattcgtagtagcagattagcagcgccaaaactagcaagcactagcagataccttcgctcatctccatcatcgagagaccaatcccgatttgaggagaaaccaactcgggccgatggaagttcgcctggctgtagtggagatggtgccgctgccgccgccagagcaggaactatcgacgccgagaaagctctaggcagcggcgcgcgcgtgagatgtgggcacctgtaggacacctcgatgcgacggcgaacaacctcgtgatgaaccccctgtcgagaacacttcacgtgcgcgtgggaattcgcacgacggcacgagagagggagattgggagcgagcgcctctccctacttgtggagaacgaaaaattcggtttttgaactattgggcgcttggctagggattctgttggactgggtttttgaacgaaaatctccaatttcaggataaccatatacagatattgttggtgatgctctaaggaactaaagatacaaaatcatcgagagtacaatgcagcagcacaacaactcagttctcggagcatttctcttggcaattaagagaacagcagcagctccagccttgactgctaaggaggaaagggatttggaggtcttcagagaggctcaccgcaggatcgatggggaagaggaagaccagattcaagctcatgagccgcctctgcctccaccgttgtgtctcctcactcaactattcgactggcccgagctcgtcgtcgctctatcaatctccacgcgccgtgcagcctcccccctcctccatggatctggtttggatctagaccatttggtgttgaagtggagatgtagcaacgtgagaaaagaggaaatttaaaggatgtatatgaaattgtacacagcatggtgcggggggcatttcataaaatgtaacgtggggacggttgggctggcaaggcttcatcaggctgcacattttggatccaatggtccacgattgagtttgcaagttttcatataggttgcagtttccactacatattttctccttttttcctgtcacatgtgattttagtaagagggatcacaggtaaaagataaagttatctatctattatataataaaagttcattaaaatttctacaaacgcttctaaaacatcacttagcgctctaataaattagagaaatccaagaaattctaaaaaaagcaaaacatcttaccctcgattttcacttaataggcccattattttacaccattagatctattttaatagaaaaaaacaaaataccatctaccaaaaatcctctctcattgctcactttggcctccttaatttctagctagcaaataataaatattcattaaattaaacatcgtgtatatcaatatattatgtaataaaagtccattaaacattcttaactgtgctcctacctaccacaagatgcatctaataaattagaaaattgatctaaaaattctgagaacaaaaatggaaaaaaaacttaccgcactctcacttagatcgatggacccatttgttttaaccattagaactatatgtagagaactttaaaagtaaaaaaccactcgctgccccctcccagtcgcgtgcgtttgcggtgcacactgctctgtagctctcctctctagctcatgctctctcctcctcctttaatttagctactaaattaatcgagaaaaatcaataattttatatactaaaacagcaaaaattttcaagctacaaatctcattcctaatctagcaataaaatactataaaaatttgacagcatatattgagtcatcatatatcattccataaacatacatatctaaattaaatctacaatatccaaacaaaaattacaaattcaaatattaaataatattttatcgagagacaacatccctaccctttcatatgtcatgcgaattaacataaaagtatgaaacagttcaataatacaggttgccccatcatacattgtttttcaaacatttataactaattggatatagaattaattcaagtatgaatagtccaagtcgcggcataaaaaaccggttaaataatatttgataggacaacacgtgctcaaggaaagaatccaattactctatattttttttgaaatttgctcgagtaatccaagcaagcctaatagtcgctatgtccgaaataagtccattttcacccatcctacgtataccgatacaaaacataaaagactaaaatacccttactatatcaaatcccaatgcaattatttctctctttttatctactcccaatatatttatcctttaatttcacaaactctaatgcaatgattactcaaaaataaacttatttgaaaacaaacggtgtgggggcaaaataaagttattatagcagagggagtaatcttttacataggtgttctaaaatatattctttgttactatataatcgactcaaaaagctatttagt

SEQ ID NO: 32365 - DNA, 623 bp, Oryza sativa
attttacttctttctcaatttgatgctgagttcctagttagtatcacatattcttctttctaagaaaaaagaaacaagtaattccttagtttcgcctatgattaaatgccgggcaaaaatattttgattatctcttaatttcatactaagttcctagttattatcccacattcttcttctttcgaacaaaaaagaaacaagtgattcctctgatttgtcaagctggccaatgcataagaaacatgctagagtgtgtgcagcattcgctattagcctgccaattacacaaaacgctatcattcaccatgaatgaaatcaacatgatatattaccacccacatcacaaaatttatctggttgtggtggaaaaaatggaacccatggtagagtcatgcatcactccccaacttccggactttacatgctaacgacaacgaaaccaacacggcccaaagcccagcatcgccgaatcgagacggcacccaacgaacacccccaaccacacgaaaccctagcacgccgccacgcgccaacggaaccaggaggaggaggaggaggtaaggggaggcaggccttaccgtcgtcgagggggatgaggcactcgtaggagatctctaactgga

SEQ ID NO: 32366 - DNA, 599 bp, Oryza sativa
gaaacctacaaatatccatgaattccaaccttagcatctagtgcttggatatttgtatccctgatatttcttaatcgctttttcttcagagcaaaccagctactgatggtttcaagcagttacggataggagcctaggagggtgacacctcgccatcatcaatcacagaagaaagctagctagttgctcatcctaaagtggactgctatatatattatgctgcaacaatgtggctagctagctaccttcatcatccatctatccaattaatttcaacacagagagcactttttatctattaggtgtcaggacaatgaatcatgcacaacatattcaactccattcctattcgatgagttccgatgaaacagcatgatagattctcctccaaatgaggacagagcaaaaataggacagctggaccaatccattcagtcagtggtcttcaatgtccacgcacatgtgctaaaaatcacggaaattgcagtccatttctctgaacttttgaagtgatgatattataatttcacaactgaagctggcaggaacttaaccctacctgcagtgtgttggcagtgtgcatgcaagatcaaactatc

SEQ ID NO: 32367 - DNA, 705 bp, Oryza sativa
cccggaatgcttagaaggccaaaacaacacgcttgaacatatatcaatgatatactaaaagtgcactaagcaccatctaaagtcaattagatggtaacatagtttaaagcaaatacacggaagatcatttagcttgcttggattattttagcacatattttaaaaaaatcatgaagtaatcggattttctctaactaaagccattggattttctatgcattggtggtttggacttcatattttagttgtatttgcttagacagtgtatatctaatttagctatatgcatgtttgacaaacaacatatgatgatgcaacctgtattggattatttcgtaattcttttacagcaattcaaatggcacgtaaaagggcagggtgttctttcttaataaaaaaaatgtttcatagttcactttgtaatttttgtttggataactattgatttaatttagctatacatgtttgcagaatgatgtatagtgatgtaatatgtgcagccaacttgtttaaggtatttgaatcatatttggatggtatgcaaatcacatgggctgaatgtgtgttgatgtgaaaaaacacacactggcctaggagatctgcttaactccagtgcaggtcctaaatcttacttttgggttcgtcgtcaacaatgtggtcgaatgccatattttggatattaggaaaatataaggatacggatct

SEQ ID NO: 32368 - DNA, 645 bp, Oryza sativa
aagtatttctggcgaagtttatccttaccttagccttctcgagccaagtgccataaagatggttgctgtagaggcaactccaacccactttaaccgcgcacatgaaaaataaaggggtaaaacaaggaaattctaggtcagatatatatgtcctgtggactgtggcacagttgcaacagagcaattgcataggcaaatgagggcagatcatcatgtacccatagcctgttggtgctatgttagcatccaagcattgccattttaactattaagattcttcttcttatatttgacaagtgaaataaatttagtgactgaacatatatagaacgatgaacagtctttgtatgtttattcatgccatgggggaaagagaagtgtgatctgaagttattggatagatagctgttagttgtagcatgcaaggcaatgcatcctggaaccaacagaccaacagagctggggatatttcatctgctaaatttctgggaaaatttattgtgtggtaatcaatatgtgttcactctttgcaactggtacacgctctctgatgttcttgatatcttcacagtgatgcagatcttgttgacacagataacttaacaaacatagtcattttttttaagaatgaagcatgacatttat

SEQ ID NO: 32369 - DNA, 713 bp, Oryza sativa
atgccattgtaaagtcgcagaaatgccatcgacaagtgtgagttccaagaaatgtcattgtgcaaacgattttgtcccaaaaatgccatcgccgttagggttccgaccattttgtgccgttaaaacactgttcatcctatagaacataacggcgcggaattgacggaaccctaacggcgcggaatggacggaaccctaacggcgatggtatttttaggacaaagtcatttgtatgatggcattttttagaactcacacttgtcgatggtatttctgggatttggacgcttgtcaatggtatttcttggattatctgtttctaaaagcatggatcaaatttacctaaaaaatttaggcgatggcaggtcttttgctgtcaacataaaccacatgtcaccaaagtaaaccatattctgttccctaaaaaaaaagtaaaccatattctctatcttctaccgcggcgacaggtcttctttatggtcaccatattctttggctggatttgcataaaccaatgacgggtgatggttggagtgatttgcggaaaccataatgacacaatgatgttaaaatgacatcgatgcccttctttcgagtttatgcgcattgcattaagccttgatacggtgggagggggtacaacttcgcaggcgtcgaatgtgaacacgtgggaacatctgcatttggccacatctaggaatgaacaaaattgg

SEQ ID NO: 32370 - DNA, 729 bp, Oryza sativa
acataactcatctcttctgtagtgtgtcaatcataatgcattgtgtgttctgtgagtcatggccaaacttttgatctaaatctaatctactttactcggatgtgtatccatgacatgactggatttcttgtagcagcgcctgatattgcagctatgtggtgtattcttcttggttgtgtatatccacctgttgatataaaggtcagatttttatccattatctaaaaaaatgtggtgtatttgacttgtcctccacttgctcttcatctgcttgtgtgtatgctctatccagctattgcaatttcagaatctgtcacgcgatgaacgcggcctgtttggaacatcaagctcgatttgcgtgcgaatctatctgtgatttttacgttttagtacatactaatactgagtcgctgggtgatcaatctaacatattaaaggggcagtaacacctgctagtcagaaaataatactctatccgttttatattatataaattgttttgactttttccttagtcaacttttttaagtttaaccaagtttatattaagcatctagaacatcaatttagttttattgaaatgagcatttgatatgttttaataatatgatgttttatgtcagcaatgttgatatatttttctccaatcttgatcagactcaaaaaaattgagtaggacaaaagtcataaccattaatagtataaaatggaggtagtatttacagtatg

SEQ ID NO: 32371 - DNA, 655 bp, Oryza sativa
tttgggtgaggagtaaggggaatggccatctaccagcgaattaattatttgggttgggctagcatttgtatttaggtcagaagtaataacattcactgctccttagtttgttggcacggcacaggggacaatatgcctataaatcttaattcactactttcttgagcgaaacgccttgtacaaagtactaataggcaaagagcttaaagacaatctacatcagctgctcctcaacgagaaaatgagacattaacagaaacatttttttatttaggccatccatgataatttcttagctttctttacagagatttggtaaaaccttgtggaattctgaagtgagactgatgaaacttctgctaacttgtcaactaagtcctatgctaatgggtggactaaacgaagcaattaaccaattaacttatcaattatcaagggcgcattgatctaacattcaaacagttagacctgatcagatatgagctgctctgtacaattaaataaaacgttaggtcagtgtagagattcacgagtcacatcatgacatgagttcccaaattgtctaccaccaagttgggtaggaaaatgatggctttgcttaaaggagctctagaaaacccaaagaaaagattgtctaatttcataaaccacacac

SEQ ID NO: 32372 - DNA, 516 bp, Oryza sativa
actgaattatcaaaaagtgcacgagatgagcatgccataaacccaaaagactcagcatcttagcatcccttattataaattgcttcactggccagcggcaaaaagatcgacttctcctgcaatctggaaaaatgaagctaaacagttttaaatcctgctgagtaattgaaccccctctatgactctctgaactctgagctgctcagctacagctccctagctgatctgtatgaaaaagacagcttcgctgtgcttggattaatttggaggcgactaactcgagcacaggtcaagtgattggcaatttgatcacaatgcgggaaggaagtataactatattgctgtagcacacgctcaactaccaagcttctacactcgcaatcaagctctgaacgaacgattgctctgcattgcttgagcttcgcgggcatgaacgtgactatcgtcttcttgctcgcctcagcaggcggccatggggaggaatttatgcgtgaacctatatcctgtcgccgccgc

SEQ ID NO: 32373 - DNA, 686 bp, Oryza sativa
attttctaataagccaaataagccattttgggccaaatgggcaaccgatgagagccttcttatctcgatttagaggatgaattgatcccattatccaaaaaaaaaaagcttcacaagtatatatctccctccgtctcgtatcctaaaataactatgttttgggatggaggaagtatatccgtacacaaggcttaagcttcatgttcagtaaactgatcagtgcaagaaaacttcagaaagtgtgacatacattagtgccactggtgtgcacaaggaagaagaaatgatttgctactgttggagaagacctaagatctcaccatgatggcctgagctacttgtagaagtagaagtatactaaagcctttatgacctttgcattggccatctagtcggtctagtaataaaggtttggccatggtcggtgggcaaaggcaagtgcttgcacatcctgcatcattgttagatttactcctgttgtcagatggacatgcatcccctctcactccccatgatcatcatcacatcagatgatcagatcggattcagagctagcccaatcttcagggagacctgatatggccaagctagtcaaacagccaaagcatagtactccctccatccacaaatataaggatttcgttcacaagaacaatatttttttggtcatgcacgtcgattgccct

SEQ ID NO: 32374 - DNA, 692 bp, Oryza sativa
aatttttctaaaatcaaggtctacatgttaaaaatatccacatgtactgtttatgcttgtttttgtactgttttgttgatttttgtttaattgctttagtttccgacgttccggaggagagcgtttccgttgaggaaggctccgaagcgtttgcggaagcccaaggcaagtcacacagatcccaaacaactctttgagcatgttgaacccgtttaaagctattattttatttcaactatgcattgttttcgaatgtcatcgggtggtgaaccttcccaattaattaacggccgaagatgatcttattttcctatgggttataatttgattagcatgaaccttatatgttggattggttcagctaaatgctatatgtaagtttgcttagccgtgcttagaaacaatagctaactaaagggattaattataaactatgttacattattattttaattatggttacattaatggtagctcacgatggttgatcgtgtgaggttaattaattgataattaaaacctggttaaggtgggttgtgagcatatggtattgatggttgtgctcatgacaattaaggaccggttcgcgagctactgttgtgaaacttttaccgtgccaaccacaagccagcgtgggcaacggctttaccttttgtatagcatgattcattatggggtgccagactgagaag

SEQ ID NO: 32375 - DNA, 1386 bp, Oryza sativa
ccgagaaaaatccccaccaccacaccacccaatctgcccccctccctctctctctctcctcctatcgatgagcgaggaggaaggaaggaaggatttatacctgtacagatagatggctctatctactgctgcccgcttctaatgcttctgcccctgctgctggctgcccctctctcctcctcacaccctctctctctctctcctctcttgtagtgcgctctgctctcctctcccctctcgtgtacttggggaattgggattctctcctctcttgcctttctttttttttctctctctctgtcttgccctttttattcctccattttttttcttctccttctctctgctgctgctgctctccgtctgttttggctcgttgaaattagaaaccgggcagggcctcagaaatagaaaaggcaagcggccaccggccagggccagctcacctgaagcttaggtggattctgtgcagcctccgctggctgtacagacacggcgtatgcgtctccatccatcgcctcccctcctttcttttcatctgcctgccttgctgattggcatggcagccccaatttcttgtattatgaaaaatgtttccttttttcttttcttgtctgtgtataagttcatttacacaaaatttatggaaagtgtacttataccggtgtgtaagtttgaccaaataaatgtagtgtttgtgtgaaaaaatggtttggaaaagatagtcgtcaattatgggttgcatggtttttttttctataaagttagtcgctttttaatggcttatagtagttttaaaggtgtatagatcctgtgaacctatctgtcccttaattctcatgactcaacctagtttaccctttctttttttgtctatacgctattttacattgcacctatatccggtagcatgtgtcagcagaatgtgccttcttcatcttgtctaagcctctagttgtttttgtcgtaccctcatgtatttttacttaccaataatcaatccatcgtgctattgctccgtgcagagagtatggtgtcatcgttgccgatcaaatgagaaaacaacaatgtaacaatatgcattgatacgaatttgtagataacaagccaaaatatcaatggctggagcgagtgtgtttgttcggaccacacctaaatctaactcctagtattggatgtagaatagatgcacacacacgtgtatggtgcagcatgatttagttacgtgttatcacccgtacgtatgtgaaagagtatacatttctatatcaatcaaaagctaggaaattgatgttcttttaagaaatcttaagataaccgccggatggaaattccatggaaaagactaaagaggagcacattttctatagatttttcttaatttgt

SEQ ID NO: 32376 - DNA, 3143 bp, Oryza sativa
  unsure (1)..(3143): unsure at all n locations
tggtttaggaatgccttgctagcttatgcttgcgcggacggctgtcagtgcagatgttttgcaggttgcaattgcgtacttgtgttaggcttagatgattgcgctccttgttcggatgggtggagactggagaggcgaaggattttctggggatgatgcgaaggattttctgtttgtgaaatgctggtctaaatcaatgcgtatggctatccaagtgttaatatgcaaaaaaaaaaaagtaatcaggaaaaaataatatgccattgtggttttgttttttagaatacacaaggagtgcatatttgtattaagaggaataaaagttatttacaggagaaagaaaaacaagaaggggacgggatacagatggaaggaccgaaaaaaacactaaactaaacctattctcacaggattattgagcgacctagaggaagtaaggggttggacattcaacgccataatggggcttcggtggccattgccttcacaagctccggccacgatctttaactctgggaatgatgcatagtttgatcttaaactatataaaggctgtaatgcatagtttgatcttaactttccatcgttttcgttaatgaaagcgggagagatgcggcctctctttatcaaaaaataaataaataaataaaggttgtaatgcatattactgcatacatgatccattatgtaaagttcatggttgtttaagaaacctatttataagttataccatcaggtgtactgcgctnttagatgtaatgataagggtggggagtgaaggatacaggaaagcttcagactaacttcctttttcattagtaagagtgttgtgcctccagttagttgttccacgcacgtatctgatatcccacgtatttatttgatcattgaactccctgtcctcctcatactgcaacaaggattatcatttaactggaaatatagcatttgtactgttaagctataacggggactggtatacttttctatacaaatggaacttagatattctctcaagtcctatctagtaactagatccgtatatttaaaatctagaattatttttggctcttctaaatgatgaaaaagttaagcttcgaggcccatttgaaccttttgatttatgcaaaggcagttgctatctgtcttaatattggaaggatttccttgtggtgctttagatgctgcactatcaatttagttctatgctgattaataagctttaggtagacctaatttgagaaatatctattaatcttcaatctgcaatggtcttattgcattcgaaacttgttagttttgtttttgagggggaagggtaggagctctaccaatttcattaaggaggatagaaaagatacatgatcacctctcaaagggtccatcgaaacttgttagcgacctggaaatgaataaatactcctttgtcatcgttcagcaatgctgttgaacataaaagtcttgatacaggaaacatctttcccataaacaatgtaaagcttcattcactaattacccaatcattgggtatgaagcttctctgatttatgtttcgattttgtcacgggattttaccaggttctgtgtaaagttgattttgtttgcatgtcagcatccttcagtccaccatctactcataggttgcaactgttttccctgattgtttttcccgttttactgatgacaaatgtcttgcctacagagtccctttataaagtactacacttatgagtaccctgttggtagcatcttttctcttaccactgtctaattgtctataataaaaaacttcaatttttttgcacgttagtttcattgcacttttattagaggatacatgagatggtagaagcattttcttgttaaaattcttgccaattgccattattttgagtttccattacatggttacaattctcaatcagtaatcgcgcatcgggctgaaattttatgagacatcacatattgtgctacttttagtctatttacctagtaagaatcaacttaacaagatgaggctataagggtacctagctttgattgtttatgtgttcccttccctagcacgaaattctttgcaaaaccttaaattgctatgacagctttgttaaaattttaatgtagcaacgaagtgttgggtcttttgtgtctcgtcatatatttgttgaaaatctgagtttgtgctcatgttgttggagaaactatgttgtgttttataccctaaaagtccaaaaacccagggtagtttagtgcgagaagtatgttacagaagtcaattgtagtttatgtggtcaggtaacttgttgctattattaccatgaaaatagttattaacttcatttgacaatgctgattaaccattgcctgccgcttcctagatgaaacaatttgattggatgaaacatataaacaacaacatttagacgtgatatgcactcagcatgcatgaaatgttgtctgaagcttttggtgtcgacaagacgacaagtatacctccatgctttcccttaatctccactccctttccttgaattcccttcctgaagctatctcaacacattcaactcctattcagctttgctggaaacctatgtatttgctttcttgtctcacaaacactaaggcatgattatttactgcagagtgaagaaatttacaagcagtcaccttgctgccttgtaacactcgttactcttttttttctcatcattgacgcttggtcctgaatggcttcctccataagatggttactaatagctttggtctcaaataatttattttaacaactgtttaccaaccgtccaccctagtataatctagctttcaatgatgagcatgttggggttctgcagcaagatctggattcttttctttgttaattgaaataggtttattgtattccttgggctattggcaccaagaacgttgtcagaactttaattttaatattcatcagcaagtagccttggatttcccaaaagtggctgtatatttctcaaatgtgttgaactgaagacagctgaccttcagtatctccagatcagatgattcctcttgtgtcagagtaatacctgtcaattcctctgattaagatctcccgtagttatatggagagtggaagcttctttcactacagtatcgac

SEQ ID NO: 32377 - DNA, 900 bp, Oryza sativa
cgtgccgccgcagaaggacgatctccatcgatctgttcgatcgtgggatggataactaaaggtcaaggagtcttgtgcaaatgtacatgcaagcggtgggcgtatttttgcaaaattgctccacctgctttataccctttggattgagatcggagggatgccgttgcacgagtgcatgtgtgcacctaatgagctgtgtgcacctgatacattgcccagtaagaaaagcttacgggaaactattctaatcccttatgggatgttcctttatttgctcaaaaaccatctaaacggttatgaaaaattctgaaaaaatttgacaacattcatacaacacatatatacaactccacaaaatgttaagtccaaactcaactcacacgtcgagatataaaaaagacaaattcagcgtatgaatagtagcatactgtttatatctaaatttgtcttttttgtttctcgatgtgtagatcgaatttgaacatgaattttggtggactagtaggtatcattatactctacattatcaattttttttagaatttttcataactatttgcatcaaatttggaagaaaaagatatatgaggggatatcccctcgagggattagaatccactcccaaagcttacagttgtagtactctgtttaacattggagttctggcttcgaggtgtgtacttggccaatagaaattttcgataccaaagactagcctgaatttttagttcttaaaatttatcctaaaatattatcttttcaattaatcgtaaccttctgctacttaatttttaattttgatactgtttttatctttcgaacaaaatcacttgtttcattttactacttccttaatatctgtatcgatgggagtagtagaatacccgtatggaagggagt

SEQ ID NO: 32378 - DNA, 1579 bp, Oryza sativa
cgtgggttttggaagtttttgatggtttgcgatggagtgatgagtgtatgctctgagtcactgacacgtgggggcaggagggaatcatgctgaatcggcctctgacaaaaaaaaataattggaggtgaatcgtgctgaattcccgagagaatctgtactgtttggtactgtagtatctttgatactttacgcacttggatactttacgccttcagatggcgtttgcggaaaacattctttcccgcctccgtggtctgcctctcccccgttgcggcggtggaacttattttttgcttctttgctgctgctgctgctgctgaaatgaatgaatctctgaagtctgaatttgtctgcccgtgccaaacacatgccgagatctgaattgacagtttttgttgagcgtgtacaaatgccatactgccaaagcgaactactcatatcagagcaagtctaatagtacagcccactactagctttaaatcaatctaatagccaattcatacgatagtaacttacgatactattaatgtatggtcccacatgtcatacacacagtgtgtcttgtaatccgtgcaacagctagctatagatctgtagcccgctactcttctctctcatggtttatcccattaaaatatatttatagctggtacatgctattagatatgttcaggcaaatccaatcttgttttcagagctctgtacatgacgcgatctctgatggatatgcaaatattgtacactactatcgaactgccttaagactttcagtctctcgtttgagagattgtattcacagagtttgtaacacaacaaaaacattagtactgacatttacagcacagcacaatatagtactcctacatgctgttggtttcgtaattaaccgagtgattcgatgcttaaacgcgtgcgaaaactgtcactgccgctgtgtcctagtcctactcctactgccaagcttaccacttgccaactaggcggtggcgtgaaagctaatgatgacttgctagttgatgcttgtacgtactagtatctgcccatttcgtcgtcttccttaggcggtgcagccaccgaggaggattccagctagctctgatgctactgacctcatcaagtcatcagtgattcagtgtcatgtgatgatattcgttttgagtgcaaggaaatttactgccgagcttttagatcctcttgctgtttgatcgagaggagatgatgtggctggttttgtcggatcgagtttgatccggtttggccacatccgaggcaacctttgatctgttggatcagattgaagattgattctgattgccaagctgctgcttcatcatgtgagatattggtcaaactatgccatgtgtaaacaacagaagtattttgcgtttaaggccatgttcagaggattcggtgtaccagctgtttcagaggactgcacttcgtcagatgatttcttctctagattatgttagtttaggatcaaggccttgtttagttctaagttttttttttcaaacttttaactttttcatcacatcaaaactttcctacacacataaactttcaacttttacatcac

SEQ ID NO: 32379 - DNA, 751 bp, Oryza sativa
cctgcagcccctactacagtagtactgctagtcaaaggtgacaagatcactgctcatttagatctcatctacactgcagagttgggacttgggaggaaaggaggaatgcttggacgatgcatggcaattgtcagctgcctcctctgtgggggctggctatggttggcctgcaaatcgaccaatctttgatgtagcgtgatcttgcggggatcaaacgaaacgaccaatttgatggcggtgtgcagcgtggtggtccttggtttccccggtgctggatctttcgtttctagcttctacttgatctttacaactagctacgaagatgacatctgtggagccctctcctactcggaggtagaagaagattcgtgtcaatttcctgtattttcgggctttaacgccaccctctcagatctgaattctgacgattcgtgtcaaatggaagtcctttatgtgagaagaagatttgttcaggacatgcctttgattctgtttgaaaaaaaaataagtttcagttttccacgtgagttgaaaaaatgttgacgttctttcaaacgaggacagagaatccaacttttcgacgagtttgttccggaaatcggaaccgattagcggtttctgctcccaatttgtttcgacgagtttaactgaactgaacccaatttatccgtggaagcagctactacccccgtcccaaaacaagtgcagccatagttttcagcgcccaactttgaccattcattttatttga

SEQ ID NO: 32380 - DNA, 605 bp, Oryza sativa
tttttcaaagctttgcattccatagttcaagtgcaagttttcctatgttcagaaaaggtgtaaaggttccctggatgattttatgcagaaaatggtaataaaactcaaataatgacaactgtaatttaatgaaattcattataatggattttgacagataataagacatcagccccatgtggtgttgtagtcctatgtaacatgaaatgactgctatgctgtctccagaggtgacagactgacaagtttgaatctaagagattgcataattgacatgttaccaaattaagctgaaaatctaccgcaaggaattcaggtaagaatatttcggagaatcaagtaaacatgaaaaatatgatgaaatgcctacagtgccaaagaaaacccctttttccaaaccataatatgttgacataaccaagacgctaagtagtactaagtactgtcgacccaaggaattggcaattgtggagagaactgtcacatagactgctactacatgctcaggccactgtcccaataactcaactgcaaataaatacccactgactcaaatttgccatatgaactttgaaaggatagggtaccgagctcgaattcggcct

SEQ ID NO: 32381 - DNA, 533 bp, Oryza sativa
gccgatcaacttggggtactcacacggttgacggcctgacgcggtgcgctggtgcggctttggctaagcggagagaagcttccgcatccgctatagctgtggccggccaaccaacgcgccgtccgggccgcgcgacgtgacgacggcggaaaaacagtagaaaacgggaggcggaatcaaaaaaaggtggggcgcgagtcgcgcgacacgggatcgcgatgccggggcggcatggctgcttgtcgctgtctgcgtggtagggatacacgcgggctggcctgtgagcacttatagatcgaggctctgtttatattctaacttttttttcttcaaacttttaacttttctatcacatcgaaattttttacacatataaattttcaaccttttcgttacatcgttccaatttttttaaacttttaattttgacgtggaactaattaaatacagcccgaataagtgatagtgaataagttttcgcatcatggttcgacttatcgtatctaaagatacaagtggattgatacataaac

SEQ ID NO: 32382 - DNA, 1049 bp, Oryza sativa
tataaatttaaaaattacgtttctgtgatattttaaagtaactttatataaaactagtatggtggcccgcgcagcttgcgcggctggcatcattatattttctctcgtataatagcacatatattttctcattatattattcaaatatattaaaatgacaacataattttaaattttgcaataactttacaaaactactaatgtgtaatattcatattgtattttatatacgtgttagttattaattatttttaatatcaaattttagttatttgtaaattatatatattcctatattgactctagacccgtcttttaatatttctttttttaaatccgaattttctgtaaattgtatttctatatagactctatgctcttcttccaatattatctatttttatttctgaatttttattatttctaattgtatttctatgtggactctaaactcatctttcaatattctttaatttttaattttgaatttcagttacttctaaattgtattcctatattgactttaaactcttcttcctatgtttttcttaatttcaaattttagttatttgtaaattatatttttatacggactctaaactctacttttaattttattatgtttattccaaattttagttagttttaaattcctatatggattctatactctatttctaatattccttattttttaattccgaatttctatttttttcttaattgtatttctatatggactctacactcttgcttctaatattccttatttttaattccgaatttctttttttttcctaattgtatttctatatggactctacactctgcttctaatattccttatttttaattcccaatttcagttatttcctaattgtatttctatatggactctagtcacctcttctaatattccttattttttaattccgaatttcaactatttctaaattgtatttctatatgggctctgctttttctttttctccgattaatgtgagaatttctaggccatgagagcgaacgtggaggctcctttttctatt

SEQ ID NO: 32383 - DNA, 596 bp, Oryza sativa
ttattttttcatgatttatcatccgtagcacgaacgatgtcacctctgaaatgatatgatatttttaccgccacaagcatatatgtacatttttttccccaatcgctatagttggtaggccaaccgtttcatatgaaattccccgtgatccaattccaaaatgtactggcgaatcaattcagttggaacatcaatggtctctgatccccctaaactcctcatatgccgtaaatttttgtagtacgaaatgatccacggtgacaaatttgagagacagatctgatccacaacgaaatcgaaaacgtaccctcgaggtacgaataaactcccggttttactggcactgttttgtgccttagctgccatctcgccaatcactttcagacaggcaaactagccaagcccggttcagtcaactgtagctgccagtgaggtgataaggccgatgcagatggcgacgtagatgtactgatgtccagtacgtacgacacactgagccaatagcaggtagaagaggaaaatatatacccatatataacttcactacaatagaaaatatataatgcaaagtttatatacagtgtaaaccctaaaaa

SEQ ID NO: 32384 - DNA, 653 bp, Oryza sativa
agatatcgtttgaatggtagatctgagattttgtaaaaattaatatggtatattataataaatatttagacccttaaatgacctcaaataataaaatagtcaataataaagttgtagatctcatcgagctctacaatgttgaatataaaatttgtcttcatctgattccgtatgaaaaagttatgtatatatacgtgttttttctaaaatttgctcaatgtctgtggatatccgaaaaaaattccggataatttttgaccgtttttcgattccgatggataatacccttactatattcgttttcgtttccgagaaaaaaatatccaaattcgtttcagaatccaagaatttccggataattccgaccgaaactatctaaatccaaaaaatggtccggacggacgaaaactatccgaaccagtttcatccctagtagagataaatatagcatctttgatttctttaatgaaaacatccaagttatgattgaggataaggaaggtcaccaaatcgacagcagcaagccccggtgccacgtcctctcgttctttagatgatttctcctcgtaaaaatagtttatggcgatggcgatcggcagccatgctcctttgcctaaaaaaccaagagctcctttggtggcgcgccgcctcgt

SEQ ID NO: 32385 - DNA, 576 bp, Oryza sativa
ttatgtagaaccatgatacttaacaatacatgttctacccaaccttttggattactttattttccaagaattatagcttggtgtcttggtattggtatttccagtattctctagaatctgtcctttaatgcccttctgcacaacatatgattcatgtgagaaaattctaaggtggtttgcacatccacttatcagctattgtctcataaaaaatgtcttgatctggatatcagctacagatagccttaccttagtaaatagagtgtataactgtaatcaccatttcattaggttaatttttgtaaggaagattttcattagatcaaccctattaggaaactggatgtctgggccagtacccagaataagcagagtgaaactagtatgatcagaagtttaaattctatgaatgtacctatattagtatgtgtaatttctatggtactgagtcttcaaaaatcaaattcagtcttcatccctactattataaagagggaatcgtctctcacctcacataaaagcctctttccttcataaaaactgtccaccctaaaaaaaactgtttactaataaagc

SEQ ID NO: 32386 - DNA, 647 bp, Oryza sativa
tcatgctttgaataaacaaaagatagtttatgtgatcttgaatcaacttacttaaattttctgaggcttggctgacttgataataaaaaaaattcattgatcacgtaatggcatcatttgctctgcacgatggattaacataaataaatacacaatatgtatggttgagctatgaaaaggttatcctactggtactggacggtgatgccacattgtgagtcactctaagagttcgtgtgttgtgtcttgtaattcaatagttattgcggaatttcttgaagatgacagcgcaagatggtttttagtcaacttttaggtttgacaaaaaaatattttcccagtgaaatgccaagtattctctctttatcatccagtatttcctttttcagatgaaggaagctttattaaaattaagataattacatcaaggagctacttccggcttctgtataatattattcttttgcagacttttgttagtaagtctactcatttttttgaccactactcgtaatcgaaacaatcaaatttcacccaatagaaccgttatacccttcaaggcagaggtggaataacctcgcccttgctcgctctacctcggtttaaaattcctccaagtctacacatctatctattatatactaaaa

SEQ ID NO: 32387 - DNA, 2917 bp, Oryza sativa
actccctccatttcacaatgtaagttattctagcatttctcacattcagattgatgttaatgaatctagatagatatatatatgtttagattcattaacatcaatataaatataagaaatgttagaatgacttacattgtgaaacggaggaagtatatatgtatatttagctacagctagcttctctctaaaaagaatagtactccctccgtttcacaatgtaaatcattctagtatttgtacattcatattgatattaatgaatctagataatattaatgaatctatctagattcattaatatcaatatgaatgtgaaaaatactaaaatgacttacattatcgaacggaggaagtagctagtaagtatatatgtaggtaaccgaatatatagatatataatgatgatttgaatagctgaagagtactgcgattaagctgttgcctgaaaattacattcgtgaattctactgaaatttgattagctgcagagagtacgtactgtaatcgtcgcgtcaagctgttgtgtgaaaattacactagtgaattttatctgtgacgtacaattatcttctagctagaggggcggccgggaatctctaggtgaaggattcgatgctttcagcaatcaaatcaaagccgacactccagtagaatattgctgtcaggttgtgcgcgcattttatatattgaaagttactggaaattcaacgaattactttcacccctctcaaaatgtaaacctttcgaaaaaactactccttccaactacttttaatagccattctacttaattaattctacttatcatctatttaaatatgctacgagtcattactcgtaaataagcgattcattaatatttacatttctcaatgcccatgtagtcaatcttgcgtgaaggaatagagagtcatgcattaatccgagaaagtcattaagatgatatgttgttggattgaaatatgcctatcaaaataaatttttcagatttgaaaatatgactataaaaaatagatggagggagtaagaaataatcattttttgagttacttcaatgtggtcaaatgttgatcgagttgcttttccaggaaaaatagttgaattgctctgattttctttccaagcatttcattggttgaagatttatatagcttttcatgtattggaattagtatacaaaatacttatattgtgataaaaaattaaataataaaaatacttatagaacagtgggttaatttactacttaacacacacaacatttacgtatatatacggttccggaaaaatctcatcatttaaaaaacaaggataaattaattggcagatatatatagagagatagcttaattaagtaaaaatcagtgatgcctactgggaattaaggattatatttgttgtggcctaactcaatcaaggcaacaaattagcaagtcaaaaatagtgtcgtctgtggtttttagccgaaaagttgacatcgccaaattgttttggtttatttgaatacctatgcaactttgatagcaagccaaataaaaacgtagcgaataactttatcaaaatttttggcaatcaaataatcaccaattagtttttgccattgccaaaaatttgcaaaggttacaaatattgcaaagaaccaaataagccctaattaaagttaacatcaacatccatccgactcttgtaagatttacatgcaatcgccggaaggaggaggaggagggggaggtgatttaaagatattttgcggtatgtgatggtgatctttttactactactactatgcaagtacatgtcctgatgtccatacactaattaattaatcacctagagaggcaatgcacatggcgatgatcccgcggcgtgagcggtggttaattaaatttgatttgctgttcatttgatggactagaatttaaattagttagtagtattactactacaaatcgatagagacttgtttaattatgtgtgtaatgtagtagattcggggcctcatcggtcgcccatatattctgtaataagctaaaacattttattataagataaaaattaatttatatgtaaacttttatatatttgtttgtagtgattaaatgctaatattaaataaaaattatattgaaaacatcttaaaataacattaaaatcaattttaaaaattttaaattttagcttattaggtgagagacgatgcgtgggcgagggtgatgatatatggatttgattggtgaagcgaattgtgatggaaagggatgtacagcgcgatggggcccaagcacgaatcttctggcagcctaacttgcctatcacgaaacctttctttttcatttatccttctatacttttttttcctttcccgaattttgcgctacacttttggctctattcggctgcttagtgcagccgatccacaatgcagctacagacacaacatattgtacagcatcacgataacaagtgaggaatagggcctttaactcgatgccatataggagtatacaactgctttaaccatggtccatggttagtgatagtatattatgagtataaaaataattcattttcaagaaaaaaaatgatgaaagagaagaggatgaatgaagctgtttattaatcccatgtccctacaaaacaatatatgagatgtgacgcatctaatattacgaatctagacataagtctatttaaatttataatattatgatgtgccatcttccgtactagttttttatttttatgggacgaagggagtacttcttttctaagaacttataaatacatatatctagtgataagctagaatagttagaataattcaaatagagatgatgtacaacactcgtgatgaatgttagtgaaaataagggaaaatattatattaagagatgtattgatcggggtactatct

SEQ ID NO: 32388 - DNA, 676 bp, Oryza sativa
ttaaaagatgggtttatgtacttcttaggttatgtcatctttttcattttttaatgtatgcatattgtatgtaccccctatttatttacaattcctaattagtctatatagagtaaattattatatatatcacacattttaatgtcaattttggtgtaacactatattatcttcgatgcctcttaattggttaattacacttcccgtcaggcagtagaaatctctaactttccttctgttcatgtttttgctacaagatttctgtgttccaaataagaccttaactaatatttacatcgcaagtactagcgacatgtgtcgacaaaataatgatatgctttacatctcgaatggatgtcggttaggatacgcatcaagtctcaaaatcttgtatatatgaaaacactaaaattttatatgtgaaatttgattaaaactgtcttcgtttagttaattatatttttaacatatttatgaatatatcattacaaaaacaaaaatcgaacataggcattgaagagactatgtcagtgtcagtgtcagtgtaaattcgggagtatgtcatgcatactaaagtttgacactcttaaatttaaaactagaggttaaattaacgtgatctggaattgacgatagatcaaactaaatgatatgcagcgaattgttgcaggatata

SEQ ID NO: 32389 - DNA, 504 bp, Oryza sativa
cagcatcggaaagagggtattagctaagtataattattactaggatgtatgtataatatgtgtactagaagtataggaatagatctttctatattctttctacttagataattatgagtaagagtataaatgcttctgcttagtgtcactctaccccatgaattatattaatccctcttagactatgggtattacaagtaatatataaattattagtacggttctctctattataatcttcccacgggattaaacaaatatgatacccttggaatactctcgggtgaaatgttacaatggtatatccatgtgcttgcggatgaacactataaccataatataccagaagtatttctgcaccattgctggaaattatatttctagtaaatgtcgttaagaaatatcaacaatatcatatatgaaatattaagttatgactgctgaaacatcataaaaatacttaccaaaacattctaacaataccatatgcaatatttgtaaatg

SEQ ID NO: 32390 - DNA, 661 bp, Oryza sativa
ggtgtccggtatctggttttgcggttgggggacgatttcgtaactcgatgacaagttgagggacctttggtgtaccttttccaaactaaaataacctcctctccatgtggatgggtcggattaggcccactaaaggaattaaaatcgacgatgcacgatggatgatggatatttcattagggcgaagctatagcaatttattggggttaggagaccccgatgatttcttatgagtccccttatactccttcctattttatagctatgaccccggtcaaataaaacactagaccccggtgattgtttcgttaaagctcatttggtggcaaggaacgatactattatcaactagcaaatagaaaattagttagcaattgtgattatacgtcagtctagatagatatacatatatgttttagactggcgctcataaagtggcccttatttaggataaccaactaatcctattattatttcctaattatcatcacaatttggttgaacctggtctctcaagtttgaatttgacgaaattagagttctgaaatatgaacgtttgatttttcaagttcaattacatgatcatgaagcatgagcctgggaaatataacaaaggtaattttcaccatataagaggttgttatattcttttccccaatat

SEQ ID NO: 32391 - DNA, 690 bp, Oryza sativa
  unsure (1)..(690): unsure at all n locations
taatttagagattttataagatgggtgattttgtgaagtgagctgttttggttgaccctggcggtcagaccggctgagtgtcgcctgttagaccgcgggtgttgcggcggtcagaccggcccgcccgacggtctgaccggcatgatcctgatcgatgtcggtttcgggttgtttgttggatttggcttctagatgggttctatgcgtatggatactattgttatactaatgtgagtcaagttgggacgaacttgggctcggaatatggtctcttggttggtgcatgtgtaggtgttgcttgaggcctcgggagagtgttgccggtgaaagatcggagtcaacttgggagaagttgatgtccaggatcaagagatcatgcgggatacttaaggctagaggacaatgcatgtggtgatgaagaaatccatatgatataccagaggaattgtgtacgtatggaaagaggagtncggatttgtagggagtccgaattcgggaagtttgatagagataaggaaagagataagttgtttacttgcaagagagggtttcctacatagttaggagtcctagctaagttgtgttagattcgctggctttgcgcagcctacctcatatataaatagagagagagggtgagggcctctcgttgtcagagaaaggaggggtgagggggaggagatggggaga

SEQ ID NO: 32392 - DNA, 605 bp, Oryza sativa
tcgtcaactaggtgttggtgttccatgccgccaagttgacgatgactagaaaggttatctcaaatattgtacttgtgtgattctgatgaataagagcaacaccggcttcggccaataggagtagggttattaccttctggtgaaggggtccgaacctgtataaaaatccttgtcttcgtctcttttatctcaatctcgcatataccctggtaccaatgatctccatactatgcaaacaccatagtcgtgatctaaaacatcgacaatggtgcgcctagtaggggattttgatgcttcaaggtttcgacgagatgggttcaagaagacggattgtccgacaacaaacaatttggctatagggggatccgacccaaccgaagtgcgttctccgatggatcgggatcctcgtcatcttaagcttcgtcgccgaggatttttttcgacgaggatacttaaacgactttggccctgggagatctgacccgaccagagtacgtcccttgactagatcaaatcatcgtcgctaacaatttgatctatcgagatcacccaagctttagggcccgtggcataccagaagatttcaaatatatatgatttcaaac

SEQ ID NO: 32393 - DNA, 1071 bp, Oryza sativa
gggggggggttgggctgggttgataaacacatttacggcccaccacggcccttttgaccctacaattattactcccaaatgattacacattgcagctcccaaatgattagataagaggtgtatacgcgctagtacaggatgcaagcggggatttcacatttgttactcaaaggatattattacatttcttcagttcaagcaggaaaacccaatgtgtaaaaaaaaacctgaaccattaggtttaaatccaagtgtctttcttttcaccaacactgaactcaatcctcaacatgcagtaaacaggcataggaggaccaagggattgatgatgcagctgaagttagcataaacaacgtaattacagttcagttcatcatgcatatgatgcatccatcattattgttatctccagatacagatcgatctctctatatatacacatcatgcacgtatggctgtacattttgcggatcgagcatgatcaggtatcagctagcgttattctcagatacttgagacacaattaaaagaactactactactactctccaatctgaatcttggttgtagctgcttgtttttgaaattcagatatattcgacccggcgaaaattcagacaagcttcagactttcagtattttcagttcaggttcatcacttgaaatgctgaaaataccagttcaacaaattacacgtgtatttctcagcaaaagaaagtcaaatatacaaagaccgagttataaacatcaacgccaacaggttatgacttgcagcatgcattgatctgataaaccactccgcaagcgatcaaatatatataactgaacctattattcataagaagatggttttccactttctaccatatagtgcagttgatagtgttaatttgtgctactcagaagtcataacacaacatacataacattacaaaggttcctctagattccggtttattccttaattttatacagaaactaacttaaaagtgcaacaaatagtaagtgcacactgatcatcatattactctcaaactaacttaagttcgtaccactgataatacaccaaac

SEQ ID NO: 32394 - DNA, 545 bp, Oryza sativa
ctgtcctttagacaaacttgctttactgtactcagggagcctgtttcagatttttcctgaccgcatttgcggtaatatatgtgcattgaaggcatatatatatatatgtactactataagtaagaaaatcaagctgtatcattcaaagaataattctaagtaagcatctttatacaatttcatgcaccaggtgccaaaaaactaatataaaaacatctatgtgaaataacttgaaacaaaacaccagtcgacagtggcacaacctgtcccatggcaaggatcagtgggcacattcaacacccgaattggtaactaaatagttacaagctactcattcaagaataactaaaaatagttacaatttaatggagttttcatcggcgagcccgggaggctgcccgggctagctgggcggtggctccgcccttgcttctaatcaatggattattgtgtgatgcttgtgcttccgtctagtaagctggtctgctggctcatatatcccatcatcacatcattattgtcgtaatttcacatggcttctaggg

SEQ ID NO: 32395 - DNA, 559 bp, Oryza sativa
attctctacattttatagatcgtgaccggtagatgaaaagtttcaaggaaccctataatacatataaatacattgctgaatatgatagtgcaaatcaacaccacgagtttctattttcttactgacataactactgcttagcatgttgttcttcaacttttcagggtgctgaaacattctcatcatttacccttttttttaggaaatattatataaataatctcagctggctgaccaaagcttgaaatttactttcgaattgctttcaactacaaaacataaaaacaaactgaaatcaccatgattgtgtggagcattataggacgagattgggtggaatgcagacagatttataaaactgaaacaataacatatcagaatatagtagaaaatttatgtcttcgtgatattgggtcaaagtaccagagaaagtgagtaacattaatttgttttcgcagagtgccaaaagagctaccaatttaattattgatggcctgagaaagtattaacttagtcttaaacatcatatattcgtagttgcacttatactgctccacgc

SEQ ID NO: 32396 - DNA, 624 bp, Oryza sativa
catcaccgccgtgttttgccggcgaaagggaaggaagagaagaaagagtatgcgacactaacgtgcgggccccatagggtgacttagcggattggaccaagccaaagcgccaagtcagcgaaactgtcctctaaaatcgtcgagagagttaaattacatcggttttcacagttggggggggggggtgtttcaatctccagcgccaaatttgctatgagatttcatcgttcaagataaatagatggatctgttcctttggacgacattggttttatgcctttatccacagtatatcagcaaagaagatcctttgattataaaaatccaaaaaaataaaggttttatgtatacctaagcatgatttcagccatgggaagcttgatcaaatctgcaaggaaatcatttctggtttacccatgggagctgaactaccgttggcccgttgcaatcatctgaaggataagctagatcatatgtcattcggaagcttccactgatcgaagaacgagatacatcactatgacggcaagggacaattatctcctacgaataagacctgcaaaccttttgcagacgattggtagtaccgatcatatgaccgatgcggaaatccttttataaaga

SEQ ID NO: 32397 - DNA, 684 bp, Oryza sativa
catacccccatcttaatttttaattcagtacatgttagtcggtcatatttttgcttttaaacccttggattattttaatttgcatatacgtccaatatttacagtataccctctaaaaatcacaaacatatataaacgtcaacccctcctctcatcaccatatctcccacccaatctctccctgcgtctcctttctctccgcttctcccctcgccggcaccgccggggagtctctccccagcgcgtcgcctctcccctccccggccctctctccccggcgctcccctctccggcggtgccacctgtctccccggcgctggatcgaggcggcggcggtagggcggatggaggctgcggtggcgccggatcgaggcgcggcagcgccggatagatgcggcggcagcggcggtgccccatcttcttctcccccgcctacttcctcgccatttttggccttggcgcgggaggtagttggctacaacgttccagggttacggtacggagcgacgcctctcccccaacacggctgctcgcccgttcctcgccaaaagctaatgaaactatgcgatgctatgcggggggtcagggagctctacgagagcgcggtcccggccgagctggcgcgaatattcgcgtcgggaggggtgagaccacgcgacgcgaatattcgcgggtgagaccacg

SEQ ID NO: 32398 - DNA, 1158 bp, Oryza sativa
ttgaaatttggtagcaaattaaagataaactaaatcaccagtacacgaatagctcacatagagcattcttggaggatggaacaaaaaaaaaacaaatatcttccaggtcactagacacgttaaatacaaggggatcaccacatgcttacaacacacgtactgtaatttaattagctggagtacataatactccctccgttcaggttataatatgttttgattttagtcaaagtcaaactgttttaagtttgaccaaatttgtagaaaaaagtagtgacattttaatctaagacaaatttattataaaaatatatattcaattattgatttgatgaaactattttagtattataaatattactatatttgtctatgaacttagtcaaacttgaaacagtttaactttgatcaaagttaaaacaacttatgacctaaaacggagggagtaatggttacaaacacaatgcaagtcgatcatcacaaaatatgtgtcaggggcaattgcgcaacggaccatattctaaggactaacgtccagttctatttcggctcgtcaggagatgcttgttcaaaacgttctccgttcacgttcatggtttaactgctatcagagttttcagacattctgctattagctctgaaccaccaacagaacatcaggcttttatatatatatataattagctctgaatgtagtgaagatgagcatgtgacataatcgaacatcagcatttttttatatatatataattagctctgaatgtagtgaagatgagcatgtgacatgatctctcctgtgtatccgtcactcttgcgtttactatatatggttatgtttgtcaacgccaggttgtggaggcacttgttcaagacagaaacttcaatcaggttttagattgccaactgagagaatcaaccacttcctttatgacattctgatgaccatcattcaggattcaggagggaattaaaaaaaagtgacaagcatttcagagaactcgcaacagcagctaagttacatgatataaaagggaggtcccaatcaacaacgatttaaatcatagacggtccaaggttaccacagcttgttagaggcatttgattacagaatcatttccagtccatttggaattgagtactattactcttctagtcgtc

SEQ ID NO: 32399 - DNA, 514 bp, Oryza sativa
ctgagcaaggcaagtcacatcacccttgagcatattgaatcccagtttataaaatttttttgatttaaattattgcattatcgctttatttaaattcccgcgttatcactgttttttttagccatgcctatttacctttgttaagacattattattgctattgttattattaccttgttcaccctaggataaacaaaaccccaactagtggacattatattcatggttccactagtatgaatttaggtagatgcttcgctgattaattaggcaacattaggtggttttataactttaaactttgggaattctcatgtcatttggacactttggaattgttggattatggtggaattggacatacacctctcttcctctttcaaaacccctaaagcctgttttcggtggggtttgggtgcatgccagttatgggaagtagcaccccggccactataaggattaagctcgggcctctgttgcaaagcactaccgtactaaccacatgtctaatggg

SEQ ID NO: 32400 - DNA, 1121 bp, Oryza sativa
acccttacgatatggtaaagaccaagtcttgtacgagtaggactcctcccatctgtggattctgttcctatcacgtgatagatttccttaacgtatacagtaactatccatatacacgcgggtataccgtatcagtatacaacgtacatccaagaatagagggtataccttatccgtgactctgacaatttccttcatgcatcgggcacccattgataagcattttttctttcttaaacaaatatctatgaatatgtgttgaaaaaatcatgtgacttataggaactgaagtgtgccgtatatgtgcctaataataagaccaaatatttttcgggttttttgcaccaacaaaaataaaaaacaggtacacccttacaagtgtcgattctatattagaaccggcaccgtgccgttttttgacaaattgatcctttataaaaacttattttgaaaatagcccctgccaaaaacttcaaccaaaactaagccgtcggctcaacgccatcaaggttggcgctgaggtataacgtctcagcgccgataatgttggcgccgagatttttgttgagctggcattgagccacgtggcacggcctagaattcacttcaaattcctgtgaaaccatagacaaaattcaaattcaaattcctctcaaatatcctcaaaattcaattctacaaaccttgagaaaataagaaagttcactgttcattttgggcctctcttcctttctctcccaggcccaactctcctcctccttttctcggaataactgcactttgactccctcaaaagtgacctgaatctaattcatgaccctaaaccgcaaaaccggatatctcgacccccgaactattaaaaccggtgtaatttgactcctttggtggttttggaggatggtttcgctgacgtggcgctgacgtggctgtgttgacctagtctatgggttaacgtggcgcttaggtggcatctaaattaaaaacatataggtgggacccgtttgtcattcacacatataaaaatttgtgggggccattggcatatgggccccatatgtcatcctctctctttctttttcctcccctcttcctccattctctctttctctctttttctcccc

SEQ ID NO: 32401 - DNA, 1885 bp, Oryza sativa
aagccccggacgccgctttcgaaagagaagactccaaccctgtgcaaggcaaacccctttgatcacattgcccctatatttttaatgatatgttgtttgcaaagatgcattgtttagttcacacgattaacatgtttaggcctcggattgtttatacaaccgacggaccaacttagtagttgcacttatatttcataggttgatgtttccatacctttgatagctccacaaatatttgcgccggtatcgttatacgattaccgaggtagtttcgcttagccatgcttacgttattgccgtgtgggaaacttgggttattccaaatacatgcttaaaaatctggtacagtgtaccggggagttgtgaaataaaatgtgttgtgaaagtggtgatgatgcggagtcacgcctttgtggtttggctacgtattattgttaaggaccgatttctttgggaaatccatccgaacacgttacagtgcgaccacacagatatttatgggatgcctctggttaagtaaattgttatcacatgggagttggtgtgccaatggttgtggaatgccgaggatgaggagacgaagtattacacatttattgcccatcatgggtgtctttttgcctctattgtggcgtgataccagtaagagtaggaggcatcctccgtatttcctgagtggatgacggctgtcattgcctaatactcggctatggatcttagcccaactaggtggcatgcgattttcatgtgttagctttggaaaggccttatcacgaacttccggtactggccagtaccagtgtaagtttcgtgtcgtgtgggtaaagcgtgcaacctctgtagagattaatgaactgttcgaacagtcgtgcccacggtcaagggcgagtgtaaggtgtttctcatagtgtagatttgtttgacaaaggtttgtgaaaaaagtggttactgaaaagggaacgttaccagagtccgcctgtgtagcagacggctaacctttgtggttaggaacgggtctgtgtgacctggggtgtcgtccgacaccgacgtgttgttagggccatgatggcgttgatgtgctaaggtaattgggtgaactatgtgttgttgtgatagtgaaaacgagttaatgagggaacaaattaattgttgttcgttaatcttgacaaggttgttgcaaagcaaactttgtggaatgggttgaaggccgtgagcctcctcccgacaactaaaacttgactcactcactaggagttttgtgaaataaatcactttgccaaaaaggcagctttcgcaaataaaacataagcctcgttgtgtaacctaaacatgtcattcttccccctggcttgctgagtacgttaagtactcacccttgccccttataataacctatagagtgtgaagacgaagatgtcgacccgaccgccgaggagtatctccaggagcaagccgagtatgaagacttctagatgtttcgtgcctagccccaagcctcgcttgtggaataagttagttgcctaggttctttgcctagtgcatagttgcttagtcgcttagttctccgcgctattcacttctgcgccgtcgcttttatggttttatgtaatgttgtgttgtttatctatgggcctgtccatgatggcaacttatgtaagtactactatccagtgatgtaataaagcagtttactttgattccacatttattctgtgtataccagctaatgtatcctgggactggtactatatcacaggtaatgcataacactccggtgtgagttagctgtgtctatggctaacgaatgacaagacgttactgctcctctctctcccctcagcgcccctctcgataaccgatgtgatggttcccaaccatcgtgtcc

SEQ ID NO: 32402 - DNA, 1628 bp, Oryza sativa
  unsure (1)..(1628): unsure at all n locations
aggatccccccgcgctgctcgccgccattgttggcctactctgagaagttcttcatgatgttttttccgtcaagagctacaagactagaagcggagccactgagacgtatgcccctgtatgcctaccgattttacgttcattatcgaagtaccaatcattctccggtgcgttggattctactccactatgtatagatggccaaaatgagtcgcccgacacggcctggccgggacacgactaaggcacggtccaagatcagtcggaccggctcggcctgagattaaccatgtcgcgccgtgcccatccacggggggcgcctacacctatatcccaggcatggcccaataagactcggatcatgccatgctggctcgaaggcacgactagcataccggattgatccttggaataagtttattttgcctacctaatttttttaaggccgtgccttatatggctagaataagtatattttaccccctcacatctttatatcatgcattatatggctggaataagtctatcttgtatccctcatctctttgggccagccgccaatgggctatggcgcaagctaccattgagcccgtgcggcctgcgggagcgaggtaccgttgagccgtgttgtgcccgggacggcacgacgttgtcgtgcaaaggaagaggcttatgcgtagcccaatagtcgggtcagactggcacggggccgacaactgtcaaaaaataccatacctgggctgggccaaatctttgtgccgtgtactgagctgtcgagctgctggccttttggcccactatactatcacccatctatggctgacgcnntantntgtactcctttcatactcgtaagannagtcgtttaggacagcgacacgatctccaaaacacaactttgacttcttgtttctataaaaatatttattgaaaagtgatatatgtatactgttatgaaagtatttttcaagacaaatctatacatataatttttatattttcaaactcaataatttgggagttattcatgatttatattcctaaggtttgacttaaacattgtcttaaacgacttcctttatgagtatggagtgagtacataagattggttgcgaagcaccccgcctactagcatagaagaggaccccgaaaagttggccctaattgaacaaggtaacaaaataaagattacatgcttttgtttggatcatgtttcagaactggttgcaaaaaaagattgttgtacttccaagcccccccatggctcctgcgtccaagcctagttctcctaatccctaaaaatcttgtacgtatcaggattcaggagatatcattttactagcaataggaggtggaacatagtttttctaatcttgattaatttctttggttttcagctttggatgtgagctgtggtatgctgaatttggtgggcagctgattgcgcagtcaactaatcaagtctacttttggccaatacttaagctggggtttcttgtaacccagttttgctgtaacttcggcgttcaaaaaaaaaagttttgctgtaacgttgctggtctgctgcacatgtattgcagtatgaactattgatattcatgttggacgtttgttgttgcttgtcagacag

SEQ ID NO: 32403 - DNA, 514 bp, Oryza sativa
caaaatatttgaacaaatatagtggtcaaatatgacaagtatactcaagaggctaagcattatgatttcctatgtatgcactgaatttcgtgcaccacatgttattctgcgatgctttgtggctcctagattgtgtttgattaagattgcttgataaaaaaaactataatggtaattaacatagaaacaaccatccaatcatgaaaaaggaaaataggtctgactggcaggtacattgtacataagctgattggctgaggttaattaacttatttcccaatgccttgtttagtgctttcttacctctgtttgtctgctgagccaaccttttggggcaaggttttagttggcatcatgccccaggaatagatagctgacaatttatttgcacagttagttgaatgtggaacacttcagtttcacttcttacctccatgttgacatgatatatatctttatcctgaagcattgactttggaagttaaagtgatacccaaatagtctgagaaaagat

SEQ ID NO: 32404 - DNA, 909 bp, Oryza sativa
ataatcgactaagctcggtaggacccactgtataacaagtcttatacggaatcatacctcgtatataaaagagttcaggatccatatttgttttccaagttctatttggacaaggacaagaggatatctatgggtataaatacaaaacctcctagggggagagaaaaagacaagccaacacaaattaacacgctcagtcagaataggcaccaatacatgccaccagacaccgacatcagagataagcctagacagatccaatctggtgccattagaggccaacaagagggatctagcgctatatctgatctcgccgagtacatatttgaggaagaagactaccccgtcgtcaactaggtgttggtgttccatgccgccaagttgacgatgactagaaaggttatctcaaatattgtacttgtgtgattctgatgaataagagcaacaccggcttcggccaataggagtagggttattaccttctggtgaaggggtccgaacctgtataaaaatccttgtcttcgtctcttttatctcaatctcgcatataccctggtaccaatgatctccatactatgcaaacaccatagtcgtgatctaaaacatcgacaatggtgcgcctagtaggggattttgatgcttcaaggtttcgacgagatgggttcaagaagacggattgtccgacaacaaacaatttggctatagggggatccgacccaaccgaagtgcgttctccgatggatcgggatcctcagtcatcttaagcttcgtcgccgaggatttttttcgacgaggatacttaaacgactttggccctgggagatctgacccgaccagagtacgtcccttgactagatcaaatcatcgtcgctaacaatttgatctatcgagatcacccaagcttgagta

SEQ ID NO: 32405 - DNA, 715 bp, Oryza sativa
actagaggatcccccgaccggtcttataggtgctggtttgcttaaaaccgacatctatgaagcttttttcttctttttacaatataaaagtaagaactggtgcatataatcactcattggcactggtttataacaaaactgacataattaatcccccaaatcataggtgttgattctttttataaaccggtacctgtagacatcacacaggtgctggttcttataataaactggcacatacaagtgcgatgtcataggtaccggtctttatcatgaaccattacatatgggtatcacatatgagtcgtttcttaataaaaaccaacacttataagcccaaaggtgcatgcttactattgaaactgatgacgtaattcatatatgtgtgttttttatctaactttttcatataaagtcgaatgaagaacaacgctataacaattgtagagctcaatgatatctacaattgtgtagttgatgacttttttatttaagatcgtttggatgtccaaaaatgtgttaaaaggtctcggatctatttgcataagtgattttttcaaatttctaaacgatatcgggtaaagacaaaaactatatcaaagttgtagctctagatgagatctacaattttgtaggtgataaacttttcatttgacctcatgacagtagtctcaaaagaatagcatttattttcaatacatgaactgtttgtacg

SEQ ID NO: 32406 - DNA, 770 bp, Oryza sativa
atagaaatatagaatagtgattatgataagtttaaggtcagaagtgtgcctcctagtgcataaacaaactgcctgcatgtgggggtatgatgttcttttgatatggcatatcccctcctgtgccactatataaaggcccctcactccaacttccctctcataccacacactagccattacattctacaacttgtctatctccatctcttccatcctttgccctgcacccagcattctcatcagactatgaagattgaaggccgaagggggcagatggggaggctcaacagagctttcagggagaagagagctaggttctacatcttccgccgctgcgtcatcatgttgctccgctggagcgattgatcgatgtccattgcggaccttgttttccattccattctggatggaattttttttggctctgccattttggtaggatttagctagaactgaggtgtagttgctctgtatagtttggcaatgtaccgctctgtagtctgaaggtttcattttgggagatgtcctttttctctagcttgtgagagatccaactctacagtcttgagatgtccccccctcttgtacaacttgagaaaaattgatatggaaaatcacttcttaattgccctacaacttgatggttccgtttgctgttgatgatgatcgccactgtggaaacttgcaagttgcaagacttgaaattgagtgatggcactttactttttttttcgaaactgcactttttaaatgtttgcagtgatttgtat

SEQ ID NO: 32407 - DNA, 521 bp, Oryza sativa
caggcgctcaactggggtataagccgggactccacctaagacatcttctccaaagcttctcttactgaagaggggaaagattgagcaagaatgagtacaaccacagtactcagcaagccacaccggagatgcataattaatgcaaggggggtacaaggggataataatataggggttaagttttgcagtaaacagcatttaaaagtcacttagttgcccaaagccattttataaagacgatcctagagctacacagtattattaaacaaggccgtgaaccctcacgaacctgccttaacccaaggcctacgatgattcagaccgaactggcaacccgaccctgggttccagctagtcccaagccaacccacgccaaccattccacattttagttggtgagcaaattttaagaattagaacactgacttgggtacattgctcagcttgcccataaccgagggcgcggctattcgaatagattatactctgatcagaggtgtacatctttacccacaagacac

SEQ ID NO: 32408 - DNA, 923 bp, Oryza sativa
aaagaggccatgacaggacccttggcataaccccctctagccaagcacaccacacctcaggtttcacccccgtccccagcgggcaaggggcagtcccctctcgtgcgtaggtgaatccggaagcgacagaaaccgtcgcagggcccgccccgctccatcacgcccacctttgcctggatgcgtcggctagagaaaagctacactacaagtccagccgttgcccacgctggcttgtggtaagtacgataagttcttccagggcatcccgcgaaccggtctttaattgccatgggtgcgactagcaaaaccatgcacccacagcccatcattcagtcgcattttagttggataattacgaccatgaagcatggccagatgtctcgagcacgcagctcattctgatactaaaaaggtctaatactgtaattatcccatcaactgagctagtgctaattaagcatggctaagcatatagttctagctaggtcacataagtaatatgagctagtcgatttattacccaaggttgacaaagaacagatatcaagtaaacatggcacaagcaagcagataggtaatacccggatcccatgtaattagcaaaacatgcatatttatttgtaaacggtaaaccatttataaattgggatcaacatgttcaaggggaatgtgtgacttgccttgcttcttcacttggatcttctgaactcttatccttgcgaacgcgatcttccgaaacgacgggaactacacgctggcacgcaaaacgaggaaaaactctaataaaaactaaggaaacagtacataaaaagtaaacaaacatgtagagctcaattttagatgaattttgcaagttgaatggctcaattcggagttcgaatgaattagatatgaattttagaagttttgagccatttaaatga

SEQ ID NO: 32409 - DNA, 625 bp, Oryza sativa
agcccactatgcttactgttttggcacaacagcagattagtgttgtgtgattctattcccttgttgggtgccaaatgtttgaccattttgcaagtggatagtgatgcaattcccaattgcttcacttaatcttttttgttttgtttcgattaaatgtttttgggtgttgatgggattagctcataatccattggatagttatgaacttatgatgttgtgtccttttgctcatactccactaggggattgtcatttcataagaacactctcccttagtatttaaatatatatcactgttgactttattcggtcaaaactttcaaagctttgatcatcaatagctctccatatatttggtttggaaacataaaaatcatgcttatatgtttttctttattttataatattacactttttaagaaaatattatcattatattctaatagaaaaatggttgttaaactggcatagattgaccaaagtcaacgatgccatatatttaaatatgtagatagtaattgtagaaacaattaataatatttaaaggacagtgtcatttgtggtgattgactaataaagaagtgcattcatcatgcacttttactgcatgtcattggtcatatac

SEQ ID NO: 32410 - DNA, 692 bp, Oryza sativa
ctgatgaccaccctggcgtatcacagttgtatgctattttcttcaatatattgatgtataaaaaaaattatgcttttgttaaaaaaatgattaaaataaaatattgttttgtgtcttagttactactagaggaacacttacattttgaaatggagggattattttttttaagaaacaaatggagggattacttaggagcaagtggtcaaacatatctgtaattatttacagaaatctaagttaataaatctttttacatacacgtgttcgttttccatgtggcaatgcatgcgtaggaagctggtagctaggacactagccctccagccttgaccgctgaagcacatgcaggacgataatatatgatgcaataatcgatcgagttgaccgcacgtctcaatgtatcatgcatcagctccattaatttcgatcgacaaatatatatattagtgcatgctcttctggttatagatatttatgatttaattaaacttttgaaattatgaccatcacttatttctcacattttaagttgtttttaaagaatatatatatatatatttggcttgaaaagaatcatcatagtatcacaaatatattatatttatgcatatactctaatataaaattgatggccaaaaattgacaagtttaatcaaacttttcctaatcaagcatcaaaaacatctgcg

SEQ ID NO: 32411 - DNA, 716 bp, Oryza sativa
ttccattcagttattggtggctatatcatatgacagagggagtagaacagtaaattgatacggatgaagtagctggtaagcacgtataggagtaactaattgcaatcaaagcgtttgtgcttaccaaccagtattaggctctgtttatttcagcttaggattattataatctagattactgagtcagattactataagctagattgttataatctgtagtagaataagcggttaattgtttctttcctacattattagagcctaaattattgggtttgcaagtctaaagagggagtgggtggcatggtgggtaatttttcacccaataatctggaaaaagctcacctaaatgagcttattagattataataagctgtgctccagattataataagctactttaataagttgtatgtttctttcagcttactcccaataatctggattataataatctcaagctgaaagaaacattgccttagaagccattatattattcagcacatattagaaatcgatcatgacaagtgaatatatatttgaaccagctcggtcagtgtcattagtcgcacggcaaacggaagtttaaacgaacagagattataactagctaggtctaggtgggcacagggacgatgttcttaattaggtcattaggtgaatcatctcaagaagttaagttaagtctgtttatttaatccggtcgggctgcagga

SEQ ID NO: 32412 - DNA, 683 bp, Oryza sativa
cttcttctgtccaaggcttgacacctccgagacgtgcagcatatttgtctggtcagcaagttgactatctattgagtcttcaccttttccttctctaatatcaaaaccatcaaaagcatccacccttgtgggttgatcttcatatctcttagcatcctgtctaatacccgctgacgaagaactcacacttcctgggcccctgaaagacaattttctctgaacaccttgagaatgaactgcttttactttacccacttttctctcaaagggttttaagggcgaacaacggagttcagcagaaaatactaaaggctcattctcatttgtcagtctcttttcgcattctttatctgagtgtccgataaacccacagaagaaacaaaagtgtgggactctttcatatcgaaggtgaaatctgcgagtctcctctttgccttgcacctttatcttaatagctagcattcttcttagggggcgattgactgggagatccacccgtatacggaagaaatcatgcttattgcatccatcctcctggacatccacttcgcgaactttgcccatcttactgccatagagttcacctcttgctctgttcatcataactaggggaaggtcatagatcctgacccaaatagggactgtatccaagttcaccatggaagggtttaacaagccattaa

SEQ ID NO: 32413 - DNA, 517 bp, Oryza sativa
ttagctaattttttttaaaaaaaatagattgatataagtgagttcaggtcaactcggtatggcaaaccagactttgaaacgaaagtccaccggttactatttatttgacctatgtgggttgacccactttggtctctacccctgaggcgcttgccggggaaggacaagtctacatctccggatggcaattaggccttctcctgctaatgggccggacacgcatcgctacaaaattcggcccaatttgaattcaacgggcccggtgctcccgggctgggccggcctcttcacacgcatggatccacgtgacgtcacgccacgtcatccaccattcctccattcttcccaaccatctccaccttccccgcatccgcagtcgccgccgatctccctctccgctgtcggagacgacgcggccaccaaaccctagccgcagcagcagcagcagccgcccatggcgagctcacgcgcggatccccgcccgctggcatgaccgcagcggccgccgatggagccg

SEQ ID NO: 32414 - DNA, 647 bp, Oryza sativa
gctatctaattaaaaatggtctcatcaatggcatgcagaatcgcagaataatcgtggaaggatataaaaggagggggcatcatggccacgtcggtttgtcgtcggagaccggagctgacttgtacatataccggctggactagtcaatccaatgactctgaccaatcgacgatgaatattgggatgggatcggcatcggacggcccggatcacgcggcacaagggctagtccttttcacatgcactaattaatcatctgtagtacagtattactcctgcttcttaatcaatttcacactctaattgacacgcacgcacatggccatcgttgatcatcgatgctatgaaaagaatatactccctccatcatccataaaagttagaaatatctcactttgagtttttctaaataagttattattatttatagtctttatacattcaagacttaaatgaaaaaataaattaaatgtttgattagtatctaagaagtcatctaaatactcattggttgcatgcttgcattcacttcttaattttgtaacatctaaaatgatttaatttcttcttgttcttggtgacaaaaataataggtgtaacttttgtgaatggagggagtataatcgacatggatgcatgatgtatgc

SEQ ID NO: 32415 - DNA, 742 bp, Oryza sativa
aaaggagaaatattccttgcatgtagtagttgtttgtatgtactatactgttgcaattctcccattggtgtatacaaatacgaaattcatgtgtttactgttgcactattatctacaaagggctaccagagcaggtataatagcaggctataaagccagctgtaaacatattttaagtagataaatgaggagagagaagagcagcgggctatagactgtagcacagactccaagacgctgtgtgtatgacagatgggaccagatattaatagtgtactattgtatgaatgagctattagattggctataaatgaattggagctagtatttggctatactattaaacttgctctcattgtcgggttcccaatcgacactagaattttagcaatgatatgataactcatgggaggagccttatagctaggtaggtgttgcagaggtctttttagtcccggttaagattattaaccagcaaagacgacacatattattgcatgctaaaactattaaacacaactaaacatgttgtatcaagatagatttcccatctaaagtattatggacactgtaaaatcaacactagtctctctaatcactttagggccgtaccaaaaataggtttcccgtctaaagtatcgtggatacagtaagaccaacactgatagtctcctcattaatcaatgccgattaatactgccgacactgatggggtattattagtgtcaatccttgaacacat

SEQ ID NO: 32416 - DNA, 545 bp, Oryza sativa
cttacttgttgatgagatcgaatcagtggtttcagctccctcctcctctgcctgcatctgcatgtccctactgagtaaacatatggactgccattagagtggaattaatcaagaaaaacacgcactcatttgtagtcacgcaggttagctagcaaattttgtatgggtcaattattgccaatatatatatggtcataggtcataactagtgtgcattgtaatttgctttgtcacctatgtacataatttaactatcagctagctatatatatatactttctctagttttaaaaagatggcgtcgttgatttctagacatatatttgatcgtcagttttattcaaaagatatatgcgaatatataaaatataagtcatgcataaaatacctttagtaataaactaagtcttaacaaaagtaataataattatgacgaatggtcaaatatatatatatatatatatatatatatatatatatatatatatatatatatatatatatatatatatatatatatatatatatatataaattaacaacac

SEQ ID NO: 32417 - DNA, 522 bp, Oryza sativa
gttattacgtctgacaaagagaggttccgttaattgcagagaatgactcgtgtgagcactgaccagtcaaagcatgtacagctcgttgagtagggcacacgtgtgaatagatgcctttgcatgcgtcgccatagctacttaattacaattataatagtgtagtacatgattacatctaaattggtaacctttctcctctctgttttgtaaacaagtacatctacacgttgacagcagtaagtgcgtgtgtgaatagtgattcttaaaaaaaaaaagactactgactactgcatgtatgagcaacaggactggtgttttctcaagttggtttgattgagtatgcatttgtatttgcagataacaagtggattccacacgcatctgttaagttatatttacgtgtaattattttacgcgttcgtgaaaaatacttggttttctttgacagatgattcgctggattattgttatagcggattatctagttggttataagaaatctaaatattaaatatttttaaa

SEQ ID NO: 32418 - DNA, 581 bp, Oryza sativa
ctatttaacaaaaaattacagatatgccaaaaataatatacaacaaaataataatgagtacatatttttttaataaaacaaatagttaaacatatgttgaaaatcaatggcgctgtaagcatctgagatgatcttgtcttgaagaagggcaaaatctcttttgaaaaggcacatggttcttcctttccacagtagatagcaaaagatgaaatcactggttgcaacaggtcaagctgccgctgtcaatctatcaggcctcttttttttacttgttctatcaacctgttcttctgtgatattcctaaactcctatggtagcgaaagctaatcgaatcccgtcagacaccatcttatcagacaaagcttgcaatctagtactctactactatatggcaaaaatcattttgtttaggggatggaatccctaacttttatgaaacataaaagagtatatgattctttgaagaagctacaaattgtcatatacaatttatttactttttaaatgtcaggtggtgcatggacacattcaaaacctgtatcatttgcacagttgaacttttcatcttgcaagagttatt

SEQ ID NO: 32419 - DNA, 630 bp, Oryza sativa
ttgtctgcgtctacaaaccaattagtaggttcaggctatctgattcatatggtccatttccatagatgtgaactagacatagtttttagctgaggtagggtcgcaatttggcgattggtatgaattcccaagagtatattcatccaaacgccaagcgagtaatcatcacctaaacaagtggttagattttttgaatcttgcttcagaatttggtacagttgttcgatctttctctctctttcagttttgaccttgtgaagaagtcgcaatatcatgcgtgccaaccttgtcaagcgacggtacttttgcacagtatttagatataatcatttttatttaagaaagagatggcattaagtacaccctttgtcccaaaataagttcatttgtaggtttctttgttcaatgtttgattgtccgtcttatttttaaaaagttatgattagtacttttgttgttattagattataaaatatgcatgaatagtattttatgtgtgacttacatttttaaaaaaaattatattttttcaaataagacggacggtcaaacattgacacaaaaacccacaaataaacttattttgcgacggggggtgtagatgatataatcacttcaattgatagcaac

SEQ ID NO: 32420 - DNA, 636 bp, Oryza sativa
caaattagtctcttaggtttgaccatttggcttatccgacagtcgagatgctctgataccaacgtgtcacgcccggaaattcactagtgaatttccgggcgtgacagggagagagcgagagcacaggctgaacagccataaaagtgcgacgccccaactgtccctcaccgcatttaatgcggtaagggcagacgtgcggcgcgcctagctaacctctgtccaacggatgtgaccggcctgacaccgtcacatccgatggatagggcaaccatgtcctcacgtcgcccttgtacccggcggagtgggggtgggtatgacccgtcacgtccaagcgtcactcgaggaagggctgtcacaggtcatcgttcatttatgagggaatgacagggctgtcccccgtgtcaggcgggggcggcgcctggttccactcgagaaccggttgttgcttagcttccgggagaaggcacggtttaaagcccaggaaaagtggagtgggatccccctccgatagagggtaggtagaggcggcgcatatggtatccccttgagctataaaaggaggaccctgcccactgagacagaggaggacgcctagaaaaccttgaactccagaagagaggaagcgagtgcgctttc

SEQ ID NO: 32421 - DNA, 564 bp, Oryza sativa
ggtgaagtttttttggtgtttgcgagaagagcggaaaaaacccaaaatgtgtgttttttgtgagagagagcgggaatttgtcgcccccccctcttcaatatattttgagaagcgccgccacccaaaaccgccgcgttggagatatactcgcgatgacaccaggaggggcgccgcggaagagaaatatatatgtgtgtttcgtacgcggagtttggccctccagagcgttattgtttgcgcgtataaggacccgaggggtgcgcgtgtttaaagcgggggatttttgtgccccccccagcctcatttttggagagggtaacggccgctccccccaatgttgagaaacgcctacaggggtggaggttattaaagaaacgcccccccctttcccgaaaggaaagaagagggggaccaagttttcccgtttaagcggcaagggttcggaaacagaaaagcgcgcacaaaggaagcttcccagggggaaaccggccgagtattctttaaaatcccgggcgggtttcgcccccttttgatttaacgctgaatttttttaattgcctggca

SEQ ID NO: 32422 - DNA, 1334 bp, Oryza sativa
  unsure (1)..(1334): unsure at all n locations
ggatcccaagctttattgattttcgaacccctatcaaatgaaacgcgagattgcaaccccccaaagagaaaaaacggcagcggaaatggcgacgtcccgatcccccacgcggcgtgatggggaagaactcctcaggcgtacgcgcattggcagcgtcgtcaccgcgaaagcgccccccaaaagagaggaaaccggttacaaatacggaaacattaaactataaaaacatatatttaactttacataaattaaggttgtactatataactatattttagccatgcactcaagttagggatttgattgaagagtcaatcaatctttaacctgtgggtcaagtagatacatgccctataaatatcgacatatttagaaatacggtaattaccatattataagaaacggtaattttcgcaagaatacggtaaatacgaaaatgatcggtacaacagcaaaaccatttccgtttctgtttccatattttttaccattttcatatttttttggtcgattaccatttccatatagttccgcccgtttaaagtcaaaaacgaacgccagtcggccgggaattacccgtaccattttaacctttaaccaaacgatggggccttagcatccacaagtcaactttcatctcaaagaaaaaagaaaagggattgaagcttcatgccgagtgaaacatgggatgctgtagtnacacagacgctaaagaatggagcattacaaatttnacacacantgatgaanntcatgataccaancctactcgaataggctggcagatcatttatcatacaggctactggaaatcatggtnataccacgccaagtttgcccaaggtgagattaactcgttgggaacatgcaacttgttttcggcccagaaggtattgagaggcttaattctaatgccgggngtttaantgtatcattagaaaaatacagcttgccgccttaattcaggtagtctttgaaaacccacttggttgaaatgaaccatggtttttattacccaccccttaggtggaacttggaaattcctctgggggattattttccccaaaaaaaattatttccccctcttctttgtaaaaagggcgcaatggggggtggttgttaaaaaaaaagaaggtgtgtggagcgaaatattctggggatttttttgggccttttttaaaaaaacagcggggggggacaaaaaaaaaaaaccccccccccggccggggtgtttttttttttaaaaaaaaaaaaaaaaaaaaaacgccccgggggggggtttttttttttttgcgtcacaactttttttttcccccccccgtttcttttttgtt

SEQ ID NO: 32423 - DNA, 860 bp, Oryza sativa
cccctagggaaattggggggcccccgtgggggggtggcccggaaaaactcttgagtttatacccgtttaaaccaaaaagggcaccccttcggggtcaaaagtgttccatccacaggggcccaaacggggtttggggtgaaaaggggcggggcaaagcccccttgaggggggaggcagcccccagtgttaaactctaaccaacccgtttaaaaatggggagcggggataaaaaattttccctaacggacacaatagtgtggtctaaggggaaagcaaggcgggtgcgcgcacattgccctaaaaggcacgtttgtgttctattcccgcaaatgcctagccaacaagcaggtcgtaacagtcaccggaaccgttcataaaccggggttaacttgggtaacagtgcacggcataccaaacacatggcccgttttgtcccggtttcacagacaaaagactacatgtcctgcttgccatacagattaacgcaggcaacttttaaagtctgcaactcccaagagctagcagtgtacccaaatcagtttagagtcaagtgcttgcggtctctagtcaacttgtgtcctgtaattcacggaactgtcaagatacattttcaagtctcaaatttatcaacgtttatcattttggtcgtaaattgacgcgagcctattggattcaacgtggtgattatctggcatgccacatgaacactaaagtgacatgtgagatagatatcctagtgtgtatcctctacatcttctgtgcctaaccctccgtcgtagcccgtgtccagtttcttctcagcatgaatggcagttaaaacgacaaaacggaaagggcctgttagttagtccaccagcgca

SEQ ID NO: 32424 - DNA, 613 bp, Oryza sativa
  unsure (1)..(613): unsure at all n locations
acaatgatgttctganatctgttttggatatgcaacttctatatntgcaaggtacctgcagcttatgaagcctgaaatcctggcaaggtactaatgaagacaagcagttccatgaagtccttatataacaacagtgaagttctatattgttttatgttctattttcttagttagtatcttgtttagagaaaaggctttacaccctgcttttttagtaagcaacaagagtacaggcatggtgtcactggggacgattccagcttaactcttagtgtttgcaggtttcctatctgttacgcctttaatatctcaaagagtacagatttaataggcaaagcccagagaagtactagcacccaaaaaatttgttgctgatgttgaactgaaagtaagaaccagactaggtaagcaaaacctatgatccccagaaaaaagaattaagtctgctcacaactacacttaggtgtcaaacataggttgctacgggaccactgaatttaatttaagttgataaaaagataaagtatgatagcannnnnnnnnnnnnnnnnnnnnnnnnnnnnnnnnnnnnnnnnnnnnnnnnnnnnnnnnaggnggnttcaatcaagggcgg

SEQ ID NO: 32425 - DNA, 1387 bp, Oryza sativa
  unsure (1)..(1387): unsure at all n locations
gctggntttgatgaaactcnnnnnnnnnnnnnnnnnnnnnnnnnnnnnnnnnnnnnnnnnnnnnnnnnnnnnnnnnnattgccagatgcagaggaaataagcacgaagcagcagctcatcaggagaacgccgacgaaaaggattgtggccatctcgacaatgaacaattaatagttggtcgtcgtatgattcgagtctttagatctgcatataatatatatatatatgtttttctatatggaaggtatgttttaagaaagaatatatgtttcctttgatgctgatcgaagctcacatatatgaattatattttgaaatatgcattatttttcgtagttttacacatatatacatgtttctaacgttgttgtgaaaatatacttttcccgctgaacgggaacgcgccaccgcaccggcggcgcagcttgaagacgcgggaccgtgtcagtctagcggtgccgcgatacagttgtgcggaaccgacgcagttccgcggattggttgcgcgggattagtggcatgcatgcattagcagtaagttagattacgtgcgtagtgtagcatcctgtgagccggcattccattggctggctcgtgcaaagcatatgcacgtaagcatgcatgttttggaagagcatgcgccattccgcatcaccaatctgcggggacgcgacggtcctgcaagacacagncgcgggaccggcttggcaccacgtttccgctcttccagaacacgggaaccgacccgttgcgcaggnaccgcaatgttggcgctcgttcacatgcgtgaacaccccgggtgcgggtaccgagcacttccgcaatcccatcgtgctgtaccggataattgggctaaatcttctttgcctatttataaagccaacattccacaggaaggttttattcaattttttccacaatttgccttttttccggaaaaatttcccccaactgggctttctccctttaacggcgcaaatgggggggaccctttttcccccgcaaaaaataaatttggttttgggggttttaccgcccctttttggggaaatttaattcccccggggtgttcctccttcctctctggggggaaaggccgtctttaatntaaattaaagaggcccggtttttcccacaaaaatatctcccctcttaaaaaaattttgccccctttgttttattgggaaaacaccacccccgccgggtttaggggaaatattttaatgccccgccgcccggggggcgcccactccttgagagaataacctatcccccccacctggggcccaccctttttttaatattaataaaaagggggggggggggaaaaccaaaaaacccaaaaaacccanttgttttttaccaataaaatataatatatttcttc

SEQ ID NO: 32426 - DNA, 604 bp, Oryza sativa
tctttttttttcttaatctcattgcgcaaattatttgtattttgagaatatgttactctcataacttatttgggttcagagacaatggcaagagtctccagcgattggaatattactgtgagtattgaaatggcacaccgcacagatcgttcttcttttgacatatttttttggacaaaattcttttgatctttgccacaaatcattattgtcggaaacaatatcttgatctagtagacctattttgtttcaataccaagatctagtagtcatgatcagagagtatatatttagaagtctgtccattcagattctttgacacaatgtttatacatgacatgaaaaatttcttcgacaatattgcttcttgtagccagctcttttggttgtggaaataagtagagaactacagtctagagacacactctgagcttctttttttttttgaacgaattacacactctgagctttcagccgaaaactaacaatcccattcatatttgctcttattcacggccatttctcttgttcagacaaaaagcataatgaattcaaggatatatatatataacgcaatgaactctccagtcttactatactgcaa

SEQ ID NO: 32427 - DNA, 584 bp, Oryza sativa
tatatatatctctacttctctctcttctcctaatattacattgtatccatatacatgtaaggattgctatagttaaagtttatttatatgggtcccatctatatagaccacttttgtcatatacattggtgatgccctaactagcaggtcggttgtattattagccttgctctaaagacagcaaccctgagaaatggggatagtgtatctttttggcattaaatataatcaatttgtattaattataattaatttgccttatttgtacatttgtacgtacgccattaatatgcgctttttgccatccttgcaggcagcagtcaggttcattgtctagcatatatgcacatcaatcaaattaaatatcgacattaaaaagtctataaaaaggctaggtgatgcacaatcacattcgcacgccctagagttagatagacattttgagatcgattttgctcgcaaaacaggagaaagagaggcatatggtgctcaaatcccgggcacctaggggtttgattttgctggtgttgatgatcacactgcaagcagagtcggaagcaagtcccagctgtgacgatctaatc

SEQ ID NO: 32428 - DNA, 4010 bp, Oryza sativa
caaatttaatataaaattaattttgaatttttaaaataattgaatcttgtcctaaattgggagattaagggtgtgtttgtttcacggttatatatgcataggatatggccattcatattttgttggatatggtggtccaattttttgtttagttcgtatggatatggcgatccaatttcttgtttggttagaggtatatagcatggataagaaaagacaaaagttagtgggacccatttgtcatatatatatatattatcaaaatataatcatctgagatctttttttaaagatttaattataacaaatgtaattgtgtaatcaaatcataaattagataaacgatttaggagaaaaacaaatcatttggagcttgcttaacagaaaatcaaaccaaccatagccaatcagaataggacacgtcactcagaccaaaactggatgacttcatctagccaaatcggccggatgcactcatccagcatgttgagggaatattcccttttctgggccacctaatccaccctgctcttcaaccaaacaccacaaaaaatcgggcagccatctcccatccaggctcatccacccaaccaaacacacctaagaggagatttgtctcgttctccgccgcacgcttctcaaactactaaacggtatattttttataaaaaatttctataggaaagttgctttaaaaatcatatgaatccatttttaaaacttaaaataaaaatactgaattaattacacgctaatagcccacctcattttacgtatcttctcaatcttttcttctcatcttcttttaaacacagccaagtatcatcttctttgacatgagtaactatggactcatatcggacagggctttctgggactgggttatggggcgggagggctttgggcacatgtcgatcggcctaggccatatgtgccgatgttacttatatatttggatatataacctacatatacatatatatttggatatataaccgatacaaatcaataatcaatgcatatatatacatactactagtaaatttccatcttaattaagacagaagtcattatctaaaaaaattaagacagaagtagcagagtacttttgagtcgttttatgtcctgttctagcgataaaaatttctcttcaagctagtactttctaagtacttttgagtagctaacttttggcatcttgctgcagacgcatcgactttgatgagtgagtgcgtctcacatcgttgctaattaagcttgctcaacgcatagttaccgcgcgctagcttgctcgaacagtgggccccggcaaggcttctggcttcatctgatacgtccatttcagaatgaatggagcagatacgtccacgtatatgctactttcgccctgtagtccattatatccaaattatccatgcacgcctacgctggctgcggtcgaaaagtgatataccctttctcgttcgaaagaactttcactgttgaccaatataaatataattttagctagaaccatcaataagttttaaatagttaaatcatgttgtacgaaaatttcacggttatatttaggctcccatcggatgacctaatcagtcaaagaaaaaaaccaaaatttgaattttcaagcttaattttgagatattttcaacgtagttttttttaacgttggcttttaaatcaccatgaatacatttataaaagttttacctacaaattcatttttattttctaataagccgtttaatgggatcgatgggatctttagagtgtaacacacttcatcaacactttatccaatttcataattcttgatgttttagacaatgacacgatcttcaaaatatatatttgtctatattttttctattataatatatataatatatttttatttttattgtagtactttataagctaaatttatatatgttattctactgtatttaaactaaatattttaaaagttactgatagttcaaattgtaaaaatttactgatagtcaactatatgtgtctagaacatcaagaattatggaaccggagaaaatataatatatttgtgatatttaattatatatttctcaaaaaaagattaatggttaaagtttaacgatgaatattatgtagtgaccagttatttgacgacgaaggtgtatatattaggctttcatatatataattgcgttgctatttacgcaattatgcattacgccgggttatctctaactgcaggcaaaaggggaaaaaagggcagggtccagggatccaatgcagctacataaacatgtataattcctcggtcacatataaaacaaatatattattctagaactacaaatctaaatttatcttctgttcagattcgtagcactagaatatcaattttatttttttaaactatggttacaccaaaacctctgttgcaaatatacttgcatgatggatgcatgacctaactaacagtgcatgtgacgtcgacacgagacatcacaacatatatactaggagtcatcagccatacatgattcagccagaataaaataaaataaaccagccatacatgaagatgccaacaatgcatgcatgcatgcaaatggagtaatatatacggattcatatttatttttgtttaatgtcttgcagtgaatatattaatgtgtatatatgtgtatttatacagctgccctcactcacctaacgcaacttcaattctaagggtatataaaattataaataggcgacgacgatgacgcagcgaagaggccggaacagtttccaattaaagtttgctttacgatcattccttgtgacttcctcattcagcctacctagcaccgttcaaaaaaaaaaaatcagcctacctagctaatccttccattcctcctcgttttgggtttgtgataaattcaaatttaccaagttaatagaaaaatatacttttagcaatatttcaacacaaaacgaatatgctatactccctccgtttctaaatatttgacacagttgattttttaaacatgaccgtttgtcttattcaaaaacttttgtgaaatatgtaaaactatatgtatacatataaatatttaacaatgaatcaaatgatagaaaaagaattaataattatttaatttttttaataagaagaacggttaaacatatttaaaaaagtcaagaacgtcaaatatttagaaacggaggaagtatttaatagcggacttaaaaaaattaattcggtgctccattttaatttacttgtcgttctataacaaaccacacacaaaactagtaggcaataaattacattgctatattcataaattacattctaataatctttttcaaagcaaacattaaaattccttgtgaggtactgatgaaagaactttaatgtacgtgtttgtctatttgcataaatattttttagaaagcaagaataatcaatcaaattacaaaattcaactgcatcatatatgcatgtaccctgtcccataaaaaaccaacctattactggatgtgacacattctagtgctacgaatctagtcatacttctgtccagatttattatactagaatatgtcatattcagttttagattcgtttttttcgggacggagagagtataaaactttgccgcaagcttattactagggagattttcatattattgctgcttttaattttacctaggttagttagaaacattcagacatgtacatatacaaccactatatagagtacagatcgattggctagctagctaggtatactactagcacacaccgacacacgtaaatgcaacttaggccgtgtttagtttgtcccaactaccctaaattttcaactttctatcacatcacatcacatcacatccaaaacttttttacacatataaacttctaactttttttttttaaacttccaactttccttaaacttctaactttttttcaggaactaaacccacccttatacacagtgatctgtcttctgtacaccgtactagagt

SEQ ID NO: 32429 - DNA, 1455 bp, Oryza sativa
atttcaggggatatactgttaaccatctgccagtttagttaattgtagggtataatcggctgatgccttttatttttaacaacagattcacagttgtactagtattaattgggttctgagtgtattctatcagttggttttacaggttcaggttggtgaatggggaattcgcacagctgtagtgttgttgcttgagcacttctcagaaaaagcatcccaacaaagcttcgagccgattacaagacagtgggcaccaaggttgcctattgctttatgatcagcaatgcagagaatgtgctcaagctaagatgaactttctgaaccttgcaggtttcatctcactttatgcgttgtgtaatatgtaattgttgcatgacactcttgctctttgccttactaaattcacctggccgtgtacatcctaagcagaagagaatgctggacgaaccattgatcagtccataattacccatgaatgctataggcagagcaaagtaactcgtgttggtgctgtgtcaatggtctgtctggtaagttgcctatcacacaaattgattctcatttatcaacaatgcaaattctacatgtcctcttagttgtgaaatacaaattctagcatttgttcgcatcatgtctatttcctagtacgatccttgcatatatcaatgtctgtgtacagtttttgtgctaatgttgctgaaataaacatgattttgttcatgtagaattttattgctagttctatgtgcaatccttttgcgtgttcacgaaaattgctctacattagtgtcccttgaatatagtgttgtactatatgtcataccactcggttctcacccagtaaactggtatatagatatttgctgagagatacaatgcattggccaatcatatgaattgcgcaaattagtcaaataaaataattggcattaaccaacctgctataaaccgtctttgcttggattggagcaaactaaagtattctggaggcaagatcttgataacttctcctgaagtctaggacagacaggattgcattaggaaccaaacattggagttatttacacactggcacatgtagaccaggtttggtgcctcaatttaaattgacattgcagattgcatcagttcctgacagtgactagtgactacatggtctgtacatgcagctagtactactttgatagactagaggcgtcaaatgggccaatttgctgttgcggacattgtatcggtatcttacttggatactccctccgtcccaaaataaatgcagttttacactatttatgttcaacgtttgaccgttcgtcttatttaaaaattgtttatgattagtatttttattgctattagatgataaaacatgaatagtactttatgtgtgactaaatatttttaaatttttcataaatttttcaaataagacagatggtcaaacgttgggcacggatt

SEQ ID NO: 32430 - DNA, 674 bp, Oryza sativa
cctgcagcccgttgtgttgcggcgtgcagtgcgcgtgagtgcgtgggggttctagttggggaggagacggaggaggtgaagagcagttaaggccgtatcgggtcgggttgggttggtgcaccagtctgcccgcgtggctaacgctgtggatttccttccgtttcagctcggatcacggtagattacgataatcaaagtgaggtttagtggtttatactatttttatactgtactgtagtatatgccaacttgctaagggtctctgattgtttctttttttttcatttagtttttgacaaggtatgtgatatggaagagattttttttaaccactcgcatgatacggtgcgatgttctgttgatagagcatgaaaaaattttgatagagcatgaaaaaattataagattacaaccatataaggtcgtaaccaggataaaaaaaataccaccacccacataccgacagcaccaacacacaggtccgggagaaccagagaagcctatcaccgtaccagccgccgctaagcgtgaccgaccaccgctagactaacaaaggaacacagaagagatcgccaaaaaaacgctcttacaaccaacacaaagcctaactttatcctaaagcgtccttgcaccaatttttatattgttatatacgtgttcaacgattatacttg

SEQ ID NO: 32431 - DNA, 823 bp, Oryza sativa
tttgaaaggaactttttaattaaagattcatgtaagcgagagtaataataagaccatttctcattctaccacaactagcctaactaaatcatccatcactttatccatcaaccattgtcgtcaataatgacgattactaatccaaagagaacagttcacataacaatcctaaaacatcccttcagaccgaaaatagcagctcgattgcagcatttaaccacttcatttgcttccacaagcaaaagcacacgaaaattcaaccgccgcatcaagtccagaagaagaagtaccgcaagatatcccctgccaatccgcacaatcaaattgaatcgatcgacccaacctaaaccccccacacgtttctcaccacccgcccaatctctagtgcacagtacagcactgcatcgaaatcaatccccaccttgacctcgcttccaccgacaaatcccatgttcaccccgaacagtacttagctcgaatcatcgcctccgcaaacagtgcaacgaccaacggccaccaaccaaaagctagtgcaacacgtacgagcaaagcatccaagcacgaagcgcgagcgcggagcacttaccatcggcggcgacggtggccgcgagcgcccgccggggcaatgccgccgcggcgatcagcagcagcagcggcagcacgagcaccgccgcgggagcccctctccggaagcagcacctccctcccgctgccatccgcatcgacgcaaactctctctctctctctcccctccagcaattaatcagcggggcctccgccgaagcagcatcagccagatcaacccgaagcgatcgcggaagaa

SEQ ID NO: 32432 - DNA, 554 bp, Oryza sativa
  unsure (1)..(554): unsure at all n locations
attcctgcagcccttagttatgtagttgttcttcactctctcatctctcctctcccctttgcaattcttggagcacttgctttctcaccgattaaaagaacaccaatggtgaggtttatggagagagagaagagagaagagagagagagagagaggagggaaggagaaggtggtggcaacattttaaaggagcaaatgggtgagtgggagctgggaatttgggtttgttagggattaaattatttagtggtgttgcacatgtgggagctctttctgtggaggtttttatttcttgatatttagtggagaatattccacaatatcgattatttatcttatgagaatcaaggacttgtccttctttaagtgcatccgaaaattcttaaattttgcatagaatttagattatttgaatcccggcttttggaacttcccgctctcgctncccttccctttttttacttggcaagcgcctcaaaaaaccgtaagagtataatccagcggtctccaccaaaactttgtaatgtatagttttattttatgattttttttaa

SEQ ID NO: 32433 - DNA, 813 bp, Oryza sativa
aatatgatctttagtcccggttgatgtcaccaaccaggactaaagatcctcgcccccctgacaaactactgacacgggatgaaccgggagtaaagatgatttttagtaaaataggtgtggtgtttttaaccgggactaaagatcatttttagtcctggtttttattgcaaccgggactattgtggattttggtcgaccgaccaaagatgatttctccaccagtgcataattccgattaatcgtcatccctattccggtaattcattaaacattattctctcatgcgacaactgactccttgtttcataacaccgttttacattaaagaaatttgatatctctcaaggaccgtagtctgtaaaggttatcttttcttatgctcaaagtagaagaataaaagctcataccttaaaattatttttttgccttattaattccagttgctatccaagttagaggttgtagcttgacaaataaatacattccaaataagtcctaagtattgttgagttgcataccgtttttgacacacaaataccgttttggtatatgaagtactccctccatcccataatatggctgtgttagttccacgccaaatttgtaagtttgaagaaattggaacgatgtgacagaaaagttggaattttgtgtatgtagaaaagttcgatgtgacggaaaagttggaagtttgaagaaaaaagttggaatctaaacagggcctctactatcttttgtaaaaattaagaaagtgacaaatgaacatgtgatgggataaaaggtgatgggtgaaagagtaaagtaatactctct

SEQ ID NO: 32434 - DNA, 701 bp, Oryza sativa
tgagaaaagacgatggtgtctttctattattagtccaacagaagaatattgagctttctgcatcctatctttaaagattgtgaacatatgatcattgccatcctttagacgatcatatcatcttattttgtgttttataaacaccatttttttggcccttttagaagatgaaaaagattcagctgggaatacttggataggttcagagagatgttgtgcatgagggtgagctcttgatccaaagcccaacccctggcataagagggtgaaaaaaacccttgtaaaacatattgagaagaacttatgtctgtgccaaaagttttaaaagattgattgagagttaggtcagggttagctgtagagtttgtgcccaccaaatctaataccactatttttgctagcacctttttgctggaagtagtattctcaacagcttacccgagtgcattagaaccttcaccacccctctgttcccaagtactatttgttaccattgactggttaggttataatgaatgaaagctaatgtttatgtttaggatgcaacacaatttgataacacaacatctttttgagtatttataatttttttttccaaaatacaagtgatcaaagtttaaatatgaatggtgtccgctgacaagtatttgggaacggagggagtactatattttgggaactctactagacctatctatgct

SEQ ID NO: 32435 - DNA, 672 bp, Oryza sativa
atatttgtattaagcttgggactgaagaagctagcagtgctattatactttgttgtttgttttcatttctctatgaatacattacaacaaaaattatcaacgagggatttcccagctggttgagtagatctcaaccattgtctcactaagacattgtgttccctttctcttagttacactggagaacaaatatttatagtgaagagtattgtttatttgtttctccttcatacaaggtcaatgaagtttggcaaatcagaaattcagaaaatactccctcagtctttttttatgtctaacgccattgaattttgaacataactttaataattgaattttgaacataactttaataattgaattttgaacataaatttaataattcgtttaattttaaaaaaccatataatcattttttattacaagtacattaagcatggtttctattttttacatacttagattaaacgaatggtcaaatgtatatataaaaatcagagatttgttctggtccagcaaattatacctcaatgcaccagtacttggtggtacctgattgaatctaaccgtccaatgtccaagggcatgatgggaatggatcgggatcaggtgcagtccctatagagactgcaactttggcagtagccaatctgaaccgttcaaaaaaaaaat

SEQ ID NO: 32436 - DNA, 554 bp, Oryza sativa
gctcgccgtcgcccagacaaggcggagaagaggcggtgggtggacgagcaggtggggcttcacctggcggcgagggtttgggacggctacagctacggcgccggctacggcaagggcggcgccgtcgacgtgagccgctacggcgacatcggcctgaaggcggcgctgggctacgagttcgagcgaaggtggtggttcgccgagatggcgcgcctgctcgccttggtcgacgaggacgacgcggcggcggcgccgtcaggcaacagcggcgacaacacgccggcggcgaagggtgtgtctggaagtagtagtaattaattagttggttcgtccagctattgggtgtctctctctggaggcctaatatgttgttgttaatagtgttcatcttttaggtttctgtcagtatatattttgcagtgttcaattgttcatagttctgtaaaaaaataaaagttgtacgagactacgagtacacttttccaaagcggaactgctatccgactgtcgacagtttttacgagcgaaaactgtcaaattttttagccattgat

SEQ ID NO: 32437 - DNA, 768 bp, Oryza sativa
cttccctcccatcctaatctcatgtatatagaaaaccgctcactagatgtttggctattccccaacgcccgcgtcgctcgccccagggcgacacgggcggcgacaccgcgcgcgccgccacaaacttctcctcctcccctccgcctcgccgccgcccgagcagccgccggcaaagctgcgcggcggcaaggacggcggcggcgggaccttctccctctctcgagaagcgcggctagggcaccggcgggacctgagcaaagcggacgacggcgacagtgtccggcgccatctgggccggatgtggcggatccggctccgccggaggtggatctggccctatcgcggccagatcaggaggggcgtgccgctcttggcaggaggcggcgtgggaggcggcgaccgcgaccgttggtgggagggacgacggatccggccactctggcggcggatccagtccccctggatggctgcggccggcgggcggaggtggccgacgccgaggaggtttgtggcggaaggcagtggtgacggcgaccgacggagtcgagagggcggtgacagcagtcgacggagacgcgtaggcggcggcagcagctggtcggcgggaccggcgacggcgtgcatggcgcggcgcgcgcgagatccggtggtgctggaggcggggtgggagatggtggcagggcacggtggctgtgctggcggcggggtgggggctggtggcggggctgagtggtggcggcggtggagcctggtggtgatggcggcagc

SEQ ID NO: 32438 - DNA, 775 bp, Oryza sativa
tatttttttgttaattaattactccatctatcccagaatacaagctttttttttttttttgactctgacatggttttcgatatgttactttgactaacaatatctataaaagtaagatgttttaaataaaaagatttgcatattatgataatttgtttaatgataaatctagtaatatcaattttacatgattgatcttttaattttttttactattaatagtcaaagtttaaaatatttgacttgtcactttgttaaaaatgtttatattttgagacggagagagcacataagagaagtccacacattggaagaaacgaaaattagcacaaattcgttccgctaaaattctattaaaagtgcatacacatgtgtgattattgatttaaacaccctgttgattggagatatgcacccatgacttcatcgtcttatctacgatcatccaatgcttgactcgtccaattcttatactttatctttactagtaatatgtctatgcgttgcaaaagacactacaatataaacaatattcctaaacggctaaaatgcatttctgcagatggatgtagcaactgcatgccctcaggtgtatatagaaatagggatttcccagacaggtaacacaaccacacgtgaaaataggatttttacacacgacacgtttacccgactgaaaaataaagaatttttgaataaataaataaaaattccaaaaagaaaaatcctaaaaaccctaactcacgtatctttctaaatgcgcgcgcacacctta

SEQ ID NO: 32439 - DNA, 770 bp, Oryza sativa
gattgaagtgaggagagaatttagcagctgtgtataattaatcagagaatttctttactgcaaattaagtgttatgtttttgtatggtcagcaattgctattgaatagcatatataatattgttaagagtaaatttcacaaaactattaatattttgatcaaactatcataaaaatacttatttaatttatgtgtcataaaactacatatttaacgttaaaattatcacaaaaccgaatatcacgaaactactatttatattgaagttatcataaaactattgagtttaaatccatagcattgccatcatattggagctatgataattgtagttttgtgattaaattggcactaaacttagagttatgtgataaatttgctacttgatttttatttttgtgacactctatattaaatctatagttatgtgagaaattacacgttaaatctataattttgtgataatttgatcggaatatctattgttaaatgatatgtgacatacaagcatatgagtttgcaagtatatatataatctaggattatgataattgactatgataaaaattttgacatgtaaataaatttctgctggaagaataatcatcttataagtgatctttattcaataagctgacctagtttctgcaatgtcgatttctggggaaataattaaagctaatcatgcctatcactaaacagtgtaaactttttattgaaagcagtagtatcaataaggtatagtccattatacgaaatagtaataacgt

SEQ ID NO: 32440 - DNA, 619 bp, Oryza sativa
agttcagttcttgggagagacaaattttgggcgaaagctctgccttcgggccggcaacaacgatgcctgtgggtgccgttttttcctcttggggtgttgccgcttttcttgtctctcccaattactttcttcatgtgaaaaccttgtcctggccctctgggacaggcgacagcggcacctttggtgtcgtacccttttcgaaggtgtcgtctcgaagaccttcagtttcgctcgtgcagtgggttttgttgtagatgcgcggtgtggttgtattttctttttctggtctgtggtcttccaggactatagattgtatttttctcctgttttatcaatatatgaaactcgcgctgtcttgtgtggttcgtttaaaaaaaatagaaaaccgctcaaaaaaaatgaagctgctataattaacttgcgatagatttttgttctaaatcattcaatttttgggccgtttgatatgctgagatttgtgtttgacataggaaaaaagtttcacgcattgtgattgctggaatcaaacccttgacccaacaattgcatgcgcacatacttcccactgagctatcttggattttgtaatttatgcttcacctggatcctagttacgtgg

SEQ ID NO: 32441 - DNA, 784 bp, Oryza sativa
ggcgaattcgagctcggtaccctataggggtgggactttaggcccggttggtgttatgaaccggggctaaagatcgccgagatctttagtcccggttggtattaccaaccgggactaaagttacgatcgggactaaagatgcgcggggggcctgacaggccctgacagcatttgaaccgggactaaagatcaaatatgcccgttaccctttttaatcaggactaaagatcatctttagtcccggtttttgttgcaaccgggactattgtggaattagcccgaccgacgaaatatggtttctccaccagtgatcaagtgtcaactgaaacactgttgtctttgactggagagagcacctacagtgcagctaaaaattgttccattccgtatcataaaaattgttttaggtatgtcctaaattaaacttcttcacgtttagaatgagttttataaaaggcgtagtaacgtctataagatcaaattaataagttttattaaatacgtctttatagtatatttattttatattaaaaatattccttttttttaaaaaaacttggttataccttagagaaaaagtttgacttgggataaacttaaaaaaggcttatggagtagtaatatggaatgcaggcagtaccatgcaggcagtaccacagtgaatagattaaaatcgaagttagatcgatcccatcatatgtctagttcaataaaattaacttaaatgtatatttaccaaaaacacttaaaaacaattttaagtatatatatataatgtaagttt

SEQ ID NO: 32442 - DNA, 878 bp, Oryza sativa
cagccatccgtcgcccgccggaagtgcccagaagcaggccacacaacttggctaagcacaaactagttcacgcacttccgttaaaaaaaagaagctagggcttcatcttttctctacttcaataaatacccagccactactcccagccactactcgtctcctcggctggccgcctcaccgctctgtttatttgtgcttattctgcagcaaatagtaccaaaactattacaccaaaaaaaaatggtaatccttcattggtaccaatccaaatggaaattgacccataaaaatttggcacaacattggcactaatccaaacactcgtatttactgtgctaccataccaaaattttggtagtgccaaaacttaccaggttttggcactgccaaaattttggtagggtaccaaaccaaataagccctttatttcttcctatatgttctaagataaatttatttttaagtaaacattatatctcaaagtttatgaaagtagtgtggataatacattaggagtagataaaaagaaaaataattgtattgggatttgataaaatgggaatattttagtctatttggttttgtattggtttgtgtgaaatgggtgaaaaaaacttattttgagacggagagattaattgttactattcgttgggtgataaaatatggtataacaatttctagagttaattatgggttattaagaaagcatgtgaaattaaataagagaaaacaataattaaatgaaaaaaaatcattgcaattaggataagttgagagaggaagtggtggataaatttgattgattattattggttgtgataaaaaaagtagatgtaagctgatatattctataataaatttttaaatcttatagg

SEQ ID NO: 32443 - DNA, 767 bp, Oryza sativa
cgtcttccttctttagtactatcatctcgagtgtgctgatgtgtgcctttttgcccgatttctctgcatcttgtcattcaattaacaggctgttgcatcatctcgcaagttgcaactacatttcggttatagccattatatctaaggcatactctctcatttcggttatagccattatatctaaggcatactctctccgtccccccccccctaaaaaaaagagaatatgtaaccctaggtcgagttttttttggacggatggagtatgatttaatatgctgtgtctactaaattacggaatttttcaccaacaaattcaaaaactagaaatttgttctcatgggcaagtcctttaaacttaagggagtcgtccatggaaattgatttccaagagcggtcgttatttcgcttgcccaaatcatgtgatttttacaaggccttggttgtaggcgggtctaaaacaccattgtaaacaggttcttgaccgccccgcacaaacttttttttaagcagtggtgatctatgaacggtgggagtgattgtatttgcgcaggtggcagtgaagcctaagcccttctctccactaggtgcagttactcattgtgacacatcttcatcactagttactgacttttatatcatcatgtaggtcgaagctatcttgtttcaaattatgatatcatttatgccgacaacactcactctttgtttctttagatctagctctttctctctttggatggaccctacaaattttgaatgcatgt

SEQ ID NO: 32444 - DNA, 610 bp, Oryza sativa
aaaggagtttatgttcctccaaacaagtataacaagaaagcagaaaattaaaaggaaaatgggatggttgacagcacaatgtactatatttttagttgggtaagccctgataagaaggggaaaagtaattcacaattttccgattacccccttctgcaattactagaattgcgatcctgaatcaaattgtatatgcttcagtagaattgaactctaggatcaaagcgtagaatcttagacctattccaaagtggcatgagagtccgtttgatcaccgtggcacctaatttgattcatttatcgtttatcttagcaccataatactgtattcctcttaataacataataccgtggaatacatgcattattgactgattttttttcagcaatgtgcagtacattccatgggttaatggtaagcatgtttattagatcatttacacataatttggttggtaaatatactccctccgtcccaaaataagttcatctttgcctccacttgtttgtcccagaataggttcatttttaagcaatcattacattgtagtttgtgaaagtagggggacaaatgcgttggaagtaagtgggggacaattccatcgggatt

SEQ ID NO: 32445 - DNA, 713 bp, Oryza sativa
tagccacatatctccttgtatagagatgatttcttacataaaaaatagtgtattcatctttttacctatcttcttgttaactcttttagcgctagtggcgaagctatgttatattggaggtgcacatgaacccccaaattcctaatttctcacttaaaaacactagaatgtacagtgttgtactgaaattttctagattctcaatggtagtgcattccccttgttttgatgctagcttcgcccctgtttagcgcttcaaaattttacatatgtgacagtgtatttaatactatggacactaactgaggtagggggttgggattgcccttattccaccttctcgatcttagtcttagacatgatgatgaattgggagagagatctagagagagaattttgatgttgattaatacgagtatgagcttgaatgatttcctcaagacacgatttgttgtctccacagatgcagatccagcagaagcagtggccgaccaaaggaaccgacgaccgctaggcagccgccatgggtttgccggtttgacggagtacagtagaggtgctgtgcaggtgttttcacaacatttttctactcatcacgtgttctttggtcctcccttcattctacaatgaatttctggaactcgaactttataccactatatagtgatttctatattgattcatatgattctcgttattttagtgattttaag

SEQ ID NO: 32446 - DNA, 563 bp, Oryza sativa
tctgttctgttgttcagtgagtggtactcataggtgttatctcctttatgtactctgtttgttcagtgagtggttaccattggtatatcatctcactgggtggtaacaattggttgttaaaatcacgattctagttatagggtgatttctacgattccacccaaccaaacaactaaaatcatatcaagaatcatatctggaagtctcgcaatcctaaaaaaactcaatgaaggggcaagtatgtcccccttgagttggctttaaagaaggggcccccgaaaccttgtgcagggaagtgggtacgaagcccaccgagacctctactgggtgatctaccactgagctacagctcatccacgaatgcttgtaatcccagtcataggatcactagtcgtgtaggatcgtataagattgtaccattctgggagttggcttgtgtggtctttctcaggtttggaaagaattagaacttctacgttgattactttgaagttattatttgatgaattagattttctctttaaatttggaatcctgaaggatgaaaaagtaaaaatggatta

SEQ ID NO: 32447 - DNA, 584 bp, Oryza sativa
ttgcgccataggtctgcctcagggaaggggggatccaccccgttgactactccagccattgcctcccgtcggatctagccattgccaccgccgaccactcccgctaccgccacctctccaactcgatctggccaggggggaccagatccgccatcgggcgaggcggatctacctccgacgtggctggatccgccgcgcttaccacctgaccactgcctcccgcgacctgccgctactgggattactcgtggggagagcgtcccgccaccaccgtccttgcggtcagcaacgtgacgaaggacgaacggtcaaacatatgctaaaaagtcaacggcgtcaaatatttcgggacggagcgagtatcatgttctacaaaatggcttagaggctattgttcgctaagagtactgctgcatgtattggttacttagataccggtcataaaattactgaacacataattattatatctctaaatacatgaattaaaaaattatcgtgaagaaaaactatttgcgtaactgctcctcgactcctcgtttgatagatccgcatatttcgcaaaaaatgaagaaaacatcccg

SEQ ID NO: 32448 - DNA, 522 bp, Oryza sativa
taggggataacttatatctatgaaatataacggatcatgacttaggtattacgtttccttatgtattatggaacggcctaaagtcctggtttgataatattgtaaagtagatttagaaaaccgataccatattggttaaggtttctatcttgtaatcctgacccccatcttatataaggtgggcaggaagccctctagagggcatgatacacaactagatcatcagatctataatacacccggcggattcaaatctccaaacaggagtagggtattacctcttatcgagagggcctgaacctgtctaaatccttgtctccgcatccatccactttcaggtcttgtgcgctaccccttttattattgccgaattcttgtttcgacaatataccatctccatctaattggaaatgccatgtatagtacatatataggatagctatacaatccacttacaaaagaggaaccgtacattctacctgatgacacaaaaagatggcaaatctacttatgcaaggagca

SEQ ID NO: 32449 - DNA, 750 bp, Oryza sativa
tttgtacctttcaggttatattgattttgggtctgttcactttgatgtcatttttaaccatactaatttttctgttaaagttgtcaaaaaaatatctacgtttagtttattgccaaatttggtcaatacataagaaatcctgtcaaaattttagcaatattgccatcttgctaaaattctaaaaattttgatattactaaaacttgttaaggtttattttgactacaatctgaacagaacaggctctttaggcaagctgttagaaaagcaaaagcttctagaaggaaactatacatcggtgtgcatggattctttttaccagcctggatgttgatgggtgagtcaacactcgagacaccacaagcgtgagtgcgtgacatgtactgcatattccaaatggagggatttttacacacaaggacaatagagtttagtacttttggggaagaaatgaccggacatttggagttaacatatgcattttttactattgttaccacaaggacaattttcatgaagtcattatctttgactgagtacacccttttctgggtgtagaggttttaatctattgttttttaagaaaataaagtatttatcttattagtacaagttatgattttattgtaccgtttcatgcaaatagatgatggtgaaattttgtcaaataaatatgacattgtgctatattgtagtactatagtatttatagaaaatttcataatcatcagggcgcgcacgtttttcctg

SEQ ID NO: 32450 - DNA, 515 bp, Oryza sativa
ttccaattatatatgatatgtcatatatatatagaagtgttcttctaaaacaacgggcaaattttataaacacttttcatggcaaattttactacataacactttaagtaatttgatgttggacaataaaagtgtacgatgaagaaaggacacattcaaatatgtaatttattggatagtacaggcaccgtagctattattttatttaggttcaattggagagagagtttttttttcaaaaatacaagaatgacttttgagccacaagtttctaacctgatgcaaagaagaaatttgatatatggcagcaatatacttggggcgatagtagattgcaaattgcataatgtgtagtttgaaaatttggaaaaataagaaaagaataaacaattgattttttctaaacatttgaaaaagtaaacaaattggaaagttgtaaaatgtactcgtggagtcgtggtcgccattctagatttttgaagggggtcgggcggaaaagatggcattgttcggtt

SEQ ID NO: 32451 - DNA, 820 bp, Oryza sativa
aggcaggtctacatttcacaagctgaaaactacagtggccagaaatttccccacacacatgttctagaataattctctttgtttgtacagatttgcacatacaaaccctgctaccaatgtgcttgaactgctgatataccacattttttgaacaacacttggttggagcagtgcctctacattgggatgattgaggctgtttcacttccaaacaaaaagaagaaacaagcagctagcttcaatggaactgtccaattctgctgtcctctcctctgcacaactcacataaagaaaaaaggttggaattagtattatatgcatgttgggactagggttgccacctgcttaatttcaggtttgggtccttcaccagcatcatcagtcccctaattattcagcactcatactacttgacagtttccttaatcattcttctgcttgacaactagtaccagatgctatttattaatttaccatgaggtttcacgggtaactgaaacaaatgaaaagctagtgattgttgccacccaatagcatgggacactgtggcaatattcacattcaccaaatcccaaacaggccaagcaaatagtgccatactgccatcaccttgttttaaacaagaaatgggtgaagaataaagggtagcaatgcattgctttcatcaccccactatcttttttgatcaaattggagctcgatttgcctgccctttctggaggtccacttaggaattgcccatagaaagaaaagaccagatcatagggacaattcagttgaggaataaagagatgcaagtattaaaaagacaggagtgatt

SEQ ID NO: 32452 - DNA, 740 bp, Oryza sativa
agatttggcttgaaaaatactttcataaaaatatacatatataactttttaataaatatttttatagaaacaataagtcaaaattctgttgtgtccataacgactttctttacgagtacgaagggagtacaaataaatgaatcaataattataaagttgatataaaaaaattgacaagaaatttatacatggaaagttttttaaaaaatcacaccgtttattagcgcgggagtacctttgtgctgcttcttggaacttggaaggaaacttgagttccaccctttgggagttggggtccaaatgaatgaccttggacggctgaatttcggtggatagaagtcaatccggtccattcttgtggatggattccaaattcaagttcagagtaagaatgagcaggctttgtgtgaacactataaactatttttgcggctgttttgacccccccaaaaataaatccaaacagatcatattcattcatttcattcatcggccatgattcactcatgcagcagttgtgctgttgcttcgaggagcttgctctacttgcgttagcactgtacgggtgactgccgggtgggccccagttctgcggcggttaggtatgggcccaccgtcagtgtcatgtgtgtaccacgtcggggggtgcgtttaaatatggagggaatggacagcattgggggggctctcttggctgcttcaaagttcgaagcactgcacttgtggcgttgaaagttccc

SEQ ID NO: 32453 - DNA, 572 bp, Oryza sativa
agtgtatgcactgtgcaacggctacaaaaggtactgcagtgaccattataactgcaatggcttacaaaaccgaaaacacgcatgtaccaagcgctaagtgtcacaggtaagctatcaatatagtaacaaacaaagcaccataaatgcacaatatcaaaaagaagcagaaaatagtgcaaaatagtaatcaataaaccgaaaaggaaatattgaaacatagtacaagacagatgggaataccttatacgaaacagcacccagtgagttgacaacgcggcagaagcaacgtaaccaagaaaatgccacgcaagacagatacccacaaaagacaaagacctcgaccaagaaatagaagaaagtctaggaaaggatagtcaccaataaagttgaccagagctgcacaatagaaagagatcattagcaaacataaacctgatacagaaggcacaacaaatacatgagatatttctatatcgtttaaagcaaatatagtagaaataacctaacctgcctgattgaaccagcagccccaacattcgctggcaaaatcaatcaagaacccttgaagcatc

SEQ ID NO: 32454 - DNA, 733 bp, Oryza sativa
accgcccaagggaaatttaatcatccagccctagtatcattgttctgaatctctctacacctgtaaagtgatcaaggaaattaagaaacacggtgcactgatgcatggttcatcaactaactctcagggaccagcgatgatgcagacgtaatatactccatcatgcatgtgatactagcaattctctcttccattcactctctcgtctagtacatttgagttaatcagtcagtttggaatcactttacaacgaagttaatcacagacaaattcaacatgcttaaggacggacaaagatgattatcaaagacattaaactactactctttgtcatctgaggatactgtagttttatactgcaattgcagcaacattatactattaacgagacctgttttgtcattgcgagatccactccaaaattttcaaatgctcgtggttttgcaaacaaattgtaaccgaagacagacatgggtgtcagagctgtcgccgttggaaggtgacatgatcgcagccgtccactccatcggccgctggctaaccaaccaaccccgtccgccgacatgctgctgtccgcctcctgccgacttgttcttgtcttcctcctatgctcttaactctgaattttgttaagagatagaaggacctgtagtaattatttatcaataaaattttatcaaatttgtcatatcaaacatctcgccacatatttcccacaatcagagccctttga

SEQ ID NO: 32455 - DNA, 519 bp, Oryza sativa
gctgcactacactgtagcgctggcagttgcatttgcagccaaccaagtcaaaaaaaaaaaaaaagatggcatccgcaccttcgaatttctcactttctcctagcaaaacgcacaagggtccgtttgggatagtttctaactgttgcagtttttttcaatcaaaagatcttccaaataatttattttttttagattttaagaagatatagttatagaatctagaaaataaactagaatccagaagctggaaaacccagcttttttttagtttctgagaaactggctaccaccagttacttttcagaattttaagctccctaaacagtcctgaaagccggtgcttctcagattctccagagcctgtttagcatagaattttcggctcaattgtcatctgcaggctagaaataagaacatgtgttcgctgtataccaaaaatcatcgaggcaattaatctcgcgtgaaaaacatatataggaccgatcgatatcggattaattagttcatcatattacttct

SEQ ID NO: 32456 - DNA, 647 bp, Oryza sativa
tccagcaccactgttctaccttccctaattaaggtacttcgctagtacttcctctaatcttccctttgcctctggagtcttgaccaaaatcaaagggcacaaattaaatgtgcaagcacagtaagcagtggattagtatttattagtacgtagtcgccgtagtagtagttaattctagctccatgaataatccatttacatgtatttatagtttgttctatcctcctcatctttagagaattagcagtgcactatccactcccaatcattgggaaaagtttgacacaataaacagagatgcatatatgtaccttggtattctgtgccaagtatatactccaccattcatattagcaccacttgacatgactagcaacaatattgaacatcagttaccatatactcctacatagtactgccttcattttacaaagatttcatctctgcctatcttttttttatggaggtagtagtatattttgccatttgccaattcttcttttctctctctctctctcttttttttgtgattgctagctccattggttgtgtgattgctttagttttttagttattagctactaatacaatcacatattaatcatcttgttgatttttttctaaaattttataaccatttagatgac

SEQ ID NO: 32457 - DNA, 614 bp, Oryza sativa
gattctttttttttttgaagacacatgacaaagattgctccttgattattcgacttgagtcgtaacatggctaatcagctactgtactagctagagatgtactcctcgatgcttgtccagtttcatctctagaattatattttaggggacaaagagaggatatgctcgtagattataatattattggtagaaagcaactgaagcattttatagtgattggctactctagtatagctagtagtaattgtatgtcttgtgtcgaagaaatgcgtggtcgctgttatggtgtgacatggatcgatcgatcgatcgatcggatcaacaccagcagctggcgattggcgagcatggcggcttcatgaccccggcgtttggatttatcaacaacacatggttaatttctaaagagatattgttcatttactcttaagctaaatctataagatgtagttaaaatttaaattttaaaactgatttgatggttttttaattatagttttatttcttttaataagtgttatagcttataatcgagtgcaggcgaagcgattgggctagcacggcattctcagagcgagtacaatagcatgatacttcctccgtttcaaaatgtt

SEQ ID NO: 32458 - DNA, 598 bp, Oryza sativa
gcatcggcttgcttgtgtgctgaagctttgtcccgatttgttgctggggttcgtcgatctgggagggaagctacgagacgactacgttcaccttcggctcgcaagtgctccacctcctctgcctccgcgctgcttccagttagtacctcctgctcctactcgttctttcttgctaagtgtagaggtatagttatctttgatgtggaaatggttccagaaagctgctctattatgcccaattgtgatgcaaaatatggttaatttctacttagctagtctgttctgggtgaaattttcttggctggaagcctgaaaccactgctaagatagcctagtttagaggcaaaaaaaaaaaaagcatagttggttgagcattatactgctcagtatggttgtcattttggtgaagaagtctatgtagaacagcgctgttctattcaaccggcttcatttacagaatcagctgttactggatactaaattagtatctccactcctttttagcttgatgatcatgaattaaggtcatagcatagcatctaccatctatagattactccatcatctttgaatttggtgttacatatgagttcaactg

SEQ ID NO: 32459 - DNA, 1429 bp, Oryza sativa
  unsure (1)..(1429): unsure at all n locations
gggagtaaagtcagttgtaagcacatgtggagtagagaagagaagaaagaaggaaagcgatctacagatttatagccaactgcacaacaaactccaatacgttgtgtgtatgagagacgtgaccatatttttttttgatcaagggctgcgcccctattccgttactagaaatgagcagagctaaaaggttcgaggcgtgaccatatattaatggtttatagataatataaacaaactattaaattagatatagataatttaaagtcagtagttgactatactattaaacttgctcttacttatgttagcagatttgcagataccaaccgcgctagctacatgtatagcccgctgttcccgggatcgattcaatcaatcctgcgaagtcaaagcggagcacatgggtagcaccaaggagatgcagctgctaaccacatctattactcttgtttgaaaaaaaaagaggagaaaaaaattaaacccatgtgattgccgatgctcttattaacttctaacttgacaatgcccaaaggcgacccaaggtcctttttatttttggtgaactctttcagcctttataaataaaccacacatgtggcttgtgaagactgacaacacacttgaccaaacaccttcctactagcaagtgagcactacataagaaccctgtgaaaaatcatgcgtcccaaacgccgtggaatcanattgaatattccatttgccagataaagttcagctccctgaaaaatcaatcaaaatgaaaaaaaatacgaagaagaaaaattcgaagtgcagacagaaacagccaagaattatcccaacttcctactactacggagtactaccggtggaaggtgtggggtccacgacgcgccccgcgccatcaacggaacggtcgcgaaaccccttcccactatcctccgccgtccgatcgagatcctacggcccgcagcgccgcccggagggaatctcggggggagcggagtcgagtcgtgtcgtgtccccggatcgcacttgcccctgtgatgactctcacctgacccgcgatcctccggtgggcccactgacatgtgggccccactttttccttggtagggcccacccccgcgtcgccagtcgccactgccattcaaagctcgcacccgctcgcgagagaagaagagagaaaagagaggagagagagaggcaaacccgcaccaaaatctctctctctcccccagatttgcgccacattttcctcgccgaatcagcctcgccgccgtgggtgcagctgccgcgggatcccggcgagcgagcgccatttgagccggctgccggcgggtttgcgttttggaagctccttggtaagacctctagctccctctcctgttttttctgtgcgttttttcttttttagtttctctctctctttttcttttgtgtgtgtttt

SEQ ID NO: 32460 - DNA, 962 bp, Oryza sativa
ttaacttgaagtttagtatgcttatcttgctgaaagtatcatgtaataatttgagattggctcatcctcttggctttgtttcattctttcctgcagttcttgctgctattctggtcctcctggagatacatgaggtaccatttatttgctcagagaaatgacatcattggggagttaatggtagcctcgcattcccaggacgaaagatggtcggcgtgacagttggtttgtgtcctctgacaacctttcaggtaacacaacctctatcagtatggccagcaatgatatagccttggagttcgagagattatctttacagcaacattgtctgaaactgattgagaccaacttcaaatgaacagaaacctaatggacctggacctggacctgggcctgacttgcttggagtttgtacaatcagcatcagtgtgcatgcatccctgattgctttatcatctctggaaacctgaaatgatcaactacttacctaccttataatcttgttgttcagtgttcttcattctgcaacatgtttggaaactggaacgacaccagatcagagaagagcagagaggatccgagagctcaatgattgggagctcaaggaggagcatgggataggactggagcaatcaacgatcaagagatgactacactttgagctgcctctaccttgactggcctgggagctaaactagctggagccgatcgatcttgccggccggcatcccggctagcctgcctgtgggtgtggctgtggctgtacctgccggccttgccatcttgtccctcccagctccggcgacacgcctgaacctccattgacgacgacgaatcgtacgttgctgcatgcctgtgatgattggtttctctccttcatttctgaaggctccacttcactttgaggccggccgggctcaagctaatttcgccgtacaccgtcaactcttcgttgcaacggc

SEQ ID NO: 32461 - DNA, 564 bp, Oryza sativa
tcttagatgggcgatagcggcgtccttgatgtcgtgacctccatgggggcatcgtttttggagtcttgcctttgtggtgttgttgtaggccgggcggcgatcagccatgcttaggggggtcattttggtgctcagttccattttcagtggtttgtgcttgtgtggttagcgtgtggttcttggaggtgccttgtgcacgtccgtacttgacaacttctgtcgtgtttttctttgtaactttactcctccttaatatactcggatggcctccttcggcctttcccggtgaaaaaaagataagtcaggtgagatcttgttcatcctttttatcaattcattacccctgaggccctgaattaacaatcagtgttgtccatttgtcattgtaatttggtttcttgaaacctttgaagtctgaactcccttttgcatttgcaggagttccttgctggtatccgcatgactttggacttatttcaaactgtgggaactgaaaacaaatatagactccaggcctctcggaagtgatgatgagagctgctctcctacacaccatgaaaatta

SEQ ID NO: 32462 - DNA, 518 bp, Oryza sativa
ttcatgctgctcatcatctgttcaagctcgtgcctatgttcagccgacaatttgtctagtgtgactagaataatatttccttcgtgaacttcagacccagctggatttggagcttgttttgacgatctgttgacttcaaagcttgcttgtcccctgacaagtttatcggatcccgctgggcgtgccaaaagcgtgttgatgcaaaaacacgaagcctggaagatctgcttaacttcagtgcaggtccaaaaatcttgccttttaagttcgtgagcgtgccacttgatttgatcctgcaatcaataagaaataaagacaaataaaccgcggctaaatccataaatgatagctgatcggctaattgccgatgacatatcatttatctctgagccaatgtcatatttgaatcgattggcagaggtaaataagtaagaaaggactaaatctattcgatcggctgtagatattaacaatatataatccttatgtcgatacatacttaaatcaagtgattggga

SEQ ID NO: 32463 - DNA, 554 bp, Oryza sativa
gcactaggctgctgtcgcttgctcactcatccgaccaacatcacacagctcccaccacatgtcgtgagaatttcaaacctcatgccttccttttccccaccgctgcacatcagtccttcctctatcagtctatcctcggtcaccatccccattcccacatggtgcaaggcatgagggcaggcagtctggcaatgggcgtggaagaggggaatagaggaacccacagcagaatgggctgcagccttgccctagctcggcaggcagccaaccttttgctgaaccagcagcaatgaaggtgaggtcaatgattcataggccgaagttcattttctccgcattagatgttttccaggcctttcagttaactaatctgaatactgctattgtctcggctgtaaccgatctaaattttttggcatgcgacacaggaaaagaattaacacctgtctttgtgctagatgtactaaaaggatgtagttcatgtgttatgtttaccatttcctatgtagattttgttgaaggattaagaaaataaaaattatcatatttgatgg

SEQ ID NO: 32464 - DNA, 781 bp, Oryza sativa
cagagaaagaaagagagagagagagagagttggagtagtatgtgagagctccaatgaatgtgtcacagatgtccatcagagtatcagacccaagaacaaagacaaaaggattaaaaaaaatagagtagccatagtaaaaagaggatccaatgcaatgcaatgtgatgtgaagttttacccgggaagtttttacataggatccttcttgtgcttccaagttttttccacccgtgtttttgggcgtcgcttcttgaaaggatacattttatctgtagcggtttttcactggttgcttcttaaagtatttgtcgagtagtagcagtattcatttgtgtgattaattagtggtgagtaaacagtggtggtgagcagctctctctctctctctctctctctctgctgtggcttttgcatcgcatgcatgcgtgctttgcctggctggttgcctctgctctgctctccctccatttcgaatttcaaattcacagccacctccgctcccccaacgcctagtttttttttcctctcctcttccctgcaaagccaaagccctcgcacgcgtgcctgcctcttctgtgtctctctgcgacagccatcgccaccgacttcttcgtcttcctcgttggtctcctctctctctctgtgttcttggtgttccctgtgctgttcttgggcaagaagaagaaggagagcagatgggagggtcagggaagtgggtcaagtcgctcatagggctcaagaagcctgacagggaggattgcaaggtgagagatgggtgttc

SEQ ID NO: 32465 - DNA, 2743 bp, Oryza sativa
atcgattaacacatatatgatgtagcttttgcttcttcctccctccgttccaaaatatttgacaccgttgactttttaagtacgtgtttgaccattcgtcttatccaaaaaatttaagtaattatttattttttcatatcatttaatttattgttaaatatactttcatgtacacgtatagttttacatatttcataaatttttttaataagacgaatgatcaaacatgtgctaaaatatcaacggtgtcaaatattttgaaacggagggattaattaatttcctagtcttgccacaggcacaaattacctgcacgtgctgatgtcgttaattcgtacgtccatctatatatcgatcgagaagcaagcatcatcgccagcgagatgatcgagctagctagctcatggctggccttgcccaatgctcatattgctggaattaatgcgccaccatcagccgaaattatgatccagatcgattgatcaatcaacggacaactacaagatagctagggtgttacgctgtttcgatctcttcatgtactatgttgtccatctgcctatttatatactctctccgtcccaaaatatttgacaccgttgacttttttaaaaatatttgaccgttcgtcttattcaaaaaatttaagtaattatttattcttttttatcatttgatttattgttaaatatactttcatgtatacatatagttttgcacatttcataaaagtttttgaataagacgaacgtgtcaaacatatttaaaaaagtcaacggtgtcaaacatttagagaaggagggagtatatcaacctgattgaccatcgatcgatccatatcgaaattaaggatgaacaggtcagatagatctagattgtactattcatttccataatgtacgatgctattgactttttacacaacatttaatcatttgtcttatttatttttttagaattatacagtacaacgtagatactcacagcacgcgcactcacccctatgaacgcatgcatataaacagtataagttaagtttatattttatagcatgataaaacaaatcacaataaaattaatgatatttatatatttttaaaatttatatttatatattttaaaattgagggggtatatagctagctagcgacataacccatcgatccattcgctgcctctaattaactaacgaccggtggtcatgcgttctggcgacttatgtacgcagttacgcacggcccggccgtcgttctggaagatagctatatgatcgtacaacattatggaacaggtcaattcttccattttgacaaggcctatcccggctcagtccacggtaatacacccacttgattaatcacccagtaattaactaatcattaacaaagccacaactacacgaatcaaagatcaacttaatttgacctaaattagaactaataatcatttagatcgaggattaagaccctcatatgaactctctttgctataagaacctatacatgtcacagtgactttaaattaatcacctaatctcaatcctcagatcgatggacgagttcagtactgtgctgttggccgttggttccgttgcggcgtacgtacgaccgacggtcagagttcagtacggtgtcatggccgttgttggttggtttgcagaaaaaaatcagaatatatatatatacgtgcaaaatacggagtgagtacgagcgcccgtagatgcagcagagaggtacagcatctagggtcgaatcgaatcaacccgtcaaccacccggaccccgaccaaccacctaaccgaccgaccgactcacttgacttggctctactactcaccatttctctcgttagattctctcactgacaggtgggccccaccgtctggctgtacagagaggctcttgccacctgtacacatagcgccgcgcctacagctcacggaccccaaatacaccattaacaccatggccaccggtgcttcgttggattggaggaatgaatggatccggtggccaaagtgccaaactaccaagtcaccaactgtgcataagcttgtgttttgtgttcatgctctaacctggcaagatctcatgcccaaaccatcaaattttatcaaaaaaaaagggcaaataatagttgtagtaatagtgatggtaatagtactgacctgacggcgacgacttgagcagaatcagcctgaggagataccccgtataagtggccgtatccccaagatcacacgcgggagagggagaggttttaatcatgccgtgcatgcgccatgtgattcgcgcgccaaaaaatacacacgcaataatgacgtgagaaacaaatcaaattatatttactccatttctttaaacgcggggacgaaaaagaaaagaaagaaagaaaaacagaaaaaaaaaacgtgcatgtgcgattggttcccgccgcgtttgggtttggtgatgtggcgcgtggccaccgtcggtgacttgccactgggccccacccgcgcgggcgcccaccgtgtgggtcactgacgagtgggccccaccccccgcggtatattcgggatcccgtgtggccgagctatattagaggcgcgcgcgtccgcaaggagaggcggaggccgcggcgaagccagcccgagtcgtcgtcgtcgtcgttcgtccacgcgacaccgcgtcgtcggcggcggcgagaggagaaagctcaacgaaggtgatcgatcgatcgattgtttgcgaggtggaggaggg

SEQ ID NO: 32466 - DNA, 681 bp, Oryza sativa
actttgatgtactgccttgcaaagttaaaattctgaattccgtcaactccatttttctcttgcattgcaaagatttgttggactgactagggatggatgaaagtttaagtggttggaaagcgtttgcactgaggagcttggctctcgcactcgcatattaggctttctgcaaattgataaggtaaatgaatataaagtttctatagaagtggtgcagtgggaacacaatgtgaacattcagaattgcatatgcactgaaccttcatggctcgcactgatccaggagccatgtgcaatttgcattgggtgccgtgcaccttcatggttgtctgtgggtttcatcaaaccggttgtgtgtgtgtgtgtatgtcctttttgctgtgctgagcagtctgttgtcatggtccacacgcagagacatgaatggcctgttgtcgttggtgcctctttgcaagtgtgttagacaaagccttcgtagatagatatctgctctgagaccatggtactaaatattggtggtagtgtcacactattgtggccacaattgcaggtggggaatgacgtggacgatgtgaggtctaaacccgcaaacgctaaccacgcccttgtcgttatcaaccgtggcacacccgactgacctattcacgaataatgtttcctgcaatgcaaacggagaacaca

SEQ ID NO: 32467 - DNA, 662 bp, Oryza sativa
tttaccacttatcggaatttgctacatatcggctattacttggctagttgttgtctccgtagcaaattagaaattcacgtactcagtgagttatttatcagagatagtcattgatgataagtatgaagcgctcgattgatttatcttgccttttttatggagtagtgattgtagtgtgataacacctttttgagatataaaaaaattgatgtgccttttaccacttgttgaaatttgctatatatcagctaattagttgttgttcgtacaccaaattagctaggaattattgctctcggagagttaccgatcaatattgatgataattaagtatgagatgtcaggtgtgtttgattgatttatcttacttaccgtttttatggagtagtgatcgtatactacgatgatttctcatcacctttcagataaaatctagtaagtctttttaaagagaaaaaagaacttgtggtgtgtgatcaaatggcgtctaaacattcaagacaaatccttttctacacaataagttacatatgctattggttcccgccaacatttcaatactagattatttgtctctaatttgtgaaaaggaatctactgaaaaagaaaataacaggtgagagagcacatgtattattttagtggagctaattcatttcata

SEQ ID NO: 32468 - DNA, 725 bp, Oryza sativa
agtttaggctgtaattattttgaacctcgctagactctttacccctctaattatggaagccgcctttggtgagattctagacaagttatagagtacagttccagataagatgtactccagagtacatgaaatgcaagctatgtggaacacaaacccagccaaatgcaactgcattttggattctagattgccttcatatcaaaattttcttgtcagtgcacgctatatcaagaacatgcacataattaaacaaagtgagcctttattaaaagaaattgtcagaacgaaaacagaaacaagatttctgcccccatcaaagtggggagagagaagaccactttaggtgctcttgcattttttaaacattcttgaactaaattggtttatgctcttgtaggttttctttttgtcactctcatacaaatgtacctacatttgtgtgtaggctatatgcactaactcatgggccctttgttttgctgttttactgggtgcaggtgtaaagggaaacctgaagagacctttgaaatttcatgcgcaatatcctcacaagcgggggggtgaaacaatcagcaggagcgataatcctatggacttgcatgagccattgcaactggatattggatttggtttgggaactaaagacgaaactgaagacagcgataatcctatggacttggaatagccatgcatgcccctttggagtgaaactaaatgggcataaa

SEQ ID NO: 32469 - DNA, 734 bp, Oryza sativa
gaccattcgttttatttgaaaaattagtgcaaatataaaaaaagataagtcatatgtaaagtactttggataataaagcaaatgacaaacaaaataaataataattccaattttttttgaataagacgaatgatcaaacattgacaaacaaaaactcaaaaagacaagtaatatgggacggaggtagtacccaagaagatgccacaacctgcaagcaacatttgcatatgcatcaatgcaggtgggcagctatatatgtggcctagtgcagtacacactgctggtattgtccctaggtgtgtgcatatatgcaacagctacagtttacatagcttgtggaccaaaatgcaacaagaaaagaaaaaaagacaagggaagaaaaataaatcatagcatataaaactagcaagaagccagttatcttacaagctataggactgaggcctatagatgtgcaaaattgaagttgcatacatatatacatgtgtgcaaaagtcttttgcttcattgtgcagtgtggattggctggggagtttgaatattatggaagattctgttccacatatgacaagttgctttaatatgatatgttttgtagtagacattttatgagtacatcacatgacctttttccatctccacatgtggcccactgcatttgtggccaggtctagatctatctttgactgccaaaaatatgcattaaataatgagagaaatttaaaaaatgatgg

SEQ ID NO: 32470 - DNA, 752 bp, Oryza sativa
catgatcaaggtcttctttcattaggtaaagccaaaatggagttactatatacttcctccgtcccaaaatgcaagcatttttaaggttggcacgggtattaagaaagtaggtgagaatgattgaagaaggtgtgtgattggttgaaaagagaaagtatgtgaaaaagaatggttgtgaatggttgagaggagaaggtagttagaaaaatagcttcattttgggacaaagtactgtgctagatatagctatattttgggacggaggtagtactaatgaagcaatcagtgaccgtccatggtgattgtcggaatcagatcctgagttcatgaaactattttggtctgatgcaaagttgcaaactgcatcctttttttgcgtgccattggacacagagcaaaagtattattgcagtgacaatattacatggtttgctttgttcctccactggagatgagctgaatgtgcgctgagtttctgtagtggaatctctgccggcatcctctcacattttgttcatgggcatggcaagaacaagttggctggtaatagtgcctattttctattcgaagtagtgctctcgttgctgtttgtttttcgaacaagttgctctaaattgtgacgcaaattttcgttcgatttaacttcccgtcttgttaagcttggccacatgatctgtcactgtatggaatgatgcaaagctgctgctgatgctgtatttctatcggcgtgtttgcacattgggctgtttgac

SEQ ID NO: 32471 - DNA, 1182 bp, Oryza sativa
aattaggcttatcaatatttggcaattttaatagtgtttagtgtctatttggtttgaagccaaattttggcatgcctaagaaaataggccttttcaatagtgaacttagtctattttggcttcaatccaaacacaactttgccttaccaaaattagtcatgccaaaatttggcactgataaaatttagtaatacctatttaaaccacaaaccaaaccaaccctatgtctcacgagccatgatccaactctgcctgctggtacacagctgccttgtcctggattttttttaaatatacccttctttttacaaatatgtttacaaagaatggcaaaaatataatatcgttacaaagcaaggaatatacacgtttaaaaagaattagcaaaaatatactatcgttacaaagcaggaatgcgaactcgcggcggacgtgtgagttctcatattgtgatgcgaagtcgtgaccttgtttgtatatccacatacgcgagttcacatctccgctgtgcgacaatgatatacttctaccagtcccttcaaaacgtgtatattttaaaaccggtgataaaaagggtatatttcccaatttgttctcgatgtcctaagcttttatatcagtgttgggtgctaaccctaagactgggctgcttgccaaagaaacatcaccatatacggtggcttctaaagtgtttggactgagtgggcatatgggctacttcctcttgggcccaacaaagcacgcaaagccaactccagttggcacgggttgcatgggccgcatttcatataggccctgtgataataaaaaattggagagagagaaacatgtaatctagttttacgctttcctactaggcttacgtaacatgttgatataatacacacaatacgcttcaccactcctgtgatatcttccagggccattcactttaatgatattttcaaccttatcaaattttagtaaagttgctaaaaaagtggctatatttagttaactatataagaaatcttgttaaaattttgataatgctaaattttagtaagatttttttttttcgcatcaaagtgaacatgtcccggttccatctcccgcagcaaaaccccactccctccactccggcggtttcatcctcctgtcctcctggtaagcctcgaaaaaattcccaactttgcactagca

SEQ ID NO: 32472 - DNA, 768 bp, Oryza sativa
ccagcttcccgtgagtagcaacgcctcggagtcggagtcagagtcggaggcgaccgcctttggtcgccggcggcggcggcggcggcgccttcttccatccggcgcaggaagctctcgcgcagcagcatgtcctgctcgccgccgccgtcgtcgtcccggcggtgtcgccggaaaaagaagtagtgcatcattgcaacggccatggatggatggatggatggctagctaggcgcacgccggcggcgagcggatggccggccggggtcgacgacgacgaacgcggcgggccgagcagcaacaggagaaggagagatgagatcgatcgcctaacgcggggcagagcaaaaaccagcagcggtatgtgtatatgtgatgtgatgatcgcgtacgtggtcgcgctcgtgtcggattggaatattggacccgataacgagctcggtttcgggaggacacgaatcgaaggagtccaggttgttttatgccactgccacgtactccgtatgtggtgaccacgatttgaccgctggctaactgattcatgtaccatgttgaatcacacgggaaatgctccgaacacatgttttgatgtatcacatgaaaaaccaagaaatttagagctcatttggaacacaggattttgaaaacgcagtaacattaaggactccagcgaaacatcatatttacaaacgaaaaatgatttgtaaataaaacctttatatacgtgttcttaacgatctaaaagcaaagactgaaaaataaaccgcgatg

SEQ ID NO: 32473 - DNA, 608 bp, Oryza sativa
atgataatggtgtgaacgaatgaatcaaacattagaaagttgataagtcgatctaaagaagtttagtaagaaataccgatgaggaaaaagtttttataaatatatgtgccgtttagtaatttaagagaagtgtcaatgataatttacactctactcataatttataatctgttagctagaactaggcataaacacacttgtaggccggaccgctgcaccatggaccaagtatataaggtattgtcgtctctattatgtgatatcccataatctaatgggagaaataaccgaagtgtgtctctgtcaatctccttataaaaatgttagtttcacaagtgttctctatttcaaacgtgtttccccaccatcaataatcgctatggggtcagtccaataatttcaacaagatagaattagctttgatctgcaaagataaagaaaaaaaaaagacccgaagaaaagctcattatccttacccaaccctccctgaactaaaataatcaaagataagatcacagaacaccaactttatctaaattttcttttgatctcttcttctcccatcactttatatctccaaccatttgagttgttaattaatcaacaca

SEQ ID NO: 32474 - DNA, 825 bp, Oryza sativa
cgagcaaggcgggtgttgaaccaaggacctctcccccgacgagcatggcgcatgccgttgagccaaagacatctttttgtttagtcatgcccgatgtatagtagttacgttgtaactataatacaatgtagttaggttcgaaagttttttactcaaaaaacatggttcgaaagttttttactcaaaaaacatgctaaagacttttagacagacccataaatacaaatatttatactctaacagttgagtcaagttggtcaagctgagtcaagtcagagaaaatagaaaaaaagagaaagccaaccaaagcacaaccagagttctccgcggggtggagcgctaagaaagaaaaaagcgttatcgctatacgaaatgaagcagcggctagcacgctaagataaaccacttgaatatatagttttacgatagacagatcaaatacgcgtagttatgtgaaatttattctaaaaattattatcaataaattattcttttagtctctaataatcgttaacttgtattactccgttaaaaaagatacaaccttagccacgaagctaatcatatttatgtccagattcgtagttatgattgagttttttttttttaacggaggggtacgtaattaacttgcatgggcatgcccggaatgttccgcccctctctcaaaattcaaaatactacacgtactccacgtatatactacggggaaagaagagtcacgcacacgtgacaggtctcagctagtcaagcgagcacgaagccaaccgccacagttgggagacggcgccaacatctcgcgagacgatccaacggtaaccacac

SEQ ID NO: 32475 - DNA, 2738 bp, Oryza sativa
cttttcacaaatactgaatgataaaattcattgaagaaaaaaacgagcgaatggttctcgtgcgaaaaacgcattttcttgggttagaaagaaagcaaatgctgcgggagaaagagagatgattatttgaagcgccagtgagtaggatctatcacccatcagactaaaagacaccagtattaagctcgccatagccccataaccctgcagaataaaatatttaaatgtattagaaggtgtaagtatgtgcgaatatgtatgaaggtaattgagataactggatttatatttagggtagtgattttcaatcctcatatgacccagaatttggcactaataattactccctccttattatattatacatcgtttgaattagatttgatcaagttaatagaaaaaatagcaacatttgtgacatgaaattagtttcattaattttaacattgaatatattttaaaattaaaatattacctttttttttgctacaaacttaaacaaacttaaaaaatttgaccaactaaaaactcagcagagggcgtaattaatatactagctgctcgtatcggttaagctaattaagttacccggacgaagcggcagccagccttgaccgagaagcaacgccggtcgttggctcgcgtttggtcgccgccggcggcggcggcgtcgtcgcttcttccatccggcggaggagtctctcgagcagcgccgcctcgctgtcgtcgatcgtcaccgtcgtccgtcgaggagcggcggcggcatcgtattgccggggagcatcagaacgggcatggttggccgccggccgggaaggggcgccgatgagcggcgcgcgctgcggcggatggccggacggcgccggtcggtctggtcgtcgttgacgacgacgacgacgatgaacgctgcgcggcgcggcgcggcgcgtgcgtacgtgagcgatgtgagatcgatcgcctaaagcgcgcgtaggaagcaaaccaaacaagttatatatgaccgatcgcgtagtagtgcgtctcccgtgtcgggtcggattcaaattaagggtttatttggtttggagccaatttttgtcctaccaaaattttgttactgccaaaacattggtaaattttgacactaccaaattgggtggtgtttagtttgaactattgcaaataaaatttggtagcaaaccaaacatgcaattgctactattgaaatcaaacatgcaattgctactattgaagttaccaaaattttagtacggtaataaattggtatcaaaccaaaccagccctaaacttttgtgtttttcgtgaagattttgttactcgagttcgaaccaaaagacgtaccccacccccgttcgatctatgccacgtgcacgtcgagcactatctgaccgtccacgggataatcaatgccacgggagtagaggtacgagcgcacgcgtgcccgagaggccattgggagctaccaaattataatccctacatatcgaaaacggaacgatataataataaatgattaattgattaattatcctctgcctttgagatcaacggcaaactttaccgttgctttcctgtaggccacccatcttgagatcaacagctgcaacagcttggcctcaccagttactaattagcacctacttaatcaataaaaccatgcgtttctctgcggaaaaagaatcaacaaacaaaataagcggtggcagggtgcgcataacaaaagagatcgaattgctttaagtgaacatgggttcttttactgaataatatgacaagagctttggtaaatcactttttatagtatgaaagaagctagtaaaaacataaaatatagatttaaaaaggataacaacgaaaggtacaatatggtgacatatcaaataaagagaatagtcttgcatcataaggtggtaattaagattaattggctgctccatcaacgaaggatttttttttcttctcatgttatttctaaatgaatggagattggatgttcattcatattgttggcgtcaaaatgcgagagggaatgtattgtgtattcctcgtgctctgtcatcacagattttgtatgttgatttactagcagacatgcccatgcgttgcaacgggtgaaaaatcgtaatgatatatttttcatgcataaccatgtcgatgacaatcagaaaatcagaaaattgaaacatgttaaatgtaatagcccaacctcgatgatggttatggcaaccttacgatgtttgctttacctaaaataattgaattattcatataacaacatgcatataatctaaaatattcttttaatctcattcttacaaccaatcaaatcctacactgcctcgtatggtcaagtctacacaaaatagagtcactatgcactcttctctaaataacaattacaatatgtttattttctaagattatttccatataacatgttatcaagaataataatagttatacttcaaaaaatagtatgataattatctacaaagatgtgcaaggtctccactatagaagaatagatgacgagtcctggagatggaaaaaaagtggttgcaacctatccaaccagctgtccataaatttagcatttttttctaacggttcttttcctcgtatgcttgtttttttttgcttttttctcatgtgtttttttggactattgaacttttttttctagcgtgtggtcttttgcgcttttttctgacacttttttctcacgtgtttttttaaac

SEQ ID NO: 32476 - DNA, 722 bp, Oryza sativa
acccatgaattcagaaccccagagtccgcacatcctcaaatacaaagcacttccctagttagatgtaggttagacttcccgttcgagaaactctaccttctacctgccctcaatttatgcacgattaatgaatgccacctgggtggaagcgagaggtggaaatggaaggtcttagttcggaggtgggatctctacctgatagttgcattgccattcatgatgatcccctggcattcgtccattcagccattcaccattcacccattcaactggaattttggttgaatgccggaattgtgtccacaaattgtggatggatagttggttggctggctggatggctggctggatggctggctggatggatggtgaatggctggcggcggttcggttgctttgaagcatttgttgctatctaaattccatttaaggtcgtaccttatcgcccagcatcatcttattctctatttgtattccctccatctttcagatacggatgtagccttggatgtgcccgtgcccaatgaagaggaagagcgcaacatgaaacgtaagtacaaaagtaccggacacccacccagatcccaatagaatccgccaaatcctgcgggaaattgtaatcccattcaccagctcctacatttaattaacaagagaactattgtatttatctaacacctggattatctccacctttcatttgatccctatttatagattac

SEQ ID NO: 32477 - DNA, 672 bp, Oryza sativa
tacggtcaattcgctcggcgtggcggccacgtggatttatttggatgcggttaccgcgatggtcgtctcactgacaggtggggccctccgccgccaaatcagaaattactgcaccatttctgtttcagttagttacaagtgatttggtggttagcatttttatcgagagatatttttccgcaaaattcatccatttcaaactttcaaagtagtgggcttcaaatggattgttattcgctttgaagtattcgagttgttttctacacattttttctcagaattcatgtgaatttttttccagattggttaagataaagagccctgcaaggtgaagcaaccggaggctgattaccattttggcccgggatgccatggcatgtggatttggtaactttggaatattccttatatgattaaggccaaaaggtgacattaatcagcatctgatcaaacaaatcttagaacgcaaataatccaaggtcaatcagaaagcaggcgcttgtacagcgataggttgagatgcgtaaagtgaacggaacagagagcacgaagctcccagacttcagcgaaatattcgctgacaacataaacgctgtgatgtgatattcagcgaaaatattatagctgctgacaaattatgaaatctagcacaatggttttgacacaaaaaca

SEQ ID NO: 32478 - DNA, 521 bp, Oryza sativa
tcctctcttttgcttattcctctcctcgccaaacctagctcatagtttattttcactttatggaaaagtaaaaacaatatattaatattgaaatttcttggatcccctagtacatgccctatggggcctatttataggttcatgtgccctagggttattaaatacatcaaaatttacatggttactcgtatgatatgagatatttatgatggtaattatgaacaaattagccttagggctcttcttgagctgctaagtgggccttcattgagtggttggccctttaaggctttgagtccttcggcttgggacaaatgtctttggctccacctggtgacttcgcccataacctctatctttgtgacagtcagcgctttaccgccgtgcttcgccctggcaattgtaaacctgtttctgtaggctcggtcaaaggccctcgtgacatgtctccaacaatatattttctggacatttaaatatttaatacaacttcatccatcagattgcaccaatgcctatac

SEQ ID NO: 32479 - DNA, 568 bp, Oryza sativa
cacaactacatatttaataataaagtgtcaaacaactgcagattttagagtctatatccatagcactattgagattatcaaagttatagttttgtgataaaaccaatgttaaatctatatgtttctattatgattccttaaatatatagttttgtgataaattttcttatatacactttcttaaatctgtagtttcttaattctgtaaattgtgatagattgttcaaagggactatctaaaattctggcgacagattttttagaaaaaaactttcaaatgtaattacagtgtaagttatatgtaattacagcgtaatttctatgtaattacagtttaagtaatgtgtaatttttgttttaattcaagtttggataactgctcacttggttgagtcgtgatgcgtgcgaccagttggtcctaggatcgaatccccgttcttgcagttttctgtgttttttatctctggcagaccagaaatcgaaagatatccatagaaaaaggttgttcaaatatctatagatttgtaaaatttaatctacgatgggtaaaaatgcttctgatgtggag

SEQ ID NO: 32480 - DNA, 1169 bp, Oryza sativa
gctgccgtggccatcacggggtcgcgacgcgtggacgcgcgctggagagcggatggatttcacggcctttcatgcgtccgcgtcgcctctgcaaattttacagaaaagccctctcttttatagatattttgttatacgtcctctctgttcttttctcggtttaaaatattgcgtttaggccctttgcatcctacgaaattcaatacaaaggagacaaaaagaggaaaaaaggactgcgccctgaatcctagaaactgaagggcattttcgcaaaatttccttttctttctctctctctctccccttcgcgagaatcccaggcgcgtaaaaaaaaaaggaaaaaactcccagccgccatgcccctctcatctctctcgctctctcctgcgcggcgcctggatttggcttggccgtggccgccgctgggtgtcctcccagtgccgtggccgccgccgggtgtcctccctacgttgctgccattctccgctcgaaggggatcgatgttgtggatgggtggtgtcctcgcagcgccctcactgccggtgctctccttgctacgccgccgctgacgcagactcgaaggggaggctgtgggtgttggatgcggcagccgcgatttctttgccagcggatccgggggctcatcaatggcgtccacaccagcggtttttcctcagtggtgagctccagagggaaagggcaagctaacccaccctttctttcttcacaatttccctctctgtctgatccagatccaaagctgatggaaagttcgatttaggacattcagggttgtcgggtgtgttgagctcggtggtggcggcagtagcagcttggcggcgatgggagaatttacatgcaggagcccaaagcattgatgttttctgctcttccccaccacggtttgccgctgccatggatgctgttgactcctcacatgtcaaccacgactaggatcctggtgagtttggtgggcttttgtggctgcttgccaccctatccgtttgatttaggggctgttggaaggcccacctcaatttaccatagttttttttaccaaaggtgtggcaagatgcaaattgtgtggctcaaaatttgatggccacacttgtggcaaactttggctaagaaaatggtctatgactagtgggaccaaaagagtagaaagt

SEQ ID NO: 32481 - DNA, 755 bp, Oryza sativa
ccattcacaactggattggggtgtatatgggaattttattgaaatatgcaaagaggtgcgcccaactaaacaatactccaattcactttcaccatgtacatcactttcctgccaaatttagaaagatatgaggattccaaatacagattaaaataatgttccaaggtaccaactgatccgtctcattattttttaaagcataccatatacggtcaatatagaggatgcgaacccgacaataaagatatagagagagaggactcaagaaaacctccagtagctgtgtcctgtatgcatgtgcagcaaaatgagtaaaccagaagcttctttggttattttcccatttatttaaaggtaaaagcaggctagagtggcaatggtttgatggagatcaaggctgataacaacattatttccatctccttataccaaatttaatacgtgtctgtttcattgcatgcatattgaagggtgactagtatacgacttgaaccatgtaatttgtaaaataaaataaatacgtgcatgttaacccacttcttacttagaagatcactcaaacctacataagtgtatgtagcatgtaagagccatcgagcaatgtaaggttccatgccatatatgcatgagttatatattgaagaaggaaaagaaatcatgttttgttcgcatatgagaaaaatgcaagctgtcgttgtcttctcatttcgttcttccattttgggatatatttgttttctttcgtgcaattactg

SEQ ID NO: 32482 - DNA, 544 bp, Oryza sativa
atagacaatcagtgtgctctctagtctctaccccttctgtgtcagatgttgatttgataaaactaatttagtattataaatattaatatatttgtttataaacttagtcaaatttgaaatagtttgattttgaccaaagtcaaaacgtcatataacctaaaacggagagagtacttagtagttagatccacgctggaagttattctgctctcttaccatgtacttcctccgtcccaaaatgaagctatttttaaggttggcacgggtattaagaaattaggtgagaatgattggaggaagtgtgtgattggttgaaaagagaaaataggtgaagaagaatgttgtgattggttgagaggaggaggtaggtgaagaaataggtttattttgggataagacactgtattagaaataggtatattttgagacggagggagtatgtgaattgtgggtagtacacatgactgcaccatatgtacgttgcaatacagcagaaatgatcacgagatgcgacattgcttcacattttgcatgaatatgctga

SEQ ID NO: 32483 - DNA, 508 bp, Oryza sativa
aaatctagtggtgcggtgtacgcgtgaatgcctttggccttgtccaggcactacatatccttccagctgtcctacatcatcctgtagctgcagctgcagtcccacattgctcagtagatccacccctggccaccacatgtccttacatctaatatgttaatttcttctaaaaggatagcattgatgatagaaagcgctgtcacgccatcattgggcaagcaaaccagcttatagcagttaattggtgaaaaacattcaactccattcctttctccaaagataaaaatagaagtacttagatgccacatgtgtctgttatgattctaaatagtactccactatttagtagtataaatacaggaaaaggtttccattataagtttattataacatcaacacatggacttaaaatcttagagcagctgaagcatggcattaactctgcccatgatacagggcaaaaccaccatgtgcatcactaaaacactcactagtgcaattcacagaa

SEQ ID NO: 32484 - DNA, 825 bp, Oryza sativa
ttgggccaatagtttcttttatattttataataaacttatatacaattaaaacttgtgcacaaaacatatttcctccgtttcacaatgtaagtcattctagcatttctcacattcatattaatgttaatgaatctagacattaacatcaatatgaatatagatatgctagaattacttacattgtgaaaaggagggagtattgcttattatttcataaagcatatgctcacgaaaaacgagcaaattaacgcaactgtatgaacacatggtaaattggtgatctttttttttcttctgtgtttaggaggggtttctctagcacacaaaatgaagcatatattagcgtatgattaattaaatattagtaaaaaactttaaaaaaactaatataatttttaaaacaactttccaataaaaaaattctcaaacaagtaccatttggcagtttaggaaacgtgcgagctgatgagataaaatcccaatttaacttgtcttgttatgacttcgagtttgtaagtcaatttgacctaagtttgatactgatatgagcaaattaagccacgaggtttgagttttttttaatgcctagaacatcctagtttggagtaatcccttcatcaaaattcgttgtgttagcagtggttgggctttttttttttttaccgagggtgtgtactaccggctaaccaacccccaacaatgcagggaattgaaggccctgggagatgggagaaggacgcacaggaggacagacgtgacagcaagcgggccccaccacaccgctcggaaacgcaggacacgttcctttctttgaattggtgaca

SEQ ID NO: 32485 - DNA, 584 bp, Oryza sativa
cacacatgattatgttttgatgaaaaaatacaaattacttttataatattctaaattacttttagatttcactaaattacttcttagacatataaaggtacatttaataaatcgtaaaagtagaagtaacttaaaaaaagaaagttactttgtcacgacattaaaattagatccgttatggaggtaaaaatatgagtatatccagaaaattaatttaatcagtacaaattatgcaattcactaaaaatgataataaaataacaactcacaacattatgattatatgaggtaatttaatcaaatcggaaagtaatttatatatatgataaaagtaacttacatatataataaaagtaatttacaacatagacatttctttcatcaaaacatagtaatgtaaaatcctgttgtaaagatttaattgcaatgaacacaatggtataattggattatatatcgggtataagtaatttaaaataaaaaactgtaaaaagaaaaaaagatatgtataatttggtatactagtaggcaaccagctctaagatgaatctctggtcaagacaatataacttgcggtttcaacg

SEQ ID NO: 32486 - DNA, 1010 bp, Oryza sativa
  unsure (1)..(1010): unsure at all n locations
gatacaatatcttgatttgttattacctaaaaaatatagggatggtgtatgcatcgggtttattgttggagtaaatatagtatgagaaaattattattttttttaaagttttgatgtacctatgtaatatgatgattattttggaatggagggagagtatgatatgatatgactatggaggttccataattaaacttagcaccacgtgtatatatgttctattcgcatggattttacggctgatttaataaatttccgtgtcatcattggtaaggaaaatcattttttctcctgaaaccttggtgaacccgaattgttttcttcacactagctagtagtagattttcaacagacactcgctggcctcagccaataaggacgaaaataaagcagcattatctctggttctagtgcaaaacaaaaactattttcagtcttcagatgccacacactagctagggttgttgtgtgacttgggaggtgtttctaaaatcagggcagaatattattttgggaagttttagaacaatataatgcatatattctgaaaaaaaatcaccgaatttctggcatttcagtacagctaaagatatacatgcatggttttgacttttgattgtacttgtggtttgatctcatacttttaaaaaatagaaataaaaattcaaacggaattaaaaaatccatctttaattaagtacatttttttaaaaaaaaatgatatacaatatcttcctggccttgatggacgtaccctacttcgaaatggtgctatgtatgcactattatgcaagatgagtagggctcttttactttcaagccnagcttttttcccacacgataatacacgagacactaaaaaatgatgacaattcaacatgtattggatgaagaaattatccgtttagttatttatcattcgcttgatattttcttatctgtcagtcacctacacctggacaataaatcgcctaaacttgcacaagcctgcttggcccaaacatgcacaa

SEQ ID NO: 32487 - DNA, 580 bp, Oryza sativa
gcacgacccctcccctctctcttcccccctccctccctccctcccagatctaaccggaggcagcggtgcggctcccctcctccctccctcccagatccagcagaggggcgatggtggtggtgtcggccacagcaagcgacgccggtggcagatgggggtggtgggcggattgttttttttttgttgtttgcgaagaatattttcgtaggcgggtggttgttgcgcctatgaaaattgagatgtcgtatgtgaaaatgatttcttgtaggtggtgttgatcgccgcctacaaatgtcatgtatttttcgcaggtttttaagtgcaagcgggatagatggccgcttagaaaaatctattttacctatttgcaaaaatctgtttccagtagtgttatattagtggaaccaatttgtggctgaaggggtattggctttttagctatgacgttttcttttaaatttggcgccctctgcggggtatggattagagcgtaattgagtacaccaacacaccctacactcatataccacacacacacaagtggttccctttgtgaactgctgtatactccctccgtttc

SEQ ID NO: 32488 - DNA, 731 bp, Oryza sativa
cttagatgacgagttcaagtctcaggacaatcagagaggtagacagcttagaggtgaaggaaacaaccagggcggcatatttggagcctcttctgcacctcctgtgtacaaagggaaaacacagttacttcagagtgggggtgggaaaaaaatatcctctaagaaaacctcccttctgaaaaatatttgaggaggtgaatgattcttgcacttctctggtggtttgggagagaaaggtgacaaggtggtggaacaagagtcccaagagctgataaatcccattgagatgctgacccaggaagatttagagggaactcagaatgattggctgacaatgggtgaaaaaaacttgttggatgatgagatggagaggtgtcaaattcccactgattctgacatagaaaggttgagggaggaagaaaatagagatgatgaatagagctttcaagaggtgtctcataagaagaaaagtagggggagaaaaactgaacctacaattacatccaggatgagcttaaggaatagggagttggctgatgttcctgtcaccaggagggctagaattctcactcagaagaagaacatggaaggtaatgcttcaaacccttttgctatttttcagctgctagattcagttgagttaaataaaattgctattgctgctaagatagatttgggtagtacttctactgagattgatactaatttagaatccttgaaatcaaaagaga

SEQ ID NO: 32489 - DNA, 786 bp, Oryza sativa
aaacctgcgaaaaatacatgacatttgtaggcggcgatcaacaccacctacaagaaatcattttcacatacgacatctcaattttcataggcgcaacaaccacccgcctacgaaaatattcttcgcaaacaacaaaaaaaaaacaatccgcccaccacccccatctgccaccggcgtcgcttgctgtggccgacaccaccaccatcgcccctctgctggatctgggagggagggaggaggggagccgcaccgctgcctccggttagatctgggagggagggagggaggggggaagagagaggggaggggtcgtgccgcctcttccgctgccggcgccctcctcctccacctgctgaggccgccgccaccgtccttccccttcggccgaatctaggagggagggaggggaggggaggggaggggacgtgccacctctgccactgccagcaccctcctccctttgccggatctgggagggagggaggaaggggaggggtcgggccgtctgcgcctctgctggctcccaccccccctccgctggatctaggaggaggggaggggtcgcgccgcctcctccattgctgtctatggctgccacccgtggggggtctccgccactgcaagtgccctcgctcctccgtcaaatctaggagggagggagggagggaggggaggggccacgccgcctcctccgctactgtctgtggccgtcacccgggaggagccacgccggcacctgctgggaggaaggagtgaagggggagagggggatggagggggaggtct

SEQ ID NO: 32490 - DNA, 1233 bp, Oryza sativa
gcccctccccttactactttacctccccttcttctcttactactacaccataaaaatttgaattaaaattcaaatttgaaacgggtatgtaaactttttacttataaaatttgggtctatagactaatatttgaattcaaattcaaatttgaaacggcaaattcaaatttgaaacgggtatgtaaacttttgacctataaactttgggtctataaactaatatttgaatttaaattcaaatttgaaacgggtatgtaaactttttacttataaactttaggtctataaactattatttgaattcaaattcaaatttgaaatgggtctataaactttaggtctataaactttagatgtatagaaatactatatataaaaaatatttgagttcaaatttaaatttgaatcggatatataaacttttgacttataaactttaggtctataaactttaggtgtataaactttagatgtatagaaatactatatatacaaaatatttgtattcaaattcaaatttgaatcggatatataaacttttgacttataaactttgggtctctaaactttatatgtgtaaacttgatgtgtataaactttaggtgcataaatttattaaaataggaaagtaatacggtgtcaaaaaaagaaaaccaggtggagggagggagggagggggaggggggggagtgaattgatcgctgcccccatcgccaggtgagcgatcgcccatttgccatttcgtatgaaaccgaccatgtatcaccgattctatccttttaattttatgagcgatgacgatgctgatgatttatgtcttatatagttaggaagtacaaattttgtaagtataacttatagcgccatctatttatcaatttaccaatttttttcttatttatcaatcactgtttaaacagtagatcaatatgcaaccattcacatttatacatgatttcttgtggtgaagcaaacgatgttctaacctactctagtgcaaattcttactagcatgaaacataaaatatgacttacgtaaacataataatgcatctggattaaccctgaaaataaaaacaaagtaaagtaaaatatgcatttcatttgtgttgaagttgcagtaattttattttgtgcatgtttgggccaagcaggcttgtgcaagtttaggcgatttattgtccaggtgtaggtgactgacagataagaaaatatcaagcgaatgataaataa

SEQ ID NO: 32491 - DNA, 2049 bp, Oryza sativa
ttcatatttcttgagatggactacatttaagaaaaaaggtaaattaaaaatgaaaggttgtgattgatgtacctaacaaagtaaatgaataaattaaatatttttttattgatcaaggtaaaattgatggggtattgtagccttagagcaacaacaatctatatagcaaaagtagtccatatagatgggacccacttatatgaactttaactattgtaacattcacaatgtatatagatagcaaatagtattaggaggaaagaagaggtagagacaaataatatattttattctctatgggcagcctatatgcttatgggtagcttttattatttctttgctatggactagttccacaatgttgctaggtgtctgaaataaatattgtattgcttatgaaccacttttagactacattgtggatgcgctcacataactggaaggactattaaccttgaaaaaaatattaacctcacatgactgaaaatattttttaccttgaaggactggaaggactacaatattttttaccttgataaaaaaatattttaccttgaaaattaagggtgaggctacattcaatatttttttctttatttgatcagttaatcaattagccggacgtggtgttttaaataccctagacatgtgagttctcaaagatggagtatttttgaccttttgtctagaagcctccagattgacccaatggattatattctcatatattgatccaacggtccttttgttttaccagtctcatccgatggtgcttgcaatttcagaggacgtggctcattcttctttcaagcagcttgctgctttcacctatctagatttagaatactcttctttatacatttatggtattaaaatacttttcgagtatatggatgccaatttatattatgttcatgttatattgaatatactgctagcttatctgggagatgctttggtgcgggtataatgtttgcttatgcaattactctatgtcatgacgatgatatcaattagagtagtatatggtagtttaggcgtggtgcttagatcattatttggggttatatgctgcggatgagaggtgggccgctgatggtgacagctcagtacggatattcctccgcgcgtgtatatagttctaagttaatttcctggggaaggtattcctctgtatttagccccggttgtatggtcatgacgggctgtcgtaagaaactcgacagttaggggtggcttcacgaagtaccaggagggcatcggatagagaatattagctagtatatcagataactagaatgtatatatactatgtaaactagaagtataggagtagattctctttctcttttatttccacttagcttagataatttagtatgagaatgagtagcttactgcttgtgtgtcactctactcttggattatcttaacccctgcttagactatgattattacaagtaacatataaattattagttaagttctctctaccatgatcttctcataggattaaataaatacgatatccttgtaatactctcgggtgaaatgctacaacggtatatccgtgcgcttgcggatgaactctgtaaccataatataccaggagtatttctgcgccattgttgggaattatatttctaggaatatcgttaagaaataccaacacccgttccacctgagactagagggaggaggctaccccaggcgccacgtggccctgccccgaggggggatcgggcctgaggtagggcggcggctgccccctcctcgcttgggggtcgggaccgtcctgaccgagactagagggaggaggctggcccaggcgtcacatggcccctccccccctcccccgagggtgtatcgggcccgaggtagggcggcggccgctccctcccgtgactatgggtcgggcctccccgaaaccctccgtgggtcaccacaccacatgtggtgggttaggtgggcaactcacacgcccacctacctgcatttatggcgacctgaccagctgtgccacgccgtatttaatgcagcgtgcagtgc

SEQ ID NO: 32492 - DNA, 740 bp, Oryza sativa
gatggtttgggctagcccagcacacatgcatgacgtcatcaatggcggcagcccaacatctacagtacagcctaatactgttggagcccatgcggagagttcgagagctattgggaaacctgacttttccccaagtttatcccctcggtagagcagtggatttgggtgaagcaaggagaggtgcaaccaaagctagggttccctgcgagaggtgaggaagtccggtgatttggtagtggtgctcgccggatctggagagttccagagcgcaagcgcgaccatcgttcatacacagaggtggtgatggacaagcgccctccaaattcggccggagtggcaagtcaacaagcgaagggtgacggatccgattagaggtggagattaggggaaccgtgatgcgcgcgaagaggatgagcttcgacgccaacttctcgctcaaaatccaacggggaatctaggtgcaagatctcaagggcgtcaaggtggcgaggcagatcgtggtgcgagagcggcggatcgaggtgaggataaaatgcttcgagtgtgggcgtgaaggtcaccatcaggcaacgtgccctaaccctcacctctactactcctgtcacaatactggccatatctcttctcactgtccattgcttttgggaaagaagggtattaagctgtgtgggtttgggttccctgggcaaggtttttacagcctgcaagttgagatttctgatatagagtcggctagagct

SEQ ID NO: 32493 - DNA, 1301 bp, Oryza sativa
gcatggaaagatatttttccatgcggtcccttaagccgcccgcatgcgatgatctgcgcctatatatagggagcgcggggagccaaaattttttaagtcccggctcccgcgaaaccctagctgcaaggctgccaaaatttcccaagtcgcggtcgccgtcgtccccgccaccgccggctcctccccaaagtcgccccgccccacgccgccgccgccgccgccgtcaggacctctcccccctcgccgttgccgtcgccgccgccaggacctctcccccctcgccgtcgccgtcgccgccgccaggtcgccgtcgccaccgcacggaactctcccccctcgccgttgccatcgccgccgccaggtcgtccccgccaccaagtcgtccccgctaccgccggctcctccccgaagtcgccccgcccctcgccgtcgccgacgccactgccaggacctctcccccctcgccgtcgccgtcgccgccgccaggtcgccatcgccgccgcacggacctctcccccctcgccgttgccatcgccgccgccaggtcgtccccgccgccaggtcgtccccgccgtcgctcggtaacatttacttttaaaaaaagaaatgtgaaatgtgcaattgtggattgtggattgtttaattgtgcatcgtggattgtgatatgtgcaattgtggattgtttaattttgagaaggtttaattgtggattgttaaatggagatttatgtttaaattgggacttatgtttaaattgggacttatgttaaattgggatttatgtataattgggacttttgttaaattgagatttatgtataattgggacttttgttaaattggcacctatgttaaattgtgacttatgtttaagttgagacttatgttatattgggatttatgtataattgtgatgtttgtttgtagcgcccgttccgtcgtggcgcctagcgggaaaattatctccgaaaaatcctaattgcgaaatttgtttctttgattgttgtctagtgtccgtgccatctcaagatctcaattcccgatctatcatcgagttcaattccgaatccaattccttccaaatcgaatccctccgcaaaagtctagtttgcctcccccgggttcgatgggccgaattccgctcggcccatctcttccccggccctctctctcccgggcgctctctctctctctctctctctccccctctccccggccctctcccctccccggcgtgctccgctctccctccccccgctcagctccgctccgcctcgcccgcgcgccgcgcgcgcgtgcgc

SEQ ID NO: 32494 - DNA, 1463 bp, Oryza sativa
gcatctcgaatagcctctccatctcacttctccaagtcaaagtttagcaactttgaacaaaactcgcactccaatagcctccccatcccactctccaaaccatttagatggccaaactccttccctcactagccaaacttgggcccaacctactccacttgccattcgttttccatccgcgggacctaccaccttccattcacttttcctctgttcgggagcaacgtggccgagggggagagccgatggtcgagccgcattggtggcctccgcgccggtggtcaaggcggtgccaagatctctggaagcggtggcaccttgcagtacaagctggtgaagaagcaactccgccacggaccactggtgttgtcctttggcccagcatcgccgtcgcccttgccaacgtgagcaagaaggcccacaccacccgtccacctgaatcctcaccgctgcctccatgcgatctccgtccctacgtggatttgaccgacggcgtggattcgggagttgcgcggtctccgccttcattcgacgggtcgtcgtcgaggtcgttgtagcgagccgccgctgtcgtcgtcagcctctgcacggtcgccgtcgcacgagaagaggaccgagagaagaggaagagggagagaaagaggaggaagaaagtgtagtagaggctggcatgtggattccagtgtcaaaggcttataatggagagtgtagatagagactgttggagtgagaaatgagtttggcttgactaatcaattggagagctgactatataggtgtttggagagactgttggagatgctcttagttggtgggtcaaacaagcaggacatatctgatttaatcgggcctgcaattggcccattattattgatgggtcaacatgactatttgatagtacaatatatatcctagatttatgagctgttataatggaatatatgtaactttgtgtcactaagaaggaagagcaagcgttatggatgtagcatcttcaactgattcaaagtaactacgaattttttaaagtttcatgagcttggtacgtgtcgagaggtcgatacttgagtacaatgattgtccgtgcgtagagaggcatgaaaaaattgttgaagcgttcctacctccaaagaggccgctgtacgtgtttatatagcaaaaacaggaagagtacagatcagattacaatccgagtctgaataagttctttacttctatctaccgcaccaacctatagcaggagtacatgactctatctctgaaacagtcagacaagaaccaaactaagactcgacaacaagtctgaaaattatctctatgtttaacactccccctcaatcataacttacacaagttaagattgtttctgaaattattcaacttgttcaatgactgggctttggtaaaaccatcagcaagctgatcatttgatgaaataaaccgaatctctagtgatttctcag

SEQ ID NO: 32495 - DNA, 501 bp, Oryza sativa
taatcacctaaagttgtcatgattcatcatgacccatcatcgccaatgagttctctctcctctaggtcctctatctccatcacttcgtctgtgagactgaatatgtctggctggaggctgaagacaatatatacactgtctagacagagagatatcatcacaacagggttagtatgtggtcaaatgacatatatcaacatatgtttataactttatattattgtgtgctgattgctgaacacacatgtcgcttttctggatttcctcataagcgatcaacttacctgtctgtatatgtcactgcagtgttgcgcaggttaagtaagattcaatgtacggtccaaagcaatcctgagacaacgaagactagccaaggaatgatcggagaagacacggtccaaattaaccgtgtgcatcacggtcagggaaaatgtgtcttcaaaagagaattactctggtctattctccgagaccactgtcaaaaaattaaaaccaaaaggc

SEQ ID NO: 32496 - DNA, 633 bp, Oryza sativa
tgcacccccttagcaaaatcttttgataacaatggttattaggtcaatttttttttaccataaacacggtattacggtatgcaatttggtacagtttaaaattttctcatttatacccatgtgctatacatttatcaatatatagaattatgccttaataaatcattacttatgcaagagacatattttggctgtttcaaccagtcaatgtattagttgttcataaccatctttccaatgcaggcaattcactggctgactcttttagttgagaaagaaagcagtcacaattatttgccaatttttaacatatttttaagtggctgcgggagtaccacaaagcagagtgatattgaaggctgtctagagaaaatggaaacttattttcttgggaagtctgaaataacatattgtgagctcctgaaggtctgttccaacatcctcaatatgccaatatatgtttctcagaagttcttttttcatgacattgtaaaagtattagttcatttagttggactcctgttgcagtcttgtggatgtgatgcaaccataagaagacagacttaccattttatttgctgcctatttggccctatttttaatcaacatttgattacgttgtttactaattca

SEQ ID NO: 32497 - DNA, 573 bp, Oryza sativa
aaaaacaatgaatcaaatatccaaataaaaaactcccagaatcaacccatcacataatcaatcaacatatatataatacggccaatctttataacatcctcactttttaattggaagaacagaaatggaattacatggctctaggaccacccgccaccgctattcaccgcatggtgaagaagtccgcccacccgctgctctctacagacaaccattgatgtcgagatcagctgaagagagagggggtaggatgaggaggatgagagggaaaggcgcggatggaggaagatggtgaatggacgttaaccttggatgttggtgttggactcgagggtggcggatcagatcaatgacaaggacgaggcttcctgcctagtgctaatgcctccatcctccacttcattagtgttgctaattgtgatgaagagaatgaggcactctagattcagctcgtactaggccctaggcagaggcattgagggcaaggaagaagagatctgacatatcagtgccattgccttggtcgccgcgggttgtgccccatcccccttgctagccccaaataggctagat

SEQ ID NO: 32498 - DNA, 710 bp, Oryza sativa
ctgcaagtagcttcatcagagagctgaagtagctcttggagaaaatctccttctgagacaaatgagttgacaattgtaactgtggaggtgataagtacttcttgagttgatgagctcgtgtaaatttgtacctcccaggttgcctgtatcatagttttgagcttgggatctagtgaatttgaagaacaaactcaagtttgtcttctctctatatcatgtacttcctccgtttcacaatgtaagtagggctagcattcccatattagtatcgatcatgctctatatcaatttatctatatctgtgtaaactaacatttgctgacgatggctgatgctattattagacatttaccgttgcatgagaccatggatagcattgaggacatattcaaatgagggcttgcttagtaattcactgtctgctaaccttatttataaatcgatgttatgaaacttgggacgtatatttatcatgtggatgctctgaaatatcttgcgtaattggtacttgaacactaatgagctaacttataataactgttgtgaatgaagctttattttttggcacgatattcatgaactaagaagtaatgctgtggctttttctgcagatttaggaaggattcaccagatcaaggtactctatatcatctcttctcactaccctacctattttataatttccagttttggagcccaatgcaaggtgc

SEQ ID NO: 32499 - DNA, 797 bp, Oryza sativa
tacccatgaattcagaaccccagagtccgcacatcctcaaatacaaagcacttccctagttagatgtaggttagacttgccgtgtcgagaaactctaccttctacctgccctcaatttatgcacgattaatgaatgccacctgggtggaagcgagaggtggaaatggaaggtcttagttcggaggtgggatctctacctgatagttgcattgccattcatgatgatcccctggcattcgtccattcagccattcaccattcacccattcaactggaattttggttgaatgccggaattgtgtccacaaattgtggatggatagttggttggctggctggatggctggctggatggctggctggatggatggtgaatggctggcggcggttcggttgctttgaagcatttgttgctatctaaattccatttaaggtcgtaccttatcgcccagcatcatcttattctctatttgtattccctccatctttcagatacggatgtagccttggatgtgcccgtgcccaatgaagaggaagagcgcaacatgaaacgtaagtacaaaagtaccggacacccacccagatcccaatagaatccgccaaatcctgcgggaaattgtaatcccattcaccagctcctacatttaattaacaagagaactattgtatttatctaacacctggattatctccacctttcatttgatccctatttatagattacgctgcgttgctaacgggccgcacctcctatttcctcaagggtgaggaaatgaagtccatgtacaccacctaca

SEQ ID NO: 32500 - DNA, 600 bp, Oryza sativa
cggcacgttgccggctgcggccggcggcgccgagacggcaaggcagagcagcagcagcgacgagtactgcagaagaagcggcgggcggctggccattagcggcctgatggcgatggcgatggctctggctgctccggcgaaagatgtacacaaagagcaagcaagtgaaaggacttatgtgatattctaatgacaaattaagaacttgtgtgtcagtccaaggcatatgatgccgtagctttatattaaaatgggttgcttggttgggtgcatgcactggcctaaataagactctctctgcttatgttggatgcatgcatgttgttattgaaatgacaccagggaggcttcgcagaaccggtcgtttgatactttgatgtatagtgacaggtctatggtaattggaagggcaaattttacgatacttgaaaaagtatcgacgtatgaattttggtatctcgaagtgatgtacttaaatatctggagcagggtataacggcttggtttctctatttctataagtactgatatagctgaaatttcggttcaaaattatttggaatgttgaacaaaatttgattaaatagggaacattttttt

SEQ ID NO: 32501 - DNA, 626 bp, Oryza sativa
atccttgcagtcccatgaagagtttttgggcaagctcctcctttagtacaagtgctcccacgtataatgttgactttgatatcaatacaatgttgcagtttgtgacataattttctttgttgctttttggttgactaaaactttccatggaatgcagctaattgcctcctgctagcaagatacttaatagttgcatcgttaaaatacttgtgtgatttttcattcatatttgagtagggagcagcttgttccagttagctttcctttccctgtagacaccaggtcaagtattcctgtattaatcacatttcatttcaacttttgattctgatatggttcaccattttttacaagagtctgtcagatttttaaatgttccttaattattagtaggatttttcatataactaacatatgatcttgataacaaatagaaaatgagtgttttttcttttgatgataccatttgctttaatctgtagctgcaactgtcttgcagcttgtagttttttttaaaaaataaaataaaataaaaagaagaaaagctaactccgaccaattcctagtaccaatcctagtttgcatccagatcacctgtgttcctgtacttttagtatgctaaaggg

SEQ ID NO: 32502 - DNA, 1790 bp, Oryza sativa
gtgtgtgcattatgcctacgtaaaaacgtacatagagagtaccgcctacaacacagtttacgcgtacgtgatggctgatatgctatttcgcgagtcgtgcacgccctacgcgtacgcagagatcgctaggtgcctacaaggttcacccctgcccgtgcctacaaggctttaacgcaacttgcaaaccactgtatgctaggtgttcacggtgtatgtggatggtttatgcacacgatgggattgcgcacataaacaggcatgtcgaacgtatgaatagaatcgatgtgtttacgtccgcaatccgaggacggtggtggcccgaggacaacaccttgacaaaattataaattatatatatatatatatatatatatatatatatatatatatcacattttcaatattttggataatgataaggggctaacaataaattaaaaccgatgctgtgtttggctcataatagtggaaatataaaggactattatataaaatagttactgccaaaatgggcttcataatggattgacagtgggatttactcttatcgttattcagtacacagttgagaggattacctgctaagtttaggtgggcctggcccatcataaatattttctttctcacaacatataccagaggagtgatatctatcttatgtggttatttactttgtattttctatttgtagaccaacgtaaaccagatgtaaccacaatcgcttggttttagctaggatcttctacatcagatcatttgtaccactatttacgtgtgccgatgcaatagctttctctaaacgcgatctacaatagtaacgcgatatagagcgtaaaccataaaaactagcacgtaactgaactttccactcgtctcttagctttccggggattcctttctcctctccggcgaactctaacaatgcgtacgttctttcggtgtggaatcacgactagagtaaactaacgattagagtttatgttggtgtccaaatgaccataatacccctcgggtaaattaaccccattatttactcagctgacaggtggcgcttcctcattggtcgcgcctacctttatgcagctttatgctgaccgcacttaaaaaaaagctccaatacttatggagtttttgacagatatcaaggagaaggagctgaaattaaataagtgatggttgtatttgttgagacgagtaactatatggagaaaatagaaattaaatgagaaatcattgtgattgtttgatatgagagtctgtggagaagtagctatatgttgagacaaaatatatataaacacgaagtagcaatattttaagacaaatggagtatctatgaacacaacaggaaacctaatgttactatttataaaatgtcttacatatttttaaagcaaatgaaaaagaaatactcccacactccctaaatagagctatttctatcattgcatcagtacatagatagagtacatgtttaaattgttcgcccatgtgaactacacatgggtaggtatgactagtagtgtgacatgatcaaatcagcatgggaatataaatgtaaatgagataataccacatggatggagtaaagcagaacaccgagctagccagctaggcctccgctgtattatcatcttgcattttgctcagtggcagcaaaatgacagtgtgctttcccttccttttctttcactactagaaaaactcttttcccagtcggccgaatcatattttcgcaggcggacaagccatccgcctgcacctcaatgcctgcgaaaatagttgatttt

SEQ ID NO: 32503 - DNA, 555 bp, Oryza sativa
  unsure (1)..(555): unsure at all n locations
atctctaacgggccttaagttggggcccgtcacggatgaccgtcanccgngacgggccccaacttaaggcccgtttgagatatggaatgttatctcaatcgggcctaaagttggtgcccgtcacggatgatggtcatctgtgacgggccctaacttcaagcccgtttgagatatggaatgttatctcaatcaggcctaaactacggcccgtcactgataggtgtcatccgtgacgggcttaagttttatgtccatctaatatgtctgtgcgaccatatctcaatcgggcacttttttagcccgattgagatgactttcttgtgacggcccgctatttccatgcatgttagagcccgtcacagatagaaggatctgtactagtgacataaatttataaaatcttaaaaatagatattaattaatatatactgtatgtacaacatacactatttttgtgagcaacatataaagcaaaaactagtccataggaaattgctttattatttttgaaatattggattttgcttggaatacatttatttttcaattggtcca

SEQ ID NO: 32504 - DNA, 625 bp, Oryza sativa
tttcaaacctattgtattgttttgtagtatgatattgcgtttaggtgaagcctataacagcccttcctccagaactgtgtagccaacccatccgatgggcgggcccacttacacataccactccgcttatacttttgtcctcgcttcgtgtaaaagggttaacccgagagtgacatggttggaggaaagaggccttataagttggtcctcactttgtgtaaaagggttaaacctggggtgatatggttggagggaggagtccttgtaagttggaacatggttgtaaggaagaggccttataagttgcttcaagagaccttataaattgcttctcgcttcgtgtagaagggtaaacccgggagtcatatggttgaagggaagaaacattataagtttgttccaaaccttgctaaactagcaagctgtaggccgtgccgtaaaattcaggggtcctgtgcaaaatcactaaattgataataataataataataataataataataataataataataataataataataataataataataataataataataataataataattgatggatcttctttttaatatatttgcatagctcctttcttctattggtttttttcttctta

SEQ ID NO: 32505 - DNA, 530 bp, Oryza sativa
ttgcatctgatggactattatattgttcggttaaaagtaaaatgagtgtgagggtatggtattttaaaaataaatattagtaggattttattggtgagtgattctcgtaccattttttttctacattattcgctacgcatcttaaatatttcctcctccaactataaaccccccctccctttccttccctctcctccaatggcggcggcgcgggccacagtggtcgtgtcggcacgggccacggcgtcggttgtggagaatgttctcgcaaaatcgagagggtaagtcgtgtgcgctcgctctgcttctcgctttccttactcatctgctagtgtgcgtttatatgtgatgggttctttttgtgcgttgtgttgttcatctgcattgggttcattcatctgcgttgggttcatcttcttcttgcttgcgttcgcgcgtgttgtgtgcgttcgtgcgtgcgttgtttgcgttcatacgtgcgtcggtgcgtgcgtttgggtgctcatcggagacacatgatgatgtgtgcg

SEQ ID NO: 32506 - DNA, 552 bp, Oryza sativa
cttttctctaatactataccggaacgctttatctataatgatgtgtttgaataatggattaggagagctgggattgagaaatagaaatgagtggaggaatatgatgaaatgagtgagtagaataaatggctagcttattcgttttagaggatttgtaaagggaaattacaggaatattcaatcctttggaatgagcactatactatcattcgttttaaaggaatgcatgaaaggaaaaattcctatccctccacttttagggggaaaacaaaggaaaaaaataatccactctaacccaatgtttttaatccttttggactgtttgcaacccaaccatataaaaatttcctatgttttctaatccataggtttgcacatgcattcctatattacacgttttctgtattcctacggtttgaaaatcctacaaaccgaataagcccaagattgaaacttaccttttgaggggttgaaaatcatatcccaaacccattatccaaatatggcttaagtgtttttttaactctttgaaatgttatcccaaaaaacttt

SEQ ID NO: 32507 - DNA, 577 bp, Oryza sativa
actattatatgaattggctgttagattgactatagatgaattgaagataatagtgggctatactattaaacttgctcttacaaaccggaacacggagtatctagatttatagttatagttagaagtttgctttatttttctaaatggagagagtatatctatagtctccatttcaaaataaatttaccttttttatatgaatataaatatagactaagatcatatttatatataaaagtaacttatatatgaatataaatatagactgaggtcatatttatatatataattaaatttatttttaaacggagagtgtatctactatccacaaaactaattttgaatctgatcaaacatatgtacaaatttatttttataaattgattttttttcttggaaggaacactatctactcccatgcgtcgccggctgtatctgatctgcaggcacactaaaataagagtgaaaagaaactgcacgatgctttgacgatttctgtatttgcatttgtgtgattgggatttaataggggagatgcgaatagtagagaagtcctttttcttagcatgcctggctg

SEQ ID NO: 32508 - DNA, 691 bp, Oryza sativa
ttaaaaatataccttttttccctgaatttacattaatatatgacttctaattagcgtgcacaaatataccatgttgtcttcagcatgcggggactattgcttgagaacgcgagggtcagtttaaagacggcatcatataactcagcaaacttgtgagctactacctccgtttcaggttataagacgttttaattttggtcaaagtcaaattattttaagtttgattaagtttgtagaaaaaagaatattttcaactcaagaaaaatttattatgaaaatatatttaattattgatttaatgaagctaatttggtgttacaaatattattatatttatctataaacttagtcaaacttgaagtagtttaatagtcaaaacatcttatagcctgaaacggatggagtactttgctgcatttgagttggcaaatgccgagccaacataataaaccagtgtaataatgtaattaaatccacctacctttctgtataattgtgatcatatttgattgacgacatcatgcgccagcatccagacgagttcaagcagatgggatgcaaagtcgatgatgtcctcggactgacccgaacgagtgcatgcagacatggtgcgagctcgtgaccacacggcccagtttacatagaaaatatgccatctcgcggccctataaaattacttcgcttcatgcct

SEQ ID NO: 32509 - DNA, 539 bp, Oryza sativa
ggagcacagcagttcccgttacccatcggcaagcaacaacgcctcatcccgtggaagtcaccgtgagcactacgatcctacgatccattcccatggcttgctcctagagtacagcaagatccgcaagatgtgctctgtggcttaattttctgggagttggatagagagaaaagaaaggcatgaagagggggataagacaggtataataagaagtttaaaccagcgatagcgcaaccaacctgacaaaactgatgagctgaatgaaaaaaaccagaaaagagagtgcaagccgacgataaaattatcgccaactaaacacaagctccaagactagagaaaccatagaaaattttatccaacacaaacgtgggctccacacacgagatgatgtgcagtaatgagcgagtgatggtctggtggaaagttaaattagtaaaaagaaagagaaaatccatgaaataccattgacaagcactctaatcccagaaatgccattgacaagcgcaatttactcaaaatgccatcgtacaagcgttttt

SEQ ID NO: 32510 - DNA, 540 bp, Oryza sativa
ctgattgagtctgctgcggacgctcgggccgcggctctcctgacgtcgcgggctcgacgctgacgcacataggtgcggccccacatgacagcactggacaccgaccagtacatgtcggcacagttttaaatccacaaagtttcatatccctttctccttggcccgatcagcgaccccgtaggttgtttgcaagtgtcagcacatcacatcctcttgggtttcttcttcgatcatctgacatctcggaagcttctgaatttttcaaatcacgtaaagctcaagtgtccatgtcactgatgcaagcagatagattagctcgttctcttttgactgagatcatcattaatgaacaagttattttggagccaaagtgtttaatcaatactccagttgttaattagtagatactcctactttgctgtgaaggaactaggaagccatgatcccggatcagaaaaagggaacgcagtctttagcctgaaaaagtatgttacacgttgcaatcatcgaaaattaagcaaaatgatcatcttagaaaca

SEQ ID NO: 32511 - DNA, 623 bp, Oryza sativa
tttcatcagcggcagcagatgtattgctttatttaggtgttgtttagcacaactctatattctagatccaacgtgatataccaaatgtttgatgcggatctaggatataggctatatctccctttgtttctaaatatataataatgctatttacttttagatatggcatttaaaaattcgtctagtgcaaatataagaaataaaatcacaattaaaataaaacaagtcagaataaaataaataaaactaatatagtttttcttactaggacaaaatgaccaaacatcatgtcacgtttacaaggcagttagtagcatcatatttttaaaatcggaagcagtatatatctcctattacatgtaatccttatagcaggtacaatactagcagattattagccggctacaaatatattttaatgagataaaagttaagagagaagaacagcgggctacaaatctatagctagttgcagcacggactctaagacgcaatgtgtgtatgacaggtgggaccgtatataatagtatagttagcaactattgtatgaaatggctattatgattggtatagatgaaatgaagtagtagtgggctatactattaaacttgctcttagtaatt

SEQ ID NO: 32512 - DNA, 602 bp, Oryza sativa
gggttacgggaagaacgtggctagcaaaaaaacatttttttcagaaaaatccaattgggaaagtgggctggtctgtttatgtgggctctgaaccgtagggtgaagggctcatggcgctttcctgtgcaaggatcggtatgatatttttcaccagatcttgataaaataggtcgaattttacaacttcaaatttgaattctcgaaaaccattcaagttttacgtggaatctacttccatcccaagtaaatcttcagaccctcaaaatttgacggttttcaaccttaggtaatatagagttggtgggtttggactataaacgtgaatctattggtgggtggcgtaagagatgatgcgaagttagcgagggacgacggtggctcggaagtcagaactcagaaccatagatgatgaggatgctttcagataaccttgagtattcttttatgaaagatattatagactattgattttgacacaagcacacaatcatccctatgaatatgcacacacactttacatctatctttgtttcgtaagaacacctttaaaaattgagccagtatatattgaaattgatgaagttattaaggtgcttcaacat

SEQ ID NO: 32513 - DNA, 570 bp, Oryza sativa
tcaaactttaaaaccgatgtaaaccgagtttaaaacgctctgcagacctcaatcttccatctattatatcatctatctattatcttattaaagtaataaaaaagaaagcctccacgttttctctcacggcctagaaattttcatattaatcagagaaaaagaaaagtagagtccatataggaatacaatttaaaaatagctgaaatttggaatttaaaataagaaatattgaaagaggagactagagtccatacaagtatacaatttagaattaactgaaattcggaattaaaaaaataggaaaactataagtagaagttagagtccatataaaaatgtaatttagaaataactaaaattcaaaatgaaaaaaaaacaagattgggagaaaagtttagagtccatatataaatatgatttataaataactaaaagtagagtccatatagaaatacaatttaaaaacagcttaattcagaattaaaaatataggaatattaaaagaggagactagagtccactcaagtatacaatttagaattaatttaaattccggattaaaaaatagga

SEQ ID NO: 32514 - DNA, 576 bp, Oryza sativa
gatttttgcaccattcggcaccaaagattcattccctgccgacaggcgacaggagccctgaagcctgaactaaaattggccgcgcaaccacacatttctgcagggaagacgattgatcgatcctctcttgctctgatcacacaagacaatgcagctgtcccgacaacgttgtccttgaatcgtcgccaaccaaaagaaaatctcttcaacccaacagcgatttgctcgaatctcattaaccgcgtgaaaaagaatatatatcttcagggatcgatggaaatgaaaactttgaccattttcgttttaacaatgttttgtaattctttgaaaaatacaccatattatcgaactatgataacctaactagactttttttttgttcaaccaaatatgataaatctaaaaattgttaatggttgaagttgaaacaaccctggtcagaggtgacagttgacaaagtaaataggagccgagggagtatcgttatcttctctctaaaatggattccgattaatcagaattttaatactggacacatcataccagggatgcagcctctgtcctgtccgtgtgatc

SEQ ID NO: 32515 - DNA, 630 bp, Oryza sativa
accaatcacacggacaggacaggaatttgcatccgcacgatctgtctaagattaaaattcgaattaattggcatccgttagtgataatgataagatgatgatgctaactgcaagtgtttctgtaatctaagatgtggtttgaggagagtgatatctgaacataagaacatttccatcgatatctgaagacttttctcctacgcggttgataagatttcagtaaatatatgctagatttcggtagacgccggatcacacggacaggacagaggctgcatccctggtatgatgtgtccagtattaaaattctgattaatcggaatccattttagagagaagataacgatactccctcggctcctatttactttgtcaactgtcacctctgaccagggttgtttcaacttcaaccattaacaatttttagatttatcatatttggttgaacaaaaaaaaagtctagttaggttatcatagttcgataatatggtgtatttttcaaagaattacaaaacattgttaaaacgaaaatggtcaaagttttcatttccatcgatccctgaagatatatattctttttcacgcccttaatgagattcgagcaaatcgctgttgggttgaagagatttt

SEQ ID NO: 32516 - DNA, 563 bp, Oryza sativa
tatatatatatatatatatatatagagagagagagagagagagagagagagagagagagagagagagagagagagaaggtctgaggtgggggaatcccggaagccgggcagattcctgagaggctgagaatagatgctttggaccacctccagtccagattctgttctacggattgcgaaattgcggcaggatatacgcatatgcgtcatgtttgatttctgaatcgaagtaaatttacataatttttgcaggatttagttcagttcctaaaagaatcatatgaatttcctcctttcttttctttttgcattgatagatcggatgcccaaataagtcaaagaaaaaactaaaatttaatttttcaaacttaatattgagattaattttaagatattacaatgtagttcctttttcagcattgattttgtaagtgacaagaacacgtaaaaaaattccctaataagacgggaataggagcatacgatgggactttcaaacaggcaaagtggcaaacggctcatttttcaagtcccagtgcaagatttaagtaagcaacatttag

SEQ ID NO: 32517 - DNA, 516 bp, Oryza sativa
gatatatatagtgtttaaattcattaacattaatatgaatgtggacaatgctaaaaaatcttataaactgaaacgaagggagtaacaatttctccaccaacattctcttcccaaccaatcacaaccctccaccatttattttttccacctacctccactattcatccaattacaaccctccatcactcacttctacctactttcttaataaccgtgttcaaccctaaaacttcatatattctgggacagagggagtatgtcataggcagcgaatgacaaattattagttgctatatcttgaaaatttcaagtaggagtacgttaaatgtcccgctacggagggagtatgtactgatccacgtcctcgctgatattcctatcgtgtgtgacagatttctttttagacagcgtctggttggttggatcgtagtactactactgttgctgcatgagcgtgaacaacgcgtgatcccatcatgctttatcctaacttctctgacgagcatgtagtagacg

SEQ ID NO: 32518 - DNA, 522 bp, Oryza sativa
cttgagagccgagagcctcagctgaaaaagctaagaaaaacaaggaatcttactgcgaggctgcaacaatccccaccatccccacctccccatccttggaggagaagagaggggagccggcaatggacgacgaggaggacgccaatccactaccgagctccattactgctgtcgccgtcgccctccgagccctcaagccccatctcctcgtcgtcggctgggaggggaggggccccagcgagctgactaccgctgaggcgcgggaaaggagagagttggctatggtggagctcaagttgccagccactgtcgctgacctttggctagatccaggcggcgccgtcgagctctaggccgaatcccgctcctcctcaacgcttgagaggagagaggcgatgatggtggcagccgagcgcacacgccgctggtgtcgaggtcgtcgtcctttgaggaggggcttcgtctcctcatcgcgggccgggagaggaggtgcactggcatgcgccgcaaaacttgtcgtcg

SEQ ID NO: 32519 - DNA, 618 bp, Oryza sativa
agagagagagagagagagagaaggtctgaggtgggggaatcccggaagccgggcagattcctgagaggctgagaatagatgctttggaccacctccagtccagattctgttctacggattgcgaaattgcggcaggatatacgcatatgcgtcatgtttgatttctgaatcgaagtaaatttacataatttttgcaggatttagttcagttcctaaaagaatcatatgaatttcctcctttcttttctttttgcattgatagatcggatgcccaaataagtcaaagaaaaaactaaaatttaatttttcaaacttaatattgagattaattttaagatattacaatggagttcctttttcagcattgattttgtaagtgacaagaacacgtaaaaaaattccctaataagacgggaataggagcatacgatgggactttcaaacaggcaaagtggcaaacggctcatttttcaagttccagtgcaagatttaagtaagcaacatttagatgcgtgccaaatgtagtcataaatatttaagggcccctgaaatgaaaaaacataggaattttgataggaatgtaagttaggaatgtaagtgtaaaacagatgaattacc

SEQ ID NO: 32520 - DNA, 592 bp, Oryza sativa
cattttttgtttttgatagaggattatagtcagaaattggttggttaatttgtttttataatttaattgtacatggatgtctattaattaaatgtacacgacttggtggattttctagattccattaccccacttgctctctttgacaaaaatagcaaagaaatagtacaatggtgctcagcctagtacagatatgtacatagaacttgctctttccctgtaaaatagggcagagattcagtaaattctccgcggaagttttgacttggaaatcaaattaacgcgaaatctttgacatggtgtcagccatgtgcctaaaacaatcatatacatggaactaaagagagattcagaatcaatcaatcagagtatgaaatcgtgaagcagtaaacaaacctgcacaactgaagactctgcactctaaactatgtcaaaaatgctctttctccccgctgttcttttcccttgtcatcaaggcaaaaaaaaaaaaaaacaataaccaagcaggggactactactaagtcatgaccatgttgagcagcagatggcctacatagcaagggcatgcatctgatcatctgatgggtactat

SEQ ID NO: 32521 - DNA, 646 bp, Oryza sativa
cgggatggggggcggcggctgctggagatatgctactcctagatctctgccctagagccgcctcccggacctcgcgccgcctccaaaccctagcgccatgggagtcgaggaagacgagcgctgtctctgctcggggaaaaaaaaatcgtctcggagatgatttttctttacccgggggtttggcgtggatcgggcggagaattgcccccaccccggcccaggcgaacgcgtatatggcccacggaagaaaattacacccggccgggatggcacacggggatttcaggccattcccccccaaacccagcctaaaagaacaaggccttaagggacaagatctcggtccttggctgtgacaggcacgcagggggggagggatgaggaggaggagtaaatacctgaccccctttggctcctccgtttgcagcaacaaaagatcgccgattcgccgcgcgtacagcgcgatcgcggcacgtgtgcgccgttccgtatccaaatcccgtggattcgatcaatcgatcgatctctgcactgcacagctgcgcctgcagaatctcgcgacaccttgtacttccatttttttttcctctcctaaactgcatggtgacctcaccggcaactacagccacctgtgtatatatataga

SEQ ID NO: 32522 - DNA, 703 bp, Oryza sativa
gatcgaacctacatcaaataagtacatcaaaagcaatccttaaatatggaccacactactgctaaatctgaaaatcaaatgatatttgaaatctacaaatcacaaagtcacaagagagtgtattgcaaaattaatgttcttagctctgaccatcttatatgcattagaaaatacaattgaaaggtacaacaagaaacacaaatgagcaaaaatctaaaataaaatagttaatctttccatcaaattatcattaaggtattatatcaagtacatatagcattatcacaagaaactgtgactgataactacatggagttggtaatagatgcataagtatcaggatatgtgaaaatggttttggtagattgttcatgaaaaaaaaaacactttcatacaattatgtttttaatatttctataaatatatagtcagaaaataatgataaaacatgtgaattagatactgtgaattgcctaggttggtaccacagcctggatctcattttaagagtcgaaggttaacagaggttggagtcgatattcttatgatcttatccaagctttctgcttctaatttgatttattaccaccaatccaccattcctttttactcgatgttttggacattgacaaagtttacaacattacattaagccccaatcatttcagtaatgattaatggcaatagcataagcattaaactt

SEQ ID NO: 32523 - DNA, 501 bp, Oryza sativa
cactaaacaatttctagaggaggctatgctcattcattccccttggtaatttttctggaggtcactaactataccaggaagccccacaaaaatacgaaaaatttcatctcctctgtggcccctctaaaatttatgaaatggttgatgtcctattgttctaaaaatcccaaattctagtcttctgaaatataaagtgtgcatcaaattgaacggaaatataagatgttataatttcttcaaatactagtttattttccatgaattaatatgctttagttttttatgttggtttttcaagatgttttttttcattttttgagtttttttagaaggggagcagttttttaagaagagaaaggaggacaactgtgtttctaaagcagttaagaataagaagataccgcgttcacgcttaatgtcgcctagtagctagttctgacgtcgggcctcatgtaattttcaaatacgacacttagtactatcatttgtactaggcgagtt

SEQ ID NO: 32524 - DNA, 596 bp, Oryza sativa
ttaaaaatcaactcatgcacagatttttaatttttataatagtagagataaatgacctccaccagtaaatttcatcttaactgccccatataccaataataagattaaaatagacttcacccgttgcaatgcacgggcattttttttagtacttaaaaaaataataggtgctttcgtcgtccgtcaaaaaaaccggccaaaaaaagggcgaaaaaaagaaaataaacaaattgtccgatccaaaaagagggcgaaaaaaccggcttaaaacaaatcgtgcgaagaaaccaggcgaaaaaaggaaaagaaaaattaaatccgtccgatcaaaaaaggggcgaaaaaaaggaaaagaaaaacgaatccaactccgtcaacgcagtaaaaaagggcgaaaaaaaataaaaaagaatctgtctgattccaaagaaaaagaaattatatatgacgcggttaaaaaaatatcaaatcctattatattatctctatctctactacttaaaaaaaatctctatctctaactctaactctacttatatgatatgagctgtttccgtcctctgtgaaaaaaaatcgggcgaaaaaaaaacggacga

SEQ ID NO: 32525 - DNA, 686 bp, Oryza sativa
aaagttatggaatgggttttgtcattagtatacgtttaatatttctaattagtatttaaacattcgatgtgataggggttttagtccctgatccaaacagggccgcttctaatctctttctactccagtacatttcagttgctttaatttatgatatgtgtagatataataacctaaaataagctagataggaagatttggttaatagtgaccaacatgtgtttaacgttgttttgtttaagccatgctgcgggcggcgtggagccgtgcatctatgtcctgttcttttctcaaaaaaactgtataaacttttagataaaaatggtacgttttttaaattgctaaacggtatgttttgtgtgaaaactttctatatgaaagttattttaaaatataagattatttttcaagtttataaaaattaaaactcaattaatcacacattattatcacttttttttaaaagacacattattaccacatcattttacgtgaaacacttaatttttatctcatctccatttttgggagatttaaacaccaccatagtcaaaagttaacgcagagctcctgaaagttttcagctaaaaatatgcttatgctttcgatctacgtggacttgcttagctatgaaatctctgtctgcacattccagttggttacgtcgaaatagtagccccatattg

SEQ ID NO: 32526 - DNA, 1674 bp, Oryza sativa
ggagaacaccaaggaagtggaagatgatccttcgcacacagcacactaccgggctcttgcacaattaaacccaaaaacatggagatggtggagcaaaaccaacatagcgcacaaatggtgggtaacactagcaaccgacaatgacaagccccgccaaaggcatgttcgtacactcgtcctactaattgtatggaaaatatggaagaagaggaaacatagagtggttcatcacaagagctattggtgccatctttggccgtaaaaattaatcggctctaatagcagtaaaacgacagatattattccctagtttctccctttccccttttgtacagttccacaccatacttgtaaagctccctttgcactcctatattcaatgaaatttccacaccttatatcagtccattaaaaacattcctataattcaaatttgtacacaatacaactatttcttcgacaccatttttaatgcaagtgaatcaaagcatttgggtgcttagaaggggaatttaaacaattaaatttttgtatttgaccaataagatgaatatttctgtctaaatctttgtaagaaaacctagcaatacttacatttagaaatgaagtaatcagtatgcgaacgaatcgtcagtttagaaagtactccatatgtcccaagattattgtaatctagattactgagctagattactataagctggattataataagccgacatagaataagctgttagttgtttgtttctctttattagctgttagccacctactccctccgtcccataaaaaaccaacctagtacctgatatgatacatcttagtattatgaatctggacatacataatactagaatcttagaattatgaatctgaatatatgtccagcttcgtaatactagaatatgttacatccggttctagattcgttttttatgggacggagggagtaataatctaaaagaaacacctttagagtggattatcgtattatagtaatttgacttatagactgtaataatctatcataataagctatctcgttgtttcagtttactcataataatccagattataataattctaagctgaatcaaacagagcctaagttaatttctacggtttaaaatatgttccaagataagttgatttttttaacttataactatcattagtctataaatcgagaagttttagtacttcaattctccatatctacccgctcactaatactactacttttattctattaacaagggacaatttcctttttcccaaccttgtaaaatttttcttgggaagtagggactcgatttatttgggagaggcaagggctgatctacattaattatgcttccctgttgcctagcacatccggtaaaatctataacttcaatacgaatagctggtttaaatgataaaccatccgtcctaaaacatggtttatataggctttcacctagagatagctgtgttaacagaagtgcaccgtacgtactgaccacgccggtttgatcgagtcgatatgacctggccaaacggctatagttaacatcgtatggtggcaatgctgtcattgaattttttttcatttacataaccctgtttagtacgacaaactgcacaaatcaacgtcgtcctccttgcaatatgccaactcgcctagtacaaatg

SEQ ID NO: 32527 - DNA, 669 bp, Oryza sativa
aatgttaatatttggcacatgaaaataacatcattagaaatttcacaaaactacagatactttaaccaaattttcataaaactacagatttagcgtctaatttatgacaaaactacatatttaggatggaacaccataaaactatagattagataacaaatttatcacaaagctataagtttagtgccaatttaatcacaaaactacaatgtttatagctctaacataacggtagtactagggatttaaacttcgaaatatgtagttttatgataactttagtatttaaatatgtagttttgtgttacttatcattaaatatatattttagtgataaattcggtgttaaatctatagttttctgatacaacaccttaaatatgtagttttgtgatagtttggttaacgtatctatagttttgtgataaaatactttaatgttgttatattttcaatatttttatgatatatgattataggataggcaaaacaatcaaacaagtataatggagaccatggcagtatcctacattataagtaagaacaaacaaacgtaatattatgctttaagttcgtccatgggaaataagatatattagctgggagaggagagaggacccgcatgttattaaatttgttctcaatagaacgacataatgattagagttt

SEQ ID NO: 32528 - DNA, 564 bp, Oryza sativa
taaaaaatcaacaaaatagattaatatgtgatagatcactctacaaacaggtaagttaaaattcaacttttacaagttgaaaaaaaatgtctacttaacatatattcacaattaaatttatttttattgcaacttgtataaattaaaatttgacattgcatgtttgtggagtaatttatcacttattaatttatcttgtttttttttctaatttatcataaccatgtgggtgacaagcaaacaacgaagaaccccttaagagtttagaatagttcccctatttgttgcttacctttttgtttagataatgaaaatggtttacatctccgcctcaccaatgttttttaaatgaaaacgaaagaaaaaaaaaagagtaatgggacaagttcccaactcctctgagaagatgctgcatacactaatagaaaaaagatttttcccaaggaggcccatatcattatataggcaggccacattttcggccacaaacgttacgtttgcctgtatagttatgaacggggatacaatggatatccatctgcgaaaatgcaacttcgcatgtga

SEQ ID NO: 32529 - DNA, 1190 bp, Oryza sativa
caaaactgctctccaaaacctcttggagtcgttgtatccggttttctgatttgagaaggggtgaactagatttcggcctattaaagggagtcaaagtgcactttttccatctacaaaaatacgccagtgggctttcatcctaggagtggtccgtgaaaactggatccaacagcccaactgtgcttacgtttcggcctttccccgccatttgcgctactggccgtgctccccgcccccacgccggcgagcgcgttgcagccttgcaggcgaggcaagaaccaacctatcgccatctatcttcaagaaaaaagaagcatatcgccatcgccaccgtcgccgccggggccgagcgcgcgcagctccttcacggtggagccgacggtagctagcttacgctcgccgccgctcatgagcaaaagaagcaatgtgcgtgcgtcgtcggtgcgcggacctgcatcctggcgtccaaggtgtcgccgcgaacagctgcagctgcaaatctgcaggtgccgcatcacgtgtacggtgtacccggtactgggctatactactggctaacaggccggtgagctgaaacaactacttcctctatcaaaaaaaaaaaaaaaggataaaccttgagtttccgtgtctaattttgactgtccgtcttatataatttttttttataattcgtattttcattattgttagatgataaaacatgattaatattttatgcgtgacttgtttttttaattttttttataatttttttaaataagacggatgatccaatgttacaaacggaaatcagggtttgtcttttttttagagacggagagagtataaaatccaaactggccagtgcatcaagaatcaaacgtactacggggcaccggatgcctgagacacggcaatgccggagtagatataccgtcggcgtcgaccattgtctcagggagtcacagatgtgtaaatttgttgcgtgttgtcaggcggtcaagatcctcgcttatccctgcctctgctgctgctacagtgctctgcacccatccaatgtctgcatccataagatttgctccccaggccggcaccaatttttgacgatctacgagcttcaacagcaagcagggctagcattcatcaattcaacccctcactcatagagtcctaggactactacactacccttgttcctgtcctgaacc

SEQ ID NO: 32530 - DNA, 644 bp, Oryza sativa
gaaataatatttttttatcgattttagatgagcctgtagtgattaactgatttaaattgccttcctataccagtgaatcagtgattcaaagttagaaccggaggtgttaagtactcctacttgaggtatctaaattttacactaaaatttttggtaccttgaggtactttataaaggatggtaaaattaccttaatataaattatgagatccacatacaaaggttttatttcagatgcagaaattccgtgtgattaaatatctgcattacatttgtcagtcgtcacttatcatagtaaacgtgcagacagctctcttttaataattgacatgtttgtacgaatgtgtaacgattgagtcattggcacgacactttatgtagtgtcatgtccgacgagatctgacttgcgagaaagcacacacatacatgcatgtacgaattagcatccagtgctttaatgcttttgcaggttgaaattgtaatagtctttgcttcttaattcctccggtctaaagtataagtttggtcatcattttcatactctcacgcatatggcgatgctcaacttaacacaccacaggggttaaaccaaatcacttggtgacgtcttctttgccgtatttttatctaacaagtagattttg

SEQ ID NO: 32531 - DNA, 748 bp, Oryza sativa
aaaaaatagtgacctattatttaggccctgtttgtttcagcttaagtttattgtaatctacattattgagccagattactgtaagctgaattataataagccgacatagaataagctgtgagctgtttgtttctctggattataagctgttcgttagctgttagccatccaataatctaaaaaaacacctttagagtggattactagattatagtaatctggcttatagattgtaataatctatcataataagctatctgtttgtttcagcttattcctaataatccagattataataattctaagctgaatcaaacagtgccttagactcgaaggctgtgtgtagattggttttagtagttttaatatataatttggactgcaagcttcctgcttgtgctatcaagttgaatcttctctttttcctgataaatccttttgttttcatcttaaacagacctttacatgcatatatgctattgattgcggcttatttccattgatttgcaggtcaattctatggaacagctaagcgatgaactgaaacaacggtgttcaaatcttcataaaggatgcaaaagattcatgtacattaagctcccaactactgttttttttgggcgagctactaactttgcagcacaggcgtacactcgatgcagaatgcgtagcatgattattattattatttttggtttaagaaagacatcactctaggtttatgccgatgtaagtcaatatcaagttt

SEQ ID NO: 32532 - DNA, 602 bp, Oryza sativa
caaagagtataatatagaatacagaacaaacaacatgcaattgttcaatatttcaggtatattatgtaacacaattaaggtataaattcccaaataatacattttaaacaatccatgacagcccacaaatcgctaacttttattgcataccgattgtcctttattcccgtagtagaaaagagtcccgtgactgtcgagaacaaagaaccttctcttccattctcgtgaattttcagaacgcttaaagagataaccttgtttgattatttgaacctgccagaaaaataaattagtgaaagaaagcaacaaagcttaactaaaaaaaaggttgcatgttatatataattaaaatgtagtctggtgaattataaatgggaataacagggcattataatactagaatttgaaccaaagggataacaccatcgatctctttgcctagatacctaatttaggaatacatgaagaagcaatcaccatcttagaaataaaaggtgcttcgctcttaaacatcatcaatccctctgaagcagaacattgaacagtgatgcagcaagcttagccgtccaggtatcctagcctattatttatgattgtttact

SEQ ID NO: 32533 - DNA, 591 bp, Oryza sativa
catgttgttcatcgctactgtcttcatcttaaaatatacatatactatcttaattttgatcggatataatatattttaggattataaatttgaacagaaaatctgttcatagtattgaaatgtataacatcatatcaaaataacttatacggagtactttgaaaacgaaggtagtagcaaactattacggatttaagtggaaatggacttctacctatattgtataattaagttgtgtataatttagtgctaagctgtatttaagacggcaggagtaacatataaggatgatgtgttctttccttttcccaacttctatccttattaacttatacccttattttccgagcgcatattttttaaattgctaaccagtgtgattttttttaaaaaaaaattctattgaaaagtttacaggaagagaaagcagcctccgtaaaaaaaacatgccacgacggcggtcgctgtaaacatgactccgactcaggacagcgatggtgataaagcaactttgctctgcaagctttatgtaactgcacggaaagggagaaattcagttcaagtgctgatataaagtgtacatacaatgtg

SEQ ID NO: 32534 - DNA, 570 bp, Oryza sativa
acatctattccaaatatagggtactttgattggatgtgacacatcttatctagattcgtaaatatactattaagatgtgtcacatccgacaaaagaccatatatttgaagatagaggaagtaataatgatgagtacatgcatgtgcaaaacatcgaaagtgctttaatttttgggcaataatgaacatgtcttgttcggcttgaatttttaatatgcgcactaatctatatacatttgacagtaaaaaaaaaagatagtaaatatttgacagcgacgagccaatgacaaggcataatatatacgcacgtaaatggaaaagaaaaatccaattcttttttctagttttgccgttttgtgccactagccccgtctgttgtgcgctcggcgacaccttccccgtcgcagaagccgccaaaggggagcaggcgcggatacaaaaccccggcttaattatctcccactcgtcaacgaatcagcgcgccgcgccgttctgttgctacgcacagtggcatgaaacgggttcgttcgggattcctcctgcctgggggatgtaaccgacaaacccgcga

SEQ ID NO: 32535 - DNA, 546 bp, Oryza sativa
aacattatctaaaaatacaattaaagatcctccaacttttcctcgagaagaaactctctcgtgtaattttcttattcgagtcaaccagctttcgtgtgctcatgttctcaaaaagcaaccaagaaaaccaaaatttgtccggcacctgtttacccggagctcgagcggatcttgctgctcatgccgacaaatcttgttgcccttgccataatttttcgtggggtttttatcccctgccgaaagcgtcgtcgccacgggcctcttctttggcgtgttccgacgtgccactgttcacagccagaacaaaccaaacaccttttacctgtacaacacataccccacccccccctccccaatccgtgctcccgccgaacgtgaacccgtcacgcacacacgcgtgcgcgtaccttgggcacacgtactgcacacagtgcgcatttatccgcaaagctatcgaaaatttcaggtctccaggatgattcaatgcagagaagagctcattctctaaaccgaagtactagtatctcagtattgaattaatcaggt

SEQ ID NO: 32536 - DNA, 532 bp, Oryza sativa
ttatatagttaattactcaactaccatgatttttattctatatcttaccacttttttgatccatggtccatactgttttacctctcaatacctctaagtagctcgcaggtatcataaaagctcttgttgtataaattttttattttgtataaccttttgataaaagctctcgttgtatcaatggtatcacggtttttattttgtacaaaccttttgattgatactcctccgagaagcaaacgagtacgcatgcacttggagttatagaagcccattccccaaatccagtcaccgatccgttaggttccgtgttagctagctcccagagcgtgccggcgacatatgtatcgctgccgaccgccgtgcacacagaatccatccagtcggtgcgcggtgcgccgtgtctcggtcgacaagcgacaccggacaacgacctcagctccacgcacacgcacgtgatgattggattttggatcgtatacgtaccccacgcattacgccaatataggctcgcgtaacaacatcaaacacg

SEQ ID NO: 32537 - DNA, 580 bp, Oryza sativa
ccccaagatttgtcggcatgagcagcaagatccgctcgagctccgggtaaacaggtgccggacaaattttggttttcttggttgctttttgagaacatgagcacacgaaagctggttgactcgaataagaaaattacacgagagagtttcttctcgaggaaaagttggaggatctttaattgtatttttagataatgtattcacaaaaggatctttaatttgtattcatatagctggtgctccattgctcctactttctagggagataggtgtgttcttttgagttcaatgtaatggaacatacaaacaataatttaactattattacaagattaaaaagaatggatttgaaatagcatcttataatgataactatatatgtaaaaagtttttaaaaaaatcctcctatttaggaactcgacctatgtgcatttttgttcaattttgagaaaagaaaaatacaccgataatatgtaaaacggacactcatattgttaaagtctcgcaatcgaaacctcttccaatgtaaagcattcaatgtcttctattacgtatcatctattttgcacaaccctttaaa

SEQ ID NO: 32538 - DNA, 2068 bp, Oryza sativa
cgatccacctctcttggatggcacagaggaaggtatcgaggaagattgtggcgtggagggttgtggagggcaatgtggaggaaggcggcaaggacaggtgttgtggcatcatatggaaactgagagaagagaggcgtgagatgacagaaagcaaggactagcctcacgcttggtttttgtcgatgcctttttaatatggttttatgattttcataggcatttctggtaccagggttgcctatgaaaataacttaatttcacacacaatcctcttacgtgaacgcttgcgaaaaacaattttcgcagcgggtttagaccacaggacctcctcaccattattacaagtggattttcaacggcctacatgtaaaaataaaatttggctctctgcaaaaaatcatttttttttagtagtgtgagcatgtagaaatcagtcacgcaacgatcagaatatcattggattgatcagtgaagttcatccctaatatgagttcatagagagacaacttgagatacatccattatatcagggatcagcaagtaggataaaactttcacatgacactcctcaatgtgttagctatatatactccctccgtcccaaaatagaagggattttgggtggatgtgatatattctagtacaatgaaccagattcattgtactaggatatgtcacatacattcacccaaaatctcttatattttaggacggagggagtcattctttatctttaaataataatttaataatataaataataaaataatatggaatttaaattaaattatatatttaaatttaacttaaagatactatgtatgatcaaatccattaattctacataagattaagttcaaaaagtttaggaaaagttcaaaaaaaaggacttttggaataaaattttgttcagaaaataataatttagaaaatgtgtagaaaaatatcgtaaagaggtgaaggttgtcaaacttgcaaatgaaaggctttcattcatgcctaatctacaaaattaaaacatctcgggttttatttcaaagtctctagtagaagcaagatacacatgaagtaaactgtgggtcctatgacggcggagtttgatagccaagcgttcacgtggctttttcccgcccgtcgctcccatgcaaaaccaagtatgcatttagatcatgcagatgtcccaccacacatcacatgattacggctccctataattagtgccaaatgtagttaatgaacttttacatgcaaacacaatcaaaattttcatgataaacttttgtatagcaaaaatttagaaactttttatatatagtttctatgtataaatttatgtgtataaaaactttcatgtatacactttagtacataaatcgattaatacactttaatttatgtatagactttcggtgtataaacttatatgaacaaaagagagtatgaggacgcggttgcctaaaacaggctatcggggtgcattcatgagggcacaccgcccgcactcgttagccctttcaatcaacttatgatgcctcctctagcacaatcaggctataacctagcatggttgcatcaacaacaataatccattatatttcatagcatattaattagactcattattacgataccatcaaagactgaaaaaaaatctgggttaacgttgctcgtaactgaatctattttgtgaatataattgaactaagggatagattgaagttggtgatcttcatttaatagcgatatagtagagaactctcctatctttgacggatagttaatacctaaaagatatccgcggaaggaaacaaacatgcaagcaaaagtaattaattgatcttttaagacaaatttacttgttgatagaggctcacaatttttaaactgtactttgccctttctaatcaactcaaaatcgagacaattgtccggcacattttaatatcaagataaaccttttcaaacctccttttatttaaccctttttagagaacacttcagattatcatacataacaattgcaagatatatatggacatttgtagtataattgatggaataagaatta

SEQ ID NO: 32539 - DNA, 7215 bp, Oryza sativa
ttaggcctataaaggagtagaatgttggcggttgatgggattctaaaaactataaacaaaaccccaaataaaatcccagtgatgatgggcatgccgttatgcaacatggtcatgacggttgacgggacatatggagagtaaaataaaccccaataataatcatgtttgattttaaattctcaataataataaggaggggaagcaacgggcgggctgtagagcagtatagtggcgaagccactaacgatttgacgagacttataaaaagtaaaaaagaacacaaacaataattatgtttgatttttaaaattccaatgacaataaagagaggtggcagcggacgagccgtagagcagtaaattggcgatgtttgacgatacttctaaaaattttgtaaacgaaatccaacaagacaatgaactctaaaaactataaggcctattttttaaaaaattttaaagaggatgaatagaagttgtggtaaatcgagtaagcaaataaaaaggtgacaaatgagtaaggggtagtgactgatgtggcttttaagaatataaaattattagaataacggaaatgataattttaaataaaatcatgtgtaaaaaaagataattttaaattgatgctacccgcgcaattgcacgggccgcccaagtaattaatattattcatgtttctatttatgtttgcaatgttggttaattttgatcaaaagtatgttttccgaatgtggattttaggaaccagggagcacatgctcccgtcatttgcctgctctttccaaggtcgacgatggaaggctgagcctgactaccgaaggaggggctaacatactgaaaccaatcacctaagctagctagctaaacggactggtttcggaattttggagcaaaattcgtgctaattcgatccccaatattaccaacagtgctaaaaataatttgtcagaataataatcctcaaatttcttcatattttcttggttccaatataccgttatatatattattgtaacgcgtcaatatataaacataactatagtgatgacagaattgtcaatctaaaatgagcaaaatatattgaattagttctcagtatcggcttgatgaatccttgttgcatcaaatagttgtacacaactcattggcatgtgtgtgacgcagttaaccacgacatcaagtactatagaatgcagtaaactaatttcgtgtgcattcgacttctttagaaaaaaaggagagtaacttcatttcctactacatcaaataaagctgtcagagaattgtgctaacgtcgatgtatggtactgcgaatggtggtgatcagcccaaaagggccatcgaccacaataagcataaggatctccattccattatggataatgcagtatttataagcttactttgttagaatataattggttctttctagtgtttagcttttttttttctttgggtagctggggttttctcccatcacacttagtttttttttaagtaacaaaaattttattagctttgtgccatacaatatacgccgagaatgcaaaacattttcattattaaacatgtatatacatattgtcgcgttgataacttgatatatacatctatgttcataatgttaaccatacatatcttaatactccatctttcgtgttgttctaaacagattaccacatacatttatagttgaataaacaagaaaatatatcgactaatgactaggagatgtgtgtgtgtaatgtgaacatgcatgattaacgcctctatgatatactcctatgttagtacatccatgaagagttggagaatcgatggatggccgatgaaattatctatacgtactactccttccgttcagaattgatcaacatataaggtgtttacaccaagaccaaagaaaacaaaattgatccatacttcatttaattagcgtatcgatgaaagaaaaaaattgttttggtaaacgcgcaatgtactgcacaaaggtaaaacgataaagtacgtgacgcactgcatgcaaacgtacggtcccatgctcatgcattcaccgattcatttttgctactactcgcatagatagagacagaaaggtctcactgtgttcggcagcagcaaaaagtgagagtttgtttagttttctgtgcgcacgcttttcaaactactaaatgttatgtttttttaaaaaaaatttctataggacagttgttttaaaaaatcatattaatccatttctaaaatttaaaataattaatacttaattaatcatgcactaacagctcacctcgttttacgtatcttcctaatattctctatcccctttctcaaactcagttgtttctaaaaaatatcaacgaaaatttatatgataattatttatgcatggagggagtacttaatttcgtagtgcaatttagttaatttgggattagcatttatgtttcaggtgactttttatctctaaccgcgtgaagagatgatcatatagctaactttagcaatcagtttatcttctcttaatttgctgcttcgtttgcattcagtagtcagtagtgatatgtaatagttaatagaggtaatatttgcactttttaattaagaagggattcccatccaatttaatcctagagagtccgaggacatcccatctatttataaagggccctagatgtacagcaccaaaccacaaaacacacaccagagggagtactcccccacaaaacaccgcagaccgtgcaagcattttggccacgaagtccaccaccatggcttctttaggcaatggagcaccaagttttcggccaccgcgtgcaccggtatctgccggaaggctatatcgttgtccggtgtgcccgggtcctgtgatctggtattcgtgcaagatctagggaccatctatgtataatcaccaaacgaggctgtagagttggtacgccgtttatgcggtacataaaggcttctaggcgtggaagggtcggcctcccgccacggccaccgacctcggccccagtggtgccacaagcacggatgccaaccccaacagtacaaaactcgtttgtcccacttcctcccaaccttgccttctgggaggagtaccgcaagggaggaagccgtcctgttgagatagacttcttcgtaccagtcattgttgtgtcggcgcttgagctggttgcaccggccatggtgagtggctcaaatttatcagactcagagtcatctgaacttgatattctggtctagttcctttgaaagctactagatccagaattcatgttagctccccgaatagggatatttagttgttatgttgtagcgtccagaaaatggaagcatgtatgtttccttgattaatttcaatcatgtcatttttacagatatatgtatttgtatcatcaactttgagttaaatccagatgaataaatgataatctctttcatgcatgtttcctaaaaaaaaattctaatttgctgtatatatgtaattttcgttaaaacagaagacatattcttctgattaactcttcagatcagcataaagtcgattccacataattcttcgtaaaagcatggtgatcaaactaagcacttgagcggccgttttaattagatctagtgacaaacaaataaaaactttagcagccgatatatatcttggtatctcgcgatagtgcgactatatataagtatccaaaattgtattgcataattaattaattgttcactgtaccttgggtcttgcattgtaccatctctttggaagttggaacaaataaagaaataaaaatagctgcttaaacaatttttttaaagatcatgggctacaagtacattttagttgacagttcgagtgaacatgatatcacatatgtaaattgaattccatctcagtgtatggcatgcatgaaagagcacaagtttctgttatcaataacatcaaggtaataaaaagcacctcccctaatttaaattctggcagatctcctgccgtcgttctccttaaaaaaaataaataaaaagcacttagctagcatgcgtactcctggtctcggcataattagtctgctctttttccgttatatatatatattaaaaaaaagtttgctcatgtcattgtaatagatagcattatgcaagaatataagaaagtaaaagaaaaaaaaagaaaagaagctagacataaacacagaggggtatatggcaatagatatttgtccggtctgaagcaagtgttgtatacatatagtgtatagttttcacctctcaaatttataaaactagtaccgcgtggccagtactccaactcactattcagttcatggtgaatatatattaaatcaagaaccaaattaaatcagacgtagcgatttttcacggtcttataaaattttcaccatgcatccatatcatatctcctactagataaccaacatctcaaggctggagatagatttgtaagctttatccagataatcgtccatgaaaactgttaattaatatgatatatcaatatatctagctaccacattacatgatatataactagaacaactctaagcaaataaaaaaatgctaagaatatgacggagaagttctttgaagaaaaaaggctacaaattccctcaaaaaaaaagaaaaggggtaagaaagcaaatgtataacttaacgttattaacttgaagcaacatatatatatggcacgtgaaagtcacttccatagtttcatgaacagaaaaaaataatagtggacgctctggtttcactttcaaccatgtcccgagttagtataacattgtgtgtaatataatactgtaactacaggatatatatcattctcgttacattatattacaaatgtgcatatcttgtaattgtcatgtatgataaactgaattttcactaaaaagagaagaaggcaccatattactttggcttgcatgttcgcgccattttaatttcctagctttcaggtaagtatttatttttgtttagggtattcattacccatcacaggttgaattctatattatattacgataaaatgaagattactaacctcaatttataccctagttacacaaagtaaattctgttacgagtaaccctcctttttcagcttttttccatgatatcataataacatttattttcaatattgtttaaaagtctaattagtatgctcttaattaaatgtagctgatcatcattgatgcaaccatgcatagtttctggctagatggtgctagagggatgggtaaagggctaacgggctaacgggccaacgagcacgtgcggctgcgacaaatgctccttgacaactcattttaatttttaggtaacaatgtcgacacgtgctctttttttttcatgcaagtttatacacccaaagtgtgtatgcaaaagaatatacatgaatatttatgcaccaaagagtatacataaaagttattgcatacggaagtttatacatcaaaagtttatgatataaagtttatcatggaattttgagtaattttttgtggtaaaaatttgctaactgtattagcccaaattatacaatgacctaaccacttggtttataggtagacatctacatgatatggatgcacagtcaccattggatgggcagaaaccatgcatgctcagttgctcacccataggaggggccattgttccagtttatttcatgtgcctctcacattgggcctctctaaattaggcctaatgttaattttaattttgtgaattgcgcgggaagggaacttccattggaaatctgataattaccttcgctcctttaaggccttttgctaaacctttttttctagattattattttttgagctgattttattcagaaccatccttttgttttttttacaacttctcctaaactattcaaacttaatgttgtttattgtaatggatttgatcatatatgatatatttttttaaaaatattttaatttaaattgtagatctaaaatttcaattccttgttgttttgttatttttattttgtaaattattatttaaagagaaaaaatatgtagttaacacatcgaggaggattatgtaaaagtttcatcctagtcactgatacagtgtgtgtgtgtgtatatatatatatatatatatatattttctctttaaataatatatatatatatatatatatatatatatatatatatatatatatatatatatatatatatatatatatatatatatataggacactcatatggggcaccatggtgcccgggcaccatggtatcaaatacacaaaatcactcaaatttttcaaaattttcaaattgtgagtatatacctagttataataactcgattcatacctatacctatcaacaaaacaactcaaatttaactttatttcacaatccatgattacatacctaactaattatatgtatggatgctatatacctaaaatcaaaatctaacaaaaacaagttcaaattcagttcaaacttgctttgaactagttagtaaagtagctaatgttaatatctaagtaattgaaaaagtttcatactcatttgaattaggtatatactcaatttcaacaatggtgcccgggcaccatggagcaccaaacaaatttaatatatatatatatatatatatatatatatatatatatatatatctctatctatgagctatctctctcactgcaacagacctctcatcactcacggtctcatcactgatggctcaaaattgttgtttgtaatgagtcagccagttgttacagaattatagtcaatgatgtttatagttatctgtaacggctctaatgatgagtctttactgatgcagaattctaccccaaagaggaaaaatcagccctagcccatcaccatggcattgtcatcgaagtagaatccaccacccgatgtcgtcctcgttgtgtcgaagccagatccttcacacaccgttgtcatcgaggctggatccaacgcacgctgccgctgaagctcaagcggcccagtatctgccgctgagcatatgggagcacgatggaggaaaaggagtcacactccccgccgttaccaaggttggatctccgccatggactgccatcgccgaggccagatccatctcaccccgccatcatcaaggacagatccgccactccttgtaactgttgaggctggatccgctgctccatctagttgtggtgaatctg

SEQ ID NO: 32540 - DNA, 567 bp, Oryza sativa
atttctattcactttctcctctagactattggtggttgagagtgatatgtgagggagggaagccaacaaggtgaacaaagaggaggaaggggaaagaaactagaggagaggcaattgaaatctttctttctcttttgcttgccctcttttgaatcaaagttcacagctttcacttgtcaactgcagcgcttctcgcttcatgatgaaatctattcccttcttcgtttctttttttgcccctcaagttaagataaaattttgcttcctttttgctctcaggcacattaaccatatgtgccatgtgttgtttgtacttcaactcttcaaatgtaaaaatgctctatcagttctgccaatcttgtttaattcgtgcattgcaaacgtaacaaagtaaaaagattcagttttccccatttgtttatttcaatctgttataggtagggataatcctaatgctaaaattagctcatgataccctctgatatgcaggcatcccttcggcaaatgtggtgatggaccgaccacaagatcctttcaactcacgaggtatcatgacatgtactccac

SEQ ID NO: 32541 - DNA, 2484 bp, Oryza sativa
gtggtattgacatggcaattttatctcgaaaaaataataaaaatagtgggacccatatgtcagctacacaaaaaataatttaaaaaggtgaggcccacatggtcccacatgtcagcgtcctttttctctctatccccctctctctccccttacactgccaggagagaagggcgagcggcggcaccgagggggtgacgggtggagcagcgatggagcggcccggcgacgggcgatggacgtcggagcgacggcgggcggcgggcgatggacggagcgacggtgggcgacggaaggaagcggagcagcggcggggcgaaatggagcggcagcgggccgtgggtggagcaacaagggtgcagcagcagcgcgatagcgggcggcggacagtgggcgaagcgatgccgacgacgccgcactcaccgccacccaagctgagctcgtcggctcccctcccctctccctctccactctgggctcttcctcttcttcctctcggctctccgtacaccatgccccaagcttgcttaccgcatatctgtcagcaaagggcctttttcctgccaaactttttgtcaggaaaacttttgccgacagagcgggtctgtcaggccaaatgctgccggcaaaagtattttccgacagataaatctattttgacagatgggttgacagtggtttttgttctttaccgacagacaatatttcccgacagatgaacttttgccgacatatggacttctgctgacagatagtttgataggaatatttacctttgctagcagataatatgacacctagactttacaacgcaaaataataataataataaccgagctagcttattgcagcaaccaatactgtgacatgcatggagccctcgcacacattttagtagattacataattcaacatacaataacatcagagtgcactagcgcattttaaatgacaaaagatgagtcataatggtatgcaaggaaaaagatgctaaaatcgctattttatccgggcttacatgtcgtatatagattacatacacataatagtagaaaatatcctaaaaagcatcgaaatggagaacacgggtacacgcttcacccttgtcaaaagttcacatgatacatcacctgtaatgtaaataaagtgtattgctcagatatacaagtcagatatataaggtatagctgagataagaaaaggagaagctctttcgataagaggcaagcataaaatcgatgcaaaaaggaattgcttgtatggaatataactatatagttcaaacaaattcgattccctactggtcaaacagaaatgcattagtatcgagcactacaagctcaatgagtactacaaatactgaagactaacttagcttccatgtgacagggggatttcacttgtagttaaagttgtagttacaaggcaaaaacttgcaatagttcccaatgctcacattctaaatcttgcactatccatttaataaaaaatgccttgtacatagaagaaatagctatacaaatcatatgctcaaacagatgctaacaaatcttacaataagaaaggggcatgtctcctgtacaaaaatgcaaaaggcatcccaaaataaatgtttcttgacaatcaaaaaatacctctctgtacctcacaatgaccataaaagtcttgccaatcaaataagtgtgtcattactcatgatcaataccttttttaggggttaggacggtactatttggtgatagacaggagtgtgttattctttcggtcgaagaataatgttatatgctcataggtttatgccaattcataaccaataaccagcagcatcttccttctagatttgtactttagagtttagacaaaataaaagtagtactaatgagaccacctttatttcatctcttccattttaccttacagctacttggattttatctcgagggcttgagtttttaatctctgaaccagaataaagtaacacacatataagcttatagcttatactccatatatgcaatttatgtaagataagatgagtagccatcttatgtaaaatgagcatatctgatcagcaaaagataagaaaaatcaactaaaatgccacagaatgtttactcagtgaacaggaatatataaacagataaaagttctattataagttttataaaattttataaattttataaactcaaacgaacatcatcacctaattaaaactaggtggaagcacaagggtaagtatgatcagaatgagccttcccagaagctgcagacaacggcgaccgaccacaacatcatccactccccgactcctcgggccgtcaacaatgaagtatgcaaaatctgtctgacaatctgagccaacaatatattacctccagagacaagaaaaaaagcagaaacaaaccccatgattttcttctatagtgcatgaccaaattatttttttaagagacgccagcagctccatttaaaccgggctgcagg

SEQ ID NO: 32542 - DNA, 506 bp, Oryza sativa
cttaaccatcattgtgattcttaaaatcatacccaatcatcattgaggtgttgttttatagtttttagatttcccatcaaccgccaccattctaccactttacatcttgtatgttattcatctctttgtcgttatttgccatcgttgtgttctaaaatagactatgtttcaatatttcttgttttatttttatttttttgttatttttaaattgttttgctactgaactcttatttttatttttctattttctaattttatatttgtatttgttttaaactttagttaatcttgtgttgggttctacatggattgtttttcaatatttctttttttatttcaaattttgtttatttctaaattgtattcctatttaaaatatctatttttctaattttagaatttattttatttgttgtttcgaattttaattaatcttgtgatgtgttccatatggtctcttcttttaatattcttttttattccggaatttagttatttctaag

SEQ ID NO: 32543 - DNA, 712 bp, Oryza sativa
gacaaagataaaccagcatttggcacagaacagctagtgacaaacaaattaattttttaagaaaaatccgtcacaggtgatacgcaaagatttgtttggccagactagctttgtgcttctgactttcttgaaatggggagaaattaaccccattcatttgggcatgcattaatttttttgccaaaaaaaaagacagatattgtaaactgactttccattgacacttactttcagcagaagaaaatggagttcactcacacggcagaacaaagaaattggcatgccccatttaaaaaagagagagcatgcacgctggatggaaaggtttttttttttgaaagaaatcgctgcatggaaagtatatctgttacagtctgaaacgttaacacgtatatgaatattcaggtgtattattcttgcccccgccttttctatcgaataaaatcccatggacctggacggctagacggccgttcgtggaaaaaaaattttgtcacacaaaattaaggtctactctaatacagatggcagttggaaaaccagtgttaatatctatcttggaccaatgagcatgggcaaaaaattcagatatgccgctcacatttcacgccctgttaatacatccttatgtggattaagacatgagtgtcggcaattccaaaactagtttcacattttaaatttaaacttcatttcgaagcacaccatttac

SEQ ID NO: 32544 - DNA, 697 bp, Oryza sativa
gacgacgctagagcttgcatcactttgcattaacgatgaaaattcaagttgaattatagggtatgtataatcggcgaacgatcgcgaatcgggcgccatgcacgaccacgtttccatgcagagcaaccgctttagccgaaagcaaacatttcccattccggaactctgcaccgagcctagagtggttcatcctaatagtgagatgggacagcccaaaaaattgatacatacactctatatgcaaaataatgaaatatataaaacttcatgtatagacatataatatgcgtacaaatatagtaaggacatgcgaacaaacttcttatgtacaaatcctgcccatataaatttgaaacaaattcaacggcgtgttaaagtaggctcgagaaagatatatatatagaatttcattacgtcagaaaaaactatacatagcaattttggacggatatattatacaaaaatgtgcatttaaactttgcacggggaaagtatatagctataaacttaggatatgcaaagacaaaaccaaatataaagtgaaatatgtggggtagaggcccatgagcatgctggcagcccactgtaaagaaaaagcccagcttaaaacaagagcccacacatcagtccaaaaggaataaggcctatggtgccttacacaatacttgctcctggtaaaaacataatcctaaattgt

SEQ ID NO: 32545 - DNA, 532 bp, Oryza sativa
gtgtttgaaaattcatcggtccacttcatgtgatcctctttagtctttaggatttaaaagtgatatttacactgtagcaaaccccatgtttgaaggcttgaagctggcaaaaagatctttaacaactttgttcaacttttttttttgcgaggaacaactttgttcaacttgatgctatgataggaggaagcttggtttggcgctgtgcaagccttgcaaaatacacaaaagccagttcaagcccatggcgcatcaacggtgtcatgggacccatgaactagctatctacctagcatgcgtgccagctcgccaatcaacaatgttccatcttgatgggtccagcaacacgttctcgccaatgattttgcgattttaatctaacgtggaacaaaaatcctgtccccttgagtatctgaatcattttcttttcattcgttttgcctttttttttttgccccttggataattcagagcacaggacccagctctccgggcgcttctgatgatctgcagaagtgcagagtaacgggat

SEQ ID NO: 32546 - DNA, 522 bp, Oryza sativa
tggatgtcaaaagaaccaaatacaaaatactgagatgtctaatagccatatacatatacttcgttaacagtgacaaggagaaacccaaaaaaaagtggcaatgtaccatcaccttcaaacgaccaagcgtgccagggattaatccatgtacagaatagcaaacaaacaatatagggacaaatattggggcaaaaagcttccataactaaaacaagagaatgtcaattcaatcatactgccagtcaattcaatcaacatcatctgatgcaacactaatgttgccagattctcaaaaggaggttttcactctgtacttcctatgacaagctaaaaaggaactacgagtctacggctatctattctcctggaattgtagggttgtatcaaaggcaaaacggtaaagacttcaagattgcagcaactaaacttaccttcaacaactcaataggattagcaggtgggttagtaccctgctgacctttttgcttctgggcattcacctgtacagcaaaatgagagtta

SEQ ID NO: 32547 - DNA, 545 bp, Oryza sativa
ctggcttttgggtattttgcaaggcttgcacagcgccaaaccaagcttcctcctatcatagcatcaagttgaacaaagttgttcctcgcaaaaaaaaaagttgaacaaagttgttaaagatctttttgccagcttcaagccttcaaacatggggtttgctacagtgtaaatatcacttttaaatcctaaagactaaagaggatcacatgaagtggaccgatgaattttcaaacacccttcgacggcctgcattttaccagccttttaacacttcatttctctaatctaataaaaattttccgcaacacctcctgataacgaacgaactcgctatcgcttttagtttgagtaggggccggaaaacacaaaggaaacggtgaatagtgcactgcaaatcacgcccaaattgcccaagttattggtcgccgaagactcggccaagtgaatgactcgtggaaaaaatctcgttctagaacaacacatgcgcgcgttagctgcaaagcctgcaacttaatcaaccgtgaccagttcaaagttcagagatg

SEQ ID NO: 32548 - DNA, 657 bp, Oryza sativa
agactcggcgcccatcccttctcccgcatgcatatagcgcgcgctgtgtgaaaattttcctaccaggttcttctttgcgcgtgcgcctaccagtgagtcaatccatcacgccatcagcttcatattcacagcatctgtctggtatatcagccatgactcccgccagcttccacagagtaagacatttatttctcaacgtcagcgccagacccatctcctatcctattggacggacattagtcggcgctcctccagcaacaccaccgactcgaatcggccgtcgccccaactcatctacaatcgtccatcgaccgtgccgcatcctccagcacagcctgtctctcgcgtcaaactggagtagcgctccccccggtaatgtgcaggcgacaaaggccccatgcgatgcgaccagcagccgtcgacaaccggaggtgcacagtctctggcattcatagaatcatcgtgcacctcggtcggagtcaatttctgattgttactgctgctcaaatctgcagcttgctattgctgagaactgcttggtggtggtactgaaactttgatgtttgctggctgatgaaaactgatgctcttcactgctaaaaactactgcgtgctagtactcaaaagtcctattacagctactgaaatatcatgctg

SEQ ID NO: 32549 - DNA, 692 bp, Oryza sativa
caggtgtttgttgaatgcaattcgactgggcacccatcctgaaatctgtagattgctgcacgtttgccttattgattttggaagtaactggtaactgaaaatgtatgtgctggactgctagtagaacatgaactagaaggaataccccttgatgaacatggcaatcaagaagttaagaaggtttcttgatcttctatgactctggtagcttgtaaagacaaaacactgaccatgtcaatgtcaatgcaacttctataaatttatgccattcgatcttaaaatgttagcctgaggtttagttcttatcttctatcttagtcttggggacagatgcatgtttggtcttacaatgatttactttaattatattgattgcctatagttaattttttattacattgttggcagaagataaatacatctaagatgtgctgttttaactttattgactgattatattccatatttcattggtttgtgattttccaagttgatatctagttgactagtactaattgtactttccgtttgtttcatgagtgtactctctatttcggttttgtgattattgaaactaaattctgtttcttggatataaaataaataatatatgtggtttatatttatctgggtgacattccgattctgaaaattttacatggctttatgcaggtccttaatgtgtcttgggg

SEQ ID NO: 32550 - DNA, 947 bp, Oryza sativa
caatgcactcgtgaacactgaaacacacacacacacacacacacacacacacacacacacacacacacacacacacacatatatatatatatatataggacactcatatggagcaccaaacaaatttactatatatatatatatatatatatatatatatatatatatatatatatatatatgtatatgtatacatatatatatgaaggttacaaagtagagagaaaaaaaagagacaaatagatatgcatatacatatgtatcacatttccttgtgttttttctttacagaaaggtgtattctgtttttttttattctgtatgatagccgtggtggaacaagaaaaaggtggcagggggaaagaattgccgatgctgctgttggattgagccttttcgcatctaggcaccctacgatgaaatagtggccttgtgtggcagctaaaatttctaataattgaacagaaaaaaactagcgaaaatatctttaaaaatgtttgtagcagaaaccaatgctcgcaaaattgttcttgcacttattattattattattattattattattattattattattattattattattattattattattattattattattattattattattattattattattataaaaaaagatgggattagtccatatttatcgcgaatatgaatgtggtagcttttagataagcgaagtggagtgactaccttccacctctatatcaactataacatctgtcctaaaataaacaacctagtacgaaatgtgacgtatcctaaacaatgtatcatatttagtactaggttaattagtttattttgtaatggaaggagcaaggatgagtgctaggcattttatagttcatataccactaagaaaacaataaaagagcaaacaaatatatgttaatattgcccgaaatatagtaaagtataac

SEQ ID NO: 32551 - DNA, 3092 bp, Oryza sativa
ctaatccacatatttttatttcgctattttcttttttttcattacttttgaaaaagatggccgtgcgttgcaacaggtgaaggtttttttattttattattgtaatatacagtttagttaagatgaaatttactatgagaattcgcttggatatatatatattttttaagaaaatcatgagttgcagttaggatcgtttcaagttagcatgtgagtttttttactgagattttttataggacgaattttgtatttccaaaagcgaacgaacgtaaaaaccgactcaaaatacggatatgtatttctaaaaacgaatttaaaaaccgactcgtacacggatgacgtaagtaccagctaaaacatcttcaatttttataatagtagagattgatagaatatcatcttgaaccgtgttaattacccatcacctatgacagattttaaaatttaggaagagattagacaaattattttagaactttgaaaatcaatcaattctcaaattcttatagtttgttagcattaaaaatgttatgtgtggatttgtcttaaaaaagtactacctccattacatattataaattatttaatttttctcttaatcgaagctttttagtttggtcaagtttatagaaaaaattagcaccatttgtatcacaaattagttttattaaaattaatattgaatatattttgataatatgtttgtttgcatgaaaatgttagtatatttttctaaaaactttgtcaaacttaaaggagtttgattaggagaaaaagttaaacgacttataacattaaacggagggagtactatcaaaattttataaacttattttaatttaaatatgatagtgaaaatttcaaaagcttcactaatctgctctaaaagttgaatatttataaacggatggattagttccgtgtatccacacacctgctgtactattttgtggcccaactagaaagaaacatcaggcggaggaaataatctgctgggcccttagcaggcgaaatattgaactaacctactgggctctagcgcggagtcaccgataagaaatgagaatttgaaagggaaaaaataaaaatatatctatacaacatacagtatagtacggagtactcagcagcagtaataaggagtataacttacatatagtgggagtgttcggtaagccagctgcaacggctacagctgtaactgtggctgcgcatgtcggctgttgcgtaactgcagccctggtagctgaacgggcccagtaaagagtacttactctgttccagaatataagaagttttagagttggatatggttattaagaaagtaggtaaaagtgagtggtggaggattgtgattagatgattagtggaggtaggtgagaaaagtaaatggtgaagagttatgattggttggaaagataatgttgataaaaaagttgttataatttgggacggagggattataatttacatagatgatataactaggatctaaccatccaaagcaagttgctggcgcagcagtagtgcatcagtgacgcaaaggaaatattgtgatatccaatctcccgttcgcgtgctgctagatgaatcttggagcaaaatccagtggtgaatgttctaaacaaaatctaacggtgaaaagaaaaaaaatggttccacactacttcctccgtcccaaaatataagcatttttagcatagcgccaagtcaaatatttgtaactttaactattaataacaacaaaataaaaaagatcaaaaatgtaaaattgatgttgctagatttatcattaaacaaactataactctttttatttaaaatatcttacttttatagatattattagtcaaagtagcatctcaaaaaccatgttagagtaaaaaaaatgcttatattttaagacgggggagtagaaaactatcgccaataatttagcgattccgaaagataaactcattgggtcggtccggttttgctcgaggtttaatttattctttgtttgctttgcacaggaccgacacagttcgaccgacaccattagggcctgtttagatcccacctcaaaattttaaaccatatcacatcgatcgtttgaacacctgcatcaaaatattaaatacaggctaaaatataactaattatatagattgcaactactttgtgagataaatcttttaagcctaattacttcatgattttgacaatgtgatgctaaagtaaacaatgctaatgacggattaatgatgcttaataaattcgtctcgcggtttattgacggatactgtaattgtaattgattttttattagtttccgaacactctatgcaacagtttatataatatccgatgtgacacaccaacaactttacatcctggattgtatttgatttgtgtgaaaattttgcaggaaggtgcttggaaagcatggttagagagctcttgtaactcttctcaagttcttttaatttcttggaaaaataaataataataaatcatcaattcgaacttggccttggcccttacatagactaggcacaactcgtacaagcaaacaaaaataggttcatccctccacgggtaagcatgagacgatcagacgatgctccaccaagggagcaaagccttcctgtggatcacgactgacgtgtccacgcgggcccgcctggccgcgtcagcgaccgactcgcctctcgccacgtggtcacctcccgagtctccacatccaagtctgatacgtactgctactcctgctagcagatcgatgactgaacgtacgcaaaatgattcatgcacgttgcagtgtacccaatacaagttatacaactatatgtcacaagagttgtatacgaggaataaagagatgaccctttttattgatggccaaagttttaagagtttgactgttcaaatcatttctaagtaaaggatgattacgggcatgagatttttactgcaattttaagctgtgctgtatagtgtaacggttcggatacacaaacgcatagctgctggaagctgttgcttgctggctggttgcaacgtagccgtgctacgctaggttgtccgaacaaagcatatatgttcag

SEQ ID NO: 32552 - DNA, 549 bp, Oryza sativa
gaacagcttggttggttgatattgcagcagatatcatgcataataaattgtacaggcatattacggttcaattttgattgtaagatttctgtttgcaaaagctaccagctacgaaagtgtgagccatcaattggatgatttgatatgtgaagctgaagttggataagaggcttagacgcatatgagttggaaaaaacagtagcagtagtacccaaaagatctgtgcaaaaagttataccgctggaacatcatgagcagaaaaaaacttagtaaatacgaactgctgcttgatttcagcgaaaataagtttgaggagattcgctgagctaccagcatgatatgtttctaccgaaaatacaagcctacccatcgtaatcattagttatcacttagtgctaatacttgatacgagaaacttgaagccgcttttgctcccgaaagagaattgtctagtgaccatacttctggaactcccactcgctgttgtctgcatagataaaatagaaaagtaaggcacggtgaacgagcagaggtaacaaccacaccaat

SEQ ID NO: 32553 - DNA, 587 bp, Oryza sativa
ggcgaattcgagctcggtacccgttaaaccattcagccagggtgctaaatctacagcaaatttggtggtaacccgataaaggttcactagttaaaatttattgaggtacctcgagttcaataattgaaccaaatattttcagggccacagaaaatataccacaatcagatttttagcacgaatcgctaaaaattaaagaataaggaacattaatatcacctgccccaacatttacactacacgttaacggatattaaataactgcattctgaggcttcaattatctaggagaccattttgccacgtaaaacatactaaatccgaccgttcctagaccgttttatgcccagccttatcccaaacatgaagtaagttccaaaggttgagattagaccatccagaatgcatgctactgggtcaggacagatccaaccttcattgtccgtcataaccatcaaatctctatgcccagaatatcgcgagctgtacaaacacactaaatttcaccaagccgtttgctgcatgccctcccaaagggccaccaaatctgtcatcgcgcgccaatacaatcctcctaagcaagcggc

SEQ ID NO: 32554 - DNA, 586 bp, Oryza sativa
gtacccgttaaaccattcagccagggtgctaaatctacagcaaatttggtggtaacccgataaaggttcactagttaaaatttattgaggtacctcgagttcaataattgaaccaaatattttcagggccacagaaaatataccacaatcagatttttagcacgaatcgctaaaaattaaagaataaggaacattaatatcacctgccccaacatttacactacacgttaacggatattaaataactgcattctgaggcttcaattatctaggagaccattttgccacgtaaaacatactaaatccgaccgttcctagaccgttttatgcccagccttatcccaaacatgaagtaagttccaaaggttgagattaaaccatacagaatgcatgctactgggtcaggacagatccaaccttcattgcccgtcataaccatcaaatctctatgcccagaatatcgcgagctgtacaaacacactaaatttcaccaagccgtttgctgcatgccctcccaaaaggccaccaaatctgtcaccgcgcgccaatacaattcttctaagcaagcgggctaatataagctaga

SEQ ID NO: 32555 - DNA, 581 bp, Oryza sativa
ctcacgacgctcgcgtttaggagtggcccgtcaccgcgccgctggtcgcctgggcgttgtagtcgcagtcgtcggctcgtcgcgagtcgcgacacacggcggcgttgttttcgctcgcgcgcgcgcggcgcgtgagctgcgcagaccagctcaccagcgtcccccgcggacgaagccttgcagaggcggcggctggttgcggaggggaccaaagcgtgacggacgcgggcgtgtttgatgttgttacgcgagcctatattggcgtaatgcgtggggtacgtatacgatccaaaatccaatcatcacgtgcgtgtgcgtggagctgaggtcgttgtccggtgtcgcttgtcgaccgagacacggcgcaccgcgcaccgactggatggattctgtgtgcacggcggtcggcagcgatacatatgtcgccggcacgctctgggagctagctaacacggaacctaacggatcggtgactggatttggggaatgggcttctataactccaagtgcatgcgtactcgtttgcttctcggaggagtatcaatcaaaaggtttgtacaaaataaaaaccgtgataccat

SEQ ID NO: 32556 - DNA, 594 bp, Oryza sativa
tcccccgctgcttacgcgggcgcctcgccgcggagggtgaatgagtaaatctctcgcttctcctcctctccctctctctctctctctctctctctctctctcgcaggatcggttacgttccgcgctgttttggggggtttgggtcgctgggcgcactaatacgtttagggatcttagtttcatcgaccaaacgcccgaggaagcggtggttgctgtggtgagggtcgtacgggcgcttgaattcccagtgtatttttttcctctgccgcgagaacctgcctgcacattgaaacaagccgttagggttttgatgagttgggtagagttaatgctgccgacccgccctgcaacaatgcccacgtattcgcaccgattttacacgtttaaccaactcctcatatttccgatgtgattttgcttcatctgtttttgtgaaaattaggggactgggatttcatgccatatagttcaaacccaagcattgtttcttctgttaagttcatattgtggtgctatggttctcattgttaaactttccagaggaatgtgccatatctttgtactagtctaactattagtgcattatcatttgat

SEQ ID NO: 32557 - DNA, 676 bp, Oryza sativa
  unsure (1)..(676): unsure at all n locations
ccgcttgaagcgtaataccctacttttgggcttgggttattgaatggaaaacaattatgcttggaggtgccaaaaccaaaccccaagtcccttcaaaagtccccccttccaccattaggtctggacctccttttaatccttaaggggtaccaacttgggccccaacacacttaccttacttccggggaaaaagtataataattttggcttaaaaggcttgtttggcctttgaactgggaaacccaaccccccttcttttgaataatggggcctgtaaaatctggccgcttaacccaaggggggcccttgtcatcaacatttaatgggggaaaaactcttggcctctattacaccgggaaacgggaaccctgctttgaccaaagaaggaagaccgacttcggctgggaataaagtataaaaacctctcaccatcattatttgatgggacatgtncggctgcacgtcggctgacatacgcgatggtgcgcctgacatactgggtcccatcggtcattcgaccgggcacaaaaccgttgagtgcactgcacaccgcattaaatgccgcgtggcgcgaccgctcgggtcgccataaatgccggtaggtggacacctgtaagcggacacctaacccaccgtacgtggtgacctaaagaggggtcgggggagcccaccccta

SEQ ID NO: 32558 - DNA, 751 bp, Oryza sativa
ccagtccagtccagcaggttgtggttcggccgcggtccacttcgctcgcgatcgtggcctggccgtcgtcaaattcaaattcaaacccccaaaaaatataaccatatatcggacgaaaaaggggggattttgttcagacgtggtgtgtttcatctttcaacggatgattgcatcacaagggaaaatggaggactcgcacaaaaaaaaaagcacagatacacgtcctttttgattgggttgtggccaaccttcctctcgctttctctgcctcctgttgccgtgaaaactgaaaagctcactggtcagtttgatctcgcaccgtactagtactactttactttggacgtatagatgctgcttgcttctccctggtgcacggagacaacaagcaaggctgcaggacggatggagtactgtttactcggttgtctcgtccgtcctagccagtgaacgagcggcacgtccaagcgtagggtacaagtatacacgtacggtgacaaactttgcaaaaataattataccggattctcgacatattatagtctaattttcaagtaatacaataattaatataacttaaaatagctagaagtagtaatataatgattaatatgacttaaaatagctagaaatagagataagctattcggtatctgagaactgccgtcactatactcaaagtgctatacaaaagaaatagattttttcttaaacatcgaatctatgttatcaacgattattatgaacacga

SEQ ID NO: 32559 - DNA, 1723 bp, Oryza sativa
gacatactaaatttattttattgcagcaagattaaatacaacattgtaaaacttttgctggtaaatgagccattagtacagtaatagatgtacagtactaataacactggaataaatttttaatgagaaccattaaaaaaaaattatgaagtgcatgtgccattagtttggtttaattaaaagagaaagggaggagaacagttctacttttccaatatttttcagagggcttctatgggtaaccatttggcataacctagggtcaaagaggctctgataccaacttgtcacgcccggaatttctatccaaaattccaaacgcttacatgtgtgtgaaccctcgtccaggaatcagccgaggcacacaataacaaattgataatagagtacaaatattactctaattaataagtgaataaaatgtcattacagaggtagatagttcctctcaaccaataaagttctaagcagcggaaattaaataaacggcgcagacggctccactccacaggcagcttgaccaaggctacacctaatcctccacaccatcagcctcattgtagaactcttcctctgatgaatgattgcaaggtgagtatatgacatactcagcaagccacgcagcaaatatgcaagtgcacaggataacaaaggatggcatagtagggttgcatttgcaaaagcagcatttagcaaacatttgagaatttgataaaacagttaagtaataattaagcaatattaatccaacgctatacaacataccctgttgtataggcccaaccattctgaacaaccaccccggctgcacagttctatctccaaaccaggaatgtaccattccaaaccaggagctaatcaaattattaccagttatagcatcttttactatgatgagaggtgtgagactaatcacgaaagacattgttagacccgcccataaccgcgggcacggctattcgaatagttttactctgatcagaggtgtaccactgtacccacaagacacaaccccacatcatgtcaccatgtgcctcaataccaccacggtatctcggaaaggagttgtgacaatacccctcgcataacacaattcactgcagcgcaccttcctggatcataatcacccccttataaacaaggcatggactccccagcgacccccgtgggcttatctccgccacttctcagtctggtgccccgcaatgaaccatgctatacaaaagataaagccgttgcccatgctggcttgtggttggcacgataaatgtttcacaaccgaaactcgtgaaccggtccttaattgtcatgagcacgaccatcaaaaccatgtgctcacaacccaccattaccaggttttagttggcacattaattaattaactaatcacgattgaccatcgtgaactatcaataagccatcatgaaataatagtgagtcattagttatcccataagtgtactaatgtttctaagcagggctaagcaattatacctaatatctagttgaaccaatataaataaagctcaactagtcaaattgtaataacccaaggtatcaaggaataaggtaatcaatgtacaaaagggccataacaaagaataggtcaattccacccaatgacattcgaaaatagatgcaatagttgaatagaaacatagctttaaataggatcaacatgctcaaagggttgtttaggatctgtgtgacttgccttgctggc

SEQ ID NO: 32560 - DNA, 603 bp, Oryza sativa
ttttggtcgccggtgtgttcgccgtgccgtccgctacccgttggtgccctccgtgtgcgtcctcgcgtcgccgttcgccggcgagcatgcgccgcccgagccgtccccgcccgccgagccgccgccgccgtcggtgacgtcaccgctgacgtcatcaggatcctctcccgtgagccgccgtggacccgatcaatctcggccgtccgatttggatcggatcaatctcggccgtccgttcgtgtgaaccgccgcccgtgcgccggtccacccaaaccctagttgctgacgcaataatccccttttccttttcaaaaataattcattattgcgtcataattcaatttaaaccgatttaagtgttttaatccgatttaatctttaaaaattcataactaattcatcttagctccgatttagttggttcaagtctctaaatttttctaaaattgagatctacacattaaaaatatccacatgtactgttcatgcttgtttatgtgctgttttggtgattttgcttctttttgcttagattccgtcgtttccggagagtccgttttcgcggaagaagagtttgaagagttccaggccagcaggcaagtc

SEQ ID NO: 32561 - DNA, 624 bp, Oryza sativa
tgataggggcgatttagtgtcccgcacgaccgcagagcaaggctgcatgcggggttgacgggcaaaagttctgcctctggtcccggacgggagtctcaagtccctgacaggcgtccctgcgatggagaggtcaaccgcgcgcggccgaggttgacgactgcaagtgcgatgagaccgtggtgacacacacgcagttcgcagcggtttgagcccgggtctggcgtcattgcaatgccactgttccttcactccggtgacagccagtggcacctgatgccgaaacgtgggccatttcgtgcgaattgcgggtggcgtggtcgcaccggctttccgatgctggccgtcatgtttcctcaccttggagcaccatcatggaattgatcgtcagagcggtggatgtcggatccggcaacaccaagttcgtcactggcgtcaccggagccgaaatccgttgcgccagcttcccctccatcgcctatccatccagcggcgagacgccgcagtggccagccagcgaaaggcgcaagaccgtctgcatcccagtcggcccgctgttctacgaggtcggacccgatgttggcctggccgcggacaccttccgcgccaagcagttgcacgacgagt

SEQ ID NO: 32562 - DNA, 652 bp, Oryza sativa
aaactaaccggtaggtgaaatctttgtcattcctaacccccgccgagttagtccgtttttgctccattgtgcagaatgaggaggcgattgtctcgtctgttcaagggatccggctcttcatcaagtcatcatgacgagtctagtactcgttcatcagccgatatcatgatggaagaagccgaagctccacgacaactcctgaacgacgctgaccttgaccttgtcggtgatcgggagagacaagcctactacatgctggccgaccgggagtatgctcacacgcgagagtactcactggagttgctgaaaaagataggtatggatactgaatttcgttctatttggaaagctgttggttggcagaaatttgctgtggtatatgagcctggttctcatttgcttactttgcaatttctgtgcactttgaaagaaatggaagatggaatttccttttgctttttccatgaggagtttacacttacatggaaaggcctaagcacacttcttggttttcacgatacctgtaaaatcgatctccagaaaggaatttctgggttcgagaaaaataggttttgggaagatatttctggtgctccaatttgcaagaaacctaggacgaatgatatctataatcctacacttaggctcatgc

SEQ ID NO: 32563 - DNA, 557 bp, Oryza sativa
tacgtggccgtatacttaatgctcgagatatgcttgcccaaaggagatagagaactggtgtgatcaatcacaggacaatgtgtagatatgggatgggatctaagcgaaaaatggtgctgttgactatattcaatacaaaacatgcataaggcaccagataaattactaggaaaattcatgatcttgaaaattaagagtatatagaatgaaaagaaagctcatcagtttcaataaaatgatgaacggtcgcatcatgtacgataattggtcgttgaactaaaagtaggaaggagaacattacatattccctgcccaaagaggaagtgacatgcactgaaactgaaacatgtacaatttttacactactaagggctgacgcattattgtagatcaattcttatgttttagactatgaagtatactagtaagtctaacagctctactctgacacttacgatatagtggatgcgatatgacactgattgcaggaaaaaaaatgattgatggcgaccattgactagtgactaaaagatctgattaaggggaattgctcttgt

SEQ ID NO: 32564 - DNA, 521 bp, Oryza sativa
caatagagacaattttccataatctaaatcatacgcacttttcatactactttgaaaacaaaaaaaaagttactactcgtggtattttttaaaggataaaagaaaaataaaaggtggtagtatattttagtggagtctggaaaatatatccatgtcggctgttgatgaaaaagaaaagaggaaatacaacaagcactagtagtagggcgtatggaataataatactggggcggggtgagtagctaggagaggaggagcacgcgtcgtcgtcgtcgtcttcctcctcctccgctcttctcttctcttctccgcatcgcattcattcaagtctagtctctagtagacgacgaattcgagatcgaatcgatcgatcagatccctctcctaaactataccaaaccctagccctaacctcatccacctctccgcccgcccccctccctcccatctgccccaaaccctaacgatggcctccgcttccgattcggacgacgccgacgccgatttcttcgacaagctcg

SEQ ID NO: 32565 - DNA, 648 bp, Oryza sativa
actaatgagactaaatagttcagaaaattttgacataaatttctaaaatgaaacaaatgtaataaattaaaatttttatttgaaatttaataggaaaatattttttttatcgggagcatttataaaaaaaatatcgtgggttgtcctatctttgcatgattgctcctcatttttatgactttttaaaaaaaataaaataaatacatatttttatttcattatctaaaaataaattttgtcataaataatgtatcaaagagcaaactcataacaataatagtgtcatgcgacaaacttttacattttcaatggtgtaatttataaatttctatgttcattcaaagggtaaaatggtcatatttatagaaattagacggtcaactaacgctcaactgatgggaggggtatggaagggctaaaaatcaaattttgggtatataaagaagcaagcaaaattcaaaggaatagaaaggattagctaaaattttagggtatacaaggaattttctaaaaaacaaaatatgaaattcctttccatgtgattttagaagaaaaacacaggaaagctattatccactcaaagctcattttttggctggctcacacaggcaaatcacctcatgaacggtggaagcaacgaaataagcc

SEQ ID NO: 32566 - DNA, 526 bp, Oryza sativa
tgttcttgctgtttttctgtgtgtgcttagtgctttgctttggctacccaagcaatggtggccactgctttttgcaacaactctttttcatcaggtcagaatttgctcacctaaaatttttatttagagtcagctcatcagaggtatttggaatcttttcgaattaaaaaggcatcattatatatatgatgtttatattttagtagcatttatctgataactgtaaaaaaaaaagggtctcacgagatactcgaagttattgacatattgttgggcaggaaattccagaggtttcaggccggccgtaccttcaatatttgtttggatttaagatgaaattaagaaatgattttatccgaaataaaaaaaaagaatttgagaaatgaaatgggaattgaaagcaacaccgtcttgagttcatcctgcttgctgttatcaaccacctgaaactctgaattgaacaaaaaaaaaagggcagatgacagcaaagaacaaatgaccatgcgtgcatcagaatttcgttggc

SEQ ID NO: 32567 - DNA, 656 bp, Oryza sativa
taaacacgcattcatgtggtaaaaatacacaaatcatatatgcactcatgtagtcggcaagaaattaaagatataattcctcatcaacaattaggttgacaacagctctcaagtacccccaacttgcagccgtattgtgtctgtatatatgcatggtattatcatctcattacaaacttgtggtatcttatgctaatgacatgggctgaaagataagttcacggatgcaaatgggatacccgtccatgtctcaaatgatgagtgtgcctagcaggggaacaatataaggatttattattatttttaaccggattactttttaatatgaaaaataaacacctaaaacttataatttccaattctaaagttttttgaccattccagtgagatagcagaataacacacaacatttggcaccaattggactggcgcagcaaaaaccttaccatgctatgaatttttacttggcgcggcaatattaaattataatatagttcattaataaatataatttgtaatttgtaataatagttaatatttaagtaatgataagctaattgagtatgttttttccggtgagccaaagcggctgattgcaaccgacatattgagggggtgtttggtttatttcctcattttgccacgtcatgctttag

SEQ ID NO: 32568 - DNA, 723 bp, Oryza sativa
ttttcaccaaccacgtgcattgatctttagcctaagcatcccgcatgatatcttgatcatctggacgtcatcttctcccaagtcgactcccgatccatcaccgacaacactcttccgaagcattaagaatcacctacacatgcatcaaccaagaaaccatatccgagcacaagttctcaccaacttgactcattgttaagaagcaatagtattacatacacatagtatccatctagaagtcataaacatgaattatccacgtatatccaaacaattgaccataaaccaaaaccgacacaacatcagccagtcagactacgtgctggctggtttgaccgcacatataccgccggtttgaccaactaccacaacccggtctgaccgaatacactgtgtcagcagtaatccctattcatcacctaaaaattctaattatatccaaaatcacttcggtaataatctccaaatatcaaaaccaataatctcatataccaatagttcatcacaaaataacaatcaaacacgctttggttttacacatatattttggaaaaaacaaaacatgaaatattcttaatacttttgaatggagggactaattaccagctatcagtctcctagaggaaaaaaatgattatttgatgttatagagattaccactttgattatgcatgtgatttgccattttacagattatctcttttacgcatgatccgacccaaa

SEQ ID NO: 32569 - DNA, 1205 bp, Oryza sativa
tgagtggggcccaaattggaggtagattaggatgagtggattacttatttttttctacgtctaatctaatggtcgaaaaggatgcacccatcaatttaaatgaaaatcaagggttagatgttttttgccacgtggcagcttagtagcgtttgtagagtgtcatgtgacgacataggagcgtttgtaggaagttaatgaacttttagtatatcctccctctgtttctaaatatttgacgccgttgacttttttaaatatatttagatgttcgtcttattaaaaaaatttaagtaattattaactctttttatatcatttgattcattattaaatatacttatatgtatacacatagttttacatatttcacaaaagttttttttaataagacgaacggtcaaacatgtgctaaaaagtcaacggtgtcaaatatttagaaatggagggagtaatagatatttttaatataaataaatctttatttaaaaaattactccacaaatttatttttcctcttttttgaacgagctgaccatcaggagacgcttgtgggccatcttttccatgctccattttcatcgttttctattgtccgagtatgcacttgcaacctgcaagcaattttttgtctgtttcggtgggtgcctccgtggaggccaaataatccacgattttaagacttgttcataaatactccgtatctagtgccaaaaatagctggggctggtgatttgcacatgtatacatctggacaggggaccttgttagggaaggttggtgccgtacgcagacaccgtcattatcacgattaggatcgagattttcaacgtcctctcctaattactatagtgcacatggatgctaaggcatgcaattgatgtgacgtgatagtgtaattatacaatcattgagacctgcaacgcgcacattgaatacaaatatatgaacgcaaaatggatatctaaaaagaaaaagcctaccgaaagcaagtatccaaaatggcatccattttgattcgattcgaagtcagtaatagaaacggacaaggttagataatggtaaaaggtcactagttacaaactacacagcaaaattcgcgatgagaaacgcgtacacaagcgctgacaaaatgaatacaatggcatggtaacgaccaagccaaactaaaccctatctcgctaatccaatcaattaatcagcataca

SEQ ID NO: 32570 - DNA, 1257 bp, Oryza sativa
caagaacacttgaacatgaacatcaagaatattcttcccagccactgggaaccatcaaagctactcatccccatcaagaacacaatcacaaaatacacatcaagaacatatagataacacaaaaggctgccgctcaacaccaactccgctgctgccgctcgacaccaccgcccctgccgctgcctcccctccgccggatctagcggagaggagaccgctgggaaaaaaattgtatggcaccccatgccacaaagcatgcgtggcacccctatcaagatcttgccacctggcgtgcacaaatcttggagcactgatctaccttcaaaaccatactagggcaaaaactaattaacaggctatcgctaatctcgcgcgcgcggaaggatggcggcggcgatgcgcgtgacggcgacgcacgggcaggaaagacgacgtgcgtgcaagaaagggcggccgctgccggcaacggcgacgcggacgcacgcagcaacacggcggaaatcgacggagctagcgctgcccagattgatcgcgcggcagaggtgcacgggttgatcgatcatgactcgaggacaaacttcgctgacgatgccatgaaagaccaagccactgcacatcatcagttcggttcagatgatgaggatcttgaagattgcatgaatgaagaaaatgattagtgtgtgagtgtggagattatgggtacgccatacccacatggcatggttatccgactagtcataggggatagcttatatctatggaatatgtaacaaatcatgacttaggtattacgtttccttttatattatggagcggcctaacgtcctgatttgataatattgtaaaatagatttaggaaaccgataccgtattggttacggtttctatcttgtaattctgccaaccatcctatataaggtgggcagtgtcacgtcctgataaattcatcccgaaattaaaaatcattcgctaaaaggaataatagaattaattaaaattcggaaagaaattggcaaacactaaaatacgtacaagaaaaattcgaatgtggcccggagaatttttgttaaattctccttggtctaaaaaggagccctcaaattttacttgaattttcagagcaccggaaatatttattaagcaacaaaaacaattatcagagtttattaaaaagaaaaacctaaaaataatctctctccccccctttgggcagagtctggcccaaagtcctccctctctcccctcggcccgcggccg

SEQ ID NO: 32571 - DNA, 663 bp, Oryza sativa
agtatctacgcactataaaatcatcgcaacgatctccgaacccctattattggccgcataggtatatactccacaatctggtcacactagcactagcagtagctcagcttttttttttttaactccggtagctcagtttggtcatgtttgaaggagtttatgtctgactaaaattatttttttaaaaaaaaagtctttagctccttcaaacggtacaggtttttacctagaatataatttaagaatttatagttgcagaattcgaagaataaatttaaaaatcaaaaactgggaaatatttttatattcctattaagtgtctatttatctgcttctctgaattttgagctccgtagatataaccttattcggtccttctccaacggtactagttgggtgggagtggtggagagagggagacgaccaaacacaatccagcttttgggtggagggagatggcttgatgagatttggctgtagatgcagggaaaaggaggtagaccctttttgttggcactgtcggctctaatggaaaccttgaattatttaaggagatcatgtcctcatgtggcccctaactattagccttttcgtaaaaaagcatgcgtgaagagcgttacatagaaatagcagctgacagatgaaatcatacatcaaacccaa

SEQ ID NO: 32572 - DNA, 737 bp, Oryza sativa
ttacgcccaagaaagatcatgccattgaaaatgatatggactcttatttaataaatcagaaattagtaattaataataaatatggtggcaaaaatatcaagcttagactgtcagtttagtattttattaatctatttttaaaattcgaaattaataattagctagttgtaactgacgtggactctcttttaacataagcaactacactttcaaaggaaaccaacacgttaaatataatattagagctttaatatttatagtgtcaatattcattaagaaggggtgaaacgatgatatgttcgcacgttatccgtaggacctctcaaagaaagaaattgaaggatatatgaaacgtttgaccattcgtcctagttaaatttttcgtgcaaatataaaaatatttatatcatgcttaaaaatatttgatgataaatcaagtcatattaattatataaatttttttaataagataaatggtcaaacgtttagtaaaaaagttaacggtgttatacattaaaatacggagggagtattaggtagagttgtcgtttttgctacggtatgtttcaggtgttagggcaccaacgttgcaccaacattattttcaataggtcccataatcagggtagttagtaagtttgtgccaaatccattatgtgttatggatagggtggtaaacaaggcgaggcactattgaaaataaaatcctctaacttcagtctctctagtgagtagaa

SEQ ID NO: 32573 - DNA, 756 bp, Oryza sativa
cacttaaaaaggcggcacgcgaaaatcgattttttcgtgcggtcctcttaagtcgaccgcacgggataatgaggaatatcatgtgcggcgacagcccggcgctggtcccttattttcccgtgcgatttcagttactgtccaccagaaaacaaaagggcccgtcaccccggaaaatcttttactgcgtgcgtgcgggcatcaggtcattggatcttagcgtagctagctatcatcatcatatcaactatgctcatctgtcgcccacagctctatctggatgcctccatgcatacatgtgtgtgaccgagcagcggaagaggggaggtccaatgggggagggacaaggggtgcggcgctgatctggttgccgctgggaacagatagatatcgatcatcgcccgccgccgccgccgccgccgccgccgtcttccaggcgatcggtcgatctaggtgtgcgtgccgcatgcgcacgcgccgtccctttgtcgaccggtagatcggcggtggtccgtcttgatcaatttcttcttctcctttcccggcgcgccgtgttgcatgctgcaggggttttggctctattcgactcctcgtcgtcgtcactttgtcacaacccttgcaacttgcattgtcacattgtctcgtctctcatgtcatcgtatacaaacagcggcatgcagcgccagccatgggtgcctagctagatagcacggctagctggcatgcatcaagatcattcctcccaactaaactgacgaa

SEQ ID NO: 32574 - DNA, 761 bp, Oryza sativa
tgaatcataaactgaatcattttcttcattcatgcaatcttcaaagtacatcaatcaaaattacttcaccgtcgaaacatgaattcggcaataataaaagggggtaacgcacgagacctaaaagtagatggatgcggagacaaaggatttagataggttcaggccctctcaatgagaggtaatactctgctcctgtttggggatttgaatccgccgggtgtattatagatctgacgatcatatgtgctcatgccccctacagggcctcctacccaccttatataggatggggggcagaattacaagatagaaaccttaaccaatacggtatcggtttcctaaatctattttacaatattatcaaatcaggactttaggctgctccataatataaaaggaaacgtaatacccaagtcatgatttgttacatattccatagatataagctatcccctatgactagtcggataaccatgccgtgtgggtatggggtacccataatctccacagtagcccctaagaccttcatagtcgaaaagataatcttctctcgaactagattactccaaagccgagtgcttcaatcatcgttgctatggtctcccgagtacttttaccaaatctgaagactgtggagggctgaaaaataaagtcaggtgcatcgactagatgcacctaataggtgtagccccccaactatgtggtcaattgaacaaaccaagcatatagtcaaggaaaataatccaaccaaccgagtggtt

SEQ ID NO: 32575 - DNA, 816 bp, Oryza sativa
atagaaatgcaatctataaaagtgttagtattaatcttgaaaaactttaaggagcagctgataaaagaaatgtactagggcagaggaggtggggccttctctaaaaaggagtatatagatgatacatttagaaaaagtcttccatcatggtgtcgtacaagtcattttgtacggtggtgtagcattgcatcacacaatgatcctatagcagctggtacgttgaatgaccagcagtactaaaaatgcattcaagtacattgcatttgcatacagctagttaacgtaagaagcaaattaaacgatatttccgtacaaacttccaacagtgcatagaatgggcggaggatatgatctacaaaaggaaaaaatcaccaccatcgagatatatcgattttactttgaataatagtggaatttcttttttggctaaccgtgaatgtttttcacaatcacaatacattgatgacagctctcaactctgtgagtaatttcattcgtcttgacttgagtgtaatgctaatttccgagcctagccatttacaagattattcggtttgaccacacctcttatttcaagcccaataaagatcgactcgttagtttcattgactatagttatcttctattccgtctcgtaccttgatatgcactagtcacatgttattttactatggctatgttaggataacacccttcatgcatggttcttgctcctcctatgcattttcgatcaaagtcaaatactcactcagccccttggtcatctcattgttgttcttgtcaccacatctctctcatactatagttgacactcca

SEQ ID NO: 32576 - DNA, 548 bp, Oryza sativa
  unsure (1)..(548): unsure at all n locations
tcgcgcaatttcgtcgaacaggtggggggcaattcgccccgccaaacgggggtcaggtcaggtcagccagcgtcggcgtgagcgcacggaaggcttggacgaagcgcgttacctgggcacatgtcggggcagctgcccacgatcggcggggcgtcgccgccggtaccagccgcggtggcgctggccgccgccgggaaggaacaggtgnagtagaaagcagnaggtggcggtaaggggccggcaccgcggctgagaccaaggccgcggccttctccccgacctcgccagcctcggccccatccgtggccacgagtggaactccggccgcggtggctcgccatgtcccggcgatccatggcggcctttggcctcgagctccgaggggtagtctggtaatttggtggttagttgaaccgtggagtggaacaatggagcttcaaacgaacatgcttttttagtggagagagagagggggggaggccaagatttttttttaaccttttaaaattttaattttaaagtaatgtcctgttttccaattttttttt

SEQ ID NO: 32577 - DNA, 560 bp, Oryza sativa
ctatagggcgaattcgagctcggtaccccttactctatattttactcctacagtactggttaactttgcatgagaggcgaattataatactaatagaccacacttgtggaaaagaagaaaccaaattatcaattattttggcatgacactctgtcccaatgtcattgtcagggcagggatgatgccactatagccaagggaagcatcattgctcaagcttaacccaagtagtactagtactcctcatgattgattgcttccatctttgtgctaattaggcatggagtgcaggacacttgactgtacctgcccctcactttccaagtgtgagtgagattaaagcacaagaaatgaggatttctttttttttttcaaggtacaactctgccagtttggccaagcaaaatgttggtactatcatctttgcatcatcatcatcatccacctgaggaaaaacagtagaaggtcccttttaatgttcaggtgaaaaacatgagatgttttattgggcttttctgctatttttctttcacctcacatgtgttagtggcctgcatcaa

SEQ ID NO: 32578 - DNA, 647 bp, Oryza sativa
cgaattcgagctcggtaccccttagtttgcgccagcacagacccggcaccactggccgagtgcggatttttcgtcgacaatatgctacataaaaaaacattcaataactaataaataaatattaaatttttatatcaaatctaaaactaaatttgtcgcagttaatatggtgcataacaaactcataaatataatagtctcatccaacaaatttctacatccaacaatgtactccattaatttattatgtttctcgcagcaaagggaaaaatggactttttcataataatttagcagtcaactagagaaaagggcgtggaagcgatccaaactaaaattcaggggtatgtaagagaatgagcaaaattcagaagcaaataagagattaggtgaacttttatgggtacataggaaattttctctatgagtaatgtcctcgtcatatcattttttaccaggagtttgtaagagaggccccacagcccttagcatcatcatatatccatggctacataattaatccaataaaagtttttattttggtacaagagtttgtccatgttcctagggaacttctgacgagaaggacactaagttgtgccacatcagcactaggatggccagattagcattccctttttttctct

SEQ ID NO: 32579 - DNA, 504 bp, Oryza sativa
cggtgaagatattcctaggcatgctttgctgtacctatgttgatggggaatttattctgtagtgtcaactcaagcgctagcaactcaagatacatctgagtcagaataaagtcattctagtgaagaacccctaaattctctttctctttttcagagagaagaagccccaaatttgatatgattctgttcttttcctatctattgtcatattcgtgattttgtgtaagattcttatttggtttacacctactgacacatacattaattttttaaacctggacaaggataccattctacccattgattatttattgacagtcctgttcagatagggggaattgtatccacactgaaattggccatgaaaaacgcagagtaggcctagttgataaagagctaagattttgattgtcagttcttttgcgcaaaatagatgcttacttggctatctattaatataactttatctatatggcagaatggtggatgggataacagcgatta

SEQ ID NO: 32580 - DNA, 988 bp, Oryza sativa
  unsure (1)..(988): unsure at all n locations
tggggatgtcagggttggccagcgtgaagcggccacctcgtccatgtcaagagcgtcagcaatacgaggaggaggcagccatgatgagaattggcgtccgtggacggtgaattcgaacaccgttctgcctcaagcatgcggcaagctcgccctccctcgagaatgggtttactgagttgtgggagagttgataccatcagcttgggttttacatatctcgtcgaattaatcatatgtactaatgatgttatgttgctctagtcataaaatgtagggaatggttggtcatgatatcgtattcacggaagtgcggtttcaccgaaaagcgtaataagtatgtcggttttatttattttgactaaacaagtctatgttgagagggagtggtaataaggctcggttctttttctcaactccaaactttaacttcctcgttttccgtgagcatgctttctaaaccgttaaattgtgcgttattgacaaaagtttctatatagaagttgtttaataaattaaataaatctatttttttcaattttataatagttaatacttaattaatcatgtgctagtgagttttctcgttttgcgtgtgctggaaatatctctccagttggagagaacaaacggggcctaagtatcgttgagaaaccggtctattctgccgaaaaacacacgagcagacaaacacagaagctgtagaatatcgaaagtacgagtgagtagaaactttatttcttctgaatttgagtacaagctataggatggaaggcaggaagtgtcgaagagcagtcaatatcaccttggacctttaggatcctatttataggcagaggaggttgatggcttccactgtaagttgtaagttggcttacactgtaagcttgcgtatcccacaagctggcttccggcttccactgtgagttggcttacanccgtagcttgcttctcccacaagctggcttttgcggcaagcttgcttctccta

SEQ ID NO: 32581 - DNA, 728 bp, Oryza sativa
agctaacaattaaaactaaccacccacgactactatatttcttgaatttattactgatattaaatgagttcattaaagttcaagttgcttaggccaataaaataaagacaggctccgacacagttataccacaaccggcatagccatgccccacacgactccaacaagaagacaaacgagaaagaacacacacgcaagcctactaactgctcgtctaccgctgcgacgggccagggcggaaggtgagcaacagcgcatcctccgtgctaccaacgccggaggtttccccctcctggggaaccacgggcgcaggctcggcacgaggggtctcgacgaagcaggtccacgccagggactgactaacaagctcgggcctggaggtgctcttgcgggcggtgatcttctggctgcggcagacgcttgggacggcagtcctctccctgagcgatcttgagctgatgcagctgcgcctccaccgcatctaggtccttcttgagctgcaggttctcctgacgcagctccaggatcttcatgttgttctcgaccatcccgcggcgcaccatctgatggaaatcgatacgagccgcgtcgtacgcctcaccatgcgcgccaggtgcgcgatggtagcgtcatcctccgagctagcatcccggaaggaggcgtagtcgcgggctcctccgcgactaaggtggtaccggtagggcgagtgctgcaactcgtccgggtag

SEQ ID NO: 32582 - DNA, 541 bp, Oryza sativa
aaaaaaaaggtaaaatcataattgaaatacagaatataggtaagaacccgtttgtttcagaattcatgcaacctgctgtaaacttgtgtgtcgggggccttgcaggcttgcagctacggtagatggaatgatgagttcggtcaatatttttttctttcacaaagctaacatgtcagggtaatcagatgttaccgtgtaacacgtctaattaataatctaaaaaacaatatagatgatacacctgatcgtgagtgatgttcacccttgcggccttacctagttaccttcattaatgcctaaaatgattccgaaacaagttattctccatgccatccgtaggctacaggttccctttatagtcgactagattcattgcagaacgaacatataaattccttccattgtatatatgttgtacatctaaaataaactcacggcttttatgtacatatttgagggcacaatttcatgtgctggtagcctggtaacgtggtagcatagtacgtaccatgtgaaattgagtccgagaacgtgaaattga

SEQ ID NO: 32583 - DNA, 648 bp, Oryza sativa
atagggcgaattcgagctcggtacccccacctattaccccataaatcctcctaggccttttaaaccgataagcccattatttccaaccattagttctatctcatcttaaaagacaagtgtgtattcataatacatcatcttccaaaataatatattgcacaaccatatttcttcatccaatattatttgcgctaggttgcatggagtctcacacactctctacatggaacgttcgcatatggattctttctcaaattaaacaataatataaacccatgcatttagtggagcctcatatcccacccaattcatccatcaataaacaatgacaacctatattcaattaaaaaatatcttacttttgattttacacataattttctatacatgttttctaacacaaaatatgtctacctacttagtagatgatgaagaatattataaatatttgcttgtagggattaattaaatatgatatgttataaagataactaatagtttggttagacaattataaaagcaatgctaatgaaaacaatttatggagaaatcatatattgtagatgttcaaacatagcgtacgacacatgcccgcgcgaatacgtggtctatcttcttagtttattaaaataggaaagtaatgcgatg

SEQ ID NO: 32584 - DNA, 635 bp, Oryza sativa
tatagggcgaattcgagctcggtaccccaaagataagcatggctagtcccctacggtatctacggatactgtcaggagagacatagcgctgtctttgatctcgccggatgcggattcgaggaggaaggctaccctgttgtcgactacgagtcagcacttcagatcgccaagtcgacaacagttagataggctacctcaaatattatactggtgtgattatggtgcataagagcaacgaccggcttcagccaaccggagtagggttattacctgacaattcaggggcccgaacctgtataaaatcctcgcccccatctcttttacctcaatctcgcatatatcctagtaccaatgatccccatactatgcaaataccgtagtcgtgacatcaaacgtcgacagtattgaaatactttccgagtatatgaatgcgaattttacattatgttcgtgttatattgaatatactgctagcttatctgggagatgcgttggtacgggtataatgtttggttatgcaattactctatgtcatgaagatgatattagagtagtatctagtagtttaggcgtggtgtctagattacgggatattattatttacggttatatgctgcggatgagaggtgggccga

SEQ ID NO: 32585 - DNA, 563 bp, Oryza sativa
tagaagacgtgtgcacctgtcagcatggttggagctgctgtcaaccatgaccacgagattaggagaggatgcagcggtggccggtggcagtaggcggaggggaggcagcggccgtgcgcccgtgcgacgctggaacagcgcaccagattggcagtgcactggaatggtatactggacacgtggcgtgattttaccatacgcaaacttgcgttcaggttttgccacgtggcccaatcagcgccagggtccgatccctgaaatcggtataagagattgatagcaactggcttaacttcaatcgttgaggtattggaggtaattttcataatgtgcgtaatgatccatatgctaaatttaaggttacgattccctcttttcattgtgcctatgatgctgaagcttattttgattgggaaataactgtagataaaaaatttagtgcacatttattcctggtgagcatagggttaagcaagctactagtgaatttaataattttgcaacagtatgatggactcaaataagtacagatggactagcacctacaacatgagaagtgttaa

SEQ ID NO: 32586 - DNA, 529 bp, Oryza sativa
caaatatgattgtgcaatataatgatcaaccttgtaatcgaccaagaacagctccgcttgctagcccaccaacaacggagttcatgggatcatcaggtgttgaagcccgagcatctcttgcaagttcacgtgctcctgaatggaaacaagcacatgcattacataaacatgttgatatataatatattcatccagaggctccatgtcccttattaacatgagcttacagaaaatataagtgctgcaataaatgagaagacgctattccaccttttacaaacatgtttaatatgttccctaaaatgaaaatcatagtccaaaacgaacagtgcaaaagtatgtattctaaatcccactaaaaaagttatgtattctaaatagtagattaaaagccacaagatagaacttgtacagttgtagtaccaagcagaattaaaaccaatgccagattctgatgtgaaaaggacaacaaatgttcatacttcatactgtgtacaaatgtaagcaataatagctcaaaacaagttca

SEQ ID NO: 32587 - DNA, 1257 bp, Oryza sativa
cagcgcacaatttcgtactaatatagtagaaaacaaaacagtctatagccctggaagacgatagctagaaaaaaaataaccacaccacgcgtctacaaccggatccccgctagtaaagagtaaacatgaacacaacacccctaatggaatgggtcttcaaatgacaccaccagcgaagaaacggtgtcgagaaacaccaccgtcacctattctgagaacatgacatggttttcacctaaagaaaaccatcaaggagagaagagattctacaacaatgccccaagggaaaagtggcgcccatgagtgtcgctattgttggcccaaaggctaggctttcacccgtaatcttcatgccctcccatgccacgtgcacctgtccgtatcagcggccaccaccaactgagcaccttcaatgcatagccaccacaccagcgccttgccgtcgaccatccattaagcaggattgcaggatccagctcactcaacctccatccacacgattgggttgaggaggaagaggatgagagagaagagtggatctcctcttcctcgtactagccgccagcgtggccatcttgtgacggcaaggcgtcaccacgagaggactagcgtatggatcagagtccgttgcatgccctgcaaacacccacctcacggcatcgctgacgcctccacctcgggcagactgcccaccttgctatcgcctcgccccgaagccatcattcgtcatcggatctcccatgtggtagcgcctcaacggtgccatcattcctgcctccatccatcgacatgttgccactggacaccggccacgccgcgatcgcctcccgttgggctccagctgtcgtcaccaatcagcatgggttcttgctacccgcgtgcgccactgccagagcacgacagccctcgctgccgcgcttgcctccaccagccttctcttgcgcctcatcggtctcctgctgtctcgtgcgctgctagtcggctcctccggccagatccattgcaggggcgacagatctagccgtgggtggaccagatcctatcgtggcggcatcggatccgtcgcctagcgctgcgcagcgtcgccgcctcgtcttccccacacatcgcatgtcaagccgccttccccgcgccgaggtggagcgccgccgagggtttgaccccacattcccctacaattttgattttcatgaacactgagttctcgatgtgtttacacggttcgtgtaagccataaactaaatatgtcggagaaaa

SEQ ID NO: 32588 - DNA, 672 bp, Oryza sativa
tcgcttctcagctcgagctagctcgtttagctcgcgagccaatacatcgaacagatgcaaatacatattatacaaccaaaatgtccacgaaggcaattgtatctccatatcaaaccaagaaatcacatgctagctcaagtgttcaacaaatgaatcagtattcatggtagctctacctttaacaataatcttgttttctggtggcgatatacgagatcgagcacaagtgctcaacctcctggatccattgccccatgcctgcaacctcctcctgcccgaccattacaccacttgaccaagacaagaacgggagagccgtgcaggtggtcgaggcgctcaagggtcggcggagctgccgccgatggagggagcgtgatgcaaggacgtgaggcgcaccaacaaggcggggccgtgtgtggcacaaaaaaggtcgatctggattgggaatttcggatgaggggaaagaggaagatgaaaagctacactgatcaaataggttctggtctttcctttttgactgttttctttggacctaccgtgggatggattatttttctacatatgggccttggcctactaacttctctgcctatgcttctagctcgtttaagctcgtgagcagcttttatgtgtaacgagctaaaacagctgctcggcttgttgaaaaacata

SEQ ID NO: 32589 - DNA, 684 bp, Oryza sativa
attcctgcagccccgcgcaaggggaggatcccaccgggaggccgcgcactagaaggaatcatcggccggccgcgtgcaaggggaggatcccgccgggaggccgcgcgctatgaggagtgatcggacggccacatgcgggggaggagctcgccaagaggccacgcacacggggaggatctcatccggaggccacgtgcttgaagaaggagttggtgggcctcacgtggtaaaggaactgactggccaaccacatgctggggagggagctcgacggccgggcacacacagagggaggagcttccggtgggccatgaccaccgaaatgagtcactatccaaatgcacgcggggggaggagctccttgtccatccatgtatgccggaggagtccacggcgccatcgtgggaaatgttgctcacgtactacgcattgcaggtgctctcggtctccggcagcgactgtggtcttcctgacgaagccattccctaacatttcctttgcaccctttacatcgcccatcccacctccggctttgcctctatccttagaggcggcaccgaaaccttctccaactagacctcctgctcctgaccacgttgccaccaaccggttgacacgtgggacccacaagctgactcagccaatcaataaggtcaaatatgccacgtaggacgaaaccgactc

SEQ ID NO: 32590 - DNA, 1017 bp, Oryza sativa
tcacgcccactacagatgatgtgttagtattgttttgccatgtttggcaggtcaaaagatctaggttttaaaaataagttttagaagagtttatttttaaaattaaaaattgaaagtttcaaaaaaaaaaaaccagttcatagacattatctattcatcaactatcatatcagcggaatcaagcagctctgctcaacagtaaccatcgtttgggctgtgtttttttctcccttttctcaacttctatttttttatattttgcgcgtatgtttcttaaactatattttacacaacttttttaataaaaaagttcatataaaaatcatattaatctatttttaaagtttatttagctaatgatacgctaaactatcgctctgttttcggtacctcaccttacagcacgtcaacaagagcagcaagcgtgttaggatagggatcggagtcggaatcggaatgcgatggtgactcgccgagccgcctatattatctctgcgacctgtgtacgtagctgcttcccaccgtcatccaaactaaaaatctttctgccacgcctaggattaaggcgccccgccgccgggcgcgcctcccgcgccgcctcccggcgctcaggttctccgtcgccgacgtgctctcgccgcgctacttccactccaccgaccgcctccgccgagccagggcgcgcggcgccgccgacgccgaggacgtcgagggcaggctgctgccgtacatcaaacgcctggaccggcgcgccacgcgcgcgttcctcgacggcctcgccggggtcctggacgcgcccggcgctcgccgccggcgcgccaggtcgctctacctcgagttcttccgcacctacgacggcgccggcaccatcgaccggatgatcgacaccgccgtcggggagtggggcgtcgagcacctcgacgtcgtcgtcctcaggtccgcgccgcgcgaccccccgctgccggtgtacgccttcccggcccacctcctcgacgacgagcgccaccgctcgcgcct

SEQ ID NO: 32591 - DNA, 518 bp, Oryza sativa
caaggctcggcaggcgctgccgattgctacggcctcctgcgtactcaggagcggtggattcaccgcctgttggtgggctctaggcacccgctgacaacttcaacctccagtggacttgggagtggcagatctgctgccgatagggtttgttaaacgatgacgacaattgtggtctcctaaaggctcataagcaaccggtccaccggaggttgcctcaccctgccttatcccctttcttccttcgcatccaccacaccactaccacctctagctagatccagatcaaggtacatggcaggagcgctgagatggaggctgatgatcaaggcagtgggagaaaggggccaatgctgagctcgataacggcaagcttgctgcagccttgacctatgttcacttcgcttttatttcgctatgagataaatgtgaatttgttatggaattgcgttatatatgtgttgagcattgttatggtgatgtcgaagtttactctcgactttggatttgcggtgtgtctg

SEQ ID NO: 32592 - DNA, 753 bp, Oryza sativa
ctgcagcccttgccattgagcaccggcgagtgggatggagtagactacaaacaacaacgtagtacggaggaggaggccaacccaagattgattccacgtatgttgcgaggaggtggcggctcaaattatatagagatatcaggacacttgatcagggcgcctacacgatctccactctgcataaccgaaccgaaccagataagtcacgcgtaacttatccgaactccacaccgtttcacacatcggattattcggagtgtttccaaaaaaaaaaaatctgaattttccgcagcaaaacggactccacaccgtttcactcatcagattattccgagtgtttccaaaaaaaacaaatatgaatttcccgcacatgcctcaagtggctaggagagcatcctctcctagaatgggctaagaccgatctattaattcaaacaataagtccatattaaacccgagttaaactgacatgtcaggagcacgtgttccccctgttctctccgcctcacatgcctcaagtggctagaagagcatcctctcttaaaaggaggtcttcctctcattgaataggcaaggcggtactaaactccccatgcatgatatcccatgaggtgggcttttatgattttccaaagaattaaacttcgaatgggctaagaccgatctattaattcaaacaataagtccatattaaacctaccatatatatattttagttgtaatgttgccctatttttgttttcctctttttcc

SEQ ID NO: 32593 - DNA, 772 bp, Oryza sativa
tgcagccctataattgatattccaccaaattagctaataaactggcttgaataagagcagttggggaaatgcgggaaaaatataggcaaaatgcacatgtagataacggggacctatttgattcatctggtggaggtagctcacattgtaaattttccttgcaaattaaggccttgtttagttccaaatttttcttcaaattttcaatttttttcatcacatcaaaacttttctacacatataaacctccaacttttccgtcacttcgttccaatttcaaccaaacttttaatttttgacctgaaaacacactctaagaattcttgccgacaactatgtttgtcattgaatcgtgagctacacatgtatccagaactttgatattccataatccctaatagactacaataaataagagtggttaaagaaagcgtaaaacttataaccaatccacacactagagaaatgatctttaataccgattctaaactctttttaatctcggttatagtaaccgagacttaagatctaaagatgcatactaaataaaaaatatataggatgtgggattcgaacttaagatctcgcatctcaaccattatctgtgttaccatcttacctactccacacgtttaacttggataaaggtattttcattttgaactaactctagaggcatttttagtactggttggtaacaaccaacttgtattaaaaatatctttagtcccgattgatattatcaaccagtgctaaaaatatctttagtatc

SEQ ID NO: 32594 - DNA, 558 bp, Oryza sativa
tgtgaaaatccatattaatacttactccctccgtcctacaaagaacatatttttggtttccgtccaacgtcctaaaaacatatttttgggtttctgtccaacgtttgaccgtccgttttattttaaaaaattataaaaaaaacttaaaaaaatagttacgtataaagttactaatcataattttttaaataagacgaaaatccaaacgtcgtatcaaaaaactaaaaatacactcctcatgagacggatggatcactatttatttaatttaaggataataataaattattacgaatgaaaaaaataggcctggaagcacggcacggacagctgagctgacactgtacttgcacagagtcacgtagagcgagcgagcgagagagtcaaagcctccacgggcagcccagccaaccaagccagccaggcatccagctcggtcccccacacctcactcctccgctttactccactccccactccccactcgcctccaccccatgcgccgccgccgccgccggtgaccccccgactcccctcccctcccatgggctgccgccc

SEQ ID NO: 32595 - DNA, 1120 bp, Oryza sativa
aaatatattgtgattgtgaaaaacatattattttgtaattgttggtttgcattaacaaatattgtcatagcgttagcacgggcaaattactagtatttctagctatcattcataatattagatctgttttgtctttccttgtagtgtcaaaagccaagatgtaaaaggctaattagtagtattatgttttattcatggattcatctaagtttagaagtccatgttgcaagtcgacaatgaactgttcaaaagtagggttgtagtgttaaaaggagggttgatgaccaaagtaatcaatagaggtgtagcaaaaaaaaaaagagaaagataagataatatgccacttggagttgtccatttcaatccatatattcaactcaccagtcagcttcaatgccgagtcaaacctttccaatataagagtgtcatgacccgagagggaaatacccgacaatccttgatgatgaagaattatggtgttgaagttcctccacatgctccacttgaacgcttagcacttgcagcacaagtatggtcttgtagtttgcggtatcgatgactcctaaaatctccccatcatcaatttccatctcaggaacattggtttcacatagaaggttagcagcaagagaatattcttgctcaacatcactagaacttgcatatccaccatcatccgtagcgatgtatgcatgctgacttgtacaatccttcatgacatgtcacatacccttgcattggtgtcgtatgatccgattgtttgccccgtagaagctactgacgaggtacttttcgtgggtacctacactttagtagacttgtaaaatcaaagatgtttttgattattattctgtgatgaacaattgggcattggatattattggttttattatttggaatttattcacgaagtggttttggagatgattggatttcataggtgaatatacaggtagtgctggatttgggtccggtcagaccgggcacgggttgccggtcggaccggcgtgtattgcgcggtcagaccggcgcagcccactgtctgaccggccgacgctgtgtcggtttcagtttcgggttgtttatttggatatccatgattatttcataattatgactt

SEQ ID NO: 32596 - DNA, 633 bp, Oryza sativa
ccaaatcagtggttagtcttcaaagtagggtaaaaaacgcaatcgccctatcatataaagtcacccgattatctccaactagggcttttctaaaagagacatcaagtagtacgcttgtgaacatattggccaacacgacatttttcttgctagcaagattatacaacgaggtaaataacttatcaaaagaaatgtctcccaaaacctcaaaattgagttccattatgaatcacaaaagatccatgtgagagaaagagacgatcgacatggatgatccctccaagcagaggcgttggcatagtacagagaacaaatcggagggaaggacgagacaacatggtgaggggttgagaactatacatgcttatgattgtggcaatggtgagtaaataaattgatttcagctctacaatgtggtattttttcttcacaaaagccagattctacttctcatcggtcttcacaaaccaatgtagtgacacgtgccaaaagcgagatgaaaagatagcttgtgtcttttgctgggggaaggcagaactgaaccatgctatacaccatacattgacctatcaatcactttcggacattgtttggataataggattggaaaatgatttcccacccatcaaaagg

SEQ ID NO: 32597 - DNA, 632 bp, Oryza sativa
attcctgcagccctattttgggtaactcgcaaacacacacatggtgacaacattccacacaaaacaagcatttatgcatgcatctcgatcgttgaatatctctccacttttttgtggagctagctagtttaagcgcggtcaaatatgtgatactcatctgctctttttaaaggttcatatgctgttttttctttctaatttcacttctcctggttaattaattttggctttatttttactgaaatgttaattagtgtggtcctacgctcaacaaaatgcaagtttgtaagctttgtctacttaactaggtgaaacctcgcgcgttgatgtgagagtttagtataatatatagtgataataagtataaataatactccctccgtcccaaaatatttgactccgttgattttttaaaacatgtttgaccgtttgtcttattaaaaaaagtaagtaattattaattctttttttatcatttgattcattattaaatatactactactactactcaagttttttttaataatattcacaaaaagtttttgaataagacgaacggtcaaatatgttttaaaaaaatcaacagcatcaaatatttagggacgagggagtatataatagatagctacat

SEQ ID NO: 32598 - DNA, 536 bp, Oryza sativa
acacaatgttagaaaattctatcaagttttcaccgtttgattgtaatgccttttattttcacgtaatacataacctatggaagaaacacaaggtaaagaaaattctatcgagatttcatcgtttatgtcgaatacatttcttttttcacgtaaactcacataacctgtggtgaaagtgtccaacaccccccccccccaccaccccccacacacacacaccacacacatttcccccgggatccgccccttgttcaaccgctgggcggctgcagctatagcgtggcgtacacgcccgcatccgcacgcggacggcacacgggaagggcggcccagcgtccgtccgtccgcgggttcccggtcgtccacgcgcgggaccccacccaccacgttcgtcacgctctccgcgcggaggacggcccaacctcccaagcccagcccaccagcagcgagcggcccactagggggcggggggtgtgtgcgcggcgtgaccaccaccaatctctctcgcagcagtcgctcgctgtcaccgtttctct

SEQ ID NO: 32599 - DNA, 1606 bp, Oryza sativa
gtcacaattgagaccaccgacctcaaactcagccaaagtcttcaccttttctctagacagaaggcacatgttgtggcacacatggaatccgcactggtcacctatttgttgcttcaccgggaagtcttttttgtggatgagggtgtcatgtcctgtcttcctgaggcctcctctttgcacgtattgggcccacgcttcatctatcgctagttgaattggggttcaatcatatgcgttcttatcaattctggagttcaggtagtgacatgtactccacttaggtgttatgacaagaagaatccaatgggcactgcggcattaatataataaaagttaattaagtactcaaggaatgtgtcatgctgttgtgtatatttagttaacacacttactattgattataggcgcacataatgtactccttgtctcggcgggaccacaaggtgtcgtagatgtagttgaccattccttaacggtcattctggagatttgtgacagtgaccacttgtggatcaaggaaggcaacttccggtgcatgcttcagacaccactgccaacttaacctacacacaggataaacgatcttgtaaacaagttaaaccgattgttattaccagattgagttgggcgacaatacttacaaggagtagcacttaaggaggcttgtgtccaccactcggagcctgtagaggttgaaaagatccttgaagtcgaccacaatataatttgttgaccaaggaatggctttctatcgtgctctccaaggatatcggtagctttacttggcttcctggcgttagatttctccatatagtataagtgaaggtccttgcaagcggtgcccattgcggcaagcacgtcatctccaaccaatggcatgcctagttggaactcctgtggagcgacgtatttcttcttgacctctttgcccttagtctcttcttggcccttgcccagatctagcttccttggagctagaagcgaggcctacacctttcctccccttcctctcccctttgcttcgggtttatcgagagtaattctctaaggggaagagtgtgccttcctgctcttcttcatcggtgggggttcatgaatcgccttgctgtcggcctccgttcggtcctccccaaaatccgtgtcgtactgcaactgcaaatcgtaagattgtgcatgacgatcttgagcaggaggggctgaaggagcagaggcgggtctctttgatggacgaccgcctggtgcagtggttggcctcgctataaccctgatctcaatgaggtccttgggccattggatgaaggtaccacgggcattttctagtgagaggacctcgtcgttcggtggatactttagagggaacagctcgtattcgggtttcacgagtcgacttgaactttcgcacagtcggcccatgagttgcgctccatgcactcttgtctctggggtcggcttgtacgcaagtccctcggctgctggaaccgtgaaggtcggcatcaccctaactatgagggtgcagctcgttggttcctgcgatagattaattgatttttttaaaatattatatatcatatggattcgttaagtctttcatgtattgagtaagttc

SEQ ID NO: 32600 - DNA, 1160 bp, Oryza sativa
taattctcaaaaaaaaagttataggtgaggtttttatgcgtctaacgaaccgtccacaggaagttgagcactcgaactgctcgtttgagcatggcaacgatgtctttgtacgggcctcagtagttgtgtacttgtgttgccgcaacttttagttctttgcttctccgtgtgagttggttttcctcaattaattgcgcagttgtaaggtttttgacctggttttcctcctaaactagatcaactctcttcttattattgaaagcagaagcttcctgccctcttttgaggtttgccacaaaagagtaggtgaggttttgaaaagaaactctgagagcttctagacgtttccatagtttttgtccaagttgtgacattgaaaatgaggggtatgactagacacatgtggtggttgcaagcactgagcagagaaccaggaggagatgaatccggctagcatctctttacttggttccgtcttctcaaatctcattcacaagaagaaaaaaaaagattgcctcaacgacctcgtcgtatcgtgctaactatggatcacctaggcgaagggtaggccttcgaattaaaatttcaagtgatttcctgatcaaagttttggatctgtagttggaaagtcaggaatttctgaaatttgtctcccataggatgttctgatcagctttgaactgaatgttttctcactgcatgcataggaaggtggaccgattttctacttgggacttgggagttcttagatacttgacctaaaagtttcagctttttggttggtaattaagataaaatcgagcaagatgttcttttttttttttgaaaggaagcagcaagcttgttgttactgcgtcagttgaaaatttctttaaaaaagccgagttaaataagagtaaaaaaagaattattcttggaacctcattatgttcttttttatgatgaaggagaaggtgaaggattcgacaaattaaggtgccactcacagaagctaagcactggggcagattagcactatccatcagttcaaagctgctgctgcctgctgctgcgcatagcttgttctcaactctcaagcatggagctggttacaggggtgatgggcagtctgctccccaagctgggtgagcttctcaaagacgagtatgacctgcagaggg

SEQ ID NO: 32601 - DNA, 875 bp, Oryza sativa
cccactgagtaataaaactttaagtttgccagcccagaagtgccggttgatgattacaacacagatccaaaacttccatcaagaaatcttttgaaattttaactgaaaaaggcctacctttctttgccctgggacgcgattcgtagctcgattcgatccgaagcttgggattttagagtagcttaatggttaagggaagggaaggagtcgtcgttgcctcgtccgagagcagctagctgtgcgcttggtagcagcgagcagcagagggcagcgataaaaaagactgaagagaaggttgagcagcagaggacgactaaggccattcctaacccaataattagaatagtatctatagcattaaataggccgccccacccactgtcgacaccggatctgacacaagaacgaccgcctcgcctgccgccaacatgaccgatactacccccgcccattgccgatgccgccaacactgggttcgctgcaagaacggccgccttcagtttctcgcccaccactgatgctggatccgccgcggaaacggccggattaatcacaggaacagttgtcccgcccgtggccgatgccgcgacgccacggacaccgtcccacgcggagaggggaggagagaggtggagccaatgcggataatttactggttatttaatttccaaataattaattactataaataaaaattggctggaaataagataaatcttatctaactgtttattggtcacgtacagtagttattaggtggtaatagtaaaaatgatgatagatttaccatcaccactacctgcaaacagaaattaatagtgtatatgcaccaatttcctggaatttacgttcaagatattatataaagcaagttg

SEQ ID NO: 32602 - DNA, 1242 bp, Oryza sativa
attatattctgacaaaagaggatttacatatgtaaaaaagaaagatgttttatactagaggagtactacacaacatgtttaacgctatctaggatatttcgatccatttatgccatgcatatatatacttccatccatgacaatggctctcaaactaattcattgattaaatcatttgcatagccaattgttcatcgcaaatattaatcatgactgatttcacaaactataatgtaacttatatgtaactttcaaaaatctctccgtaacatgttatttcagtaaaatggaggtcgtgggaacaaattctttcacatatgtgtgtgctatgatttgttttcgtcctcaccaaaacaaatcttgtaatatatctaacgattcaaaattatatgaaacttacatataagttacactgtagttacatgcaagttacagtgtaattatagtaattacactacgtttgtactataattacatctgtcaaatttttaggagaaaatttgtcgacaaatgtataggtggtcttttttttttgtccgaccacgccgccacatgcacgtgctaggagtagttttttagataatgtgctaggagtagttaacgcgaggtgaggcaaatcgtttgatttgaaactgttgaagcatgattactgcgtgattaaggctagtaattcattattaatagttctaatttttgtttttttaattaggtgccgcgattaacgtcagcactcatatatgaaatctttcaacccgttttttaaaactttcaactcaaagcttgaaaatttcaactcaaaatttttaaaactttcaacctaaatgtgaaaactttcaacttaaaatttcaaaaactttgagctccaaaattcaaaaattccaattcgttttttaaaactttcaactcaaatttttaaaactttcaatctaaatttaaaaactttcaacttaaattttcaaaaactttcaactccaaaattttaaaacttccaattccaaattttaaaactttcaagtccaaaattcaaaactttcaattccaaaattcaaaagtttcaactcagaatttaaaatttaaaacctcatgttaactatttcctccatattttaatgtatgacgccgttgaccttttatccatcgtttgaccatttgtcttattaaaaaaaaattatgtatttattatttattttattgtgacttaattcatcatcaaatgttctttaagcataacataaatatttt

SEQ ID NO: 32603 - DNA, 1009 bp, Oryza sativa
cttatagacattttataaaatgtctcttcgtttgtagagacaattcaccataagacacttattagacattttttttaaaatgcctctataatattgtaaagtcatttgaaaagtgcctctacagtataaaaaaatgtctatgcaaagctttttttcttgtagtgtttgtagatatagcatgaaaggtttaaatgcaagggaggaagagaagatcatttgtagctcagaattaacaccactttctatgatacgcattcaatagcatgtgtggatattgtggtcctaaagactatgttgaaggatgcttttgaccgacaatcgtgtggaaggatattttttgataaaggacatatgtacaaaagcaacaaatgacccgatttataaacttgacgcatagatttttgttttgatatggacgagagagtgtgggaagagacaagggggattgactttgacccaacattcgtatgggagggtacttttgataaaggggtatgtacaaaaacaataaattaatggaccgatatatattgctgacgtgtagattttgttttgagatggaggacagagagcgggaaaagacaggggagattaactttcgctaagcatcgacgctatgctccaagtacgatgaagtatgcaaccttgaggaggaaccatgcgcaagaaaaaaaaacacttgcaatggaatcttagatccactgctagcgggcatgtgggaggggcaaaggggcaacatggatgatggagactatgtaaacagtcaaaggtagttaaaccatacaaggtgaaccgtggagacataggcctctttggtgaccacatgtggcgaagccgttggtgttggtggggtggagggcaggttgagtcagagtcattatggtgtaccggtagtggtgaagatactaggagagccaatgaaattcggaaatattaggtatgtgagatctctgcgaaaaagacgaagggaatgaaactatcaaataggggtaaataaatattatttaga

SEQ ID NO: 32604 - DNA, 542 bp, Oryza sativa
atgctatgattgccccatatgacgtagatggtaaccgtattacgtacccttctcttgggggacgaaactacaactctactacccctgttaaatttacaaaactagcaaaaccacttaaagtcggggatacagaggtttttgtagaagatgttagtctatggaacggacaggcaccgcaagactaccaacgtagtattatcatgtggggttataaaaactcgttcggctatacttatcccgatggaacgtatagtcagctaatgcagatgaggacatatgatattggtgcagttgacaccacagctaacaagattacgttaaacaagccatgggcagttgcaaacccaaatagttcagatgggattttcccagtagggcatacacttagcccaacttctgacggctccacatatttgtatttgaatggtcacgtaaatatacaagtacctactacgtacaccaagtacaggcatttgattagtggctcttttgagtttgctaatacaacgattatcccagtagaaacaggttttattcaactt

SEQ ID NO: 32605 - DNA, 618 bp, Oryza sativa
atttgcagccaactgtagcacgaactgcaagacacattgtgtgtatgacatgtgcgaccagatattaatagtgtagtatgtaactatctatctatctatctatctattatatactaaaagtccattaaacttcctacaaacgctctcaagtcgccacgtggcgctctaataaattagagaaaatcctagaaattctaagaaaaaagcaaaacatctaccccttaattttcacttaaattggtgggtccaatattatacaccgttagatgaaattgatcttaacataaaccaaaccaaatactatgggccccacctctcctcctccctagatatatacgaccatgaacgtacgcttcttctttcctttctctttttttttttcattttttcttcttttttccatttatataatagatatatatatttttttaaataatcataattcatgcgtacgcttcttctttcaattctttttttcctttttttctttttccatttatataatagatatatattttttaaataattatattttacaaacaaagaatctaccatcatgcaacttagaggtaactaaaatatctctacaattttgaaaataaatttacaccattatct

SEQ ID NO: 32606 - DNA, 2503 bp, Oryza sativa
agtaacttcatcgagagaatcaaacatcttttggagcccatgagagacaaaatcattgtaggagtttatctgatggctaactagcctagtttccctgaaaaatgatctgatgcttctttacagagcttctctaggcttgcaatcctcttgtcaactgggacttgtactggtgggtctgcatgccctccatctttcagagatggtatcactctcaaatccacatccatatgagacatgtcacctgggatttgtaccagtgggtctgtgtgccctccatctttcagagatggtattgctctcaaatccacatccatagcaaactgtacctcattgccctcaacaataatgtcatccaaatccatgagatccgtcacaatacttgtggcatttggtgactgctgaccagtaatttcaggatcttccatcgctaaccaccagacagcttctccctgtgttaacaaaaaaaaagaagtgtgttccttttaacaactaagaacaaaaaaaaatgaatatatttagaaaagcatcatgtaatccttgaatcagaagccgcaagcgactcctcgaaaaggcgcacgcacaataacatgattacaggatcataacacgcacattatgacagtaacatgattacaggatcataactcgcatagtatgagaggaggggctctcatattgaaatttattaaagggagggtgagactcgaacccgggtcggctaaccgctaacatacatcttgtggtgctagacagaagacccggcgcctttctgcacaacactcaatatataaccattttacctaaacattcctatcccagcaatggcacaaaaagaaatcaacctttcttaacctattagaccactatctctgctcctctctgaacaaaccccgacaacatcgagcgaacctgttgctcgtcacaaaatgaagatcccacgatgatcccctcccgacccacccctcacatcacccacaacaacatcgcaatcatctccaaaagatggtcttattttggtctaaacaaagtcagcaatccatgatcaaaacgcaccattcccaaaaccaaaatcacagcaacaaaaaatctctccttttctttcctttttttggttgaaaaccaccatcaaaaaccgcccaatcaccccccacttccatcatcatcatcacacacgcaacccagcatcaacaatcgcaatctgataaacaacaaaacggaaataataaaagaaaaacagagcaagcaagctcgtgccaaaaccaaacaaaacccactcgccgcaacagatttgtgcgtcacaaacaaaaaaaaaagagggttttttcctttttggtatttccttttcttttctcctcctcatcctctgaccactcgcccaacggcgaacaaacccggcggcggagcgatcaagaaacaggggaagggagacacgcacccttctcatcccacattgcacccaacccaccacaaaacccgcccacacaaacacaaacatctttggaacatggacgaaagggagtcccacctactcgtcgccggcgacgacggcgacgacggcggcggatggcggcggcgacgaggcgatgatggcaaaatggggggttttggggggagcgcggcgagaccgaggaggcctctcacgtgaggctctctctcctctgctttatggcggaggaaggaagctgcacagtggtagtggaggacagaaggctaggctgtgtaggtgtaggctttgtaggtttccgatttgaggggggttttgacctggcttgccctcttcggtttctactctttactttttgccgtttttgactgtgctgtcacttttttgggagggtcctccgccgtccgatctgcatccgacggtgatggcatgatgggtacacatacatctcttgtgtggaaaatggtttgggtaggtatggtaatagaggttggaaacggaatgggggaaatggttgtgcatagagccacccaagacagttctgtagcttcgtgttaccatttctattatacgcatttggtaatatagtgcgtgagggttgtggtcctgaaggctatgttgaaggatgtcttttgacccgacaaccatgcggaaggatattttataaaatgcgtatgtacaaaagcaataaatgaagtgatctttagagctgacgcgtagaatttgttttgagttataggagagagagagcgtagaaagagataggggagattgacttaagctaagcgtagatgctatactccaagtacgatgcagttaatgtagccttgagggaaaaccacatgccataaaaaacaaaacttttgatagaccatgtaaggtgttggacaacagagtccgcgaaaagcttcgatccaaggaccagttggtccgtgggagtgaccctgaccggtgactagggtctcctctattgtccagtctatatccaatggtgatggtcagacgtttataactcttgtgaaatgatgttttcactacaacaaaaacctcatatagagg

SEQ ID NO: 32607 - DNA, 530 bp, Oryza sativa
tacatcggctcttagcgtttagaaaaggaaactttgctgcatcaggatggggaaaatgaaagaatggtaataaaaattttctcggtgcattaattgcactaagagcatgtaccagacccttggaaggtaagaccagtaaaaaatcttatccattgatcaacagtaaaatacgccatgtatatattatgagatttactccggtccaacaaaaagtacctcgaggtaccggtacctcacggtatcaaattgtttccgatcgttggatctagctgggtgggttgggcattgttagatcatgtgaagcaataccttttccattcccttgataagaaaatatccaccaaaatcatactcgcattcgctttcctgaagtttatgcagccagcacaaatttgacttcaccatgacaggtaacttgccaatagtgacccatttagtctctttcattatatcttttctttgtatatatgggtcctcgccagttttagctttgtcgcttttgtggagtgaatagacctgatacagcaaaa

SEQ ID NO: 32608 - DNA, 658 bp, Oryza sativa
tcagacaaattcatcatgaaactaacacgaaacagacaactttccagcacattcatccccaccactacacctaaccattgacccactaccaaactctgcacatttaagcataaattgaacaataccttcagtactttaatcaaaaaaattaaaataaaatagagagaaaaggacattaaaaaagaaaaggaaaaagaaatgacaaccaccagtacctctcatcttagctaaaccgacagattagcctatagttcagatcaaataattcccctcattccaagcaaaacccaaaccaccaatcatgatccccctagtacaaatttctttccaaccaattcacaaagcaactatcgaattaccacatttattttcatattcttactcacctctaaaccttatttaccaaacacattgatgacacagtaaaaaaaaatgcattcatggcaaattggactagtaagcaaatactcttcacatcgcaccagtaaatttttctcaccctaaattacaatatcagcagtaaagaaaaatcgttaaccaatctaatcactaattcttcatagtatcaattcaggtgccatccaacttttcctgtcccaaattgcaaacataacccaaattctacaccatatgattcccaagaaatcaagcaagaacc

SEQ ID NO: 32609 - DNA, 558 bp, Oryza sativa
cgggcattatattattgaaagataagattattgtttgttcgttataaattaagggcaaactaatgtttggataatgttattttataataatttaagggttctatttttcttaaagtatcttaaaaaaccattcacaaacttttaaatagaagatggattaagtacttatgacttttaaatcatgttttttttctcaagtaaataagaaactattggaagttaattattatacaatccatttatagagcaagatacttaaaattcttatgattaaatcatctcatgaagacgcatgatatagtaagaacgggaggaaaacgcatgcatggaaaaaaaagaaagggaaaaatgaaaaaaagggagaggaagcatacgtactcacgtacgtaggtgggtacctatgccaagcggagaggtggaacctcgtagtatttcgtttgttctaagatcaatttaatctaatggttataatattggacacaccgatttaagtgaaaatcaaataatagatattttgctttttttcttagaatttttaatagttgctttaatttatta

SEQ ID NO: 32610 - DNA, 519 bp, Oryza sativa
cccatgccgcctaatgggcacgtccgcccctggttatatgtcgttaatatctatagccgatcgagtagatttagtctaatcttatttattcatgactgtcaatcgatcccaatatgacatcggcttgatgataaatgatatgtcatcggcaattagccgatcggctatcgtttatggatttaaccgcggttttcttgtctttctttcttgttgattgtaggatcaaatcaattggcacgctcacaaatctaaaagcaagattttggacctgcacagaagttaagtagatctttcaggccagtgtgtgtttttcgcatcaacagtatgaaacattgagttttaaaggtttgaaacacatgtttttcttttaacataatattgtaaagatttaataaaaaacgaatacaaccgtgtgttaagattgaaatttggtaagccctaagagaattatcacatcgccaatagtcggatttctgctatatttggttaaggaaattaatctattaaaggaagcttatt

SEQ ID NO: 32611 - DNA, 544 bp, Oryza sativa
tttgatccatatgtttggtcatatgtacagtcatatagctgaagggctcaataaattaataattttatgattattattcaagagtagaaataaatgaattttaactattataaagttgaaaaatggatttaaaacattttttaagaaattcatatgtaaaagtttttgcgaaaattcaagagtagaaattcattctttttcattcatttaaaaagtacacgccctgagaaaaattgcacattttaagagcaactgaaattggggagaaaatccaaaagaagctgaagaatgatatggcaaatgttgatcaatccaatgcacctggactagtttcttcgtgaccatcttttggtgaatgattgcgtacattgagatatgatatatttctgtataatttaaaggtactttttagatcagaggccttcaggcctggcttttatagaaagccaaacacataatttaaaggttgaaaggtaaaaagtgagctaactaaagtaaatacgcattgcttgttctgttatgaaacactgtcatatatttccct

SEQ ID NO: 32612 - DNA, 656 bp, Oryza sativa
agctaggagcctaagatgttccagctccagtggggcgatctatattacgaacaattgtatatttgccactacgcaactccaaattccttccactgcacacaatcccctttctaatccaatacgttctaataagatgcaggagacattttatgcgttacctcagaaataattctatgatattcaactatccacaaccagaaaaaaaaatgtggtccttacatactgaccttgaacaactttctagcaaattatcattgacatcatcagagatttcctcacttcatttcaatatacaggtgatatttttgttgtctgttcaatatcacgatgtgttaaacgatctgcaaagtaaacagcatgagcacacacacgtctggaaggttgacatgttcagctcattcatgcttgctgccatttccatcagaaactagtggtatagaatccttgtgttgtaaacttgtatttttggagtgaacgatatccaatacattctgtctagagtttcacaggcatatactccgaagttgccaagtatgtgatgattcattcttacaaccagcaacatgattgtgaaagtcatcaagatagataaccaacctataaaaaataatgaagtacaaaatgtaaggatactgaagtaaatgacgaaaagcatg

SEQ ID NO: 32613 - DNA, 1137 bp, Oryza sativa
gaggatcacagtgatcaagatttgtccataactgctgcaactcactagcataactgttaaatttgttgtattccatgtcctccatgcttggctctccttatcagagggctcttcacaaccctcttgcaaaaaatgatccaccccttttgctctcaacattatgagctctcctacaccaactcaaataatttttgctcccttccaacctcaactcacttggcatcacttctagtttcagtttagaccctcctgctacattcctctgacctatcatgcccatcttcaacaaatcctctagcaaatccttcatatcacccttagtgataagtgaggaagcatctacaacctcctttccaaccactgaagacatttctttcttctccttctctcctctcttcagcaagcagcaccaaatttactagcagcaagcagcaaccatacacaacaacaagatcccaatctactagcagcaaccacacacaacagcaaaatcccaaatttaccggtgatagtactccttcctcctcctcctcctcttcttaaatcaaccacacaaaatcccaaatctaccggtgatagtactccttcctccttctcctcttcttgctgttctcttccttcttcttcttctcacccttctccctctttttccctccttcttcctctcctcttcttcctgcacgcacgcgcgctgtggacaccgctgcctcacgcacgcgtgcctggccttctgctcgcgtatgacgctgccactctgggcccaacgcctatgccgccgccaaccacctgctccgggcccagcgcggcccatgcacacgcgccgctgctgccgcctcacgcgtacgatgccgctgctctaggcccagccgccttcctcgcgccctcctcctgctctgggcctcaccccgccccacagatcgccggtgagctagggtttggctctaataccatattgtagtttggttttggggcaatttctcagggggcttcaagcctacacaccccttcatcatccttctattcttaaaaaaaaacattttacaagtagaccctcgtatacattacatatttacaccaagagatataataggaaagccttcagatgtgaagtcagatcatagtagctaaaagactatc

SEQ ID NO: 32614 - DNA, 699 bp, Oryza sativa
ctactgtattagcatccgcagtttgctcaagtttttcaccagatcaggtttttcaccagaaaaacctgagctcgccaaacatccaaaagaaccgccgatttgttgtggcgttgatcccgagtcccgcaaaacaccaaatgaatccccttcccatcataataaaaagaaaaagaaaaggcaatgaaattactaagaaaacaagttgtctaccaaaagtcctcacttgtatgcatgttttcccaaacaacaaacgctatttatcaaagtaaacggaaatttggttaaaaaaacattagttgcacaaaattattacacgacttgcacgaaaattcaaaatggctactacaatagtcagggagcgcaactagcgtagatacataattttcagaaaaagaaataatgaaaatttagggccatgtgctgatcgaaagcataggttttagtttgaggccatatttaaagcagtaaataagtgaatcacttatacaacataactgtacgtagcatatgaagagatatgctttatactgtccatttatacagtactatcgtaaattatattgtccatttattctctatattttagtttcagattaatcttactgtttccattaatctcaccctcgtttgcgtttgccactgtcatttgctgagttgctaatgacacagaccgatgcttttgcgaattgcgattactct

SEQ ID NO: 32615 - DNA, 792 bp, Oryza sativa
ttgttggttggactgaatattttctttggctacatgaagatcgttgttgagttattatagttgtcgaaagatggcaccccagacaccaataatgcacattaatatgtagtgataggctatagaagacaaccaaagtaacataatagtaggaggtagagaaacaaggtgcatagctcaatatgtgaaaaaagaattgagaagtacatggccgtcgaatgattgtgtgtgtgcaccattgtgtgccaactggaagattccatcttcttaacatgttggacaattcatcctatgcttctaggcatgggatgcatcaggaattattcaacagccttagattggacccttcgctacagcttggcgttgctctgcttgactaagagcaacttcaacccgagcctcatccctagatccccatcatccgttgcaggacgcagctccagtagatggatgtggcttggaagctccctccctctctccatgactaggaccttccgtggcgtcgtgcatagaggtttgtgaggtggcggatccgaagtctgtggcggggccgacggatggagacgtgcaggccagcggtggcgtagaggcatgcagtatcgtcgttggagccttggaggcttgcaaggcggcgactcatatgcaaatgacgatggagggatttttacatttccttgtttttcctagataagtgctaatgactaacaagaagttgtacttgaagaagggcatttaggtcatttcatgttagtactaaacttgcattgggaatttagggatgggtttttttgtgag

SEQ ID NO: 32616 - DNA, 603 bp, Oryza sativa
ttcctaaatataaagcatggatggatttaatttttattaaattctccatgattaagtctactctctgaaattttctcggatttttcggagctcaattcctaaatgatacaaagaacagttcagtaattatttgatcattaatgatctaattataagtgttaagagcttttcttgtttaaaaatccttaaattataaattgttgtttaaaaggaattattagaaatgatcttaaaagcctaaaagagaagatctaattttaatttgttaaatctcaatataaaattgggctagataaaattttgttaaatactttacttgattctatagttcctagatttttctgggatttatttgagccaaggaagtatttcatgaataatttaaattgaaaaaggtttttaaaagtctcttttggctttgggccgaaagccggcccaaaacctctctttttctctctccctccccggcccagtcggcccaatccgccgcgccccttcctcctctctctcagccgctgacaggtgggccccacctatcaggcccgtcttcctccccgcgccgctgccggccgaaaccctagccgccgccgctttccaatccgg

SEQ ID NO: 32617 - DNA, 592 bp, Oryza sativa
tctcttttattttttattttttcttcttttttccatttatataatagatatatatatatatatatatatatatatatatatatatatatatatatatatatatatatatatatatatataaataaacataattcatgcgcgcgctacttctttcaattctttttttcctttttttctttttctatttatataatagatatatattttttaaatagttatattttacaaacaaagaatctaccatcatacaacttagaggtgactaaattatctctacaatttttgaaaataaaatttacaccattatatgttacccattaaattaataatgtaatataatttccatttaaaccggggtactcattactttgtactattatttttaaataatgcactttttaaaataaagttcacacattatattgtatacatacgtatgtgtacgcacgctcctttcgcttatcttttccttttttttcttcttttttctatttataaaagggatatatattttttaaataatcataattttacaaatagagaatctaccatcgtacaacttgcatgtgactaaattagctctacaatttta

SEQ ID NO: 32618 - DNA, 598 bp, Oryza sativa
ccatgcttagaaacattagcacattattgggataacttatgactcattattacttaatgatggtttaaagatagttcacgatggtcaatcgtgattggttaattaattacttgccaactaaaactgataatggtgggttgtgagcacatggttttgagagtcgtgctcatgacaattaaggaccggttcgcgagctactattgtgaaacattaaccgtgccaaccacaagccagcgtgggcaacggctttaccttttgtatagcatgattcattgcggagcaccagactgagaagtggcggagataagcccacgggggtcgctggggagtccatgccttgttttataagggggtgattatgatccaggaatggtgcactgtggtgagttgtgttgtacagagggtattgtcacagcctctattcgggtactttctagtatcgcgacgcatggtagacatgatgttaaggctgtgtcttgtgggtacagtggtacacctctggccagagtaaaactattcgaatagccgtgcccgcggttatgggcgggttgagcaatgtttttcgtgattagtctcacacctctcacaataattatgg

SEQ ID NO: 32619 - DNA, 570 bp, Oryza sativa
ctcgtgaaaaggaaatggagttaaaagaaagggacaagaggaaaaggtacctcttttccccaatagttctttttcctaactttcttggacatttctgttcaaaccttttaccccaggatttttgttacctgactttcttttacatttctgttgaaactgtagagaacgtgagggaagtgaagaaactgaagatacatcggaggatgaatcaactgagaaatatagtagaagaaaaaaaggtaaaaatgattgcattattacctggaacagtggatcttttttcgtgtttatgaagtcaaacactaccagtatgtagtaggttactttattttcgtcggaatttaaactgtcaaaacttttgtatattattaacaagaaaaattattctatgcaaaatcctgcagatcgcaaacgatcattaagaaaatcgagcaacaatgatgaaggcttcgaggaagttccttgaaggcatgttcccttgatctggcctttatgttaaaatcatcatcaaaagggggaagcgggaccttgtttaatctttcatgacatgttaatactgcacgtgattaa

SEQ ID NO: 32620 - DNA, 595 bp, Oryza sativa
ttagaggttttcatcatctggcctagattttatatttatctttatgcttaatgttacatcagttgggttcgatctgttgagtaatatccataattgtgatatctggcttgttttatgattatcgagagagatagcatcgggttttcaaccgatcttacctgatttagctactttatgttttatatgtttaattgatatgctagatctgtcatttatattaagatcttgtcgcattaaggtatattaggcttcttgtttaatatattttgcttattttaatatcttagtctaaagtagtatcggagtattagccgatacatgctagatctgtctgatcgtctatataacccctgctttaatgtatatttcgatttaagtgatttatactgtctcggcatgacgaccgatctatcgtaatcacttagtttaaatatacatcgaaggaagggttatatcaatggcggacgcaggattaaaaataagatggggcgaaaatgttcgctttataaagaccgtatttatgccgtaatcgcataaaaatatatttgaggcaaaaaatccattttataacaaagaaataatatttgcatcatat

SEQ ID NO: 32621 - DNA, 562 bp, Oryza sativa
attacttatccaacacttaatattttcatctaatacataaatcatcgctaaatctatacttcataataattaaagtactaaaatttacctctattttcttcgacttatatccctcttggcttggaccattacctcttcatttcttctctcttcctcaagctcttctcttctcttttttatggcatgagcacctcgtctggtgcaaactctcttctccttatatggcgtgaggtgagcaagaaagaggaacgaaaagagtgacgttttcaccgtgcttgattgctcaaagtttgagagcattgtattgacagcgcggattcctactctgtgcagcgcaactgtgctgcggtacgggcctagctcaattcaagagtattcagatgaatacccaagatttttagataaaaaatacaatatgaggtatatatttcgtatctgttttagatgaaactatcatcagaatggccagttttcagttagatcaatgtacttagctttaattaacaatggttacattgacagaaataagttaatttggaaacttaagatgccgcttaagatc

SEQ ID NO: 32622 - DNA, 568 bp, Oryza sativa
ggttaatatagatagattataaagataggagcagaacttaagtgcttcaaatcaaacatagcaatcctggttctctctcatccttcatgttcccatcttctaaaataggtactacagaacttcaaaacatgctgtttctataggagactgactgacagataatattggcccaactatttaaggcataaatacaagaaactttatgcatatcatgtaaatagtttctcttaggaaataacccgttaagcactatatttgtttggaacgaacttgcaatattctctcaaagacatatactgatgcagcggacaacagtaaatacgagttatgcctatgagaataaccatatacatatgcgttatgtctacctctttgatgagaaaatttcactcatagtatcttacaatttatactgcaactcttatcttttcagacacgctaatgagtttgtgagataatatctacagttcatacccaattagtctattatatcaagctcttcagtcttcaatacatttgcagtattgctcagaataaaatgggatgaacttgccaaatcacctcagct

SEQ ID NO: 32623 - DNA, 547 bp, Oryza sativa
cacattatgagtttttccaaataagttgctcctatttatagattttatgcatttaatacttaaatgaagagataaattaaatgttttattagaactcaagaagtcatctaaatactcattggttgcatgcttttatttacttcttgattttgtagcatccaaggtaatttaatttctccttggtcttggtgtcaaaagtaatatgtgtaatttttgtggatgaagggagtatgttataagtcgctttgactttttctgattaacaaagagattaaactttgttaagtttgactaagtttaatgaaaaataagtaacattttaagaatatattttattattctagcaatcagcattgaatatatttcgatgatatgtttgttttgtgaaaaaaatactactatattttttaaaaactaagttaaatgtaaagaagtttgaataggaaaataattaaaaagacttataatataacacgaagaagtatgtatgtgtatatatatatatatacatatatatatatatatatatatatatatatatatatat

SEQ ID NO: 32624 - DNA, 603 bp, Oryza sativa
gcagtatgtgccatcaaataataatgagggtaactctatctacattaggagggaaaagccttctgaaaattattacagattaatatgtaaatacattcttataagttaaaatttgtccaaacctcgcaagccccaaaaaagatctttttttaacctaatgccgaactttgttccactgttatacttaaaaaaaaaaaattgacccagtttataaggaaaaccgggcccaaaaaccatacagctgcacggttaattacaggaaaaccagctaaaaccttccgctctacacaactaacaacgacggcggagcctaatcgtaggacgtcactgccaaactaaacacaaaagcgacacaacagctcccacattgcagaagaagtgttaccattgctaagctagccgcccaagcgacctagcagcgccgactccacaactgcagcaacactgaagccacgaaagtcaccaaagcgaaaagtagctccgacatccaacaatggacgtcagccaagccaccgaagagcaactttcttcacacggccagcaccagagcttcttggaagagactgcaacatgtcatcattgccgagcgtcgccgcaccccca

SEQ ID NO: 32625 - DNA, 616 bp, Oryza sativa
cttattcgcaaaataagcgaaacggtatatttgcaaacgaaaagtaacttgtaaatacaaatatatatatatatatatatatatatatatatatatatatatattcttagcgatctacaaataaatgctgaaaaataaattcgataaaaaaaacctcaaaatcaacttcaaatttaaagttaaaaatttaaattttgactgataagcataagcataagtgaaaagattaggccctgaaaaaaggaccggaatgaagatgttagaattttttttattttaaaatttttattttttaatatttacagaaatattatatcatccaaaatatttacaggaatggccactgccgtccaagtggagggcggcaaggtgtgcgcattttgtactaaggtcccttgccaccctctgcaagggctgcaagggggcaaatgcaaatttcgccttgccaaaaatgtatttttctaattttttttatcaggcctacttctgtaaatattttcgccggtacaatatttctgtaaatatttaaaaaataaaaatttaaaaatgaaaaaaaatcgaaaatgttatatacccgtaccataatagcgaaccaaaatagcactcctaaacaggg

SEQ ID NO: 32626 - DNA, 606 bp, Oryza sativa
aaataaatctctctatagatacctgacaggtgcaaatgaaatcagagcaccctaagaaggggcagggcactggcaggtaacagaaagagcttgatggtttgatgaatttcatagtgaaaccagaggtgtttgacaatggtaatcaaatggtgtcacagtttctccagcttccattttgaaaaaaaaaatagttgaatccagaggtttttgacaatggtaatctaatggtgtcacagtttctccagcttccatttagttttcaaaagataagatttcagatgacatcaagcactaatcaatcagtatgccttgtcaaacggttgttagctggtacaactacacattcctaagggacatgcaagtgcagtttgctttgcacgtttttcttgaaataagcagtgccggtcatattctggcctagtagcttataaagccaagtcaaatgacatttattaactttcgaagacttatggctatgcataacagctactacaacattagtagaaaaaaacaatattaaccaaaccataaaaaccgagagaagactacaagattgttaatactggctttcctttctataaggtactatgcaaaataatacttgga

SEQ ID NO: 32627 - DNA, 597 bp, Oryza sativa
aggcggcatcgtcgtcgccgccgggcaggtcgaagtcgaagtcgaagtcggtgcccggagccgtccaccgcatggagaagaggtcggcggggtccatgtcgatgaagtacctggagcttccgccgacatcgtcgtcgacgaggcgcttgaacgacggcgcctgcgccgcgtgcttgagccaccggtaggagaagctgtcgccgaggtgctgcagcgagccgacctccatgagctcccagcgagtggcgtgcgcgcgcgagacagaagacgagacgaggaggctgtgtggtttggagtgcagtgcagcgtgctgagcaggcaagggactacacggcatggcacggcgcagatatagggggtcgtctcctctccttggccttggaccgttcggtgcaatgtccatgttgcccctgcagtgtctcttttctctcattgcaaaactctgttctttttctcttgaaatttttaatagaatgttgtttttttttcctgacgggctgctaattacttcctccgtttcacaatgtaagtcattcgagcatttcacacattcatattaatgttaatgaatctagatagatatatatgtctagattc

SEQ ID NO: 32628 - DNA, 554 bp, Oryza sativa
aaattaagctaagagcaaccaagggtaaacggtaggtactcctgtttctcaatgaattaatctaatactgcatgtgatacatcatcgtagtaatgaattcatgttcataattactatgatatgctatatttagtataaaatttaacttattgtgagacaaagattaatagtattataatgtgtcaatgtgagacggagaaagtagtcatttcgttacaaagaaaatgacaaacacctcaacatactggccgtcaaactaagcttttctttaggactaaacatcctaaataatgcccagatggatcgtcaaagacaaaattatgctgctaagagaaaactcagagtaacacatgacgggattagttgggtggttgggataatcctgacaaaaaaacctgcgacaacgctgccgcacgggcgtccttccatccaggcctctggtcatgtcaccctgcgaaattccagctgccagctcaagaaatggcacatgaaatcagtaaaatgatctttgaatatttaatcctgggagaaagagctaagctaagctaaatcca

SEQ ID NO: 32629 - DNA, 590 bp, Oryza sativa
tgaaacagagggagtagttgctaaccagtcaattttgtggccgtcagatgttgtggagcacgaattaggagcgcatcttctccttattggcagcagtgacgtcatcgaagccaagaggtatgacattttagttttttagaaagcgattttgttagacatcactttgacatttttgtgggcaatatcactgaattcataacatcgcaatttttctctgagatttgtgtgttgtcttcatctctaatgaactttagctagtctccgattggttaggtttcagggtcaggatggcagaagagggtgggaggtgttcctaggatgaccgaggcagtagtgacccaacggtgggttagcggacatgacaatgcaaggaggagatggtggttctgcctcagtcacgggcaagaatgacggtaggaaaagccttatcatttgagtgattaggaaacaataaaaggtgacatcagatccgataataggagccatcgaaggaggacagtagcgttggcgtgagggtaactatagatggaggagtataagggggcaaagtggttcatcaagcctcatagagtagttaggaggcaatggga

SEQ ID NO: 32630 - DNA, 682 bp, Oryza sativa
  unsure (1)..(682): unsure at all n locations
tagagtctatatagaaataccatttacagaanaattcagaattaaaaaaagaaatatgaaaagatgagtctagagtctatacaggaatatatataacttccaaataactaaatttgatatttaaaaataattaataactaccacgtatataaaatacaatatgaatattatacatttgtagtttcgtaaagttattgcaaaatttaaaattatgatgtcattttaatatatttgaataatataataagaaaacatatatgctattatatgagagaaaatataatgatgctagccgcgcaatctgcacgggccaccatgctagttcagtaataaagagagaggagataattcaggtgtatagcaaattactttagaaaatcttaaggtcccaacttttagcttacaacctcgaactattaattgaattattcgtgacatgcttgtaaaactgcaattccttcgtaaactttcttagtcagccttggttagattttttttttcaaataatttgctcgcttaatagtatatattatttattttattcatacaagtagatctataagttttaattcttaaaaagaacatgctagactgacctttagacaatccattttttccctactcatcgctatgataaacatggagtaattcgagtcatttgacatgctgtaatgattgggtt

SEQ ID NO: 32631 - DNA, 1622 bp, Oryza sativa
gggatttgaaaactgtcaacttagatttgaaaactttggactagagtttgaaaagtcaagatttgaaaattttcaacatgatatttgaaaaactttccactcgagagtcgagatttggaacttccttcaaattgaaaaactttcaagttaagatttgaaaactttttcgagtaaactatttttaaaacatgtgtgctatcgattaaaaaaatcggaaaaaaaagaaataaagaaaaaacacgcgatgggaggggaagcgaataaaacgaaaaaaaacgaaaaagatggaaaaaatagcgataaaaaaaaagaaaacgtgggaagagatagcgccagttccataacccaactttccctttccccttcagccgtaaaagactgttcatcagcttctcggcccacagtccataacggcccgcccacgcccacgctgacgccgtctctcccacactccccacctccgtggctccgttcctcggtctcgctaccagccgcggccgccatacgcgcgccccacccaccaaagcgccacggccccggagcaacgagcaggatcagaacgccgagttcaatagctccgctgccgacgagccaccggagacgccctccatgcaccttgccgcctcgacctgctggttgccgcggcgctgcctgcgatctctgcccgaggctgggatggtaaagagatgagggatctagtggggaggaatagagtggaaggggctcatcatgcaccggaagatccttcgcggtaacaacccaatctctttccccgtcccggcattcgtcttcgccctctccttgtgcgcgcaaaatctccatttctctcactctctgtgtttccaggtgattcattatgagaggaattgacaagcgttagagccgcactcaccttcagtttttttattttgaagacggaaatatagtttcggcatcttcaccaaataaggtttgatggtctagtgtatcaattttagtgccttggaaattttctgcttttttggattaaaagcatactgatcgcgaacattgctgtactgattgggaactgtactcatcatgaacattgttatctatttaagtggcttagaaacactgcttgatgattgtgaaatgtgaattcttcctttttttggattaaaagcctaagctcaactattcaaaatttagaacaaagtgtgaaaggtttatattggggttatgaggcatgctaaaagagcagcagaaccaactaccatcacattactaaatctgtcagcagtagaacaggcacacactaccctgaacagagtcctggaaatagctagcacagaagattagactatcaaaccccagattaaagtgcccccatcaaacctttagctcatgtcttcatcacctccaccactatatccagctttacttgctccttcccgttcagtgcttgcggacattgctgtagaataaatgacagtttacatagagcgaccaccaagtgtccaagtgtgaaatttagactctaatctttcatagaatccttgtctttgagatagatgctatttgttctagagttcagattagtgttaaagaggagcgtaggtttatgactactgaaacagatgctatttccacattaaatcttg

SEQ ID NO: 32632 - DNA, 633 bp, Oryza sativa
acacaatattcacaatctcaattcataaatacccattttaaccagattcctaagtttgtaaagaggtttgaataataaaccacataaaatgatctggaatgtatctttcaataatatcatgcttaaaagcatttaacatctatccacgagatgttaaaagaaccaaaatcatgcatcaaatttaaatatgaagattatatcaaggtttctatatgatcaaaattttaattatgtcttaccttgcgcctcaagattgcccgtggcttcaacgtagccatctgggtccatgtcagttccttggattcgatagtcgaacttgctgtatggtctaacttacggatacgaaaagatagcaaataaagtctataagcaaattgctacaagaaacgataaagccaaggaataaataaaattggagcgaggcgagaggaaaaaggaatgggttcaaaataagttttaatttgaaaataaaagagaggtgatggtttctataggttggaaattgaataaaaacgaagaaaggataattttggataggtgggatttatttggtggatttggttttctagccggtgctagaatggagtagcacgacggttagatatttgaagtggttagccgatgctaaggttg

SEQ ID NO: 32633 - DNA, 720 bp, Oryza sativa
ggtgctactttaaaaaccatgcaccgtgtgcccagcctaaaaccatttttggggattatgaataaaacgagcggtgtgaaagcgattccacaatatccaaaccattccatagtgtccaggcgatatgaatattaccaaagtctagaggtggaaaaccgactaatgttccctaattaaaagcgaagcatgtacctaaaatcatactagtgattgcatgagtagagtgtccactagttggggttttgtttattttagggtgaccagggaaataataccaataccaataataataaggtcataccaaaggtaaataggcatggctaaataaaacagtgataacgcgggaatttaaataaagcgataatgcaataagttaaatcaacataattttacaaactgggattcaatatgttcaaagatgatgtgacttgccttgctcgctttcccaaacgtaggcttcaacttccacgaagagcggatcttctgaagctgcagcgtgtacacgaccaacgtaaaagaaatggcttttactctactaaactccatataccaagcagaaacaaagcccaaaaatgggttcttgacttcttaaggagaaattagagacttgaacggtccaattccgagttcgaatggccaagttatggccatttgaagtttatatgctctttaaatggatattggaaaatttcttcatttaaattttaatttaaaatcgga

SEQ ID NO: 32634 - DNA, 1178 bp, Oryza sativa
atttcttttttttccgatttttttaatcgatagcacacatgttttaaaaatagtttactcgaaaaagttttcaaatcttaacttgaaagtttttcaatttgaaggaagttccaaatctcgactctcgagtggaaagtttttcaaatatcatgttgaaaattttcaaatcttgacttttcaaactctagtccaaagttttcaaatctaagttgacagttttcaaatcccgagttgatttttttttctttttgtgtttttttctatttttttaatcgatagcacatgtattttcaaaaatatttgagtcgacagttttcaaaaagtttttcaatttgaaggaagtttcaaatctcgatttgaaaactttcaaatctagatttgaaagttttcaatctcgagttgaaagttttcaaatctgagttgaaagtttttcaaatctgagttgaaagcttttcaaatcctgagtcgaaatttctttttatctttttatgtttttttccgatttttttaatcgatagcacacgtattttcaaaagaaaattgagtcgaaagttctcaaatctttaacttgaaagtttttcaatttgaaggaagtttcaaatctcgagtggaaagttttcaaatctcgagttaaaatttttcaaatctggatttgaaagttttcaatctcgagttgaaagtttttaaaatctcaagttgaaagttttgatatctgagttgaaaaagttttcaaatctggacttgaaagttttcaaaatctcgagttgaaagttttcaaatttgagttgaaggttttcaaatcccgagtagaaagttttcaaatctcgaggtgaaaaatttcaaatctgagttgaaagttttcaaaatttgtcttatacattcaaatttagagttcaaaattttcaaagtttgagttgaaagttttcaaaatttgacttcaaagtttaaatcttaagtagaaagtttttaaaactaatttaaagttttcaatctgttgtcgaaacgacaactacatacgtcgaaagacgtggttacttaatagtggttggaaagaaacgaagtgtattagtttttttttggaatttctctccttccggtccccttattacatggccctagggggctatttatagccccattacagattcttactactagggtttaggttacactgagaa

SEQ ID NO: 32635 - DNA, 570 bp, Oryza sativa
ctgccagtcatgcaatgggtgttattctatatgttctacgatacttaattcttttggaggaatagaagcttttaactggtgcttatggattagggtcagctttagaaaattattgtgtatcgtatttcaccttatttgtttttataagcaagttactcactttgggtagtaagaaggtgattaattgaggtaatgttgtgcacagccagtcaggcatgacaatagtagttccttttttttaaagagaggatgataatagtagtacattaatagtataaactgaaaacatcgattgactgttctgtccatgacactgtttcaacttggaggtacgaattatgatcaagctccattgatgataatcatatgaccaaagcaaataacaaatttctgttatttacctttgtgtttctagtatctagttatctactatgacattgatatctgagcaaatatgatcaatatcctactcataatttgagcattttgttttgcagctgggccgaagatgcaccggttcagcttgtactgaagaacctgttgtgccaaggtttgaactgggatgtctgg

SEQ ID NO: 32636 - DNA, 552 bp, Oryza sativa
aagaacaaaagggctataacaaataataggttaattccactctatgacattcgaaaataaatgcaatagttgaatagaaacaatagctttaaacgggatcaacatgctcaaagggttgtttggatctgtgtgacttgccttgctggccttggaactcttcaaattcttcccctgcaaaaacggactctccggaaacgtcggaatctaaacagaaaagagcaaaatcaccaaaacagcacataaacaagcatgaacagtacatgtggatatttttaacatgtagatctcaatttagaaaaaaattagagacttgaaccaactaaatccgagctaaggtgaattagttatgaatttttaaagattaaatcggattaaaacacttatattgattctaattgaattatgacgcagtaatgaattatttttgaaaaggaaaaaggaaattattgcgttagcggctagggtttgcggaggaccgagcgcacagaggtggttcactagatctaacggtcgagatcgatccattcaaaacggacggccgatatcgatcgg

SEQ ID NO: 32637 - DNA, 655 bp, Oryza sativa
tttttccttaagaagtcaagaacccatttttatgctttgtttcagcttgttatatggagtttattagagtaaaagccttttcttttccgttgttcgtgtagacgctgcagcttcggaagatccgcttttcgtggaagttgaagccgacgtttgggaaagcgagcaaggcaagtcacatcatccttgaacatattgaatcccagtttatgaaattattttaatttaagattattgcattaccgctttatttaaattcccacgttatcattgttttatttagccatgcctattacctttgttatgaccttattattattggtattggtattaataccttgttcaccctagatcgaaacaaaaccccaactagtggatactctactcatggtatcactagtatgattttaggtagatgctacgctgtttaattaggtaacattaggtgggtttacaactttagactttgggatattctcatcacctggacacactagaattgttgaattattggggaattggattcacacatttccctctattcaaaatcctgaaaatggttttaggctgggctcggggtgcatggttttgatagtagcaccctggccatataaagacccgtcttcgggccctttgtgcaaagcacttccgtactttc

SEQ ID NO: 32638 - DNA, 673 bp, Oryza sativa
tagctcggaggatgatgctaccatcgtgcacctgttcgcatggtggaggcatacgacgcggctcgtatcgacttccatcagatggtgcgccgtgggatggtcgagaacaacatgaagatcctggagctgcgtcaagagaacctgcagctcaagaaggacctagacgcggtggaggcgcagctgcatcagctcaagatcgcccagggagaggtctgccgccccaagcgtcgccgcgtctgccgcagcccgaagatcaccgcccgcaagagcacctccaggccctagctcgttcgtcagtccctggcgtggacttgcttcgtcgagacccctcgtgccgagcccgcgcccgtggttccccaggagggggaagcctccagcgttggtagcacggaggatgcgctgttgctcaccttccgtcctggcccgtcgcagcggtagacgagcagttagtaggcttgcgcgtgtgttctttctcgtttgtcttcttgttggagttgtgtggggcatggttataccggtgtgtggcataactgtgtcggagcctgtctttattttatttgcctaagcaacttgaactttaatgaaccaatttaatagcagtaatagattcaagaattatggtagtcgtgggtggttagctttaattgttagctctctctgtttgctggttctg

SEQ ID NO: 32639 - DNA, 599 bp, Oryza sativa
attaatggcgccggcgaggttaggggaggagtttccaatacgaatccgagggagagagagagggaaaaatggggggaaagggggaggggatcccagggaatatttcccccctattgattgcacgtggggaggacgggggcggcgggattcgcggcggcggcggcgctagggcgcgggcaaggcggcgggagcggcgggaggaaggggatgacgggtgggccccacccgtcagcgagggtggcaggcgggcccgcccgtcagcggcacgcgtgcggggaggaggccgaatgggccgcggggggggagaggagagaggggaagagagatgggccgagccggcccaagagggggagggggaaaaaaggactttttagagcttttctttttataaaaccattttaactttgtttacttcttaataattattatttgtgctctgaaaattccactgaaatttatttacgcattttaagcttttaggaaatatacaaaaatcctccaagccttatttgacttttaactttgcacattttaattgttggaggctttcacacggattttaattattctaagcataatttaaagggatatattttagg

SEQ ID NO: 32640 - DNA, 661 bp, Oryza sativa
agcgaagacaaagactgtaaagggcgaaaagatattttatattgtgcatcgaatagatgcacctgaggaggtgtagcccccaactatgtgattagttaacgaactaaacatatagttgagagaccaaataatagcacgatcgtgcatcatatgacaaaagcacacacagcgcctaaataggcatgctagccgaccgctttttagccataatgaaaagagtccgagtagtttacactctaaaaaggttcacgaatgaacacactggacaggcatccgaatttaaaactctaaagattacccaccaagtattataaaaattatggtaatgaataagtctaatagcctaggctatgactatttaccataatgaaaataggtatataacataccaaggaagtgactatgataaaaacaagtcattccaaattaacccagacaggttttgtagcctaataaaactaacaaaaagcagtataacacctttctgtcgggcaccttttaatttgcatttgcaataattccaaagaattatatgaccgcataaaaaggattttatcagcatttggcaacactattgtgcgcataatattgccaaagcaaaatatgcctaagttcctaaggaaacacattggccacgctggtaaaagtattggggccgaag

SEQ ID NO: 32641 - DNA, 592 bp, Oryza sativa
ccctagatcaacttattgtccaaaagtatgaatctgcaccagctggacagcagtgacattgtcctctcactacaggtaagccgatattatcttttatatttctcatccattcattcttgttatcacttgctagccattgtcctctcactccagcttaatctttctctcttttcccctaaacagaaagccaggggtttgtttggaagatttagtatactccgtaagctgaggtgctcaaagataccttctacctggatggttcctcgaggaagtttggcctccccttatatgctaccactatctctctaccttcctatttcatttgttcgtcactaaagaatattataacgttgctttcagaagattcaaggatttgctctatcttccatttctttcagctcaatatcattccttttcatcgtaatgatataataacatcaagtgatttgatcaagcataagaaagactgcaactgataaccatttgcaacagcgcactgttatatatttgatatttggcatggtcagaacttcttttaatcgatttctattttctcagaattttcttaccatcattcactgagcatggttat

SEQ ID NO: 32642 - DNA, 584 bp, Oryza sativa
ggcgaattcgagctcggtaccctattcctgaagtataagtagttttaaaattaaaatgttgaggataaagatgatttatggttttcattactcctttactttattattgtttatttattcatatctattcacctttaattatttataatatgttttgccgagtacataagtactcacccttgcataatttgacatatagcggaaacgtgctaacaaggagatcagaaggaagcgagattctacggcaacgacaagtttgtctaggctagtctacactcgagcttttgcctgtggagttctttgaattctttggactttattagctgtagttttagtagttgaagagtttaggagtttaatagtttagcactttgaattttcttgtatttcaaataaggatgtattagtttgtattttttcaccctttaacagttgtataattagtctatataaacaaatttgtgtaaacaatcgaaagttgttcagtatatcaatctgtgtgtgatcgaaatcctggacgatcacgagtggattttcggggcaccaagcctaaatatggtgtccccacaatagccacccccttt

SEQ ID NO: 32643 - DNA, 667 bp, Oryza sativa
tcacagtctttgattttagtactcggcaaaccagagcagaaggaattgaagcactcggatcattgctttatgttctaagagaaggcattttcgtcgactgtaaaggtctcgggggctactgtggagattatggataccccatatctacacggcatgtatagtctggttaggtacagggtaccaaatatagatagaatatctttaagaggactcgggttagtttctaaacttgtatgtcaaggaaatacctgggatcctagtcggttatgattgtattttatctgtaatcacatattccgttagggatataaactgtattttgtaatatggactccttccccctatatatggaggggtccgggtccctctggggacacgattttctcccagatcatacgatcaataatacactcggcggaatcatccccggacaagaatagggtattacttcttaactaagaaggcctgaacctgtataaaatcccttgtcttcaaacccatccacttttctaacttgatagccacccccttttagtattgccgaaatcttgtttcgacaccctccacatagtatatctcatatgtttgggaattggcttgtgggtgttaataataagatcaaggatcttattcttgttggagcttccgctgttgttgggctctctgg

SEQ ID NO: 32644 - DNA, 550 bp, Oryza sativa
actatagggcgaattcgagctcggtacccctacaagtaattatttataatcttctccatcatttgaaaagtaggtagaattattttctttagaaaacatgtcaaaaaaaagataaagtaaggttttttttaattgcatatatattatcatggtttaatagaggagaattgggtgggacatgaagctccactaaatgtatgggtttatatagcctaatataactgatgtattttgagaggtgatccatctataaacatttcatgtacacaaggtcagacactccacacagcctaacatgaatactataatgacaacataattgtgctgtattaattttgaaatgttatagtattcatattactatagcatgaatacacatttgttttttatataagatcgatccaacgataagaaataatggttccaccgatttaaaaggcataggactattccaaaaatatagcttaaaaattatgtgtgattaaaattcaatattattgtaaagtgagtgtagctcaactggttagtttccttatattagaacttgcca

SEQ ID NO: 32645 - DNA, 526 bp, Oryza sativa
ctacaagtaattatttataatcttctccatcatttgaaaagtaggtagaattattttctttagaaaacatgtcaaaaaaaagataaagtaaggttttttttaattgcatatatattatcatggtttaatagaggagaattgggtgggacatgaagctccactaaatgtatgggtttatatagcctaatataactgatgtattttgagaggtgatccatctataaacatttcatgtacacaaggtcagacactccacacagcctaacatgaatactataatgacaacataattgtgctgtattaattttgaaatgttatagtattcatattactatagcatgaatacacatttgttttttatataagatcgatccaacgataagaaataatggttccaccgatttaaaaggcataggactattccaaaaatatagcttaaaaattatgtgtgattaaaattcaatattattgtaaagtgagtgtagctcaactggttagtttccttatattagaacttgccaccggg

SEQ ID NO: 32646 - DNA, 699 bp, Oryza sativa
cctacaaacactcctagctcaccacgtggcgttttaataaatcgtagaaattctaataaaaaagaaaaatatctgaccatcggttttcatttaatctggtggacccattatttttaaccattagatctttatttaaagtaaataccaaatcaatctatctaaaaaaaataccacgttacccggccgtacgtgtcccatagaacctgtaggtccttgcgtcccaatgtacgtacatatctcctatatgtctttttcctttttccttcttgtatacttagattagatgaaaatctaaaaaaaatccatgttaaccatattttttatgttctaaaagtacatgttatttcaagttttattctaaataatgcatctcatcgaatcttccataataataataataataataataataataaattaaaattgtggattatatgattatatatcactggagagcatagttaaattggacatatatttgaaaaaaaacaatttaaattgtgagtagcactctaaaagtttactcctccatactgtgtaatactgatatatccaaatgatgttattaaatttatcatgaatgtatttttcatatattatatgtttctttgttcatatgtttttttttggaaaattaacaatcatatgtccaaatgatgttattaaatttatcatgaatgtattttcatatattatatg

SEQ ID NO: 32647 - DNA, 1112 bp, Oryza sativa
tttctattcaagttaaatcacacttatgcaattattcatggttacttacattgtctgctctgttaatctatacaacttgattgccaatggcattctctgtagtctcaagggtacatgattatgcttttcaggtcttggctaaatgcatatgaaaaaacatattgattgaactttactaaaaatattgctcgtccgggatttagtaagaatgtccctctgctcttattgatcaaatagaactgtccatatatgcctactctcttttctgatcacatagtactgtgtcaaataaattcaatatgttgctttggtgtccttaaatggcatggttgtttttataagacagtaaatacaatgtgctaaatccagaatatatcaataagtctacccttaatgatgaaatttaacttgtgcttgctgcatatttctgttcttttaaccctgatgtgtattgtagaaagtataatccaattccacgcagctattttctcctccgctttctctgccaccgctgcctggtatctaaatgtttgcacatgtgctattttcaactcaggtactttcagcgaacaagaatcttactccattataaggaatcaaaccaatcgtgaaggtagctggtactttgagaactgtcagatatgcaaatctggctaaatagtcatccatgtgaaatgccttaatgaactctgtatttatatagatgagatagctcatttagagagtacatacatgatgtgggttcttcgatccaataaactctgtagtgttgatccatttatatataattctccctgttgtgctgatccatttatatatatttctcccttgcatatgcacttttcatttactcccatccatgtaacattgtcagcactgcagcgggtactggtgtgtatacatttcgtgtgcatggtgcgttgtaccatcgcctgggtaatttggttccaggttctcaagggccactccatatgcaactttacttttatgatacagaagacgctgaagcactggcccatagggttcagaggtctcctgaccttgatatcaaccttgttcgggtcattctacgtattttggcacaaacccttacgtacagaccttcaatagag

SEQ ID NO: 32648 - DNA, 675 bp, Oryza sativa
aacaattggatcctataggactacatagattatcaacagcgtcagcttctcggacggctatagcaacttcgacaccgaaagcatcaacaactccgagttcaccaacgactactctccactcttctttgaagttttcatggtcggggcccctgaagacgagcaggcccgtattgcgagggagcaggaggagcaacgtgcaaaagccgagaagaatgctcacgcaaagaagaagaggaacatgcacgaaggcagcgcaatctgatcagaagtgggtgtgtcactaacaataacatcatacagacctacatagatgacaccaatgtcttcgctacgccttagcaggacgtcgtggcagctgtcacattactcgacaatgcccttgaggacatgactccgacgctgaacaaacttaacaccatgatcatcgccatgacagtaggagccgggggctctcgccgagcggaggaatctactactgagatgccaaggacacccactggcagtcatctactgtcaaaccatggatcgccgagaacctgagcgtagcagaggccacacaatgtcaagcctacgtcaccgagaggatagaggccgccgtcaagatccatcattcagcaatcacgaccgcaacactgatcgccatcacgagcattgccaccaccacgaccgaggtca

SEQ ID NO: 32649 - DNA, 615 bp, Oryza sativa
aattcgagctcggtaccctgcgcacggaaaacggaacggttcattagcgcatgattaattaagtattagctttttttggatcaatatgatttttcaagcaactttcgtatagaaactttttttgcaaaaagtgtgtgcgcggaaaacgagggaaatgagttaggaaacttggggtaaggctattcccaatctaagacactagacatagtttccataaactacacatcatcaagaaactagtactggacactactctttaaatgtaaacaacattttttcatacttaaatttaatgctatttatctcatatgatgtcttaaatattgtgtagaaaccatgtcttatggaagacctggtttccttccctttacttatttattcacttgtcacatcattttttattttagatggcagcttatttaatactatgggtaccatactaattattgagggaatggcataagaacacagccctagtcttgcgcgaagctggcgttttcatcgatgcatggacaccaacggaacgacgtggatgtcatctctccgtgtttattgtgactcattctatagctagagtcggtaaagggttcgctggtaatcgatcgatcatacttt

SEQ ID NO: 32650 - DNA, 776 bp, Oryza sativa
ctgacatcaaaaccacctttttggagaagacctcaaaaaaaaaactgaacacgtacatagtacaacacagcaaaaattactaattacttgtgggatcaagcatgatcatacctggagcagtgaagcaactgtgccaaaagaattccacaacagcagagccaggttttgaaacatctctcttttcagaaaaatagtttcaagaagcttcattattcataggtttttccttccatgatgttgtaatgtcaattgtagaatatgcgatttacaattacttattcaattaagaacaattacaaaaataatcaaccaggcaattagaaattaactaatatcttagggtaaggagatctatcaaccctttgagacctcaaggtgtgctttctcacatagattaggattggaaaggttgaggacaagtttctctgctaatgtcatgttttgatccttcgctcactactcgatgacacccaatgtcggagcaagaaagatttttgagcccaggcaaacatcactataactatcatttgctacagaaatttcatcatcaatttattcaataatattaaaatttaatggacttttcaccggtgagcccgagcggctgcctgggctagttgggcgggggctccgcccctgatgacaccaactttagtgcctacctcctcacacggggatgaatgtgagaccatgagagaggagtgtgctatggaggaaaataaagtgttctttttgtttcatatagatgtatgcttgtataaatttctaggtcttag

SEQ ID NO: 32651 - DNA, 608 bp, Oryza sativa
ctgttttcgcgacctttttctccctattttatcctctcgccgttgctttaggtgtgcgaatcacatggccatatatatgaccaagctgatcgggttttcaggcctttttttttccttttttctctcatcgtgcatcgcccttgggtacgaagcttcgtgcgccgtgcgatgtaacatgataagatatcgcaattatcggtggttagatctggggtgttggttcacttgcccggggtggcgagatatataagacgataaggttttgatccgggaattctaaaatagtcgtgtatggcatgtgatgctaatcatgctcttttgcatgcactgtgtgtatatctgtttctccttttttattttctttctacgatacctttttgcaattattattccaattaaaccgtctatatgcatcacgtgtgatctccccgccctaacatgctctgtcaactttgcgttacaacccttacatgttgtcagttttcgatcaattacgatgggaaaccagagagtcgggttacttatattagtactctctccatcccataatacaagagttttttactttttgcttgtactgtttgaccactcctcttattaaaaaattg

SEQ ID NO: 32652 - DNA, 667 bp, Oryza sativa
gttgatattgtaaatctaatttagtggtacatatttttataaccgataaagaatatatagtgatatatagtctatattgtcatcttttttataattttcatgtccgtttggactacagaaaaagaatgaaaatatgacctaaaatataattctactttacagattaaagtatggttaatatagatcataaattaagttaatggtaaataatataatatactaataaactttattttcaaacgtcttagagttagttttagtatttatgattataacgtgatctatgacactataacctttgttttcgttttttttttctgttagacataacgcaaagggtcaaatcgatcatggataaaaataatatttatttttttctaaataaaaatatagtaaatatggattgatttaattgtggtcgaataaaaaaattgtatatataattgaaaagttacaatagtttatttattatttatatactacatgttatctcaaccaatatatggaaaaaatgagttaagaagagggaagagggggtccacattatctgcaattagtgagtgtggctggttagttacgtatggtggaacttaattgcccacgcctaggttcaagacctagacttcacatgggtctcatatttacggctaattatttttgaagtagg

SEQ ID NO: 32653 - DNA, 637 bp, Oryza sativa
ccccttcatcccttaggctatccttgtaggcgtcacatttcttgtaggggtcatgtttgaacccttcttcactgagcttggacgatacacctcgaaccctaccctctgggctcaagagtacccagtgtcatatttagcacatatttctacctctttggcttaaaaaatcatgtcttctatgcactggataaagactctattttattggcaaccccttgcagctcgaggtcttcaaacgaaaattcgccttcttgcgtgatcttaggagttctagcttttacccattttttcgatatttcgctccattcctccattggtacctgaagccccgccttcctcatttcttcctcctcttttgcccactgcgccacctttggtgcataccccccggaacctaagcgatgaggaaatctgttcttcttggacaactcagcaaacttcttgctcttggcaatttctttcggggaggtcttcaacttaacataatcgttccactgtgtcggtgttatattggcatatgtctcaaatggtgtccggcccgtcttcacgaattttgtgttcaatgtgtttttccaaccacgccacgacttgtccattgtttgcagtgcacaaatcctcaccgctgcttctgatccat

SEQ ID NO: 32654 - DNA, 1300 bp, Oryza sativa
ctactatagggcgaattcgagctcggtacccagtagattagatggcgatattgctagagattatgtaagatatatgataactcgacgaattatataaacaagattagagtgtcataaagatggaagcactaatcctaagaacgcaattcgtcataacgaattttacctcttgttgaagatcgaaatcgatgcagctcaacccgaaagcaagaactcgtcgaaacaaaactaaagcaaaaagggtggtgatgcgccaagattgtattgaatgtgtgtgttcaaaaattacataaggctcggggtctatttatacccgagaattacaagatatgcccatactggacacgaccattatctctaacaaactctaagatactataagtctttgcggcagacttttgcccacatttatctataaggaatttacataacatatcctaattaatagatacaattgccttcccaggactctatccgtgcgtggcaatcatcttgaaatacactaacttgaacccgatgtcgcatacaagttgtattgtcggaatcggctatatcggcttatttagcccgactcagacccaaccgatcctaaccgtagccgatctggattccagccgatccctgctctgcttccgaactcgatctccgcctccaacttcgctttgatcaagtcctctttcccgacacagatgttaccaaatttggttgttaacacatgccccccaagtccgggatattcgataatgttccggatttgccgtatgccgactccgagcgagttttgcactccgccgcttttgaccgttattccagcgctttaaatactaaccgttacccccgagaaatctcacaccgtgacttccgttttcaccgctcaagcgaaaccttttctctctcttctccggcgattcctccggtgcaaaggtgattcctaggcgacctcctcttcgacgagatctccgcccgcggccatgtcgtcctccgccagcccatctggtgcaccaacagccgagtacgctgaggtaagttctcattggctaaatccccttctttagcagcagatcgatcttctcttatctcatattgcttttcctcttttggttgcttcaaatttgtagcatctttctcaccaagtcgcaattcccagtctgacgcatgaaaattactactttcttggcccaatcggcaatcctgaccccaccgagttcattgttggtgaaaccaatagaatcccctttagactaaccaacccagatctaggtcactggaagaatactttcaagggtaccgagctcgaatt

SEQ ID NO: 32655 - DNA, 547 bp, Oryza sativa
tttcctaattagatatcctcctatctttatttgacttattcctaatttatcatgcctaaactaacgcatgagcctggtccagacccataatacttgacccacccagttaggccataatgttattgttatgttaatgctttcaaggaaaagagggtgggttagagggaatgatgataaattgatagtagtatttcatacaatagcctgaagcaatgaaatgattccacatagaaagaggtcttcagaatattgtggaaaggtcggtgtgtgctcttgaacaaaatcacaaatattcattctaaaactaaaggtcttcacagttaaccatgatcatagaaaaaaaaacctacaacagctcaggagttggtccttttttttcacgaaacatgaaaaggtatagaatagaaaaaacagtacaggctacagcaagtttagaagttcaggcagataatgtgtacaccgcgcagattgcagagcattcaattgtagaatgattaaaaaaggtcttgaataacggacagggtaccgagctcgaattcgccctata

SEQ ID NO: 32656 - DNA, 551 bp, Oryza sativa
cactgtaactataatgtaacaaatcttgtagttacatgcaagttacagtgtaattacactatgattgtactataattacatttgtcaaattttcaagagaaaatttatcgacaaatgtataggtggtcccacaaacaattactcaagggtgagaataaccgtctcacccttgtaagaaaataattgtgtcttatcttttgaggatagtgctaatagtgaagtggggacaacaatgcctataatagtgggagtacaagatgctatatgtgaggcacaaattatattatacttgtaaagtgatgttgttccctaactcagcgaccttgttgtgttgtaaaatgtaactcttttcttaattttaatgaaatttggccaataaatttctgcatacccaatgatgaatgtattacaactacggaggggttgaatttcgtaaatattcggctaaaccaggctcctctaaaatatggagaaaagaagtcttatatatatatttttctaaaaaaacccaaattttgttatagaaatttttccctttcaatctaatttca

SEQ ID NO: 32657 - DNA, 1281 bp, Oryza sativa
cagaaggcagccgattaggttagatcttgatgttggtctagattatataagatatctaccattctatgaaacttctagcggcttgattgtctagatatcactcttcttttcatacttaatactgcatcagttgagtttgatctattaagtcgtgcttagaatatcgatctctagcctgccttctagttgccgattagaatagcatcggagtttcagccgatcgtatctgatttaactatatttgttctatatgctatactgatatgttaaatctgccctttatatcaagatattgccgtatctaaacatgttaggcctttgtttgatatattattcttgctttaatatcctgatatggagtagtatcggagtattagccgatacatgcgagatctatctgatcggctatgctataaacatatatagtcctgttattgatatatgtttcgatctaagtgatttatactatctcggcatgatgaccgatctatcccaatcactttatttaagtatatatcgatatgaggagtatatatcatttatatctacagccgatcgagtagatttagttcttctttacttattcatgactgccgatcgatacacagatgacatcggcccaaagataagtgatatgtcatcggcatctagccgatcggctatcatttatagatttaactacggtttctttgcttctatttcttgttgattacaggatcaaatcaactggcacgctaatacatccgaaggcgagctttcgacctgcactggagttaagcagatctcccaggccatgtgttttctgtcaacacacctattacgcaggattgtcacaacccaaccaacagataatagtcttcctcctctggttgctactgctactacacaccctttcctctactacctctgaggagctaggggcacctggggttcatcgaggggagctggggctgaagccccaacgatgaattcacccttgcatgtcctttgagttctggatctagatctagcagatcaagaacaagacgctcataatccccttctaattaccttattcaatatcccctctaggttaagtcaaccattagatttagtcataattattatgtcaaccattagatttagtctaaatgtatccttagagcacaagccctattggacattacagcaaacaaccccctcccccactccaaaagtataaagcccagttcactcggtgctcccaacttctattcttccccattgagacccatgtgatacccatgccatatactgacatag

SEQ ID NO: 32658 - DNA, 981 bp, Oryza sativa
ggcgaattcgagctcggtacccttccaatagatggaagtaatgaattcttaaattgtttatggtggattcgcctgttcgaataaaatactgcctttttatttgacaatggatgcattaagtcgttgtaaggtgatacttaaatagctgggcatcatgatacccttcttcatgagactttttgtagttgtttccttatctgaattaggctcgaaattcactcgacgttgagtcgagtccagcatgagccagttctctagctcggaatccagcttggctcaaagtgagctcatttgaagtataatgtgagcttagtcaatgcaagactcatccatgcatcccatggcccagccatatcacattggaggatataagctgataaggcagtcacatgccacagccacaaatctcacggcaaatctctcccatctgtcgattctttagtagacaagagtggtgcgagctgcgagcaggagaagatgggtggtgcaggcgtgcgggcaacgggcaacatgagtaacacgaacacctgtcgccttaatgtgagattcttcggtaaaaaccattccccgtaactaccgaaccgattttatttggttttttcggcttggtttatatttgtaaaaaaaaaattctcagcggctattatcgagaaaccgaattttatgaaaaccgaagaattgacccgactaaaccgatgaaacagaacatcgacacctaccttttaccacaatattttcgttaaattctgtgtggtaaatatggtattactccctccttcccaaattgatcatcatataagtttatacactaagaccaaggataatttaaatcacatcaatctcccacaatgcatgcatcgattaaaacaccatgccaattacaccttagcatacacacattctcccctgctgcattaattgtattctgatgaaatccgtatccatacggttatatgatgatcaatttgagaaattttgaat

SEQ ID NO: 32659 - DNA, 669 bp, Oryza sativa
actgcactatttcctgagctaaatttgctcagaagtacagatagtgagataaaacaacctctaatataatgagaagtggacttgaacaactctgcagcagagaaattacaagctgcctcagattgcaaggcaacttttttggtgaaatattatttccgctaaaataaaattaattgaactctacaaagttttcaagagtagcagtgtgcataaaatccagcagttttctataacaggtctactaggcaattattatgggcatgggccaaagaaagcttgaccagtaacacatgccttccaaagccaactcctagatcctttggtccacactcgggcatatacgaggaatgaacactccatgcctattgctgcataattgcctgttatgaaatataatcattacctatgtaacaccaacgcaggataccagtaaagcgattttgtgatcattctcagctactcaataaaataacaggtaaactactgagggtcccaaaattgtatacataaaaggcctacatacatgcacataaggcccactgcttcctgcatgctgttggccagccagcaaacctatattgaaataaagaaaaatgaaaggagagtacactcaataaagtaacctatattaacttgacacttggagacatgaagccgtgctccgtacca

SEQ ID NO: 32660 - DNA, 1100 bp, Oryza sativa
atacttacaaatattttgctttaaacactttatacttcgaaaatattataaacacaaggaattagcaggggatggaaacaaagacgtgtattaaaaaaaaccctatcgggcaaatagtaagtttatacacctaaagtttgtacacctgagtttacacatctgaagtttatatacctaaagtttgtagacctaaagtttataagtcaaaagtttatatacccgattcaaattacaattcggattccaatatttttttatataggaactttatacttgtaaaatttacactaataaaagtttcaacatccaaaaatttatagttgcagaaactttatacttacaaacattctactttaaacactttatacttcgaaacattataaacacaagaaattggcaggggatagaaacaaaaacatgtgaattaaaaaaaaacctatcgggcgattagtaagtttatacactttgcttggtttaattgatccatggtatgggacattatagcggttaaagagaaacagggaaatagactagtaaaatcattatcataaaaatagtatatctccattttttttattgcagaatctgaagactgctttatttcaactctgttactttcagattctgccgagctgttatctttgcttgcagagtgctcaccagtggcatccttgcttggaacataatctgaaattgcacaatttgcctcgctacagtccgagtcttcacgataactaataccatgttcctcaaaatcatccatactgcctgagtcacgtaatggaatttgttatctgcgcaacagttacatagacaccttgagctcctgaccaactgatttattagaaatcattgatacaagcagatagcggcaaggaaatcaaaaaggttatgcaaaaaacatgaaacaatggaattcagaaaagcgccaaaaaaagatactattcatccaggagattttattccgtccaagctgttcgttctctatatgctgaaggtactctctctctctctctctctctctctctctctctctctaccccttggttttcagacacatgtatgagcatttttggtgacttggtgtagtgagaattttt

SEQ ID NO: 32661 - DNA, 553 bp, Oryza sativa
actataggcgaattcgagctcggtaccccaatcgagttgttgagtagggcatgcatatatgcaaaaatgcactttatttcctagctagctagcttagctagtatgctctcatgacagtgcatgggtaaggaataaggaggacataagttctttcggtgcagttaaatactcttttcatcaccaagaggcgatatcgatcaagcccccatctaatccggctacgctaaccttaattaatctcgtctgttgcctgcaactacgggtaattaggccattcgatctcagtcagtcacagtcaagtctttggagaggattgaacgcctatgaaaatatataaaaacgacaattttatgtactacttcgatctgtgaatgacctgataagttagtatcactattttatttgcactcaacaaatgttaggtgttggcaacatagcattgcataattgcgctaactttattccaggctagctacatgcgcacgcctagagttggttacttggttagttgctggcttgctgctcccatcatgatcgtctttaatcatacgaa

SEQ ID NO: 32662 - DNA, 727 bp, Oryza sativa
agagagagagagaaaggcaatctatcgagctatgaactttgttgtttgcatcctggaggaccaagtgtcggtaagcctgtatctcggttgctagcatgcatgtactgatgcacgcctcccttgtgattgcttcgactttaagctcactcatgtactagtattttttttttgacactcaaagtgaggaggaggaggaagaagaaacaacaagcaaaggcaaaagaaatcgagcgtgtgagtgagtgagcccccacggaccgatacaaaaaaaacccgtgtgccacgacgtgcgatgcattcatatgcatgcatccatcctcgtttttttttattattccctgtgtaataataatcgagcccgtcgaccagtgcatctggatatatatatatatccggtgctccagagaaatttttcacgtgccattacaccgtacacgcatatggagtgtacacgacgcgcaaaacaaaatttcgccggggagcagcgaaaacggcgtgcaggaccagcacagtgagagggcgacgggtcgaccatgtgaggaaggacgggaaagagagagagagagagcgagcgcgtagtacagtacagtacgtgcctcgaccggaaaaaagggggccggccaaaatagcatggaactgctaaaccgaggcgcgcgggcgcatgcatatgtgaccgtgatcccgtgctgctacgatgacgcacggcgagcgcggggtgtatcggcat

SEQ ID NO: 32663 - DNA, 722 bp, Oryza sativa
tcccccgttcattttatgagaatactataacatgctccgctctcttttttaagtgaaacggaaagcatttattttatgagagcactctaaacaagcccctggtctgcacatacaattttttttcttgactgtagattgagttttaactggaaagttatggattaaatacacatggtaccaatgtcatttttaaagaatatatttcataattatctgtaaagcttttggcggataggaactgcgggcacatgcattggccatatttggccttctccatgttttaggggttgttcaaattatgcccaaaataatccttatcaaattttggcattggcaatttgacaatattgctaagttttggtatgatttcttatatatttaccaaagtttgataaaaaaaaactaaatggatgcacatatatatttgataagtttaccaaaatatgctatggtctaaaatggcatcaatctaaacaaccccttaaaattctgtataaacaattgcagaacaatgaatcattgattaaccactcatctcttcagaaaaaaaacttccttgccttaaaaaagaaaaaggaaggaaaaatactcacaaaatattatcttcttgttaaagcccgttctaactttcattggcatcaaacatcgataaagcttgcacggagtgctctgctctgcggtaaaaacttgcagcattggctgcccaaaacaagctatctcca

SEQ ID NO: 32664 - DNA, 731 bp, Oryza sativa
aaaaaaaaaaaaaaaccaaaaacgcatcgtcactttcatcaccaccggccccgtggccccacgcgtcaggtccgctcaggataactccgaggccacgccagtcgcagggttcgctgacacgtggggcccaccgaataattgcccccacatgctagcctcggggcggaagtcttccgtctctgtccgcgcgagccctcgcctccccgagcagacaatcccgtgcgcgcctatagttacaccggaagatcctacccacgagcgaaccacatactgcaggtgggcccagatggtggtgtccccaccatgtcagcgagagaggtttctgtgcgcgtttgagatcccacaccgccgcgacaagtgtacacggggatggatagagaggagagaagaagaagcttaaggctgagttcggatgggggagacggggaacctaactctaactcctgtgcacggaaaacggagtggtccattaacacgtgattaattaagtattagctaatttttttttcaaaaatggattaatttgattttttaagcaactttcatatagaaactttttgtaaaaaacacaccgtttaatagtttgaaaagcgtgcgcgcggaaaacgaaggagaggggatgggaaaaggtgcatgcgaacacagcctaagcgcggacaaaaaaaattgggaaattgattttttaataataatataataatactaataataatcgcatcgcagccgcatcg

SEQ ID NO: 32665 - DNA, 554 bp, Oryza sativa
cagaaattcgttaatgtccagggttttttttaaacagttgttcttttctttttgtcgtaacattcttttccttctttcctttgtatagacaggaatattttccatttcgaatttgccgtttgcaccctgctgttttgtgggcttaattaaatatttacatttatgtttctcccgctaacaatcaatacatgcaatccaaacatgtacagtgcttgctttctttttttgcggccggggacataaaatgtagtgcatcttttttcttttcagaaagtggtccctccttttaaagaaaatacatgacgccattggattataggttgaccattcatcttatttaaaaaatatataattattatttatttttatataatttgttttattgtcttggcttatattttgcaaacctacacaacatttttgaatgaatacgaatgctcaaatgcgtacctaaaagttaccagcatcatatatcacaactgaagaagtactcgtttttacatgtactaattaaaatgtatttgctttaacatgtaaatagccaaagcgatagt

SEQ ID NO: 32666 - DNA, 703 bp, Oryza sativa
aactgaaactacattaaacttgtcaaactggaagtaaaaactagtcctgacctcctttttcttgtcgcgcttgctctttacctcttgaaacgtatctagagaaagattgacaaaatgtcagatatcattatcagggcactactggaaccatgcagaacatcaagcttacgtgctattcacaagaaaaaaatgcactaaaatgaacaattggacatgtttttttttgaaatgaagaccagcatcccaagattataccatccaaagcatgctgaataaattgtagaaatatatcgatgtaattcaaatgttttacagatgatacccaagtcaatctcaattcatttccaacttcctttagaatatttctattatcaagcaatgaaggttatttactcaaattacagaaagaagttatagaatatgttagtttcctacaacaaagactacgagagatgcacaacttgattgcctatgatcagttgactcttactttgaatgaactgtaggaaaggtgtgcagaagataaatgttcagacacaggttaatgtaaagaaagaggcagcccaacagggaaaaatcagatgccctatccaaactgaataaatcgaaacactgtccgagcagatcgaaaagacctaattccaagagaagaaaatcaatgttcacaaagctaatctatattatgcccccaaatgttagcatc

SEQ ID NO: 32667 - DNA, 611 bp, Oryza sativa
ggccaattcgagctcggtacccgcgtatgatgcacttttgcatggttgcccacccgagctctaaatttttttgctgagagcgaggaatagtagcagaccaaacggtcttaggtctcctgtcattgtgatcccttttcatgattagatttcctgtactttctcctcctgttgcagggaaaaggaaaacgatgaagagactggagaggggaagaagaagaagagaacaccacctcccgtttcccgatgccccccctgacgcgcagaatgatgcaccgtctccgaatggaaacgccacggggccccacctgccagcttgacccctgctgctgctgctgcactgcacatgttattccccctccgcctccggtgtcacacacgcacgcgacgcgacgcgatgccgaggcgtccgtaccaccaccgccagcatcagcggccgtcagctcgagatcggacggcacgggacagatggcagcaggcgtcacgctggcgtgtgccgcccccccgccgctaagggccccacgtgccaacgatggaggcaggcgccgtggggtggtcaaagggggcgcggggacggacacgtgtcggtcgccgcaacgtgtgaatgttcgacc

SEQ ID NO: 32668 - DNA, 607 bp, Oryza sativa
agttagggggtgtaaaatggacttttccctaaagtttatcttcatctaactctgtatgaaaaaagttatgtatatatacgtgttttttctaaaatttgatccatgtctgcggatatccaaacaaaatttctggatagtttccaatcatttcccttattgtatttgtttttgtttccgactaaaaaaatccgaattcatttccgaatcccataatttccaaataattccgacctatctgaattttaaaaatgggcccgacggacaaaaactatccagtttcaaccctacaagtagatgggacttgcagttgactcgctgagaacatgtccacgcttgatgcaaatgcctataaactaccggcaaattgggaaaaaaaaagaagaaaagaagaaaaattgaacttgcacactcacttgatgaagatacacgaattgttttctgaagcactgcatatcttttgacttaggagtagtaattaattatacttcaccacatatgcatactgaaatcaattgggccatccaccatctatgcatcaacattatctctgcagatgcatcacactgcaatcaggcatactcctatgtactgctacctgcgtacccca

SEQ ID NO: 32669 - DNA, 648 bp, Oryza sativa
cttttgcatatgtatacaaagtttatatacgacgtatacaaactttatacatatatatatatattaaaaaatcaaaaatatagaaaatacatcacatatataaagtttgtacacatgtacaaatttctatacgtacgggatacaacgtttgtatacacgtacacaaactttgtatatgcatatagaaactttgtatcccatacatataaaaaacaaaaaaccaaaagacctgcaagcaaaaaaaccgaaaaaaacaaaaagaaaaaactagaaaaaaaggcggaaacaaaaatcggccacatatataaagtttgtatacgcgtacacaaactttgtatacgcatacagaaactttacgtcccgtacgtataaaaaaggaaaaaaaaactacaaggaaaaaaccaaaagaaaaaacagaaagaaaaaaccagaaaagaataggaaaaattggtggggaaaaaatcgtgcgacacgtggtgccgtcccgcaagcgtgcgctgctgcggctccctctgcgtgcgccacgtgcctttccgcgccggggggggggttgtaaccgctaaatataaaaattgggcccggtgcctaagaacccctggcccattgggctccacccctctcccgggttcaaataaacttgtatacatg

SEQ ID NO: 32670 - DNA, 887 bp, Oryza sativa
atcggctgtagatataaacgatatatactcctcatatcgatatatacttaaataaagtgattgggatagatcggtcatcatgccgagatagtataaatcacttagatcgaaacatatatcaataacaggactatatatgtttatagcatagccgatcagatagatctcgcatgtatcggctaatactccgatactactccatatcaggatattaaagcaagaataatatatcaaacaaaggcctaacatgtttagatacggcaatatcttgatataaagggcagatttaacatatcagtatagcatatagaacaaatatagttaaatcagatacgatcggctgaaactccgatgctattctaatcggcaactagaaggcaggctagatatcgatattctaagcacgacttaatagatcaaactcaactgatatagtattaagtatgaaaagaagagtgatatctagacaatcaagctgctagaagtttcatagaatggtagatatcttatataatctagaccaacatcaagatctaacctaatcggctgccttctgcattcagatattggccgatagtagattagatgacgatgttgctagagattatgtaagatatatgataactcgacgaattatataaacaagattagagtgtcataaagatggaaacactaatcctaagaacgcaattcgtcataacgaattttacctcttgttgaagatcgaaatcgatgcagctcaacccgaaaacatgaactcgtcgaaacaaaactaaagcaaaaagggtggcgatgtgccaagattgtattgaatgtgtgtgttcaaaaattacataaggctcggggtctatttatacccgagaattacaagatatgcccataccgga

SEQ ID NO: 32671 - DNA, 1088 bp, Oryza sativa
  unsure (1)..(1088): unsure at all n locations
caatcagcttcatcgaaggagaacaatatatcccgttctgtcgtgcttctgcaaactgtgctgctattaaattgcccgactgtctgtagcagcnaattcttttgcgaaaaaactttgtatgaattgctctttatgcatgtaaccaggattctatattatcatgcctccaccgtgataatactgaatgctggtagctatctaaaactacttcgtctgactgagcattaccaggtttattcaagcatccagtttagttcacattcatcgacccaggatatctgtgcgcttactgaccactatcggcctgctttcaggaaataaaagttaatcaccatccagatactaaacctgaatatatgtttcttccatacaaaacatctatagaccataccacaccgctgtatagtacaaagaaccaaaacacacacacacacacatacagacatacatatatatatatatatatatatatggtattgaatgctagggaaattcacccatcaaccaactccatactgaaacaacagcctacgcattctttacacactccatccacaccatcgcttgcccgtacatgctgcctttgaagagacatgacatatttgcagcgagatgccatacagcacatcctattatttctatctctaccacacttatcttctcctcttcgccgctacttgcacctccccaccacatatctgctgctcttcgccttcccgtcagcaagaacagctttcacaagctcttcagcctccctccccaggtaacaactgcagcttattatcttcagtaatctccatatgttcattcctatccctcctctccctatacagaagtgggtcagatccaaacatctgtaatagaacaatataggaaagtattagagcaaacaaactaaacatttttttgatctctgcaatgggcacgcgttaaccaacaggtcttctatttctttcctagaacactatggaggcccatcaagataaccaccctagccagagacaaccacgaccattgtcttatggcagaagccgcccacgggtagcgacaaaaatttcaagcccggagaaatttcacaggtatttgcc

SEQ ID NO: 32672 - DNA, 527 bp, Oryza sativa
ttgtacacctgagctgcagaagagcgctcgcaagccttgagcttttcttgcatcccatgacttgatcatcccggaacttatgtcaccaaataggaaaccaacagcatcctttctctgcactagtaatatgcccgtgcgcagcaatggacattgattcatgggcttatgggcccatataattggggatgggctcggagtgtagggagggtgctacgctcacgggagggaggcgtacagggcgtgctccgcgcggtggggtgcggaggagagcggacggatgactccattttttagtagagaaaaaatcaaggttaaaaattttgtgatgggtacgcagcagttcacccacctagtagctatccaagaatcactgcttcagcaccaactgctgttccgtacatgatatgcatgtcatacaacatatcggaactgcatcaaatcgatttagaattacaagaaaacagatgcaatacggcagcggcatgggactggaacaatacacacagatacagcaggcccaaataccc

SEQ ID NO: 32673 - DNA, 721 bp, Oryza sativa
tagcgctaggatgtactaggatgtgtcacatcacgtagtaggtttgtttttatgagatggagggagtacttgctttccctcttctcaactctgcttatctacctatgggtacatggctctgatatgcttccatcattcatctccttccaccgtctatttcctagtgagtgcacttgtatgattatagatcttattattgtgtgttttggtttaaggtgcacgactggtaggacaagcaagtttaaatagcgagtgcctatgggtctctaggatcagtagctaggattaggccattcccaacccaaaacactagatataattttcatacactccacatcatcaataaattagtactagacactactctttcaatgcaaacactattattccatacttaaatttaatgctacttatctcacatgatgtcttggatgttgtgcagaaaccatgtctcatgcaagacatggttttcttctttttcctcatttattcacttgtcatatcatttttcatcataggtgacagtttatttaatgttatagacaccatcctagtcattgagttgggaatggccttaggggatcattcttttgcttggacatagatcatactccttcgtcctaatgtatagcaaagactggacgagacatatcatagtacgaatttggagtcctctgtccagatttattgtactaggatatattctcacaaatcctagatt

SEQ ID NO: 32674 - DNA, 1362 bp, Oryza sativa
cgtgaatggctagctgtgtccgagctctagggtcggccgtggtgcaacttggggcttgatagaggagcgaatcgagcatggcgcggatgagctcgggggccggctgtggtgtgaattgaatcaacagcggatgagcttgtgacggctagtggtggcgcaaattgaagcagtgacgaacaagcttgcgacggcagagatatttcacccatgtgcgcaaattgcttgtgattggcagattgggaagcggtgctcttcactacacgtggagaacgagaatagcggaaaagggattttcaattctttgggatgttgattggagatctattggatctattttttttatacataactacaaaattttgagattgggaatagaattggacatctcttgggcatgctctaactattactcattagtctctcggtgcttagctaacgatggtgtaatgattgtttcatgcatgctatttatgcggagatagaaagtatgtgtttcaatgacagtaggtgacggagtgctcggttgtgcgactcagccaaacaaaaggattggcccagggcattgtttgttggtcgaaccaaacacacggctgattattgaatgaaatggattcatcatcacacttcattagtcaaaagcacatctagaaagagaccgaggaatgtagttatcatccataggccaacacatccggcaacaagttgtatttctttaaagtacaaattttattttggatagtcttttattaccgatgtttcgctttaaaccattttttaaccaatgtttttattctaaattgagtatttgtatctctatggttctttggatcttaactcttttatccatttacatccaacttgttatatcctaaagaaacaatctttcatatagttgtgaaacaatctttcatatagttgtgagagttctttgatgggtaggagccgacgtactcaagatctttcatatgcttgagagagtcaggtggttcaaaataaaacaaagccaagattaaccggtccaaagaaaaaatattagttaaagagtgattcaaaataaaacattggtaataaaatatgatcaaaagtgaaatttactccttttttttcatctcattggttttttaccagccaccgaaactatttatttaacacagttatgatccatattgatcacatttaattgtgtggatccactgaacttatgacattaacatattcttacatgaaaatttgttactccctccatttcatattataagtctattttacttctttttcctaagtcaaacttatttaggtttgattgagtttgtaaacaaattaacatctataatatcaaattagcttcattaaatataacat

SEQ ID NO: 32675 - DNA, 1600 bp, Oryza sativa
taggatcattgaaaatggccttgaactgaaacctgtgacgagaaaaaatatttttaaaattgttacaacttaaatgggagaaaaaagttgggcaagcaacatgataagttgtgcggagaaaatagagatgaaaaaatattcaattttatactactgacagttttgtggaaacaaagctttaaattaaactagagccgttcctgcacataaatatatgacagttgtgatgtacataaatttgctaaaattgggtcacatgaaatccatgatgaacaaaacataacaaaaaaatcccataaaaaaaaggaatatgcaactaaagaaatgacaatgtgcgactcagtgattggaaactacactacatagagaagttcaaacaagggaagaacagtttatgtacacataaagtttgtagacgtaaagtttataagtcaaaagtttatatacccgactcaaattacaattcggattcaaaaaaaattttgtatagaaactttatacttgtaaactttacactaataaaaaattaaacatccgaaagtttatagtcgcagaaactttatacttacgagtattctgctttaaacactttatacttcaaaaacattataaccacaagaaattagcgggggatgtaaacaaaacatgtgtattctaaaaaaaactctatcgggcgataataagtttaaacacctaaagtttgtatacctcgagtttacacatgtgaagtttataaacctaaagtttgtagacctaaagtttataagtcaaaagtttatatacccgattcaaattacaattcggattcaaaatatttttttatatagaaactttatacttgtaaactttacactaataaaaaattaaacatccgaaagtttatagttgcagaaacttcatacttatgagcattccgctttaaacactttatacttcgaaaacattataaacacaagaaattagcgggggatgaaaaaaaacatgtgtattctaaaaaaaccctatccggcgattagtaagtttatacacctaaagtttgtatacctcgagtttacacatctgaagtttatacacctaaagtttgtagacctaaagtttataagtcaaaagtttgtatacccgattcaaattacaattcggattcaaaaaaatttttatatagaaactttatacatgtaaactttacactaataaaaaattaaacatccaaaagtttatagtggcagaaactttatacttacgagcattctgctttaaacactttatactttgaaaatattataaacacaagaaattagcgggggatggaaacaaagacatgtgtattaaaataaaaccctctcgggcgaatagtaagtttatacacctaaagtttatacacctcgagtttacacatctgaagtttatacacctaatgtttgtagacctaaagtttataagtcaaaagtttatatacccgattcaaattacaattcggattcaaatattttttatatagaaactttatacttgtaaactttacactaataaaagtttcaacatccaaaagtttatagttgcagaaactttatacttacaaatattttgctttaaacacttt

SEQ ID NO: 32676 - DNA, 1841 bp, Oryza sativa
  unsure (1)..(1841): unsure at all n locations
gttattctgccggaatgtgtactagtacgatatagacgggagattgagttgcccatggtttgcccctttatgaatgaagctgatcgacttcgaatcactgtcgctattgcatttcggcatatcatcctggggccaactataggaagaagtagaataaattaagacatgtcatttggagtcaagtagagcttagggtgtgtttagatctataggtgtaaagttttgacgtgtcacattagatattatatagggtatcgcatggggtgttggggcactaataaaaaaactaattatagaatccgatagtaaaccgtgagacgaatttattaagcctaattaaaccgtcattagcgtatgtttactgtacaattagttatttttttagcctatatttaatacttcatacaggtgctcaaacgttcgatgtgacagggtataaaattttagggtagaatctaaacacccccttactatttaatattattgccaatgtctatttcgagcaaagttggagatagggactcataaggaacacacgcgcctactgccttctctataattgacttgattttgctggacaatgacatgcatggctactcatttgaatagcaaattctcaacggggccatctatatcattgtagggcttagttgcatcatattttggtatcatctttgctcggcaattagatctataactatatgggctctagagtctagactagtagggcatggctcgtcagtaccgtataattgtaacggtcaaacaaacactaaactagtaaattctcaacggggccatctatgtcactcatatttttaaatgtgtatataatatggaataaactgcactagtattatctggatgtcctactttcaactcaccttgctgntatatttccttgtatcatatccctggggcggaagaatggaacaaggcagcttcagtgggacttttttttccgcatgtatcagtgggttatgcccctctggcgacgtaatttggagtaaagctaaagaaaatgtccctcctacaatatatacaacttgaattctttaacttctgaggaagtggcacactaatacataattatctttgcagacctaccctgtttatttttacaaacagactataagaaaacctgcatgcaaaaacatttcagggttgtctagtaagacccgcatgtgaaaatcaatttttataaacaggtctctaaacatagccgctagtgtaaatacgtttatttttacaagcgactatattaagatgccgcatgcaggtatacgcctcgattttcacccgcgttagaaaatcacatctcaattttctctcaccctcagcttaaaagtcaatgtccatcatcctctcatctactcccatctcttctcctccacacatccactccctctctgtcccctatctcttttcctaccggtcggtgacgaccagcgttagcaagggagcagcgccagtgacaagagtgcatgcgcattcctcggctcctccttctcctctctctcctctctccctccctctcactcctatccgaccaactcgggcttaggctggacagagggttgaggcgtatgtaatactgttgtttgataacaataagtcaagttggagataccttggtctcagaatatggtttctttgtttgattcatgtgtaggtgacttgatgcctcgggagagtattccggtgatggatcgggagtcgacttggggataaggcgacgtccgtgacggtcagatatcatgcgggatacttaagctagagttcaatgcacgtggttggtaaagattacatatggcatacgatggaggtattgtgtgcatatg

SEQ ID NO: 32677 - DNA, 1485 bp, Oryza sativa
tgggtaaattttgaagttgtactagattacttaaagaattagctatagaactcccggtaaaaaaattataacaatttgtttgaacaatcaagtactaatttgaaaagagcttagcctcaacatgcgacgagaaaaagcgacacgacagaaatgtttggatttggattaaattattcttagtggcttttggtggcacagtgggcagattttgaagttactatattaggaattagctatagatctttcgataaagaaattataactatatatatactataattctagtgtaactaaattgaaattgcatgtaattattagaaagatgtgcttagattagattgttgaatgtgctacacagctactggctcacaaggtctcgggttaattagatccttcctcctatcctcttgtcaaaatcagtatagttaagtggtggtatcaatctatctatttattatatatagggattattatattatttaaaatatcttaaaaagaagccaccatattttctacggagactagaaattcccacatctatgtctatacctaattaaaaaatacgtaaggctttgcttccgtaacctttttcgtctgtcattgtctctcagccggtccagttctgtttttctctccctccctggccacaatctctctccctcttgatctttttccctttttctctccctcttgaatcttcttccgtattttttacaaggattccgtatatttttatgagtccgatccactgactgcgtgcttcacgcgccttcagccgccactcaggccgaacctagtgccaccgccacgttgatctacctccccgtgcgtttcctcttcaaattaattgcaaataacgattccacactcatccctcatcattttcccatgattttccctttcaattcagcttttatgggccagatttaatcttcatttataatggtcgtcaatgatggttagccagtgagcttccgtgggcccttttttctcgagttctatggattcgcatcaatttttggggaaatagaaagaggagattgaatggatcaaaagccctcaaacaatttttggagatcaaaagagatttagccggatttgatgtgcaggatcggttcaagcatcataggggcatgggactcttattcagaggttaaagacgctactgaaacgcgagggtgtggcttggcagcgagaggaggccaatgtttcaatttattgctcaattcctaatagctattgtatcacttagaaaacgtctgtacccattgcaatgcatgggcattttttatagttaattaaagaagaagaaaatatttaatccattaaaccgtgatgatcaaaattataacagtgtagattgatcgatataattgtacatatagtaacatgagctaggagttgtatatgatattcaaatttattttaaaaatatatatagtagaaaatacaattgtatcttaaaacacaatttaagtatatcga

SEQ ID NO: 32678 - DNA, 1512 bp, Oryza sativa
ttcttagattatctctataaatattgttatcatgtggattccaatctatccagactatacggggataatctaaaatgccaattctatttaccaaatcatgtgtaaattctacattttgtagactacaccctaaataagaagtaaaataacagatggagtacacgtcatgttcttccccccttgatttctattaaatacgtatggtgtgtgggtattttgtacatactaagtttggttaattagggaacataaaccatactaaagttatatatgagaattcatgcattaaaaatacaatctcatacaaattattgataaaaacatgttcataataaagtaaaaaatattttaagaaatactcatccatacataaatattcataattaaaatacaagcaacattaaataaggtgctcgcgcatgtgtgcaggttaccttcctaattattatatactaaaagtccattaaattttctataaacgctctcaagccaccacatgtgactcctacaaacactcctaagtcaccacgtggcattctaataaattagaggaattcctaataattctcaaaaaatctaaccattgattttactttaaatacagtggacccactattttccaccattggatttaccttaataagaaaaagctaacaaaacgaaaaggcccacaagttacatgcaccagtgcacgtatgtatgccatacctctcccctactactcttcatgaaaatatattttgtgataataaattccaaacaattatacgatctaaatcatatagccaatgttttaccacgttcatcattagattatttacaacaaaatttataattcaacacccaaacgctatatttaataagtaaaagaactaaaacacatttatatgaaaaatcatatagatactttaatgatctatttaacaacacatagcttttaatagaacaatatgcaacacataaagtcaatttataatgttataataataagcaatttaattagaaaatagatatttaacaagtatgttactttgggtcattattattttataaatatagaaaactcaaattggtaaaaccattggatctatctcaaaggaaacaaaacttctcccctcctcatgttgtatgtacatatgcatgtcttctggaaacaagatcagaatacatacatctattatatctttattgatccatatgtagatacatataacaaattgcgttaatgtgaaccaattaaaaggagtgctagcttgatggtacattattaagaataatagtttttcgagatttgtaaaaaagaagccccaaaacattcaatttaaaacaaaaaaaacaccttacttttaatttgaacttaatttgttagacattttttttgtaaacaaaataagtctaccttatttttaaattatgaagcagaaagtaataattaattaattatatggatgaattaaatattgcgtagtataaagataacaaataccaaagaaaacttatttaagaaatgcc

SEQ ID NO: 32679 - DNA, 2089 bp, Oryza sativa
tgtattttggtttactttacataattgtctatattgcagttaagcctattccacgtagatcttctgagttgtgcacactttttctcaacctagcatcttttaaacgtgcaaatgccaaaacccaagaaaaacaacttttggtcggttttccaaaagccattccacctctacctgtatgtagaagcaactagagtaattccctacacctacccctctccctatttaatttcaagcgaccagtggaaacatgaatcatgtgaacttcaaacactcacccttctcctccctcccctctcccccctctcctacacacccctcctgttcccttagacaatttatcgcctcaaccacaattcttgtagttagaatgcctgatactgtgtagtagtctaataatctttatgaaaaatatccaaacctaccaaaggggccttactattgtattggttaggttaataggcatttgcggtaatattgtcacatcaatgcatgccatgccacatattgtccaaatatttacttaaatattgcatattatcgacaaatttaatttaattttatacatatttatttaaaaattgaggggaaaactaatagtatatatgtttagaatatatctcatatagcatcattagataattcctttcgtgcacaaatctgcaataagaaataatgaaatgcaaaaaggtgcatcatctgttttcaactgtcatttattcatgtatgtgtgttacacatatcacttttatttggtggaaaacaacacattagtatattagtaaatcaagttaattttacgcaacttacagcccagtccacttcttcaaataaaaggaatgatgtaatagacaattcccacaaaagatataaattactttgcgcagctcggaaagagcatgtccagatgtcttggatctagcagatcaagaataagacgctcaacaagttcagggtccctagggctaggaacctcactagtcaacatagcaaatatgtgaagactagctatatccaatgaaagaagtgatataaaactctaagtcaaactatctccaatgcttctacatgaataaaatagaaatctgtgatacataggggcactacagcctttaagtagtgtagatacagatgatgtgcatttacttggttcataagaaattagtagaagttgttccagataaatgcacattatcttgttggtttctttgtaaccttgggtgcatgtttcttttgctctaaaaagaatccaaagttaaaaactgcagctccacatctgcgatgagtcatgtaaaagataagtttagcggttcatacctttttatgtcattcctatcgtgtgaagcacatgacaaagtgtaagtttggttcctttatttttgttaatatatgaccagatcactaatctttcttgagggtgagacaaaactcacaggaaaataatgattcacctcataaatttttcccatcagaatgaaatcctcgaggtggtggttttttgtgggggggaagaagaggctaacgcttgtttagattataggataggaaaagtatagaaatttaagaaaggaatctaagtataaaacagagaaattaaaaataaagaaataaagaagttaataacaagtttcaatcaatccagtgcatcggcccatattcaaagatcatataattgtttaattaatatcttataattatcaatcttatacttataatatctgtttgatccgatctattaagattagttttaatagagttagaagattcaaaattatatcacatccaaatcttggctaatgtattctttgctttatttttcataacttatatcccatcggttatagccgatcgatccaaaattccatccgcatcggctagacacatgattatatatagaccttttggccaatctgccccacgatctaatctttatatattgtcgacgtttgatatcgcgattatgatatttgcatagtatgtggatcgttggtaccagtgtatgtgcgagattgaggtaaaagagatggagacaacgatttttatacaggttcgggccccttatctgacaggtaatagccctactcctgttggc

SEQ ID NO: 32680 - DNA, 4802 bp, Oryza sativa
cgagttgcattacccgtcgacgccgacgaagaaggctgcgccgccatccgcggctagggttgccggttgcgccagaagatgtggggggacacacaggaccacgggcgcgccggcggaacggagcggcggcagggggcgccggagcggagcggatcggggagggagcgagctctagagaggagatggcggagaagacggcggaggcggaggaacgccgacgaggaggagagcccgctcgagagatagaatcaggattcagggcagaggggaattttctttttttttctttctttcttttttttttttttggctggcatatgtggggacacgccgagacagtcaattcgtcagagagctgcggactgcgggcaaaacgtgcgaacttttttggtttttttggaattattattacgtgcaagtttgattgtagcggtaaaaataactgaagcgtatgtgccgttctgatgatggtagaggtgaaaagtgcctgaggtgcaaatttcagaagctaagtggaagggggtgaatatgtaaaaatatgttttgacgagtttttaaatatttgaagatattttgttatgcaacgtttggattgtatttgatatctattatctattatctatctattatatatatatatagggaaattatttgatgctccatggagtatgggctccaaaatcatccaccattcagctgcttaggatttgtgcaaaccaaaaactcagtgttacaaaaattagcgggttttacccgataagaaagatctatacgtacattccattttttttatttgcatgcatgtatttccactggtggagaaaccatatttggtcggtcgaccaaaatccacaatagtcccggttccactaaaaaccgggactaaaaatcatctttagttccagttagtggctacagtgggcatatttaatctttagtcccggttggtaaagatcatctttagtcctggtttgtatgttgtcaggggctgtcaggccctcccgtgatctctagtcccggttggtaacaccatccgggactaaaaatcctaactgtctttactcccggttggtaacaccaaccgggactaaagttaggatttttagtcccggttgttaaacaaccggtaaaacaaagcctctatccacgcgcgcgcatgcaagtctcttattaattccatcattatctcctcctctcccatccagccattctctccatcttatcttcttctctcctcctctcctcccatccttctcttccttcttctctcaccccatctcctcctcccctcccttcccctccggcggggcggcgtgatggaggccggccatggcggccccggacggggcgacgggatggaggccgccgccggcggcctggcgcgaggcgacgagatggaggcggcggcgaccggctgtgtcgggcgggaggcggcggccgacgcaggtcgggagggcggcggccagctgcgtcgggcgcggggtggcgagataggggcggctggcgccggtcgagggggcagtggcgggcggcgggccgtgggcggcggcgggcgcctggccgcgggcggcagggagcgtggccgcagccggcccggcagggaacgtgtcggcgccgggagctcgtgaccggcggcaccctctcctctaccggaggggggaggcggcagcgaagcacaattttcttttttttcccaaatttgtgatacatttggatataagaacttgtgattcattggatctgtgatgtttggatctgtgatgtatatgatgtgtgatgtatttgatgtgtggatctgtaatgtatttctttaagaatttgagttgtatttttttgagaatttgtgatgtgaatgattcattgatttgggatgatactttgattttggaatatttggggagatttgggaaggagcaactctttggaaagaaacaataaaaataaaaaaaaagaaaaaaatggtgaccaaccaggactgcgctgctatctttagtcccggttggtgggactaaagatggatttttagtcccggttatttaaaccggaactaaagatagtgatttttagtcccggattcgtagtcccggttggaaaaccgggactacaaaggggttaccaaccgggactacaaaccatctctccgccagagttccaaataaagtatatatggattctgaacgtgattatgacaaaattatgcccgtcaattacgttatccgttgaattgatttctttccatgtatacagatttggacgttcattttttctgtgtatatatataccatccgattccgacggtattgcaaattgtagaatttagattagacacatatacatgcgttcgaaaagattagatacatacactcgatcaaggtacatacgtccttgtccgcttgtcgtcgctgcgagcttcgtcgccatgccgttacgtcgctgaacgtccgcgaggttagtcgtggccgccgtcgccggtcaactgtaatctttcgtggccactatcgatcatccatgaggatcgtgcggtcgtctgtgaggttcatcgtcgccgctgcggtcgtctgtgaggttcgtcatcgccgctgccggtcgtctgcgaagttcaccgccgccattgaaggttgctgcacatgctgagaacatatctactgcatagcaaccatatgaagcgcgtatacaggccggagcaactcagtaaagccggaagccacatcttggaaggtatatatggaagaaatgtaagccatcggagtactaagcatcacttgtttgatatttacgtgttacacttacagtgtaatctatcttgaaacagtgtgtattatactttagttagcacctcatttttgttatttcagtatccaatccgaataatatgtttgtatggctgcattatcaacaggatacccagaaattaaatcagttaaaatgttgatttgtcaatgtgtgtcattcgatcgttttctctaaatctctactgtgattactgattaagttattagtgacagcatatactcaaccatcactgattaagtccaaaggggacacacacccaacgacgcacaggatgaacataatccggattgaattctttacataagtatatccaatcggttttgctaatttgcacgtgtgaacgtatcggaatcgggagtatttatatgtcaaaaaatatttttaggcgtgataatttagtgtatatgggtatttacataagtattatatgattaatgtacacctcaaaatttcctgcggcggagacgtgagcttctccaaggtgtggcccaggtgccacgctgccacgtgctgtgcgcgccgccgtggtcttgccccgtgcgagcagcagccgcagcggccagtggcggcgtctctccgtctcaagcgaagccgggatatatccaggtacacgatggtcggcggtggcgtcttgtttgctctctcttggggtatcacgcctggtactcaggtaccaagttctgatatctagctaccaactcgatactagggtataaggtaccagctggtactgggtaccggatagcagttaggagtcacttaaagtaccctgtagtaacggttcccgttgtctagtctctctctatttctttacataccttgaatttttggcacagacactagttataatacgatttttgggtatatgacatgactgttgggcacatacactaaataaaataagacacatgatttttatgtatatgccttgaatatttggcacatgccctgaataaataatacacgtgatttttgtgtacatacgctacactaaatacataatacacatgaatttctagatacatacactaaatatatacataatgcaccgattttttgcatgtgccctaattttttttatcacatacactgaataaataatacacgtgatttgttgggtatatacctaattatttaaaaatgtgtatataccaaatatacctaatttttttaatgtgtatatccaaatatacatattttgttgggtatatgccttgaatgggtatataccaaatcgatgtttaaatgcgtatatatttaaatgtatatatacctaatcgatgtttaaatgtgtatatacctaatcggtgtttaaatgcgtatatacttaatacgtgtataaatccaaatctgggtatataattattttttccttaaatttgttcctcaaaattaaaaagtgatgggtaatacatacattttaccacatacccaaaaataaatctccaagaatttcttgccatatactctccaagaatttccagctatataccatgtgtcaatcacattccatataaaaaatactgcacaacactctttattttatatggttaattcctatcatatttgttgcctaaaaattggacatgacacgtacatccgtaaggaaattactaatcatagatggcaagtatagctatttatctaaacatgcatgcatatcgttactacccacaataatagggcaattgcatgcggtagtttttaatccatatataactcattccatatttaatgtacaaacgggtgtacccgttaaacccaacacctagagcgatcaaatagatatggatcagatccaacggcagctaggtttggagcctatacaccatgaagtcccatatggctgtcccatatatatatattccaagattgtatatagatactgcattcctatcctcatatctggtgtctagacccctagtcactgccctgggttagagctggtattagagccaattgcttcgtaacctccccaagccatcttctcccaaaggagggggggaaga

SEQ ID NO: 32681 - DNA, 1544 bp, Oryza sativa
tatttcacaattcattattacatacctaactaattatatgtttgaatgttatatacctagaaccaaaatctaaccaaaaaaatgtccaaactcagttcaatcttatttgaacttgttagtaaagaagttaatgttcatatctaaacatttttttaaaaaatcatactcattaaaattgggtatatactcaattttaatcttcgagcccgagcaccatggagccccagttaattttaatacacatatgtatatatacatacacacacatgacggtgacactggctctatatcgagaaatagttatatgttaaaaaaaactaggaaggtagccagcgcatacgcgtgggtatgttgtttaatcttatttgaacttttattacgaatttttatgtgtggatgatatttttgaaatattttttgacactattttaaacgtatgtttgttaataactggtttgggcatattacttgaaattgtatatctattaggaaaaacgtgtcataataatagagttagttcatatctattttaattatgtgtgattcctttctaaaaatttttggactttccaaactttatataacatttttattttgtatgctatacatgaatttaagtaacattttaaaaataataaatttaatctaatggtgtaaaatgaaacaactaaattgcattgtttttattttttttataaatgtagatttaaattagtgttgtatatttgtcaagtgatatttgaaaccctaaaacaagatgtgaaataaaaaattatcatagcaataattattatatatatcatcctcgtatgctaagataggatgaataaagattattcatgggatatttcatatttataatataaatttagtttaactacgtatatttacataaatttgtagggtaatatatttatatttaaatagtagataatactattttaaaagaccatcgatctttttcgaatgatacacatttttttgttttattgtttttatagtaagggattttgaaaatactatttcaaaagaccattgtgcatagatttttcttttccaatggatagtaggtaagctccaatttttttccaagtcatatgtatgtacggacaacttatgtttttttttgtttttctatcctaatagttatatagttctccagtatacgtacacagagtaatatggtattagtttataaaataaaatactctaatggtctaaatattgggttcatcaatttaagtgaaaatcgagggtgatatttacttaaatttatagagtaatagattttatctttaaatagtagaaaactctattttaaagataattgatttttttaatggtactacgtatggttttttttcctttcgataaacagtagataagatacattgtattttagtcgtatgtacgtacctattgaatacttgtgttttttttccggtgaacagcaaggtattagtttctattttctttttcggtgaacaataggtattagtttctttttaaataaaatacatctaatctcatttaatggtgtaaat

SEQ ID NO: 32682 - DNA, 631 bp, Oryza sativa
ccattagccacacccgaggatggaggagccatgctcggctgcattttttcacattttagtactttttaaaaacttatcctgcaaatagacctataaaagaacttattctagaaatgatccttgtcgcggcgccaatgtcgttggcgccatgtttcaacatgacggcgccaatgacattggcgccatcctctccgccctcgggtgaaagtttagtcacaaatgtgaagtgggacggcgccaacgacattggcaccgaggaccaatttgtaaaaaaattgaaaaggacctatttgtaaataaaaaatatttacaaataggtccacaaataggtccttggtatcagcgtcattggaactaaggacctatttttaaataatttttatttgcatataggtcctttttcagaaaaaaataatttggtcctcggcgccaatgacattggcgtcgtcccgttcacatttgtaacttacctttttcacctggggctaggaggatggcgccgacgtcattgacaccgtcatgttggaccacggttccaacgacattggtgccgtggaaaggatcatttattaaataagtttttttagagatttatttatagaataagttttctaaaaagatcaaaatgcga

SEQ ID NO: 32683 - DNA, 1031 bp, Oryza sativa
gactttttcacaggtattatagttgcagttaagttcttataaattagtactgttctcattgcattcataagagactattccttcctattgtcatcatagcagatgctattggaatcattactgagataacgtcagtagctcctatccagacatgcatcagagacggtgaaagcctcaagaggagcatctacatcagtgatgccgagttagtcctccatctcagtttttcatatctgccaaaagatatttactctgcttccctaacaactttgttgccactgttccagtaacgccagctaaccgctgcctaatattctccttcctttcaatatgtgctttttgtatattgttctgttttactaataacataacaaacacttaccatccatatactttttctgccattatactataccttttaatagtaatgtgacaataaatgttgcgctgtggggagaccgagctacaagcttccctgcaaatgacattcttgaggctggccaaaagagtcacaagtagtaatctttgttgggacacttgtcaggggatttggcagtaagtacattagaaacgtttgctatcgttattagtagctttccacaaattctctgagattcttataatatgtgtacagggaatgtttctttatctggtaactctgcttgcaagtggtacataaaccttgacaaaccagaggtggctgccttaaaaaacaggttccttatttgtcctttctttgccatttatatcttgttagtttctattcctaccaccagtttaaactcacacttattggttctgtgcagcatcaaaggaaattatgaaccgataaaatatatcgacctcccagcctcatctgatgctccaaacaatgcagaacaaaagaaaattattgagatcaaggacctgcacccttttaagttcaaggtaaatctttactaatatcagtactcattattgtgtttgccattttgcaaaatagtgtgctaatcaccaccctacttctggcaaacagaaacatcagttcttgg

SEQ ID NO: 32684 - DNA, 518 bp, Oryza sativa
ggcgggctggcctagcacgactctaggaagaagatggaaaaggaaggaagaagacggaaaggaagatgatggatggaaaaggtgacagcaacgacatggttctaatttcgtaaaattggagtggcacagttatgaatatacaaattgtaatgacattttttaatatccacatttgcaatggcatggatcaaattaacccttgatctattgaaaatctatttttttaatttttacaatccattgttttacaccttcattattatcatatttattttttgttaatacatttagtccttaaggccttgttaacagtgaaatttggtaatcggcaaagacgtcatcggcttagaatcattatcggctgtagcatctcggaatcagccgatgggagttatcaagtcgccaatagtcggattccttctatattcggttaaggaaatcaatatactaaaggaagcttatccctaagtgacccgagtttaaagaggatgcggcatggcagtttatctattaattag

SEQ ID NO: 32685 - DNA, 706 bp, Oryza sativa
ccagttttccctctcaatccatcttatatccgctactatttatgaatgaactactctttgtctcataaaaaataaatctagtacgaaatgtgacatttcctgttactacgaatctgaagaagaggtagctcttatctagattcatagtgttacgatgtactaggatgtgatacatcccgtaataggtacttttttttacgggacggatggagtacctgctttctctcttctcaactatgcttatctatctttgggtacatggctctgatatgcttccatcaatcatttgtttccaccgtcgatttcctagtgagtgcatttaatgatcatacatcttattgtgtgttttggtttaggacaagcaagtttaaagagtgggtgtctatgggtctctaggacaagtagctaggctcacgggatgactcttttgcttggtcatagatcatactccctccgtcccactgtatagcaacgtagaactggatttgacatatcctagtataacgaatttgggcatatccctgttcagattcgttgtactaaaatatatcccctcaaattctagatttgctatattttgagatgggggagtaagagcatcatcaagagatacccaaataaatctgctccctagatgagttttcaagaattcctaaccagaatttatggtcctaaaatatcttccctccaacagattagataaaca

SEQ ID NO: 32686 - DNA, 650 bp, Oryza sativa
tatgggtattacgcgtgcgaattcctcatggttaatgggaggtacatggctaacgcagaggatgcaagtttctacactatggactagacaacttcacatatagatgatactaatatattgcgtttcttcaatgcatgcagttgccaagaatagaacatcgaacaagctttgatgatacatgcatcataaatatctagcgcgatctttgccacttcatccactgtgagtgttgtcatgtgaaaggagagttcttcgacccagagggtgccctagctacaagtaacgaatacaagcatcttctggagtggagcaatgctatgccaaaatataattagatagcgtatttcaagtgagaatgtaaaaaaaaaatattgtaatattttgtcaacacttttcacttatgcaatatatgtagatttctaagtatcaaaagcttgttatttactaatattattcctgcatcaatttcaattaaataattgaaaactaatttataggcaaattattattgtatcaaattttaaaatttttaacctaccttcgcaggcggtaatttgttattttttgcaggcggccgttatctatttttgcagacgggtctagctacactccgtttgggaaaattatcttcccaggcggaccgccaaccc

SEQ ID NO: 32687 - DNA, 682 bp, Oryza sativa
ctgcaattgtggaacccaaaagtaagaggtctcttgcataacatattaggcctagttgatggcactggaaggacagaaagaaagcgcaaatttaggacaaagatgtggactgtaaatctgaagcgtttgaccatagggcccaaaaaatattttggagcttgctatacctgccaccagcgccatcgtcaccatcgtctttgaacaacttcttagcagcgcctatgccaggagatggtctagtcctgttatttgtgatttgttattagcctgatgcagaattttctatctagcaatatttagaaggagcaaaatagagcttaccttttttttagcttttggaagcgctttgtttagtgccagatggaggagatttcttggcaggctggcatgatcagcgccctagtccatagaaaaagaagttcagtactcagttttgaaagatgtttgattaaaagaaaactgagaagcaaaataacctcatcctctacgtcctcttcatcctgaacatctgcatgggtctttgaaacacattctatgtccaactccttctttttcgatacagcagttgatgggctggttggtccagtctgtgcatcactaaggccaactgatggagttggtgctagagccatggaagctgggagagaagatgcttgagatgcagatggcgactgaagcaagg

SEQ ID NO: 32688 - DNA, 1472 bp, Oryza sativa
atgaaatgggttttataattaatgtatgtttaatactccaaattagtgtccaaatatccgatgtgacaggtacttggaataagtcctggaaaccaaacagccccctaattatcacccgtgggtgaacgggggcgagccgaccgcacccttcatctcccaccaatcgctattattgcctgtgagtgaggcacgctgtgcgggccccagtggtgcgggtcatcaaagaggccagggacgaggcccgggttcatctcttctagtaggatggggccgggtggactcgcagggggagcagggtggacccgcacctgtctcgcccccttgccatacctagttcttgcagctcatcgattgtgcgttttgatttgagctcagctgatgctgatggcagctaaggatcgattagacgtgtcatagtgactgctttgacactgcaggatcagcaaccagtggcgaatccatgatttacatcaagatggggctaaagcaaactagatatatcagcacgatcagcatttctctatgaaacccaaatacactacgataaacaaagagataatccatgaaatgctattgacaaacatctaagtcccagaaataccatcgacaagtgtgagttctaagacatgccatcgtacaaatgtttttgtcccaaaaatgccatcgccgttaggattccgtcatatagaatttaacggcgcgaaatggacggaaccctaacggcgatggcatttttgtgacaaaaaagtttgcacgatggcatttcttggaactcacacttatcgatggcatttccgggacttagacgcttgtcaatagcatttcatggattatctcataaacacaagacgttgtcttcttcatcgtaatttgcactgtattaacatctatccaaaaaatttatgaataaaatgatatggtatactccttccgttccataaaaactaacgtaatactggatgtgacacattctagtacagtactacaaatttgaacattcattgtactagaatatgtcacatctagcccgagcactacttaaaaaaggcaaatagatgtcgccactataggtgccggcacacaaaacaccgacacctttatgtccaaatatgtgccggtttttaaataaaaccgacaactaaaacctatgtcagagaaatgtgccggttctagacccaaaaccggcacctttaatcttctccctcccccactagccgttggcgggccccatacataggtgccggttctcaacccaaaaccggcacctttgtttcaatagtgcttttatgaacgacggtggccctacacaagggtaccggttcttggtatgacaagacaaaggtgtcggttctcgaccaaaaaccggcacctttaatattctccctcccacactagctgctatgtcacatcctgattttcgttttaggatttataaattatttaataaattattattagaatttatattaaat

SEQ ID NO: 32689 - DNA, 634 bp, Oryza sativa
ctctctctatatatgacaagatctagatctagatctagaactaggtggtggatgtgatagcaaaaataaaaaaaatcgagaatttatgttaccacattaaaccactacaacaagaggcatcaagtattacacatacatctaacatcaacatatcaaaagaaataaaattaaaaaacatggagctcttccttcacaattttggatgcataaatccatcacaaattaagatctaaaagcttaaaaaattgcatacctagtgtggaaatgagtagatctaagtactgtagaaaaatcccccgaagatttgaagttcaaaacctccccctatatttaagtcactttaggagagagaaacgtcggggagaatgaacagggctcggggagaaagaagactatataggggcatctttgcaggcggggcttatatggtccgcttccaaagatcgatcttcgcaggcggaccgcccactccaccccgggtactttttttgccggcggggttttggctccgaattacatgcccgcctgcgaaaatcgatcccctacgacgccgaaaaataaaatcagacggtcctacccaatgtgtatgaaacagccatcagtctcacatatgaagggatgcacatgcgagcat

SEQ ID NO: 32690 - DNA, 3749 bp, Oryza sativa
ttctggtactgcgaaaaattcaggaacacgacgtagtgtacgcgtcatgtgcatcctgcagctgcaaataatcgaaattcctcttccaaccttgcaattcgaacttgggatctgctgctaacactggatattgattaagagtacatgatggtagttaggctggcatgattggagcatcttttttggtgacattaaggagtcagcagaagcaatgttcaagtctgagctgatcctgctgcatgcttgcctagatccctaggttgcatgccccctttgcctttttttcccgattactgagcgagctgagctgcacgattcatgcactactgctctcaactgtggcatctgatccatgcgcagtagctgcagcagaatctagtgcatgccctcacttcattcatcgcaattttttcaaatcgtccggcaactccgcgaaccgcaccagccgcggcaaccccatagcctatgccgccgccgtgcccactttcttccccggcgccgaggacgacgacgacgacagcgccacgacctcctcctcggcaccagcgctgcccacctccgccgcgtgccccacgcagcaccaccctccctggtggcgcggcgttctctactggccggcttgcaagagagaagagtgagaaagagagagaggaagggagaaagatgatgtggcagcttgacatgtggggaccacgtgggtcccacgctgacttagtcatcacgtaggataaaaccggatcaaaaacactatgatctatcgtgaccggtttcgattagttaagggacgcccgatatctggttttacggttgagggatgatactgtaactcgacgacaagttgagggaccttcggtgtactttttcctatttggattcatcctgcgttgggcccctaaggctacttgaacgggctgggagtgggaggacgtcacgccagcgtgagctcctcagagaagccgccgccgctcggactcgtcaagggcacaccattgctgccaccttgaataggcctagtagagcacattggatacttgggcattttgacaggcattcaccgccgctttgtgcgctagatgttgccggcgcacggtgagcccacgtcgacccatgcctgcccgccttcccttttctttttctcgcgtctgttttctctctctcatgctttttttttgtctcgagaattttgtactcaaagtcaaattcaaacaaaaaattttgttcatcgatgagttgatgtctatactctctttccctcaactcaatttttaaaactttcaacctaaattatgaaaaaataataataatatgatacagacaccgatagtaagctaaaagtttgaaagaatatatatatatatttcaaaatatttgagacaagtaaaataaaaaaagagaataaaaatatcataaaaataaattatcacaaaaataaaacaaatgtacaaaaactaaggagacattatgatacattattgagtgcataaaaataatgttaaaactttgctacaattataatactactatccattcaaaattacttgaatttcctcttctcgtggcatctatctaaccaacagtttcataaaataaaattacatccatcaggctatgaataataacttggatgacatattttgcaacttgctagcttgcattgctcaagcgttctttctttgatgccaccaagttaactactagagcattcacaacttaaggtacaagatgatgcagaaatccattgcagtgctccattattcccaaccgagtaaactaagtatgatcattgctacaatatcaatggcatgcatacactatcctcatggaatggtccttttttttatttttttatttaggaagacgacggcagacctctgcaggaattcaattttgctcatggaatggcctcaatatgcaggtatttctcatttaacaaggttacctcagcaatagtagttcacggtttactttatgtactgacaattcacactgagcaagaataccaagttaccgaatacaaaaaatgaaaatattgacaatcagtcatcataataatgatcatttggaaaattgtaagtttgtaacaacattcaacaaattaaagaagcacagggcagctatcgaatctactctcatgtcaattagtcatcatggagtcagccctgaaaaacaaggactagtttactttgcaaattatggtgtacaacagaagagaagcataaagatacaatggtacatctgagtataacacctttgatgttcttataattgttaattgtgctatttctcgtatcgaattacggggttagacgtagtttatcaaaatcgagcagttacaaggttttagatccaaggtacatcaaaattatatatttgctggtggtattatgaggtacacaggtgattgtaataagaacaaaaggctatgacagtaaggtatgctgacatcttggattagatgtggttaaacacaaagcattactatatggcaacattttttttcaatttcttaaaatctaattgtaatactagattactggactattgtagtcgatccatagaagccttttctaaatacaaaaagggtctaatggactatcatctaattactctagtaattactaagactcctatatttctttttcataaaaaaagtgtcgtgtaacaaaaagaaaaattcaaaataggtggcaaacaaaatggttaaccttcacaagaaaagaaatagctacaaaatgaaaggaccttgatgtctccaggagggaggggggttgaataggtaaataggtagtcattccttatatcttaagctggcatggatgctgctcgctgattggttgagatggtgcacaattatacgttgacacgtgcccctcttactttcccccaagaggctaagagtgtggctggacaagtatttgggaacacaaaatactaaaatctagagaactctttccacacaattctagatctctagtatcttcaagtctagtctcatttcaaatgatttaggagtaaataagacaatgtcgtagtcaaactaatggaggaaaaaagttacaaaaacaacatttataggggtcgcattcacctaattaaatcaaagaaggagctgacaattgaaagaagaattgagccaagcaataagattgaacaggagcaatggtggtggcggcgactgcaatactggatcgaacaagcgatggcgctcgcacaaaatggctcttccgtgaacattgcagtgctatcgaagacttattgatcaattggacactgccactgcagtgaatgccctgcttgctgggtgttggcggctgttaagagccaattttatgccgccaatacctgcataaatcaaggaaataaaacatccaacatagtgatagaattaaattcttacgtattccacaagtgttgttgtatatttgaatgcaggtagtaaaccgccgaagttggataaaaaaatagactcaagtgaaggtgaaatcctatccatacaaagagtgggccagaaactaccaaaaaacaccgtcacatgggccttccacttgcagaaatggatagaggaagaggagagacaacaggccaaaacttggacctgttgggcctggcctgggttcggccgaaccactctcgcagccctccaattcagggtttggcagggacggtctggatgagctcctgaatggtggatggagggcaaaatggacttttcgcgttctataaccgtcagcccctatataaagacctca

SEQ ID NO: 32691 - DNA, 715 bp, Oryza sativa
actttaaacatgagctccaacccatattttaagagaattccaaagcaacatctccatttctgtcttcttttaatcttaatctaagtaatacataatctcaaaaatcatatattttcctttgagccatgtaaacacatgttttgagaaatcatatgattatagatccaatgggattcaacatactcaacattctgtattttttttatccatgtgttttttgaaatcatgcatttcaaagaagccttaaagcaatatcactccatttaagttagttacactcataaactggcattttctatatatatccatccctatcaagatagacacccataatgttgtttctcatatcctgcatctagcgaggtagcttgggattatatttgggtagtactagtgccatatgatatgcattgatcttttgaccttcttatggacttcccgtgcacgatatcttctgttttactcgcttctaatactttttgttacatcctattttggttgaggtggacaaaccaaagtgtatatatatatgtcatgtatatatttagaatacatatactttatcaagaagataaattacattcggcctctacacctatattaatatattaccataactaataaagaaaagaacagcaaagaaaaaaaaactaagacaacttgaacatatcatatatcattttgatagcttactcccttactggcctacaaccca

SEQ ID NO: 32692 - DNA, 518 bp, Oryza sativa
cccaaaacaagttcatgtttagtgatcattgcatcggagttcgtgaaagtagggataaaaacattggaagtagataaagtgggggacatttacattgagatttggtaaagtggagggtattctagtcctttagcttttgtattggtatgtgtggggtaggtgaaaaatgaacttattttgggacagaggtagtaactaatatgacaaaaaaaaactcggaatataatacaaaatgtaattagacccctcaggggcaatttttaataaactatggtaagataagcatgagtcggccacatttcacactgatgaacatacattatataagagtcaaaatccatgataatttttttagcagtatcaagataagtttgaattgagcatgtgaagctataatttgtagactcaacagctatttattattagttcagaaagaaggactacaggtgttcaagtcaaaagagtagttatttagtaaaactttagatgcacagaagaagcccaaaacattttaatac

SEQ ID NO: 32693 - DNA, 650 bp, Oryza sativa
gctttgcttgtgtgcttcgcgtagcttctgtcgttccgaaggttctcgaagcatggtttgcggtcgtcgccaaaggttcgaaaggccgttctctctgagcaaggcaagtcacatcatccttgagcataatgaatcccagtttataaaattattttgatttaaattaatgcattaccgctttatttaaattcccgcgttatcactgttttacttagccatgcctatttacctttgttatgaccttattattattgctattgttattattaccttgttcaccctaggataaacaaaaccccaactagtgggtactctatttatggttccactagtatgaatttaggtagatgcttcgctgattaattaggtaacaataggtggttttataactttagactttaggaattctcatatcacttggatactatggaatggttggcttatggtggaattggacatacccctctcttcctatttcaaaacccctaaaacctgttttctggtggggtttgggtgcatgccagttgtgggaagtagcaccccggacaatataaggattaagctcgggcctctgttgcaaagcactaccgtactaaccacatgtctaatgggtaaggcttaactcggtgctcagtctagtcctgaacaaa

SEQ ID NO: 32694 - DNA, 521 bp, Oryza sativa
aattgggttatccgtttatgcaaggtccagtggagcaaccacgccgagaagaagctacttgggagcgcgaagacgagctgaaggccgatgatggcgacgggagagagggagaaagaggggcggcggtgaatgccggcgacgggagaggcggccctcctcgtcgtcctcgcggtcgccggtgacgggagaggcgagcggcaccggcggcgaaagggagaggtgagtgcggcggtgagatggaaggccccctttcttgtgaaaaaaataaggggcaaaaaaagaattttggttcgggttggaaaaataatttggggcttttgggactgggaatcccatttggggggttagaatgccttttaaatgggttcaaatttttaagggacccatttaggatgtccttccattacgagctgagtttccctactagtgcctttagttagtatggacactttaagagtatctggcattgtagatacccttagtgcgcaatattggaggaacgagaagctgacataataatt

SEQ ID NO: 32695 - DNA, 550 bp, Oryza sativa
gctcgaggataaaggcctgattagttaccaaaaactttttctcaaaaacatcgcatggaatctttggacacatgcatagagtattaaatataggtaaattaaaaaactagtaagtgctacagtaacccacatgtgctaatgacggattaattaggctcaaaattcatctcgcgggttccatgcgagttataaaattagtttttttatttgtgtccgaaaatctcttacgacatccggtcaaacgtctgacgtgacactcaaaaaaaattcttttcacgaactaaacaggcccaaagtaaacattctggcaacttttttatgtagatgctgtcttattttggtttttaaaaaaatgaactcatgtgcctatgtcgtcatctccacggcgaactggttcaagaagccgtccttgttccacgcactactagaaaaagcattcttctcgacgtgagggtcttattttcgcatgccgacatgacccttagagggaaatgaccacctacaaagatataaatcggagtgaaatttgctggccgcctgcgaaaataga

SEQ ID NO: 32696 - DNA, 618 bp, Oryza sativa
acagatggaacatttgttacaaacttgagtaaggataagagaagaatgaattgagacggtgagatgggtgcagacccaaaataaatcatcatataagcaacaaactaaattaaatgattacaaggccttaaagaccacaggtacatattttagaggaaatggtttgacccacgtagtcacgtagagatacagtggagtccactggttataaagtatcatcacgcaaatggttgatgttctagattcaccgctctctaatgcaccattcggtcgccacataaccctactgtagtacacgtacggttcattctttgtacatctctctacagtgatggagtgaccaatgtttttttttttttttttgaaaactgagtgaccaatgtaaaattggctcaaacccttgcgttgtatagttttaattaacaattgaggtgaaatagacttccaattttataatattaaggtggtgtgtttttttgacagtacttcaccgttatcgaataattgacgctgttgactacgtccacctcctcactttgacaaaaatatttagataattatattatgatgatgatagttgtataataggaatatttatggcgttgcacattttaccaa

SEQ ID NO: 32697 - DNA, 740 bp, Oryza sativa
catctcgaggcggcccaactagggtttgcttcgttactaaggtttatcatgtaatttttttataggaaaaaaatatcaaaccctcttgtttattttatccatggaagaattattatatatccattcagataggataatgttttaaaaaaaggatatatgtatttaatattaaattccatggatgaaacgtggaaaagatatcttagtatttaaaagaaacaaaggatatatattccgcgtgctgaaattaatgttaggtacgttctctcatattaaggttgttttgaattgaagccaacacgtgtcctactgaatttttggtaacttcaatagttaggaaaaagctagatgtgtcaacattttcttgctaaattcttaattattaatattgatgggtcatgctatgggtgtatttagatttttataacttacatcttgatgaaattattgtcaaagggggagaaatatacaaaatgcatacttcttgaaaaggggagaattgaagttctagactcagtgaggagttgaggtccagacggtcaaggataccgggtgacgaagttggatacgagatggcatacggtggatggataccgtgtgggtgaaatctttgcaacgggcttcacgaggtgtgcgtgcaagcgtcggtgttcgcgaaggaaattggaaagtaagagtatatggtgctacagtacacgtggtactgtagcatgcatatatgtgtgcctactatgaattgc

SEQ ID NO: 32698 - DNA, 597 bp, Oryza sativa
agatgaaagatatatagcctcgatcacaccgattttcatgtagtaacaatactaacaaacaatgatcctaataggaacctagaacagtgactacagtctacagatgccgaatttctatccattatctacaaaattctcgagccacgacaatccagaattgaacagacagcttacgtccaacatggaggattgggtctacttaattcatagaaggccaaagcttagctgaattttgttcacgggtatcgcatcaaatcaaagttaaaaaacagtttagatacgctgtttggttttctacggatactcgactgacaatatgccgtttgttctgattataaactaaacaatttatattaatcaagcagtatatcatgcttctagataggtagtatatatacgactaagttgtaacttgcaaaggttttgcagccaatggaggccagtgtccaggtaggcagccatgaggctctgcccctgcttatgtaaagccactacaagcaagaagatttaaaggataattggtctgaatcaattttctttcgatttggtggaggaccaaatactatttcagacaagactaacaacaattgtgaaaga

SEQ ID NO: 32699 - DNA, 723 bp, Oryza sativa
tcagccacacgtgcattgattgtacaagtcatcacagccgaccatgatgtcatcggatgttcggtagtattccctctctctatagtagtataaccatgttaacacggttatcatgggatataaaaacttgtcaactttttggattatgataaagacaagagatggtaagtgtagtatatgtatagttaatttagtgggaagtcaccttttataattactatattgttatatttgtcataaattttgaatttgaagtagttgttacctccgttagaataattgtatttctaatatttaaattttgtaaaaagaatatttctaatgagacaagacctaacaaattaattttatgaagatatatatgctgtcgcctagcctcccatctctctatccaaatctcctagccctcattttaatcaagttttacatataaaaagtatgcatgcggtgtggatattaaatagggttattatagtcatttgtgtgttgctaatctgtctctaatttttttaaatataattattttgagacgtatgtagtatatatattttaggacgagggaatgcattatttttgactcaagatgatcctttctgagtagggctgtgtttagattcaaactttttttcttcaaactttaaacttttctgtcacattaaatgtttggacacatgcatggagcattaaatgtggacgaaaaaaaacaattgcatagtttgcatg

SEQ ID NO: 32700 - DNA, 2139 bp, Oryza sativa
  unsure (1)..(2139): unsure at all n locations
gaaataccaaatgcacaacacgagagtctagtgctaattattacaccataagaccttagacattgtcttaaatcatcggaccgagcggtccggaatacatccaaaagcagaaatagataaggcagcagaatttaggcagcggcatgccattgccacaggcaacgaccgtactaagacctactgagcgccatcgtcttcatctccctcctggtagtaggcatagggatcctccgaagcttcatttcccgcttctgattaattttataattgcaagggtgagtaccaaccgtactcagcaagccaccacagcaacaatgcatatgaaaggggtatttcaaaggatggctatggctcttttgcgtaaagccagttttgtaattcttttcacaagcctcagacctagcattgactgatcaaattttagtaccagtgtttgtattcaaacaatgacggttctgtccaccatccattgtgatcccaaggatagcttcccgccattgaatcgttatggttttctgaggacgcccactttcccccttctcaggaagtggctccaacagcatataaattcatcatgcaactacccatcccacacaagttaataacttagagactagccaagtgtaatacatgtcccggtgctcaataaccgcgagcacggctattcgaatagatttggtttactcacattgcagtggatgtacactttacccgcactccgtgactgcccaacacatgagcctcgtcccaacacatgagacgcatcacgacaaagctttttgataacctcgcattggcagtacccgctccatgnaactttacanntcctcttagcactctagggcgtacacgagtttctagcagtgagaggagttctggcgcacccgggaaagaaagactcacacatacattaagttataattatgtttaaattctctcatggcagtcctaccgatggcgacaccactgtagacacccgcctcgcggttctaccaatggctgccccaccgtagagcccctgcctcacacatcaagaaaccactatgcatggataatgcctccgctcagctatctattccgctaggtctatacccatacgagaagtgcggttgtacgagggtcgtttcatgcttaacttcatggctcggtccttaattgaccagggatggcactagcctttttccggataccacccaaatcctccatccgccccagtcgaaatcatttgtttagtttcattttcctttcacaaatcatgtcatcaatatcatggcaatgtggcgctcatgtctccacatgccgcatctcaattaccttcccaaagataattgcccaagcatatagcatttgataaatatgagtatgcataaatctagagtagcatttctaagcatttatcatagttgactagggacttttacgtaaatcatggttacaaggatttaagggtaaacaataatcaaggcatggcataatcacaagtaggatgttcatcattgcatgcaattttatttgtaaacaaaacaattttgcaattgggatcaacatgttcaaggaatagtgatgacttgccttgctctaggtcttgtgggtcttggtcttcatccggatccgcggctccctcggtctctatagttacgtgcgtaagaacaatttgaattcgattagaattcaaacaaaatccaaataatgaccgaattgagaaacgagcgcgggaggtgaattctatataggctactttattcgcgaagtggaattattcttctacctaaaatatttgtgtttcttaagaaattttgtgatttaaagtcatgtcctaagactttatctaattatctagtccttaattacatctagatcactaccgcgaattaatctcttatagagtttactaaaaataatctataataatctataagaattcatctaattgtttagttcttaaataattgatcctataattaaatgctagtattttaggtatttaaatagcaagaatttatctagctatattttcattaagcctatgattaaattctaatatttttaaatattttaaatttccccctaaatttttcctttcctttctctccctctttcttttcttttcttttctcttttcccttttcctttcttttt

SEQ ID NO: 32701 - DNA, 3585 bp, Oryza sativa
tttgaataagacaaacggtcaaacatatttaaaaaagtcaacgacgtcaaatatttagggacgtagggagtaattaataaataatattcgatagatatcatacaattgatacgactctatatgagtaaatcagattttttttaataatgaaaatatatcacacaagcaaataaataaattagatctaaagatattctctccatcccaatttgatcatcacctaacgattttgaggtcttcctaaaataattatcatataataataagtgtctctttatttatttattatgcaaagggtaattgggcatcgctgaatggaatgcatgcatgaagccatatgcatgctacgactgttagtgcaattccatgcaacatttaaagtgtgatgcaatatccactggatatatggagcaccttgattggtgataattaatttaaaaacatgaaaattttattgtccttgtctttgcaccttttatttaggggatgatcaaattgggatgaaggatatactattaaactaataataaatagaaatattagttgtttcaacggaacatcgaaaacaaaatgcaacaattttagtttaagttatgaagttagcaagatggatcagcaggtgcctaactaatttaatcgagtaatcgatcggcagcaaaagaaattaaacaacaaattaatttagagaataatcaatatggattttctatattgtatttgtattgcatgatcgaaggaaagaattaagagatcatgatcgaagatgagatcgatcgatcacctcggtgaggtcgtcatcgttgacccatggggacgctacggacatgttggggaggacggacgatgcctccgctgtcagcctgcagtgcggcggccctcctgtggcggtgcacctcgggaggtggacgacgacggacggaagccgcgagggggcgcgcgcagccatggttgccggccgcacgactacggagccgccgctgatgaggaggccggaggggcgcatcatctctcgctgcccgcctggtcgatcggtgtagtttgttgcaggccggggcttagggtgtgtatatatatatatatcgatcgagttggagaaggaaattaaggtaaaaccctaagccctaggagattatatatatatagtatacctattattaattactagcaaaaatacccgaaattgctaattcgccgacgtccgcgcggatgaggagggcggcagaagccgcgccgcgcgtgggatttttttcggttttctttgtatcttttcggtatttcttcggttttttcttccgttttttttttggtttttttacgggatacaaagtttatatacgtgtaaaaaactttttatgtgtatacaaactttgtatacataatatattttctagtttttttattttttaatacatacttatataaaatttatatacgttatatacttatgtatatacgccatatttaacaagaaccccagcacccaaccttggaaacgaactcactacgagagggcgggctctaatccttaagagtattttaatagtatagccaactactgactctaaattatctataaataatctaatagcccatttatacaatagttaactataaaaatatactacaccattaatacccggtcccacatctcatacacacataacatattagagtccgtgttgcagctagctataaatttgtagcccgcttttttctctcttctctttttttctcgatatatgcagtggttatagctggtttatagtctactactattgtacctgctctaagcgaggagatgacacagggtgccaaaggttggggccatcgtcgcggccggtctttccccggcctccgagcgttgtaaccagtgctaggagaagctggatcgggaacaaagatctgattggcacggagcagggggaccggcgctaggagatgtagtaccaattggatcaggaataaagatcgaattagaaatggtaataaaattggtcgctagcatgcacacattctccgatgttgcattaattgtattccgatgaaatccgcgtccataaagttatatgatgatcaatttgagaaattttagatttcattatataatgatcaatttgggaaggagagagtacagtactctttagctagttggagccactttttaaataaatggttcaaagctaataagaacgtgaattacataatactttaaagaaattggaactgctagagaatttatagtccgggttgcaacccctttagtcctaggttgcaaaccaggaatacgaatctgggtttgtgaagggagctatctatttttgatttcctattttttttcagcgtcattatgtcaggtgagatgataaaaacactacaaatattttaaaagactataaaaagtgcccgtgcgttgcaagggaagaaaaaacgagaaaattgaggaacaattgagaaagatttacattttgtagttaattaaattataaatttcctgagatatctaggtatttttaaataggtagatgtataattaaattaatttataagtaaagtaagtgtgggaaataaaatagcatggctgaatttaattttttattaaattcttcatgattatttacactctttgattttttctcggaattttcaaagattaattgctattttctataatacaaatatcatttcagcatttatttaaaacaaaatctaaataaaaatcctcatttgtgtatgggccttttttagccaattttcttcctcaacccgtagctaagccggcccattttcctcctttctccttccctccgccttcccatatctgtccagattctctcagttgcccaacaccggctgaagccacctcttgtgaaatcaggtcatttccttatagataatctaaaattgatcgagggtttcgattcttatcttttcatttttccgttgtcccaaaaatcagagaaaatccattgtgtatcaaactcggaattaagccctattctaaacaagcaaactctaagtttagtccatttcaattgaaaaaaaatcgccgaaagctttacatattttctttaattaggtatatgatatagaccatttgctataagtatattggtatggatgcatgctttgatacgtccaaaagtgcgacggaaattaaaaggaaaaatataaagcataccatgggacccaccatatgctggatgcaccacaaaaatctcccatcaatggtcatgccctgtcctctatcccattccgtttctcctctctctttctctgcgatacgatcgctccttctcaggcttgtgacgtgcacctgcatcccgcagtcctggcaccttttgcatctttgagtctggtgttaatagagatggcaatggttaattcaccgtcggggtcatgcccgtgtccccgtcaccacggtgaaaatatgtcactgtccccgcccccgtcaactacaacggggctataatttctctagccccgatcaccacgcggtgaatttttctccatggtgaacacgtccccgcttaaacaacatattcacaatcacattatatcaaatatatccaaaaactccactcaaca

SEQ ID NO: 32702 - DNA, 1050 bp, Oryza sativa
ggccttttttttaaaaaaaaaagaaaaaaacttgagggtggtatactggggcactggctttgttaatttatctgggcttaggccccgtgttggggagtttctgggcactgtaagttgtcctaaaatccccttaaataaattagattctcattcagatttgattttgagttatagaatttagtaaaaactaaaagaagttataaaacttaactattatcagaagctgattaccaattaattatcctctaacagggcctagtcaccgttcgttcgagcagtgctaaacaaccgcacgtaaaacaagaaaactttttaggacatgattaattaagtattaattattataaactttaaaataaacttatttgatttttcagaatattaatttgtatatagaaagttttgcaaaacacataccatttaacacttcgggaaatattctcacaaaatacaagggagtagctaacccaaagtgctcaaaataactcagccttattcctttcaaattattcaccaaactttaaagcatattatttgctcaatgctttgaaaaatacattttctagaaaaaaatcttctaccacattgcgtagaccttgtgtttatattttaagctattttgttaagtgcatttatgaaaatattaattcatccaagtttaatctgcagtaacacttcacttaataatttatgaagttagtagcttttagttgaattcgctttaactggtagtatatatttgaaagtttggccattttatttataaaagttattatgctgcatagctttcgttcatcattgctttaaccttttaaaatttatcggtggttaaatgtaaactaataatagagagcattgataaatattgaaagcggttttgtaaaaggagagttgaaaaatgaaaggagtaaaaatcagatcgtgaactgcataaatgcaaacttgttcagtaatgaatatggtaatgtactagacagcttcctagtaaagccatgctaccactgtggtggtgctcttttcttttgaagatgaagattaagttttttacgt

SEQ ID NO: 32703 - DNA, 722 bp, Oryza sativa
agatatgttcacttcatactctacaaggtcctttgtttgtgcacattgcagggagatatctctactgtcttaaaagcacaatcatcatcttccctcccatcctaatctcatgtatatagaaaaccgctcactagatgtttggctattccccaacgcccgcgtcgctcgccccagggcgacacgggcggcgacaccgcgcgcgccgccacaaacttctcctcctcccctccgcctcgccgccgcccgagcagccgccggcaaagctgcgcggcggcaaggacggcggcggcgggaccttctccctctctcgagaagcgcggctagggcaccggcgggacctgagcaaagcggacgacggcgacagtgtccggcgccatctgggccggatgtggcggatccggctccgccggaggtggatctggccctatcgcggccagatcaggaggggcgtgccgctcttggcaggaggcggcgtgggaggcggcgaccgcgaccgttggtgggagggacgacggatccggccactctggcggcggatccagtccccctggatggctgcggccggcgggcggaggtggccgacgccgaggaggtttgtggcggaaggcagtggtgacggcgaccgacggagtcgagagggcggtgacagcagtcgacggagacgcgtaggcggcggcagcagctggtcggcgggaccggcgacggcgtgcatggcgcggcgc

SEQ ID NO: 32704 - DNA, 651 bp, Oryza sativa
atcatctcgagtgtgctgatgtgtgcctttttgcccgatttctctgcatcttgtcattcaattaacaggctgttgcatcatctcgcaagttgcaactacatttcggttatagccattatatctaaggcatactctctcatttcggttatagccattatatctaaggcatactctctccgtccccccccccctaaaaaaaagagaatatgtaaccctaggtcgagttttttttggacggatggagtatgatttaatatgctgtgtctactaaattacggaatttttcaccaacaaattcaaaaactagaaatttgttctcatgggcaagtcctttaaacttaagggagtcgtccatggaaattgatttccaagagcggtcgttatttcgcttgcccaaatcatgtgatttttacaaggccttggttgtaggcgggtctaaaacaccattgtaaacaggttcttgaccgccccgcacaaactttttttaagcagtggtgatctatgaacggtgggagtgattgtatttgcgcaggtggcagtgaagcctaagcccttctctccactaggtgcagttactcattgtgacacatcttcatcactagttactgacttttatatcatcatgtaggtcgaagctatcttgtttcaaat

SEQ ID NO: 32705 - DNA, 721 bp, Oryza sativa
ttagattccgtcgtttccggagagttcgttttcgccggagaagagtttgaagagttccaaggccagcaaggcaagtcacacagatcccaaacaaccctttgagcatgttgatcctatttaaagctattgtttctattcaactattgcatttattttcgaatgtcattgggtggatttaacctattctttgttatggcccttttgttcttgtttaccttattccttgataccttgggttattataatttgactagcatggaccttacatattggattggttcagctagatattagatgtaattgcttagccctgcttagaaacactagttcacttttgggttaactaatgactcactataatttaatgatggcttaatgatagttcacgatggttaatcgtgattagttaattaattaatgtgctaactaaaacctgataatggtgggttgtgagcacatggttttgttggtcgtgctcatgacaattaaggaccggttcacgagtttcggttgtgaaacattaaccgtgccaaccacaagctagcgtgggcaacggctttatcttttgtatagcatggttcattgcagagcaccaggttgagaagtggcggagataagcccacgggggtcgctggggagtccattacctctggttttgagggggagattatgatccaggaacggtgcactgtagtggattgtgttgtgcgagaggtaatgt

SEQ ID NO: 32706 - DNA, 1124 bp, Oryza sativa
atctttaaaaattcataactaattcatcttagctccgatttagttggttcaagtctctaaatttttctaaaattgagatctacatgttaaaaatatccacatgtactgttcatgcttgtttatgtgctgttttggtgattttgctcttttctgcttagattccgtcgttttcggagagttcgttttcgccggagaagagtttgaagagttccaaggccagcaaggtaatgtcacagctcctttccgaggtaccgtggtggtactaaggcacatggtgacatgatgtggggctgtgtcttgtgggtacagtggtacacctctgatcagagtaaaactattcgaatagccgtgcccgcggttatgggcgggtctaacaatgtttttcgtgattagtctcacatttctcaccatagtaaatgatgctttatttggttataatttgtttagctcctggtttggaatggttaattcctggtttggagattagatctgttcagccgggaatggttgttcagaatggttgggcctatacaacagggtatgttgtatagcgttggtttaatattgtttaatacttcactgttttattaaattctcaaatgtttactaaatgctgcttttgcaaaataaaaccctattatgccatcttttggtatccttgtgcacttgcatatttgctgcgtgacttgctgagtatgtcatatactcaccttgcaatcattcatcagaggaagagttctacaatgaggctgatggtgtggaggattaggtgtagccttggtcaagctgcctgtggagtggagccgtccgcgccgtttattttattttccgctgcttagatctttattgattgagaggaactatctacctctgtaataatattttattcgtttaaattagagtattaattgtactctattatcaatttgttattgtgtgcctcggctgattcctggacgagggttcacacacatgtaagcgtttggaattttggatagaaattccgggcgtgacaagttggtatcagagcttccttgaccctaggttatgccaaatggttacccatagaagccctctaaaaatgttggaaaaatagaactgttctcctccctttctcttttaat

SEQ ID NO: 32707 - DNA, 1875 bp, Oryza sativa
tcagttctctctcaacacaacttggactttggttctactccacacagcccccctgattgcacaccgtacacacattacacccagcaagctgtgaattgttgcactcactccgattgcaatcaaaccaaactacccaacacgaagtgagtgtaagggcaagtacaatacttgaaattaccggttaatagtaagcttacgttggattttatcctacgtggcggagagagagtaccaagagagagaaacatcgtcgattaatctgtcgacgatcatgcacgggcgccaatgcacctagcgctggcttggagccttcctatcgacagcaccatcgacggaacaagaaattagcatgaataatcttccctgattggcttggaggaaagagaaaagctgggaaggagtgagagagaagtaattaaataattattgatatgtgtgctgcagtaaatgtgaagagacaactattatatttattatctattaagttacctccaaatgacgtgtataaatattagagtaagcagtcgtcttttttattgcccttgccctaactcaactggttaggtttcttgtggtgaaactagttcatccacattcatacgggtgcttgtatttatggctaattattctttcagtaatatgcgatagatccatcgaaaacaagacgttcgtggtaacttcgtcaatctcaagatatgttagttcagtcttgcagaaatactcatatataacagtagcgtgtgtgtgtatgttcatgacttcgttaatcaaaatttaagtttttcagaacctataaatattattcttgacttttttttcaggaatttaacgaggatatagatttgtctctggcatccatatgtctcttttagggtatgtttgtttgagcatttttgcccgacagctttctcgtttttaacatgttttccagagtactaaacggtgtattattttttaaaaaatatatatattcaagttttctaaagcataaaataaactcattttcaagaattgtaataattaatacgtaattaatcatatagtaaaaacttttctcgtttcatgtgtacttgttaatcatatagtaataacctatatgctacgattctggacgactttcctaatactaaaaatgtcccaaccaattctacattcgtcctagaaaaattgtagtttgtattatgtccaacgtttaaccgtccatcttatttaaaaaaaattatgatcaatatttttattgttattagatgacaaaacataaataatattttatgtgtgactatttttttaattttttcataaatttttaggtcaaacgttagacacggatacccataactacatttaaaatgaaacgaaggtatgcgtactaatagtatattttaggacggatatacgtagtactccctccgtgtagccataagtttccgtgtccaacatttgaccatctgttttatttaaaaaaaatttaaaaattaagacacgtataaagtaatattcatgttttatcatgtaataacaataaaattattatttataattttgtttcaaaaccgacggtccaacgttgataactgaaacccactgctacgtttaacacgggacagtggaaatggtacaaaagaagtgatgtcgggctcggcccgcgcggccccaccgcgtcggccgtcgcgtagcggccggcccatatggtccgtccgtcgctccgcgactcctctccccgtccccgtccccgtccccctccccctcccgggcccaccaaacaaccaccccgtgggccccacccccatcacgcccactccccgccctccaccgtggccgccgtcacgtgcgcgcccaaacgtccaatcacccacggccgcgcgggccctataa

SEQ ID NO: 32708 - DNA, 707 bp, Oryza sativa
ccaatgaatcgaatatacaatttcacatattctagcaaacaatgtaacattaatgaatcgaataagtagccgacacaaacaatggcaacattcagttcaagggccacatttcctcggggagcaaagcatatagcacacaactccacggtaagatagtaatagcatacgcagccacaaacttattggacgatcttgaaaggcatggttattgcaaaaaggatcttcttggttctctcactggttgagatcaaaatcaataacacgcacaaactctatgcaagtcattcacttggaaaatcaggtatgtcacaggcaccgggcatgctcgcccaggggtcctcaaggtcatgttcatcgccttgacctgcagcagctagattggtctcatcagaaagacccccatgaccgaaagcgtcatctgcatctttggcaaactgctcatttgagggcggcaattcttcgttaaactggcaataaactggcaaattcggttctagtgatacatcgtgcctccagaaagtagggtccaccaagggtggaggttggctgtcaaggaataggctgcttgcattattgttgatgccaacaaaagcatgacaacctgaaaagactaacagtaagttttatgtgatattgttcatgttaaaataagagtgagtacacttactgttctcgaggagatcatcaccaatgattggaaaggaaga

SEQ ID NO: 32709 - DNA, 718 bp, Oryza sativa
ctcgggttcatggcggggccagggatcgaggaggttctcatcgagtgcatcaacaggggcaacgccgccgtcgccgccgccgccgccgccggcgacggccagccgaggctgctcgccgcgttcgggatcaagccggagagcctgccggcgaacccgacggagaggcgcttcgtggccggcatcctgtacgctgcgctggagatgaggaactgcgtgcggaggcgggtccggtggctgaggagggtggagaggttcaaccagcggcggcgggaggaagaggcggaggcggccatgaggagggaggaggaggaggcgaggaggaagctggaggtgcaaaaggttcttgaggggtatgaggaatttataaattttaaataaatatttggcttgtttagattcaaggaattaattttggaggtttttcacagtaattaattgttttgatccctatgaaattactactttccaaagtagcacttagccttacaaagtactgaaggatccaagcttcacagtgcacttcatactattgaagggagtagttgcattttcaattgttttcagtggcttcccgtgatagaaaccattatatatctttgggctgtattgggacttatatgttctacactcatccaatttgttttttggagccctttttgaaggaaattttatttatcttagacaactaataagacggtataattagtgcaagaccact

SEQ ID NO: 32710 - DNA, 741 bp, Oryza sativa
tggcaaatggcaatggcatagattttgtggccggcttcgcttggaaggaggtcgtcagacgcccccaagtccgagcatgccgtcgtcatcgtcgtcgacgaagtggtcggggcgccatttgcggtggctggcctcctccgcccgaatcttggactcctcctcctgtttcccctcatctgcaatgagcctcatcctgaaaacatccagaagatgcttctcgtgtttacccacgacgaggcgggtaccctgggaagcatacatcgcgactgtgaccaaatcctgcatgcacgcgacaaatcgaacaggtcggtcaggtataccaagggtgtgtttagctccgcatcaaaattaaaagattgattgaagttaaaacgatatgatgaaaaaattaaaaatttatatgtaataaaaatttgatgtgacattttttttttcgaaactaaactcggcccaagccaacacaaggaggtctagggtcggagaaaagtcatcgggttctgttctgttctgaccttggcccacgcctccttggggagcttgtcggccttgatgccgaaaatgttgaggtagtatggcagcgcgtagccatcggggccgcaagcgaaactgatgcagctgtgcaggaaactgaggagcccgtccgggaatccccttgtgactgggtcgccgtggtagcactgccaaaggtaccaatggtacctcagcagcgtgcacgtcgccgccaggggctccatcggcacc

SEQ ID NO: 32711 - DNA, 721 bp, Oryza sativa
cgccggcaaaagatgacgtgtttagagtagtcggtgcagaaggagctccaacagctgcaagatggcttttcggcttggatgtggtccttttcaaaggaggaggcctgcgaagggcatttgcattggacttgcgagaggagccagcacccaacccgacgaccgcaggggctgcacccaatgcgacgaccgcaggggcagcacccagcacggcggcggatacggcagtatgcccaacattgggtgtggctgcggcagcgactactgctttacttgtatcacgtggtagcaggtccaaatccatggcagcatcccttcgcgtggaccgccggtcgtgggttagtgagtcaacaatgcagctatggaagacgaataactcgatggagaagaactagaggtaggcgtctatcgagcacagagaagggatgagggattgtagtatgctcaccttgcatcgtcgctgtcatagcttacggggggaggctgaagccatggtcaacggatggcggcggcgatggcggctcccggcggcgcggcgacggcggctcccggcagcacggcgacgacgactcccggtgaagacggctgcaggctggcggcgtgtcgacagaggcagccggtggctctcggtgaagacggctgcaagcgccgcgccggccggtgacgacggcttcaatctcccgacgagagaaggcagcgagtggcagcgaacagtggcgtgcac

SEQ ID NO: 32712 - DNA, 3519 bp, Oryza sativa
cataaaaatttggcacaacattggcactaatccaaacactcgtatttactgtgctaccataccaaaattttggtagtgccaaaacttaccaggttttggcactgccaaaattttggtagggtaccaaaccaaataagccctttatttcttcctatatgttctaagataaatttatttttaagtaaacattatatctcaaagtttatgaaagtagtgtggataatacattaggagtagataaaaagaaaaataattgtattgggatttgataaaatgggaatattttagtctatttggttttgtattggtttgtgtgaaatgggtgaaaaaaacttattttgagacggagagattaattgttactattcgttgggtgataaaatatggtataacaatttctagagttaattatgggttattaagaaagcatgtgaaattaaataagagaaaacaataattaaatgaaaaaaaatcattgcaattaggataagttgagagaggaagtggtggataaatttgattgattattattggttgtgataaaaaaagtagatgtaagctgatatattctataataaatttttaaatcttataggtttatttgtctctgaataagtccatttctatgcactcatctacttctattcgagtttcatttcattaataccctttactaatcattatacctatatgaaccacccaaaaatactattatttctattaattgaagacattttgatatgattggcagtacaagtttcccagtccaaattttcccctattgccaaaaaaaagaaaagaaaaaagaaacgcaaacacacacatgcacacccttactcctatacacatctctctggtcccttctactactactactagctaggtccgattcgatcatatcgacgcgatgcaagccgttcactgaacctgcagctaagtatacgtaatacgttggcttggtgggtgcagtgcatgcactgatgactgatcgatccatcgatcgagctatatctctcgacgagacgagatccagtacgtactctttcgtcggatgggtacagtttaattatcgattggtctaggtgcaggcgcattcacgtactacgcgagcaggtgcatcgctgtcgacgatgccggcgacgtacgggacagcgaggtttcagggaagcgatggacacacgatgccgatgcctggcagtgcatgatcacgacttctcagtcaagaccatcaattatcgtccgactagctagaggccgggtccttgtggtgtttttgctggagccgtaaatagtagtgcactccctccgtacttgttgactgaataactttgaataccaagtctgtttagctttaactggttgggttctcttaggccatgtttagttcacatcaaacttttcttcaactcttaactttccatcacatcacatcacatccaaaactttcctacacacataaactcccaactttttttccaaactaccaactttccctaaacttctccccaatttaatgaactaaacacagcctaaggtgaaaccgatcgtttgggtttactggcttctaatttaactcaggtgctcgtatttacggctaagtagatttaggtgcactagcgttcacgtaaattattattttagtggttcgcaagataccaatcgataacgagatacttgagatttcgttaatcccaaaataaaatataccagccatgtctttaggaggtgatcatgtcctaacagaggtaaggtgtgcgcgcgcatttagaaagatacgtgagttagggtttttaggatttttctttttggaatttttatttatttattcaaaaattctttatttttcagtcgggtaaacgtgtcgtgtgtaaaaatcctattttcacgtgtggttgtgttacctgtctgggaaatccctatttctatatacacctgagggcatgcagttgctacatccatctgcagaaatgcattttagccgtttaggaatattgtttatattgtagtgtcttttgcaacgcatagacatattactagtaaagataaagtataagaattggacgagtcaagcattggatgatcgtagataagacgatgaagtcatgggtgcatatctccaatcaacagggtgtttaaatcaataatcacacatgtgtatgcacttttaatagaattttagcggaacgaatttgtgctaattttcgtttcttccaatgtgtggacttctcttatgtgctctctccgtctcaaaatataaacatttttaacaaagtgacaagtcaaatattttaaactttgactattaatagtaaaaaaaattaaaagatcaatcatgtaaaattgatattactagatttatcattaaacaaattatcataatatgcaaatctttttatttaaaacatcttacttttatagatattgttagtcaaagtaacatatcgaaaaccatgtcagagtcaaaaaaaaaaaaaaagcttgtattctgggatagatggagtaattaattaacaaaaaaatatgttttgattgataaattggtatgcataaagatgcttgcactagaattttaacactttggcccttcttacatttactttacaaatgtaaatccatgctgaaacttattttgaaaatgacatatgccaagacttgtttcacaaatgctagctaagcgtgtactcctaggacttttagcctgcaggccgatcggccgctctcgatgccggcgacgtacgagacagccaggttcatggaacgaaaatgagaggtgcccgggcggtatgacttttcagtcagactattattgtagtagtacgagccagtttcaatttctctacagtacgtaatttgtgcagactattattgtagtggtgctttttctgtagcagtaaaattgtgcagtactccctcacagccggaatgagttcatttttgggccgttttggtttgctataaaaactgggccataccaatattttagttatcagaacaataccactgtgagtttggattgtgaccaaatcactggtagtgcctaggtttaatttggtagcaaggcataggctggaattggcagccatccgtcgcccgccggaagtgcccagaagcaggccacacaacttggctaagcacaaactagttcacgcacttccgttaaaaaaaagaagctagggcttcatcttttctctacttcaataaatacccagccactactcccagccactactcgtctcctcggctggccgcctcaccgctctgtttatttgtgcttattctgcagcaaatagtaccaaaactattacaccaaaaaaaaatggtaatccttcattggtaccaatccaaatggaaattgacccataaaaatttggcacaacattggcactaatccaaacactcgtatttactgtgctaccataccaaaattttggtagtgccaaaacttaccaggttttggcactgccaaaattttggtagggtaccaaaccaaataagccctttattcttcctatatgttct

SEQ ID NO: 32713 - DNA, 782 bp, Oryza sativa
tattatactccttgaggatgaatgaatgaatgagtgcctcacctttaaatcttgtgtctttcactttcttatagacatctgtcatgtattatgcaaaataaacccacaaataaaacgatttagatggtacccaaggaaagacatgcataaaaaaattattttccgaagtgaatatcttaagagatcctcttgagaaaacgaattatttccacgggcctaaaagaccagccactatacccaacctctccttactctcagccttcttaaaaagtaaagaattatgctctccctcatctcctcatccttatctcctcgagcccctctctcttctctcactcacaaactcaactcctctctcactcacaaactcacctcatctctcactcacggcagcggtggtgcacgcacagaggcaggtccgacggtgtggtgtgcgttgatgacgaccgccctccctcgtggatccaacgaccaagtggtggggaggggcgccagatctggtccaatgggaaagggcaatgacgttgacagtggctaggggcgatggcgtagatccgatgctgctaacctttggagggatgccccacagccggaggcctctttccatcccttgtgcctggattcaccgtcgtgagttagggtttttaggatttttctttttggaatttttatttatttattcaaaaattctttatttttcagtcgggtaaacgtgtcgtgtgtaaaaatcctattttcacgtgtggctgtgttacctgtctgggaaatccctatttctatat

SEQ ID NO: 32714 - DNA, 590 bp, Oryza sativa
atttatcttaaatctgtagttccgtgataaaattagtgttaaatctgtagttttgtaatacatcatgttaaatctgtagttttctgataatttgaccaaaatacctgtagtttcgtgaaatttactcttatttatttttttttgaaacgttttaattttcattaggcttggagccttggacccactgggtattttttttaaaaaaaaaactgacacactgggttaagtgggcacgcgtaggtgtacgagagcgcaagcatgtggagcatagcatatgccatgtgtaggccttgcttgggcacattcaatgacgatgtgctcacactgaccatacatgtgtatcttcatgctcaatattattcgtacatggcaagccatcatggttaaattatgactacggttattatgggcatgtttggttcattgcccaaatgaaccaggtaaaaaaggaataagttcattttacatccctaagctttttgtttatctaaatacacctcctagctacaaaatctattaacttattaaagaaatagaaaaatgagcctccacgttcgctctcacggcctaaaattcccatattaatcgaa

SEQ ID NO: 32715 - DNA, 507 bp, Oryza sativa
gcgctcggaaacggacgacggctcgcaggtagtccagatccgctgtcgctgggcggcgggaaggccggatcccccgcttccgtgccgcggggaggccagatccgccaccgtcgaccttgctccgtcgtcggctagatttgattttttttctttttgcatgttgttccagatgatgcacatgttttgatctgtgtaaatcatgtttgattgtgtaaatgatgtttgatatgtgctgatgataattttgtatttcatgtttgaatttggaaatgagcagcgaatctagatgttgatttgaaatttgaaattaatgaatcactgggcggctgcatgagtattttcgctggcggctgtcttaagccaacgccagcgaaaatgtatttttgctggcggctggcttaagatgaccaccagcgaaaatgatttttgttggcggtcaataaccgctagcgaagatcttgatcttcactggcctttgctacattttcgctggcggctggcttaaga

SEQ ID NO: 32716 - DNA, 663 bp, Oryza sativa
tcatttcagaaataaaatggtgaacaatactctttttcttcttgtaatatgcagtagccacgaccagcactacctagaaaagccattgttttagagtttatatttttcctcaaaatacgaattaacattaagaggtttggtaccagatcacatacatttttaaatcaacgtttgaaaggaggccccgtactcttttacactcactgtgctaacatagttaaaacctctgttacgaggtataagtactgtcatggactaatctccagcagccccttgacagctctccctcgccgtgcttgtaccctgcagcttgtagtttactccaacccaagaactagtactaccactgcactgctacagccaagtggcccaaacgcccaggacacattgctcctccctcctcagaacaagtactatggacctcatacctcttgtttgatatagtacttcctccgttttatattagaagactttctaacattatccgttcatatatatatatatatatatatatatatatatacacacacacacactaatgaatcacatatatgaatctagacaacatatatataaatatgggcaatgctagaaagttttataatatgaaacgaagggagtaccatgtaagagcctcatgggttgccaatattacttaataaa

SEQ ID NO: 32717 - DNA, 1900 bp, Oryza sativa
cacacaaggattttatcacggctgttcaagaacagccgatgggattcttcaacgaagaagtcctaatcccgacggtgaattctactacgacgaatcgacaattcataacgtcggtccttcctcttctgacatagcgccggcgtcgaagtcgtagctatatatagctaccgagcaaaagaattgtactatatacgcatgtatatatatttatatatgtacacatttacttttgtgttaatatatattttggtaacatatatatatgcacataaaatgttaagtgctttaaattatacatatgtgtatgtaatatatgatttacacacacacacacacatatatatatatatatatatgtatatatatatatatatatgtatatatatatatatatatatatatatatgtatatatatatatataaccaaccatgcagcaaacagggccatgcaaaaaaaaaatggtgcaccgatctttagtcccggttggtaatataaaccgggactaaagatggatctttagtcccagttatttcacccgggactaaagatagctatctttagtcctaaattcgtagtcctggttggataaccgggactaaagggggttaccaaccgggactacagacggtttctccaccagtggatcgtcgtccttgaggccctggcgatcgtagtccttggcgcaactcaagtcaaagacttcgcccctaatcaattaatcattgcactagaaaagagataagggacgaaattgaggactggtaaaggatttttggaggacactcagtttctttttgatttttttaggtcctttgattcatagaaaaagataaaagtttttgtataggattatattcctatggtcaattttataggaaaaataagtaagagattagatctcttcaaaactttcatttggttcatttttttcctttcgtgcagtcaaaggacatttcctcctgtttcctgtgttttcacttcatgtcggattgaataagcagttacttcaatttttacggttttttctatatccatatttttcctttcctgtggttcgaaggggctctaagactttgattatctctagttcttcatcacaaaatgtagaggggaaaaaaagacttttgaccttagtttcttgacgtgctacttctacgagaacctaaaacacacacaggatatacaaataattactccatctaatcattgttttttttaaaaaaaaagagaagaactttgcagtatttcattgatagtgaagatagagcaacatcaacatgatcagaaaggataaatcaccgtgtccgaaaaaagatcaagaataaacaccaacccaacacacaacacctcacaaagaccggaatatccctctagtaagtattcccaatgtcatatatctatgacaagtggaggtaatatttgataatattttttaattacacgagtatatgtgggaacacacatggaaacaaacaaaaatgcagaattattttgtaccaacatttttcattttgcccctgagggattttttccatcttggctttttaccactaaggtgaaaattagtcatggtttagcctcacatttgcatttgccctttggcaaaataaatagacatagtgaatgtttatattagagtgtcatatatatgctattttttatggataagacttctgatactaatttaacagcaagcgattttcgtccaatccagatcctcagtattgcagactcaatgtggggctgaatgtggggctgagggtctgtaaggcccatatgtcagtgagcacatgcagtactgcaggagccgcatccattttcatcaccttgactcttaagacgtcaaaagcaactctacaaacaaatttaatgagctttaagatgcatttgtgaaatgg

SEQ ID NO: 32718 - DNA, 1922 bp, Oryza sativa
ataatcaccaaaataaattcactagaaattttggcatgacctcccctcttttttaaagaaattttgaagcttgctcgggctggaggaggaagaagacatatatatatataggggtgggactttaggcccggttggtgttatgaaccggggctaaagatcgccgagatctttagtcccggttggtattaccacccgggactaaagttacgatcgggactaaagatcccgggggggcctgacaggccctgacagcatttgaaccgggactaaagatcaaatatgcccgttaccctttttaatcaggactaaagatcatctttagtcccggtttttgttgcaaccgggactattgtggaattagcccgaccgacgaaatatggtttctccaccagtgatcaagtgtcaactgaaacactgttgtctttgactggagagagcacctacagtgcagctaaaaattgttccattccgtatcataaaaattgttttaggtatgtcctaaattaaacttcttcacgtttagaatgagttttataaaaggcgtagtaacgtctataagatcaaattaataagttttattaaatacgtctttatagtatatttattttatattaaaaatattccttttttttaaaaaaacttggttataccttagagaaaaagtttgacttgggataaacttaaaaaaggcttatggagtagtaatatggaatgcaggcagtaccatgcaggcagtaccacagtgaatagattaaaatcgaagttagatcgatcccatcatatgtctagttcaataagaattaacttaaatgtatatttaccaaaaacacttaaaaacaattttaggtatatatatataatgtaagttttatttattcagttacgtgtacgtctattctgcggatggatatctaatatgcgtaaatcatgatatgaaaaaaaattccaacattttagcatatgcctacaggaccactgaattttttcgctctaactaaattgaatgtgcttaatttaataattgtagatgcgcacatatagataatcttttctaaagccatggcttatataaaaacgtacgtgctggcgaattgctgggaagctggaagcagatatcactcacgcaatacacctcgtccaactaatttagccgtataaaatacaattaaacagtagtgcctgtgccaacttgctctaactgttttattaattgtcagtgctagctagctaggttaatcgcgtgcgtttgcgtgagtatacctagtatattacttcctccgtttcacaatgtaagactttttagcattgcacacatttatttaaatgataatgaatctagacatatgtatgtgtttaaattcattatatgtatttaggtaatgctaaaaagttttatattataaaacagaggaagtatgtattaatataattaaaatgaattctagctatatctctcgtgctgtcgtgcacgctttctcctgatttagcgtgtgaagtcagtggctaacgtttttattgatccaaacacttgcctgacaaatcgagagttgttctgtcagctgctaaattgatcgatctgttcggggcgcgtggatacaagaagctggagcccctctcctgacctaagatatctattaaaattgtactataaaattttacaaattagaagataaaaataaaattatgtaaattatatttattgagccttaagcttagaaggattctggttccatatttgttaattaaccgagttcatctcagggtttgtttttacaatctactccctccgtctaaaaaagacaaaccctggtttccgtgtaccacgtttgaccgttcgtcttatttgaaaaaaatataaaaaaaaataaaaaggtaagtcacgcataaagtattaatcatgttttatcatctaacaacaataa

SEQ ID NO: 32719 - DNA, 1884 bp, Oryza sativa
agacattggcgctgagttaaacataccaacgttagctatgttgacgttgagccccctatccacatggttccgaggacgatccccctcacttacgtgacagggactcatcagcaccaagacggttggcgctgacccaatggcatatttttttgttaaagtttttttttctgcacggttagtttcgaaataagtttggaaatgactaatttgtaaaataaccaaattattactagtatagtaaattaccacgttgatcataagaaataatatatactggactgtcttcataacagtgtggattatttatatattgtgttgtgaactaaccaacgttatacttttcgagacggagggaatatatagttgtattagaaaatacaacagaaaacctagacaacggtatcctgatagaacgaaatatgtctatcatgttgcaacgagattccgttttatagcagccctcaaaatacaaatatattcttgataatcccatacaatttggtggaaaattcgaccagtttatccgaaacagaaggcgtgaacacaagtcatcagcatcagcaaggcataaagcggacaacttgaaacactttattgaatcagctaaacttgcggctcgcttcttcttttcttttcttttttcttcccttcactttcttggacctgtgacttttagttggccgtccaggggatctgaatccatctactgtagaccatttgtacaatcaattgttacaaaatggaccacttaatctacccctaaatgctaaagcaatgactaattatgagctactcctagctgctatattcagctcagctcttgcaagttgccaggcaaaagggctactaaaaaccaatattaatttctagcaaattgctctagcaggctcttcatcttcttggaccatggcttggcgtttgtgtcccggtgagctgaaccatggataagaatgcggtttagtgcaacaacctgcaggggaacaatttgatgacattatcctaataaaatatatttttagtccatgctaataccttttaggacctggtgtctcttacctagccacacacatgtacaccgtttcaccgatttaattatgtttttaccgagtcatttgttccgtatgagaataatctatgggttggaatgatcatcaattacatacttcttcgtcattgcttcttacagaattaatcaaagggggaatatgctaacgagtataatatagtttgaggttgttgtgtttgaagtttccgatcgataaggtgttaatggtttattttcgaaactattggtgctggtaaaaaaaatgttctgctattcctctatcaaagcatgtcaatgtcaaacatttgctaaagttgtactccctctgtttctgaataaaagtttagctttgattttttttcttagtcaaactaataagattatataaaaattagtagcattttcaacccaaaacaaacatattatagatttaatgaatctaaaatttggtattttagatgttgataattttttctataaatttagtagtaaaatatcacaatgacttctaatataaaacggagagggagtatatacatatgccaaacaattttaccaaaatttgggtaatacccatatatacacatatattaattccacattggctcaattttccaaatggcacattaattcacacaattattttttgcacgatatcagaacaacttctcccatttatatctctactattataaaaactgaagatgtttttgccagaactttggtacgtcatccgtatatgagtcggtttttaagttcgttcgattttagaaataccaaaggagtcgcatagaaatctcttaaaaaaaactcgcatgctaacttgagacgattggact

SEQ ID NO: 32720 - DNA, 696 bp, Oryza sativa
ttattcgaaaaaaaaaggtagtagtgtcttattccggaaaaaaaaagttgtagtgttatctcgtattgtatgcttctacgacagcaacatgttctgcaccaataattgttttgtttattgtgaaacattactgttacagcatcatcttctgattagtactatatacattgactggtcctttctactatgtactccaccctgatcaagtctgatttctcctgaacccagtgtgacaagtctatattgattgaccggtcctttctagactgctccactgagtggatgcaagcgagccaacccgccggacctaccacttccttacacccgccggacccaccacttccttacccatgcttttctcattctaagtcttgatggtattgtgttcttttttaaagttcatatagaagcgagattttttttttctaatatttcaacgagaactgtacttcttttttttaaaaaaatctatatttaaaaagattaggctagttatggactaattaggctcaaaagattcgtctcgcgatttccatgcaaactgtgtaattagtttttttatctatatttaaagctccatgcatatgtcaaagattagatgtgatgtttttttttaaaaaaattgaaactaaacaggcatttagctcaaaccctcattgacgcctagagatggcaatgggggcccgtttaccgttt

SEQ ID NO: 32721 - DNA, 723 bp, Oryza sativa
aaaataaatcctttatttttaaatgttatagtgtaaatcttaaatacaaccctcgagatcttctgcccacccatataagctcatacatgcttatatgaagaaatatcacaactggctacatattttcaaggaaaacaataattaaattttataaaatcctacctactccatctgcaccatattataagggattctaggtggatatgacttatcctagtactacgaatctgaacactaccagaatgagtcacatccacttaaaatcccttataatatgggacggagggagtattatggtctgttgtggttcaagttatacaaaaccatatggatttagacacgtggttcataaccctgggtattatgatcctaaagtttaacaaaaatcacaccactaaccattttggcttactcctatatcaaaatttaacactcctatatcaaaatttaacaaagtggttgtaatataagtttaaaatgtgattgtaaaacttaagaatgtggtagatcaaagtcaaaatgatcatgattatgatttcatcaaaccataatacctaagactatgtgtcacatgttaaaagttctattctgtgtaacttgaaccatataataatagattaatatatagggttttatgaaatttactttaaaaaacctacagcaacaacgctcaaaatggatgctgggtcatttaaggattctagttgcattcgagttttcttc

SEQ ID NO: 32722 - DNA, 672 bp, Oryza sativa
atgcacgatagaatcactaaaatatttgatcaaatatcagtttttaagaactcttttaggatatttaaccagcacaaattatgaccatctaaacttacggggagacacatattaacatgctcagaattttagatagaacattgagaggcattttgtcaagcagttcatgagcagcaacggcattttgtagcattaatacaaaccacacaatgctagcagtgaacatgtacaccatggtgattttcatcatcacaaaattcagaaaagccaccttacaatccgattggatgagtgtcaagcatgcaaggaatgtcaaaagccagaaacattgcaggcatcaagatgcttgactccgtcagaagcactcagttggcagaggtgatcctatcaggattcaagacatacaacaaactgaacgaactatattttcaaacactcaatcaaactctgcagtaccttccagaaatatttggtttgcacttcttcatcatttaagcagcaattgctacactacaaccaaaccaagtgataccaaattaaacagaatttgctcacctggcgctgaggggaagtagcacctgtatgctggattggggagaccgtgcactggacggatggccggtggtgccctgaacggaggacccgcgacgccctaaatcatcgatgggacgc

SEQ ID NO: 32723 - DNA, 1367 bp, Oryza sativa
cgtattgggttcttatatggactcctctttcaatattgcttatttttaattccaaatttcagttatttttcagattgtatttctacttggactcttttttttctttttctctgattaatgtgggaatttctagcctccacagcgaacgtggtgccttcttttcgagctgtcttaataatataactagctaggtggcccacgcaattgcgcggctagcacccaaataaaatcatatatttttagtatgattttaattaaaatttattaaatagctatctcattgtcttaagactttgaaagaccaaatcttatcatcgtcgtgtttttaattatatagttttttaaaagtcacaccagttgctacccattatgtcatttccttctttatttgcttgctcgatctaccactatttctaatcattctccttagaacctttaaaaattggatcttacagtttttagagtttattgtcatgttgggttttggttttataatttctagatgtcctgtcaaacgttgccattatactcctctatggcctgtccattgtttcttttctttattgtcattgagattttaaaaatcgaacataattatcgtttggcttcatttttactttttaaagtcccgccaaaccatcagcgactttgccattgtacttctctacggctcgcctgctgcctcccttctttattgtcattgagattttaaaatcgaacatgattatcatttttttttactttttagaaattccgaacctttaaaaattggatcttgtagtttttagagtttattgtcttgttgggtttcattttttataatttttagaagtctcgtcaaacgatgccactatgctcctctacggcccgtccgccgtctactattatggtcattgtgattctaaaaatcgaacatagctatcgttggaattcattttttattttctagaagtcccgtcaaccgtcggcggctctgcaactatactcctatacaccccgtccgatgcttctcctttttattgtcattgagattttaaaaatcaaatatgtttatcaatggggtttatttttttttactttctagaagtcccggcaaccgccttgctcgtctgcttcacggcctgcttatcgtccctccttttaatcgtcattaggattctatttggtgttttattaatagtttttatatgtcgtatcaaccgccaccactctactcctttatagtctagttaatttatctcgtcatgtgttttagatggtcttttctttcaatagtctttatttttatcacaaattttagttatttataaattttattcctaattgaaatcttatttttatttttccaattttagaatttatttttt

SEQ ID NO: 32724 - DNA, 551 bp, Oryza sativa
agcataaccacagccataaaaacatctgattttagccccatcacgatgctccagcacaatgaaatgagaaaaaaaaagcacccattatacttccatgaaagtttatcccatggcactatattaatcgattccacacattcagtgatcgaaattaacaacaatctataccctcaaggccacaacatatccagaaaaaaaacagtagtaagaacaaatgctatgtgctaaacgcacgctaatttcccacagcatttcattgcactcccccaagccatctaccacgggccacgtactacgaaatgctaaaagaaaaaaaaaacctagaccatggaactagcacatatgcaccaaaaccgctggatggatggatcaagaaccaccaccaccaacccacccaccaagaaccgaaacgggttacaggtacccctgatctgagattgcaggccctcctccgctactgtagcgacggaacgaggcgtaggaagtgcgggaggagcagccggtcaccttactcgccggggaaacgcgccgccaccgccgccgggctgcag

SEQ ID NO: 32725 - DNA, 1179 bp, Oryza sativa
cgccgccaactacagtgatggggaacttttttgttatccccgcctccacacggaaaattaatcaccgcagatcgcccatccccatttttaaaatcatttacatatcaatagcatattcttttaacatgaaaagtgtccgtccactgatcatgttacgattaaacctttggacatacataatttgcattggatttagacccttatacccgctaatcaggtcttcacagggaacggggacgacgagggacaaaggatcatccccaccgtacccctcgccacacccaacagggacaacccctagacccgacggggacatatttccaccattccgtgttctctaataagagaattccctacagaaaaaagggaagagagccccatttcgatacctatataccgacggtagtgtgatgaagttatatgggtataactatattcaccggggctcaaattctgatacctaccgatattacatacatacacatatacacacacgtaggtatactttcaatgggatcttagtgagctcggcgatttgccggccatttacatctatctatttgagctcgtgttagggagacacgttcgtaaatatgtaagtatggtatgtatgttatcttttacgtaataaaaaaagtccaatgaaggataaaagaaaagtaaatatattactagtcgtaaaaagtaattatcattcaaagatctgtaaaattatatacatatgtgcgcatgtgacaagctgcctttttttttgaatgtttcattactcaaccacttcttataagagtgaggatatgacaattttggaatcaaaattagcttggttaataatttaaaatactgccaaagcagtgtaaaacctggcctcttaaccaattcatgtgaagtgaattagaggtctataagtgttacgtacttgctttgcaggagaaatatacaagtaaaacacaagaacttgctatagccaactgtcctttcagtctttcaccatgaaaatgagtgttcacccaatcacccatatattctctagtacatgtcattagttttttatatcttcagagggatcttcacggacacttaatgatgcggtgaggccactaatcttcaattagaagatccagtcatacaatgcatgcatgcttaatgcattccaagctaagtaagttctagcattcatac

SEQ ID NO: 32726 - DNA, 652 bp, Oryza sativa
gtatatgccttcacgtttcgggtcagcgttctgcgtgagctcgatgagaccattgagactcgcggatccatctattgcgatgtcggaacgattgaaagtggtgggcttggagaaatcgtagctgaaagagagtgatctggagaagcaaggtagcttgaagatggacaaggaagcgaggagcaagagtgcggggatcattgagctcctcttggcacccatgactaacttggcacaagctcaaaatatttttttttcccaaaggggggaacaaattaatggcggcagcgatatctgactaggagaagagaattcaagaaacaattagaggtccaaaacaaatgtaacttgacgctggtaacctgagcggtgtggaacgaaaggaacgaaatgatcttcaatcagaaagcgcgaacgccacttcggatgtttggggacatcaaggagatggaagatggcgggcgtattcagagaggtggattttttttttcagtagttgatgtaatttcaccctgtacagaacactcccctttcttcctgagatccactaactaatgactgagccacgcaaagaaatggccaatcttcctcgctgcgactgcacacactatggggaataacctagtaacagtagtctttcaaaagtcaaaacaca

SEQ ID NO: 32727 - DNA, 534 bp, Oryza sativa
ttttattagataccacttaacattattcataatattatgtagtatttaatcgagtactaagttactatattttaagacaaatgtattatgttatcgtaaaaagaaatcagagaaaatagtgtatacgcttgctggaaaagacgtacttcttgtatggtcaatgacttgtatacgtgtttctaaaatacagtagactgtggactttgctattttaattagctggaaacgagaaaaatgcatgcatgcgaatatgcgatgcaattttgtggcgtcgcgtgcagtggaactggaacgagccaacgacgacgcgttcgcgagactagctagccaaagcacacttctctttgagctccttgaatgaatattttaagaaaccatatagttcagtgacttttctcatgcaaacgttgccacttgatagcacattcgttgaatcatgctgttctaatcctaggcaagtacggagcaaggacaagtgactcactcaataggggtcatttacttaatcagggtaccgagctcgaattcgcccta

SEQ ID NO: 32728 - DNA, 655 bp, Oryza sativa
ggcccacatatcattctcacccctcttcttcctcttctctccccttctccctctccatctctctcccctatcctctctctaggcgcgacggagaggcagtggcgcacggcggccggcgggagaggagggagcggcacggcggcggaggcatggctccggcggctgtgggcggaagaggaaggggatgtggagcttcttttctctctctcggtctctcccctctccacgccattgatctctccctctcctacttaccgcagccatggcggaggacgccccagcaacgtcgctgccgccgccgccgaggggagccagcacgcgtcggctgtcgcggagggaggctccgccgccgctcccgcggcactagccaccaaggccgcggaggcgctgctcccgtcgctcagcatctggccgctgtcgcagacattgatttgattccaagatttttttttttgagcaagggtcaagacccccatttcttttactagaaatgatcataccagtacaggttcagccaaaagcggcaagcgatttgattcgaagatagtatcagcttagctagcagtggctagctagccatgagtagtagtggcaaggagaagaagcagatggaccggttcatcgtgatccccttctcctccacctgccaaatgct

SEQ ID NO: 32729 - DNA, 869 bp, Oryza sativa
attaagtgttatgttttgtatggtcagcaattgctattgaatagcatatataatattgttaagagtaaatttcacaaaactattaatattttgatcaaactatcataaaaatacttatttaatttatgtgtcataaaactacatatttaacgttaaaattatcacaaaaccgaatatcacgaaactactatttatattgaagttatcataaaactattgagtttaaatccatagcattgccatcatattggagctatgataattgtagttttgtgattaaattggcactaaacttagagttatgtgataaatttgctacttgatttttatttttgtgacactctatattaaatctatagttatgtgagaaattacacgttaaatctataattttgtgataatttgatcggaatatctattgttaaatgatatgtgacatacaagcatatgagtttgcaagtatatatataatctaggattatgataattgactatgataaaaattttgacatgtaaataaatttctgctggaagaataatcatcttataagtgatctttattcaataagctgacctagtttctgcaatgtcgatttctggggaaataattaaagctaatcatgcctatcactaaacagtgtaaactttttattgaaagcagtagtatcaataaggtatagtccattatacgaaatagtaataacgttggtatcttctttttctaaaaataaatcatatgtctttttcaaatacaccctattttggtgttgggagaagattgaaaggtagaataggagcaactataggcgtgccgtctgccgatgaatacatctcattttgatatgtaccttacctccctcctctataga

SEQ ID NO: 32730 - DNA, 3354 bp, Oryza sativa
ataaacaggtatctcactgttggttttctggtcatcgcactattgcgtaatataagaagtaatataatacttcctatgtttaataatacaaaaagttataaattcaaatttaatattataatataaggatttctacttattcgcatgattcacacatcattttaataaatcttgagctaatcagatgatttaaaaattaaaaaatgataactaaagttgactaaagagaaatatttttctctaacattagtacttgctaaataatctagaaagttggattatttagcagttggattcagctccccaagcactagctaggcaacatggtcgtggtccaggtcgggaaaattagcagagttgcatgcaagctgtgcaggcattgcaatgcttgggatggtgatggtttatcgtatcgaaatacaacaattgatcaggttaagaattttctttccccgattacataccccatccgtctcacgtacacactcgcaagcgcactctcttaagacatgctctgctgatgagagcacaatctcacatatgcgtgtaattatagacatcaagatttaaaattaaatttgatggatgaactctacttcaaataatggttacctcatatcagcagttttatgtgtttgaaatagattatttatcagatcatctaattaattaatcgtagtgataaattaaatactttttgaaaataaacataaattaaataacttaaagaaagtggtttaagcaatgccatatgaagaaaaatttgttttagaggcatggggcaaataattcacagtaatgatatggtgaagtggctaaaaaaacagggagcgatcactaaggagatgagttctatatagcggcccgaactccactcacacatctaatttatttttttaggttactctagtcaactcggctatttcttttttatagagctaaaattgtttgattagactagcttcagttccaaaagtgatgcagctagagccgaagctttcacaaacaaacccctaagctaggtcttgaagctagggagctgatccagtcgtttctaggaaattgaacacaccaagtagatcttcagttgagatttattctacgactctcgattgcaagtgaagccggacctgtttggcacgagagcttcaactttatttctacctcttctgaagacggaactcaaacaaacagtttgatctccacgtaaaataaaacggagcggactgaagtgctatcacaaaacaactagccagatgaagccgggtttatattgctctacaactttactctaaacgtaactctaaaaattaaatttaggagttggaaccctatcaaacgtggccatagtaaattaaccgggcaatcgatcgaactcacgtttgcgggtgctcgctttgtcccgtccggccgtgcctggcaccgaaaacgactccccccgccccgcggcgcaaacggaggaaaaagcgctcgcgcccgcgggaaaaacccatcataagctagcaaacgcgcgcctcgatcgatcgcgcacggcacggcaacgtacgtacgcagaggctgcaggttcactgaacgcgcgcgcgcctacgcacgtacgccgcatgcgtcgcgtcgcgcgtgctgcgctcgcggagacgcgggcagagaccggcgtcgcgcgaggtggtggtagtggtcgtcgtcgacgcgcacgcgcgctctcgcgcgcccgccgggagagacgccccgcgcgcgcagcttcggatcaacttgccgccggtgtccgagctagaattctactagtacacgtcaaggcgtcaagatgggattagattcagaaaaccggctgctaaacaagctaggagaacttgttaaaaaaaaagaaacagggattgtggtttaagctataaacttttgaaagacgactattaccacgtctgtgtggagaactattaatctaatttttttaggaaaaagaagtgtttttgtttgtctaatatatatgaactttaaatcttgatctcctacttaatagcagtaatttcttcatatatacatgcatggctagctttcttatgtgcatagctagctactgcaaattaaaaagaagccaaccagagagcaatcaaacaacgattatatgataaacttaacacaagtcgcagctaggatgaatatatagatagctcaagatgcagatgtgagtgaagtactgtgaactaattttcctatctagatcaccgtggcatctgctgatccacagattaccaacacacgacaccataaggcaaactatataaaacaggccaagtgatgtaggtgggggactaattaatcaattaaccattaattgcgtttgattgaaaagttaatcaagcattaataatttgcatgaattagcaaccgacatatttcctctttcatcgttctggtcttcaggactttaggtcatctcaccctccgtccctcgtactacgccttagctaaacaatcggcaaattgcacaagcatgcattcaaggttcagctcacctggccacatgaactacccaaatggaggccgagaaagtgcagtccaagacgatgatgaagaagactctggattgctactcctagccagcaattcattcatttcctaggaattcttgtactgcattttgcgtgatctaagcaacaatccagtgttattttattgctgcaacttgcaaaagttgcaagaacgactgatcaggtcgagaaacagctcacacatttcatttgtttaagactagtagacagtatagatcgagatggatggatggatggacccttggtcggtcatgcatcatggtactactcctacctttctctcacgaatctatcgatggattcagctccccaatgcaagaaaaagaataaaggtcttggtccagtgcaagaagggtgaagagaaagaattaaaagttaaacccaacttgatgaatgatagagcatggaaagagctgcaacttgtgtatatattcagctctctagctgcaactgcaatggttgatgacgatgacgacgacgacgacgacgatgcatgtacttggataggatgattgattggtgtgtccagtctgctaattcaattaattttgcctgtcctagatcgaagctcagagagtttcaacagtgttgtgtgctgctgaagtacagactatttaggccacaatttcacaagttgagttcagatctagagttgcatatggaatagtatgtactagtatatgtcatgtcgatctctcttcattgcatgtttctccaattcagtgatgaacatgcatgtaaaattgatagtactatatagtttggtgagacatgcactatcaggttcaaattgtcaaattgttgtgag

SEQ ID NO: 32731 - DNA, 572 bp, Oryza sativa
tacaaagaaaaaaaatactactactcctttttttttcccggaataatacgaggagaaatttacccaagggggggggggtaaaaaggtggagaaagttaaccatcaggcccatatatattttttaatgctggaacataaacagatctggatcaatttaaatatgaaagaaggacccttgagtcgatccatctttgaattcagcggatataaaaatacgtagctctccgaccaaccatacgcaaacaaactatttgaccacaacgtgaagctactatctctaattaatttattctatgtatttcggtaagactagtagtactatacgtagagacaaggtgaatgctactactacagtatcagagtcagactccgaagtctccaaggagcttacaatataattacttaagtattttattagtcgaaaattgaaaatgtgcgttctcattaaatattgttgccgaggttattttaggcggcaaaagccagcatgggaccaattaggcttctaatttagaagttacttagtagtttgctagtgctttggctttttagttacaaataagtatatggag

SEQ ID NO: 32732 - DNA, 654 bp, Oryza sativa
ttacgaggtacatacgcacagcttaaggtacttgatactgctactactttttggtcttttggatggacaatggagaataaattagagagtagtatggatctactatggagtatatgtcatacgttaccgtcatagacgtcgaccaacacaagaaggggacttattaattattatagcttgtatacttgctaaactcatatgaactgattaagcaacttaaaatctgctggcacttgtcaggcccatatatattttttaatgctggaacataaacagatctggatcaatttaaatatgaaagaaggacccttgagtcgatccatctttgaattcagcggatataaaaatacgtagctctccgaccaaccatacgcaaacaaactatttgaccacaacgtgaagctactatctctaattaatttattctatgtatttcggtaagactagtagtactatacgtagagacaaggtgaatgctactactacagtatcagagtcagactccgaagtctccaaggagcttacaatataattacttaagtattttattagtcgaaaattgaaaatgtgcgttctcataaatatttgtgcgaggttattttaggccgaaaaaccagcatgggacccattaagcttctaattaaaaagtactta

SEQ ID NO: 32733 - DNA, 714 bp, Oryza sativa
ttaatgggacaagtagtactgtgcatagtgctagaaatccttagatttttttaacaagattcaaatgctagaagttcttatattttggaatggagggagtacattatttcgtgtagaagaacgtgatagcattttgccccctcctgggctcaatttctaggtgagccactgctacagtagcatgtaggaggatcagccattcttgtttgcatgggaaatattgtgacgagcagccattcttgtttgcatgggaaatattgtgacgagtataaaactactgaccaataaatattgttctgacttttgtatgtggtcctgctgtatataacttgtcaatttgacatggttgaccttttttttttgtggaccatttgctactaaagaaatcttcagtggtctggaattatggtgctttctttgcatttcacaaattagcttttgcacttctgccctaagcccatcgtgtcgagagagggtatcattgactaattacacatagccaactttactcaagctgaggcatttgaagttctgaacttgttttggactgtagaacgttgcttcggactggtaactcccaatgtgttattccgtccgtttcatattataagtcgatatgacttttttcttagtcaaacttctttaagtttaaccaagtttatagaaatatatagcaacattttcaacataaaacaaaccatcaaaatatattaa

SEQ ID NO: 32734 - DNA, 646 bp, Oryza sativa
agtgaacgtggagggggttatataagaacaggaatgagaattatggtcagatcagagcaggaattgcagagaacatgccggcgatatctcagtcagcagtgcaagctaggctcacatgcatgcaaggaaaatgtaagccgaaccctggagatggaattgcgcgttcaatcaggtgattgatacgctgtaaacctgcaagctgggcatcatcatcagcacggcttagcattttctcctgataatcatgacctggaaaataatacatttcatgcatgtaccttgcatgttcagtaatccgtacttgccggcataaaatggatctacttagatattagtctgataatctatggacaaaaatataatttggaatgaactgtgcatgcatgccatggctatcagcatctatgtggaatttgcaaattcttggtaggaaagaaactctgagccacatgaggccatgagggggccagcactgtcagcacatggaagatagctaggaggtggataaacaactgatcagattgattattaactcagcgcctacttagatgtctaatcatttggaaaaagctgactaaaagagtcagcagatttaattagccaccggtaccgcgcgcggtacggcgttgaaattgattacattttt

SEQ ID NO: 32735 - DNA, 619 bp, Oryza sativa
cacacattcatatagatctcgtttttcttcctaccaagtagcagagaaacttctctttcttttttttctttctttcctttttcttttctctccaataaacatgcgtgcatgcaccgatattcaactcattcgccttttccttctcttcccatcgtccttgcttcatttgccgaccaccctccatcgatttagattaattaggcctctccttccctaataatttgggcctttcattcattcattcattcattcagacgtacgtgggggcatctgcccattccttccttctttcactcgcttaatactgctctacgtaaacaccacttaaaacggaaaatgatcgatcgaattagataattcccttttgtattactccctccgtcccattataagtgcaaccataagttttcgcgtccaactttgatcgttcgtcttatttgaaacttttttataattagtattttcgttgttatgagatgataaaacatgaatagtactttactcgtgacttatgtttttaatttttttaaaaaaaattgaaataagatggacggtcaaagttggatttataatgtgacggaggtagtagctaagtggtccttggtttttctccatcgaa

SEQ ID NO: 32736 - DNA, 549 bp, Oryza sativa
atgtgcgtgctcatctttaatatactaatattagagtataatgtgtgtgtgggcgtttatcggagtcacacgttgtgaatgtttacgtttatactatgtttttgagaaaaaacaaaattaagatacgtatattaataccactataccgatttatcttttttatgggactattcttgaccaacttatacgaagctctctctctcagtagggagaatcaatatacagttttattattttcttactaaccgtacaatttgtaaatttgtttgaacccattagatcagtgcaatattcatctcagttagagagagcaccttaattaaggccgcattctttccataggttcgtatggagattttaacgcatgcaggatgagaaggcttattagtatatgaataattaaaatttaactattataagcttctatgctataacatttaataatttgaaaaacatgctaatgaaaaataagaagttgaagtttcgagttgaagaaaataactaggctttactgtatacgtgcaatgaatcttaacttgttaagttcat

SEQ ID NO: 32737 - DNA, 544 bp, Oryza sativa
ttccatgctatctcgtgaacaatgcctcttttaagttccaagctatctcgtgatctctaaactagcgagttgctttggtgcgagtttttctgtgtagatttgggctgaaagcctgcctgagtgtctggcccgtgagagaagcccaaggctggaaatctgcagcataaccatgggccataaatcacatgtagcccatatgacactgcatgttaacaatagcacatgttaacatgcaaaaacgcccgttcaaaaaaaaaaaaacatgcaaaaacgtggtacatatgtacacgcagcataggtagcactacttgctaaacttggatatggacggcacaaacccaacgtcccaacctgccacatttccctagtggcgacgggtctatttttttcgagacaacatgcacaaaatataaaatagtacgacgtttttattgatatacataaaaaatataagttagaaaacagaaaaggacagtcacactaagcgtttacgtctgatcctgatgctgaaaaataaaaacaagcactcaacatccggaatggg

SEQ ID NO: 32738 - DNA, 572 bp, Oryza sativa
tattctagttccatttaaattattttccttttacagatcaaggaagtgcaaaaaagttatgtagctgaagccattgggccttttgcttgctcaaaagatggggtgtatctggttggtggtgctagttctggacatacttatatttgggaggtaaataaaaaaagcttcctctttctacaaaagaattaaactattcatacgtcgttctattctagctagattatgatcaacaagagactcttgatgcattgttcgatgtttgaattgggtatctttatattaaaggaaggtatggcttgtgtttatgttcgctttttaaatcattctacgaattatcctgtcatcactaatgcataattatatccaacaataccaagttcttttattttgatttatgaaagacatggggatttcctatttaaacatgtatggatctaccgaacttcaactggtttgtccagcaatacgaaatggagtttgcactaataaaagatcacatccccctttatgccccgccattctttcattaataacctagtattcgttatgctccatctttatcgaaagaatgc

SEQ ID NO: 32739 - DNA, 697 bp, Oryza sativa
aaactcataacataccactgccttacgtgttactcgagataagcggcttgtttggtaagcagttggctgagacatgaaaatttaaattttgtacaatcatatggacaatataattttgtgaaaaaggaaaggtgaaacaatgcagagtttagaacaaggccttagcataaatactgaagatttgtgctccatcgttatttctttttctatagtacggtcaagacatgcatgttctttttggaccaaagtattgattttatactgagataccatgttctatattcgttggatgttcttctcttttcttcgaaagcctgatgctgagttgcctccacgtgcaaagtgttcttccaagagaagttttaagtgctaatttcagccccaatttcactcatgacacacgtacgatggaatcatcatggaactggaattgttgcgtcaagatcaaacgcagctctccttcacaccatcccggatcttgagaccgatctggcatgagtaacacctacccgcactttggcggtagaaaccggctacgctagggagaaggggaaggatcagaaggaatagttaccatcttccacgcgagtccctagagccaacggatgttcctctcgcgcggccgcggcggcggcggcagcggcgacgacgaggcggcggcggcggggagggaagacacactttgggctgcaggaat

SEQ ID NO: 32740 - DNA, 647 bp, Oryza sativa
ctgatgtgagagagactaaaattatccaaaccgaagtattggcaggcatacatgcacggagagttggagacgggctggcatggcccatttggggagacagtagcggagtacggaggagcgacggggcaagcggagccagcgcgcgaattcccgtgagacgcgtacctgcatgcaaggcgtggcgcgcccaggtaggctcgcgctgccgcggggtgacctgtgtactgtgatctatatcctctcgctgccgcgtgtggttgccgactgtacggacaccccagccagcggcgcgacgccccacggccttactatgcccttctcgcattggaccgtcgaggagtagcccgtagttactcggtaccctagtacttgccctttccgtagcgtgatggttgcgttgggttaattggccccccagctactcgagttcggacacgtcgaagccccattggcccacaccgccaggtcactccacatcccaaccaacgcgattcgtccacgaccatgacatgcgatcaccccaccccctccctcaagtccacgcacgcgcgccgcgagccaaaaaaaaaataccccaaagcgaccgcggccaaggaatgaaaaaggtcgcgagaacttgtggctgggagggtccagggcgcgcacac

SEQ ID NO: 32741 - DNA, 625 bp, Oryza sativa
tttcttaaccggcggatgataatcgtcgcgcgagatgaaggaaccgaagcaagctagggcccgggaacttcagggacaggaaacgacggcagttcacgtgcgcaccgcgtcgcccggtagcccctcctcgcattcagtgcacccacctcacgggaccgtctcacagcactctgcaccctgcagcataccgggcaccacgcgaaaacacccgaataccgcaccttccaaacctacgataatcgagcagtcacttcccaccgttgatacctatgtctcgaattagtccaatcatgtgctcaatgagagactgttctgacatcgtcgtcatcaactggtcttgggcatggacgagtaaaagcgacatcggcagcgagccgttgagatcacgcgtgatgagctcggtctgcatatcatgggctttcttcaactgtgtgtccgccctaatcatgcactgttcactctcagtcatctcgccagcccgtgctttgtcaagagcctgatacagcgacgcacgcgcctcaccagcgctcgtgatgatggtaaaaatggcggtttcgatctctggcatcaccgccccaccatccgggctgtcactcccacaatatgaagtcatgctccaccttct

SEQ ID NO: 32742 - DNA, 522 bp, Oryza sativa
ccaaatccctttatccaagagttgatattgatgccattgatggctttgcagacgggatgagcgaagaagctgctcttgacctcatcagtgatgcgcagaaagcggctgacaaaattgctgctgatgtagttgagagattccaagatgtcgaccttcggccgactgggtctgataagtctgatgatgaaaaaactgatactgattaatgtaccaatgattttgacgattaatgatgatggaggcacaatttgtacaatactgatgaatttatgctatgcttaatatcttaacttagttcctgatttcttaaaagtttttgtcgaaccttgttgagcctaaaacccgcaaaagttgttaaaaaactttcagtcctcattgataagccaagaaatcaaacagggcaatgatacatcaagtaagcaaattgaattgataaaaatcacactccattattattatagtagccccctgactgaaaacttcaagaaaaaacttgaagttagcagtcaaagaggaaagata

SEQ ID NO: 32743 - DNA, 675 bp, Oryza sativa
acaccaattcccctcccggtttccccctatttccactgcgccgttgattatagctcgccgccgataccccgtcaccgaaggagccgtcgatactagcatccatctactccctccatcccaaaatgtttgatatcattgacttttttaaaaatgtttgaccgttagtcttattcaaaaaaaaattaagtaatttcctatcatttgatttattgttaaatatacttttatgtatacatatagttttacacatttcataaaagtttttgaataagacgaacggtcaaacatgtttaaaaaaatcaatagcgtcaaacatttacggcttgtttggtaactcgagggaagaggattgagagtttacacgagggaattgatgacgagattaagctgggaatttgatttttaatcccaatatcttgtttggtagaggtgatgaaaattgatagggagtttagttggagattagatcattaatagaaacggatggctgagatttgcttagacaaagtaaaggaggaattccctcccaattacctgcccctacccaggtattgaaaaggaggaagtttcttcctcaattcctcatccccatccccccaaaattcccatgtctcccaaccaaataaatcacttaatatcctcatccatctgaactcccaatcgggctgcaggaat

SEQ ID NO: 32744 - DNA, 775 bp, Oryza sativa
tgcagcaactggtttctggtgtctgctcattatggctgcgtaagttgacctcttctcattggagatggacgatggagctggagcccctctatatatgtttttctttgatgaagagtcaggtgttggtaacattgatctcagtaatgtttttgttgcccctgtctttcctgagagctgccagggataataccaagatcaagagaagctctttgatgaacaaatacattctagaaatgtgtattgcaattgaggaagaaaattggcatctaggatctttagcattcagtatagaagactacagagcagatagtatataccctggaagctgaaggtttgactggccgagagattggtaactccttctggaaagccatttgacaggagttattttcggccaacccagcaaaaaaaaaaaaagagaggtgttggtttccatctctatggaaggaaacagtggtgaagctggaggtgtcttcagcctgaaacaatctgttcttctaagaaacagttccaacaacaaaaggatacgatctagagtgaattatatcctaccacaatcattattctcacactttgacaataatggaagaagaagcatggaaacaattctggacctttgcatggtgacaagagtgagataatggaagagcaaagcgtatgcacctcatttgagagtcagcaggaggggatgagcctttttacaagcttcttcaggttagattccagaccttgattcctcctccatttctgttttcgctgctgctggaatgcatat

SEQ ID NO: 32745 - DNA, 585 bp, Oryza sativa
ctaataagccgttttgacttattaggaaataagccaaacgatggggacctaaataaatacatgtttacttttattatagagctttgaaagatagatccatatatgttattctagttcttttaaactaaatacgtttaaagttattgatagtcaaagttataaaagattgactgcaatctttgtccaaaacgttatttcctccgtttcataatataagacattctagcattgtctacattcatatagatgttaacgaatctagacatatatacgaatctagacatgtatatatgtctagattcattaacatctatatgaatatgtgagatgctagaatgacttacaatgtgaaacagagagagtaactattatggaaccagagggagtatgcttactaaacttgaaacattagtgcctgttattttcttgagttgcttaaagtcttgtcagtggcactattcctcttggacccatttgtgtctatagattacatgatgtgtacatgcatatagtttataagtagtatgtaaactagatgaatgggcgcaccctgacgcgccgcctgtggatagttggattgcgggg

SEQ ID NO: 32746 - DNA, 539 bp, Oryza sativa
aaaaatagtttttcttcattgattttaaagaaatatacgtgtttacaatgaataggcagaatgatatcgttgtcgcataggagtgatgcgaattcgcggcaagttcacgtggtgagtgcacgacttggcaaacttacgacgagtttggagcgaattactcacgctattgattgattaattaattaattgaccattatttttaatttagcgtcattagctgtcgattaaaagtgattaaattaatttatgccgcgaagattaatttatgctcgtgtcgtcaatgaggctgagttttttccccaactttcccaactcactttcctcgttttccgcgtgtacgcttttcaaactactaaacagtatatttttttgcaaaaattatctatacgaaagttgctttaaaaattcatattaatccattttttaaaaattagtaaatacttaaataatcataagaaaatatgccgctccattttgcgtgcacgggacctcacctcccgaaccagccttcttctgctaaaaagtaatgtaactcacat

SEQ ID NO: 32747 - DNA, 621 bp, Oryza sativa
gaagttaagctaactcataattgcatgccagaagattgtagaacagaatagcagatatcaaagagcaaggcttagacaaaccagacacactagtttgagaatataatattactccaatattatgaagtaacaacttccactggaatgtaactccaatgcatagtaaaactataagctctcaaggtggcatgtaaaacggataaaaaataaaagaaattaggggaacgcattcaaaaggtcactaaggacatatcagaataagagctagaatatactgagttaacagaaacaaccaaaacaagcaatgaatgcaacaaaaagatcacaacactaaactcaaaacataaaacaaatcgctaaatactgtactagtagaatggtaatggaaccaaaagtttgtgaaacattaagggcctgcttgggagtttagtttttttttgtaaagtaaaacacctgtaaatttggattacccaaacataacagtgaaaccccctctaggacctgcttcatctgtttgtaagaactgaatcctacatggccatagcaatgtgtatgaacatttgtgtctaacagaaatttcagttcataggatcaatctggaactacaaaatttgataaaca

SEQ ID NO: 32748 - DNA, 675 bp, Oryza sativa
ccgattcaccaacccttctcctccatcggcatgtcgcgggggggaggccggctgcccccgcgcttctctctacccagctgtacctgtacctgtagtagaatcgcatttggttaatttggtgcgtcgtctcatctactgaggggatttagagggtcagcctaacgggattgtggaggatttgatttttctttttgttgttggcatacgatgaatcgaggtgctagttttatgttcgtggatttgtttgagtgtgtcctcttaagagagcctaacaatgcctattaactgaagatagacttttggttttatgcagaatttatctagctaagtcaatattggtagtgaagcttattttcccttttttccctcctggaaaatgcaagtgtagttttgaagatgtggattggggaatatgctggttgctagaacagttttttgccacattttggttgtcaataaaagaagtttgtccctttttgatgagaacaaacatatagcccttagagaatgaaatttgtagcttttaaaaaaaaagaacgaaatttgtcagtcttgatcaccttggaaatttccatactagactgaataaaatccctactggtcttcgtgatactttgagtctacagatatatggcacagtgcagttttctggaagatgtcacatgaaggaaaaac

SEQ ID NO: 32749 - DNA, 670 bp, Oryza sativa
ctttacttgttctggaatcctatatctttgatttgtgaaatccttgtgttcaagcattactttagatggttaaatgcatcaactttacatgatgtaccatgggactaaacataatttctctaaactagattatcaacatggctaaatgttatatcaaacaatataattctcaccagaaaacaatataaaattcaactgataattaaagagaggaggttgcatttattggatattagaatgtccattcgatatctttgtaacttaatgggtttatgcttcctaagagcacgttgatccatcttacgagtcaaactgtatatggtatcacatatatatataatgaatcatctaggatttgtgtcatcaagccattctatgtattccaatgtgtccttaattaaatagaaatagttccaatgcatataattattagtgtggctttgcagttcatgaaacatctaattgataaagtacaaataagatattttgaatgttaagcttcaattaacatgctaatgtagtatggggacaagactatttgttagtttcttatttaaggcagtactatttgggcttttcgcatgctctctgaatttaatggattaaatgctattattattttattatattggggtagggtaacattttcaatgcaaaataggtgttgttt

SEQ ID NO: 32750 - DNA, 4881 bp, Oryza sativa
tgtcaaacattttgaaacggagggagtataaagttttgagatatcattgaacacctccaaaaaaattcttacagtgatgcatgctgcgccgatgaagaaacaaatcacaatggtagctgtagatgttactttctccgtttcacaatgtaagtcattctagcatttcccacattcatattgatgttaatgaatcttacatcaatatgaaggtgggaaatactagaatgacttacattgtgaaatggatggagtaattattctctctatctttattctcttttcgctttaccaaaagagaattggcaacatgatgacagaggctcgagagaatgaagacagagttagggtgaattcttttgtgtttgtgtgtgcgcgcgtttttgaaatcgaatgcttttccctgttcattgatctaaaatttgcaatatgctgatgataatcgttcgggatcggatgcctcttccgaatgtacttttttccatccaacatcgaatgtactaattcttataataaacgactacaatcatgttagttgcagtgacctaagtagcactctaaagtcctgagtttaaatcttcatatgagcgaatttcatattggattgtttgaggggctaaattctcaatttaaaaggttgcatattttatttgggcatcatttgattttggcatacagatggctttgcccagtagtttaaattttataaataacaaaaagggtctagaaatacaaatacaaattacatgggaaaaaaagaaaaactcaaagctttatgaagattataacctatctaaaactctctcttttagatcattatattcatcctccaagatacaagagaatctcattcttgaaactagctaaccatctgtcgacattaggtgctaggtgctcaaaaaaaattaagcattccgctgcttccatatatgtcagcatgaagattattactatcttcaagaaatctttcattcaaaagcacaatcttgcaaaaactttcatcttggtagaaagacaatgacgtcttccaggaaattctaaacttcctccagtagggcttactaaaagtgcaatcaaatacattcttgtttcccctatcaccactcactcactcaggcaaaatatgcacatgataaatccgtgtcctgtggagcacaatgttgatcatgtcattgaacaacagccaaagaaacacttttatctttatgacacattttgatttccatttgcatgataacggccttgcatggctgcttaaaaaaaacaggctatacattcccgaatttttttaaaatagtaattaataacctgaaaattaaattaatagtaaatgaaaggtttaatttataaaaataagaaggacgctatgtgcaacagcgtccaggcatggacgttattcccgagaacgtccagatcaggacgctgtttgtaacggcgtccaccgttggagccgaaccaacctacggtagggaagcctccactcgcgattctttgtcgggtcgtcgtcctcaacgctgctcgccaaggaaggcctccgctgcgtctcgctcggttagcataagcgccctagccctagccgtcaggttaatagatcatatccgatcctgctgtccgatatgattcgacctatgcatcctaattttttagcgcacttcttcaaattaaatggccagctcgatcctgcaaatggcttctctttttttttccctaacgaatcgcagatggctactcttgattcgatacatgcgtgcctgcaactagctgcttcgtttatttatccagaacgtcctactgattgctccgtaaaagctagtagacctggttaataatgtactcaatgttagagcaaacagatcgatcaaggatgcaagtaacgctaatgcatgctgcagtgctgcacataaatggagaattggtaacccaaaagtgatggaatacagagattaataactgattatatatgtatgcccacatgcaaaacctaaacgaaaatcaactaatatccagtccagagcatatatacatcgttttcgaagatcagataagcagccggcgctgggttcatgtggcggcaaatcgatcctcagcagacgtcgcgagcaaattaacgggggcttctggatcagggcagagtttaacgaatggcaacgtgcgacaggaagttttgggcgctgatatatgctgacggtgctaggagtgactagtgagcgcaggctccctggcgagacgcgttgggggataacgaggctggtttggctgcaccaggagacggacgcagttgcgaacagcgtccccttccggacgttctcaggaacagcatccacgtctggacgctctggtagatagcatccttcttatttttataaatccagccagcaatttactataattatttaatttataggatattaattactatatataaaaaaaatcggatacattctctgtgatgaatatgatggcctattccataaaaatcttcaagttgtgtggatggactgtatatgtgcttctagttgaatgtatcatcatatgcttactatgactatgacagtggtaagtgacatgtctgcttttatctatcaaacattatggctacagaatcatccttgtatgtaaaaaagagtagagctagccttgcatgcttaaccattttaacggaaccattccacatgtctttctataacaaaagggtttgcccattcccttcgaattatgaagcatagtgagatttctgtaaataaatttgatagaccccttattatatacttatcattaccctcgattattgtttggcaaaatttgctatatgatatctaaaatttgtgtaattggttggagaacactgaaggcactattttataatttttggagaaaaagtggacaaacattttgagtttaaagttttcaatttccaaatgaaggttttgaaatttgagttgaatgtttttggagttcaaattaaaagtgttgaaatttggttgttttttcaattttgagtttaaagtttgaaatttttcactaaaaaattcccaatttccttttcagatttgagtttgatacactccgtaaaaaataatgtgcgtcattgaaaaaagaaaatcatgtcgcaattcacattgcctatactgtcctcaccaagatcgagtcggtgtttgtaccgcgttcctgttcctcgtagttctatgcataacagtgcaagccattttctcctgtaaaatcaaagtgtaaaatcaaagtgtgtttgattgttattctgtgatgaacaattggcatatgagattattgattttgatatttggagatcattgacgaagtggttttggagatgattgatttgcaggtgatgaacagagactgttgctgacaggtagtgaccggtcaggccgggttgttgtagtcagtcagaccagaggtatgtgtgcggttagaccagctagctcgtggcttgaccggccggctctgtaccggtttcggtttagggttgattctttggatatccatggacaatcaatgtttattctagatggatactatgcatatgtaatactgttgttcgctaacaatgagtcaaattggtgagaacttgtgctcggatattgtttcttggttgatgcgtttgtaggtggtcttgatgcctcgggagagtgttgccggtgatggatcgggagtcaacttgggataagatgacgtccggacgatcagaatatcacgtgggatatttaagctaaagatcaatacacgtggttgtgtgtatgggatacatagccgaatttagagggagtccaaatttggttcaattggagtttgtaaagtttgtttcttgtacggaaaggtttcttaggggattatgacttcttgtacaaggttggtctgtggctttaggctgcttacgttgggtataaatggagaaggagggtgtgtcattctggtatcatttttgatagagttgcgttgagataagataggcatatttgtaatctctatacatccaaaacttaaatgaagagcttgtcttttcgtttggcaatatttgattcaactcctgttcgagagagtttatagtagctatagcttctcttagaaactccagctgtcagacattccccaaagagttatttttaaccagattctgataatttgttgatgtagaatccatataatgaactagaagccaaaagatgagaaacccaactttctagatcttaccaacagcttatcagaatcttaagttcccaaaaacatgatttaaattgttgactctatccaaacattcatcttaatacttctgggttatgcagacttttggataaaacgagtaacatagttaatggacgaaaattaaaccatggcaatagttaagggacagaaatagactttgtttaaaataaagaaaagagaagagctcataattggtcggtgctgagtcttttgacgcagctttagaatctatcgagctttgttctacttttctttttctagcaagacaaatcattaaataaaatgaaaacgtactactgtacaaaatcacagtaaaaacacaacaaacacaaaagaaaacgaaataagaaaatactttccctattattatatacatcctgagtttaactcggtaagacggtaaagtctcaggtgagtacgccaagactgtaaagagcctttccttcccacgcatagtagtagccatagtcgatacagcaaaagattagcatgagcctcacttcaggagacatatacagattaaaaattgggcaaggaagcaaataattcagaagttaataagaacaaataaatgtaaagcgagaggtattcaggtttttttgccaaaatgaatacggcgaatagcttcctgagaacgtcgaaacttctgattcacatctatca

SEQ ID NO: 32751 - DNA, 2576 bp, Oryza sativa
ttcctgcagcccagccgagcggagcacggtaagccgagcggagggcggcgcgctcgatggcgagggaggccggggatccggcaccgcggtggctagatccggtgctcccgcggccggatctagctgcacggcgcagggcgacggctccatcatgggcacggaaagctacggctgaaggccgccagcggcggcggcagcggcacgagggccgcgtgccggcgagggaggactgtcgcccgcttggcagcatgctcgtgcctctctccggccggcctggtggtgtgcgcggggaggagctgtggggtggtggactgggctagctggtggctgagaagatgatgtggtggttcagcgacggttgttgtgtgaggtggtggtggcaatggatggaaatcgctggcgaaagccttgcttagcacttggctggcatgacgacggcgatgccctttggcaccgtttcctttcttggaggcgtagttatggcatttttcttcatcgctatcaatctccaggtgaaaactatgttccggtttccggacggacggtggcggcgtttcatgtcgtatccttcattggggcatcgtcttggagaaccttacccttgcttcgattactgttagcgaactcctgtgtcagctcgaagcactagatgcctaggttttggcgaggccttctccttcctggctccattcttgtattggtggcatccagcttcttcatttgtctctgtcaggtggagtcgaagctgcaacgtcattggggtgcgacgttgcttggcaacgataacatttgcagtttctctctagggatgttggtgttgccagtgcaggttttggtgcctcaggggctttggctgatgtctaaagtatgagcttggtgttgttttgctcgttttggcggtgcctccaatgatgttatgatcgccgtggagtcggagctctgggtcgctgggcggcaaaggttggcaacgatgacacgtgccttgtgatgtcaaagttgtatgccgcttcttcagcttttcgacatcgatgttcgcctttggattctgccgtcgtagtttggttagagttgtgtggtgctcagtgtgttgtgttgtttgtaccggtcgtggttgaggggcttggcgagtctacttgccgagaggttattttttctttttctgtaacccgtctagttttttacttctgcttaattgaaatataatttgcagttccctgccggtttagtttaaaaaaaaattatatgtaacttgatcatttcctttttcaaaaaacacagcatcccaagtggctagtgccgttgacttgcaagcagcaagtcttgagttcgattaccaacttgcgcgtggaaaatttgtaagttttgaggaaataaatcttaaaacaaattgtacatatatttagtatatgcttaaatgttgagctttgtgtgctttagccaaagctcaaacgatgagaaccttagccacgtactcctttcgttttttaatatatgatgccgttgacttttagatattcatcttatccaaaaactttgtgccaacattaaaaatataagtcatgcttgaataaccttaatcataaatcatcataaaaaataaataatgattataaagacgaatagtcaaacatattaaaaaagttatttgtattatatattaaaaaatgaaggtaatactacttaaaaacttatcagtgttggacaaaaatagcaacacacatagaagagagaacagcaggacgtgctgcgtcaggtggcatcgcgtccaggtgagccccgtcatacatgaatcgataaatcatcttgtgcataaatcatattgaaaacaatatttttgccaataaatacctctcggagcataatgaattgccctcaagaccagcaaatcagggcaagtggaacccagatctcaccaatcagcatcacaccctacaaaaagacatgcattcagtgttggtttcttcgaaaaatttagatcggttctccaaacagaaaaaaagattgaaattttactagttagagagaagggacagaagaatcacttctcatttggagctgggagagaaagggagagagaccaattaagaaatgatagtgaaattgaagcaataagcaaagtgcgtgtctgaggatatcaggcagaagatagatggagcttagcaccagtgatcgatgcaactggtatgaatatattgtccctagtttgagtttcgctccttttaacaaagcttccaatgcgtatcacttttgaacaaagcaaaaggcaaagctctagcatcacttgtctgggtagtttataccttacttcctccgtttcacaatataagtcattctagcatttcccacatttatattgatgttaataaatctagacatatatctatctaggttcattaatatcaatataaatatggaaaatgctagaatgacttacattgtgaaacggagggagtacttatgagcaacaggaacaaattgtgtattgccatatacggaacactaacacacctttaagaaagcgaattacgtgatgtactccctccgtttcaaaatgtttgacactgttgactttttag

SEQ ID NO: 32752 - DNA, 1987 bp, Oryza sativa
cataataaactagtcctataaatataagttttttttaggcgcctcaaaagattagattgtaaatgccttttgaacaatgcttggagaaactatctgtatggtctcaatttcttaaaaaaacattttgaataaaaaatcagaagcatataactcaacttgtcaactgtctaattccctcaaattataaaatatagagtaaatttcacaaaactataggtactttaatcaatctatctgaaaactacagttttaaaaatgcatatcatgaaactacagatttaaggtatcgtatcagaaaactacgtatttaaaaccagttttatcataaaactaagacttttgtaatctcaattgtgatatggatataaactccaaaagatgtagttttctatgacttcttcactaaatatgtagttttgggatacgatatcctaaacatataattttgcgataaatttggggttaaatatgtagttttgtgatacatatttctatatatgtagttttgtgatagtttggtgaattcatttgtagttttataaaatttactctaaaatgtatgcttttatggccatcagcctgtccaatacgccgaattggctggtttggttcacctactcgtttgcacgtatcaattgccagagcttaatcacgtcgtctagctgcacgtgtctctgccttttttaaaaaaaatttctcgactgtttgatggcacgagatggtcgcgatttcagcagtaattcgttaccggtaggagacattggggcctcgtagtttactctgcaaccttatcaacctctgtctaaactttaatttgaagttaattttgagtattttcaacgtagtcttttttttttaaaaaaaaattagcttttaagctgctaagagcttatatatatatataagttttatacatcaattatttttttattactaataaaccattacaatttataattagttttggtcacgatcaatgggggcaatttcttgtgtcttcccggtgcagcccaaccggcaccatcatcccaggaatctgcttgtcctgctcgacttggaagtaagctacagactactacagcatatgcaggaccaggcagctccagaacacacatactacgacattggatattcaacaaagtaatactagtactaaacaacttcgtttgttacagtactagaatatacttattactcatacataagcttgaaactgttaaacctcaaccactcatgtcggcatctcttcagaacttatcagcaagcgaaagactggagaccggagagaagcagtagcagcagcatgcagtaatcaaggaccaatgcctaatgctacagtactctctgtttagtatagtgatctataatctgtttgttactgaggctctgagcagagaatgcagcagtacaagtatggcctgatggccagcatctaccctgttgatgattgctttttatgcactgcgaaagaagagagagcgaggcacaggcaggcaggcagtcagtctcgggcctgcactgcctgcttctgcgtgtgtggcaggagaggcaggagcaacggctttgacgcgtcaataggtgaaattctaattacctgttcagttaataatagtagcattttcaagtaaacttggataaatattactgtaaaaacttttactaatcttgatatgatctttgtaggtatagccaagctttaggtggtgtttttttcttctgaagatgaagataaagatgaaaacgattggtattaacgtatgattgattgagttttaattattataaacttaaaaaataaattaatatgatattttagagcaacttttatatagaaagttttcgtacgaaacgtaccatttagaagtttgaaaagcatgccatgaaaatcttaatcttcatccaactcttattgaagaaaagaacgggaccttagtagtgacaactttgtaaggttccatattacttgagtaatgctaaagtcacacaa

SEQ ID NO: 32753 - DNA, 1324 bp, Oryza sativa
gggtcatacctacctccactccgctgaagacagatgcgacatgggggcacagccgtccgtccagtcagacatgaccggggacaggccggtcacagaccggtcatttcctaactgacgcgcgccagtcgggcacgccgcacgtctgcctctaccgcattgaacgcggcaaggggcaattggggcgctgcgcgcattaaaggtggttcagcctggccccctccccgcttgctcctcccaccagatgacagctaggcgagggcctcggagcaaagcggcacgagggcccgaggggcatggcgtggcaccccgaggccccccggccgctcttgctattcgtggggtgcgagggtagggccaggctgtagggtcacgcgacaggatgggaaggtaaattcccctcacttcgcatacccctgggcccatgtctccgacattatccaacattttatttgtgtgtaggacccaacaactaataatcggtggataggagctggactgaaaagatatcacagccatgcaagacaaagcaacaggttcattttcaggtggacttgttttttttataaactaaaccggcgagagaaactgccaattatattttcaataagtaggagtgaaaacctagacgggttactagaaaagaaaaaataaccaccagctggctgaacagctacacagcacacgccacaactcactaacaactgaaacactgacggagcccaacgtagggtgtcgttaccaagcttgaccgaaaacaacatagggggtttggactttgcaaacgtgtcatcgttgccaggcttgctgccaagcgacacagcagctccgacttcaaaccggatgcatcatccaaacctagcttgttgccaaaatgatcaagtggcttcgacttcccacgatgaacttcagccaaagccacctaagcgccatatcctattcacggccaacaacaacacccctagaaatgtagcatgtcattgttgcctagcttcgtcacccggacgaagcagctccgactccacctagtaaaatcaaacaaagagcgaaggtcgcccactgcaaaacaaaaggtggaaccagaaagtgaaggcctcatcaaacctaggactgaaaagctttgaaaccaatgcatagaccatcaacaatatccttacacgaagaagtttctccaaagcagtgcccccaaggaggacacgacgtggatcgccgccaccgctcgtctggaagccggagtaaggttttcacccggagaacggtaaggaaaggatcggggtcaacaccataacgacgccttcaagaaggggaacaatgcctataggcgtcg

SEQ ID NO: 32754 - DNA, 510 bp, Oryza sativa
gactatgtgatggacttttggcattgtgatttgtgcaattggaacctgttttagtctgtacgaatctgtgaattgtgatttgaattgcgaactgtgaattggtacatttgtgcaatatggatctacaatttgcagggaggcagagggcggcgccaaccaccctagcgccgaggttgagaagggcggcgccagccagtgccgcgaggcagaagggtttcgggctgggggagggcggcgccagctaccctggcgccgtggtccatgagggcggcgccagccgaggcccggaggcagaagggcttcgatgggtggaggaggggggcgccagccaccctggcgccgcggtcggggggggggggcgccagccgttgcctggaggcagaacagacttggcgaaaattttggggggggagaaagttggtggggcccgcaaaggaggggcgcgccagccatgctggcgccgggctatgaggggcggcgccactttggctggcgcccccttctgcctaa

SEQ ID NO: 32755 - DNA, 790 bp, Oryza sativa
gaacctgtataatcttgttgtgcacacgttgcctagcagccttcagggcggatacgaatttttagaggcgagccctttcccccggcgaactcacaaaagggggatctcacgatctcccgctagagaggatcactcctcgacagataacatagcaatagaaaagttggatgaaacactcaataatacaatatatagtcaaggcatttctggataatatagcataaatatttattcagaaagagagtttgggcactagattttaccctttaaacctagttaaatgaaatgtattattattgaatctttcaatgttgcatgtgaaaaatggtctgtagtacaaattactgtttcatattaaatgacagaaataattggctgttagtaactaaatgagtatgcaataggcataattaactattcaacatgttcagttcacaagccatacgttgtgaaagagaagatctaatgtatactatggtccatagtaaacagaaactagtagtatccctcctccaaggccaacggaactaacttgcacaaaaccagggcaaagatgatcataacatgccctgtaaatctgcgttgcaactgcctgtcacaaaaaatacatgccaagtgttcaggttgatgagtttcagatgcaacaatttgtaaaagtgtttactcgcgtaaaattgtattggacatattgtgtgactttagcattactcaagtaatatggaaccttacaaagttgtcactactaaggtcccgttcttttcttcaataagagttggatgaagattaagat

SEQ ID NO: 32756 - DNA, 606 bp, Oryza sativa
acggaaaaccgacacctattgccagttttcaaccggcactaatagagttttctggactagtggcccgaagcattcgataaagttttacctttaacttaagttagctaggggcatccaaacaaaacgatgttcctatgcaaagagagctaccttgtgtgcctcacaaacatttacatgccatgccatttcggatgatgcggtaaaaaaagctttatttttctataccatcttaaaagcggagtggttttacttccatgtcctcctcccaccatatgcagtgcatccgtacatataatatacgtaaccaccagatccaacattttattttcaatcatcatcctagctcatccatgcttatatgggacttttccgttttatccgttataacgtaacgacatacgactttattttaaattttaaattgaagaggttaaaaaatagtactccatctttcccaaaatatgggacggaggttataagaaactaaccacacatcggttgtcttcttcatgcgcctgcggtttggctattttctggtttttcctcgtatccatctgggagtctgggaccctacccaccacgcacgggcggggggcgccagtggcc

SEQ ID NO: 32757 - DNA, 683 bp, Oryza sativa
cacattcgctgcgaagtgtgtgtagtttaacttcttggaattaacacgggagttcggatttacgactatttatttagtggtagcatggtaggtggaatacccatacacaatgaaacactcacgatgacttcatcaattataaaactagaggatgccccgtgcgttgctgtgggacttggttaacatcaatttgttagataggaggtacaatctcaagaagaaacagaagaaacaaatagctttcttggagaaattctttttaacagctctatccaaaatttgtagataatttaggtagcacatgtcaactgaaggggcgttcagccataaagctcttttatacggattgacgggctggatacatgtagatgtgtgtggagatggaccaatttgttcatgtgggctacatttggcgctgaggaggtgaagagactcactcggtgactaatgggttgggctctatgctgcattccatccaacgtctgagaagcgatctaaaatgggggatgtattcataaaaaaaagccaacggttcacaatttgataataatgtggaagcatgaggtttgagcttttggccttaactttataaaaagaagggatatgtcagtctagtcatccgaaggtattaataggatgtgatgtgcatatgtgcattgatagggtgagcgcgcgcatagtga

SEQ ID NO: 32758 - DNA, 660 bp, Oryza sativa
  unsure (1)..(660): unsure at all n locations
tatggccccntttgattgactgtctgacttactatagggcgaattctagctcggtacccattatactaaatatataaatatatagccaaaatccattgtatagtcataacaagatctattataggtagatatatgtaagtactacgtaaaaaaggcaattatacgtatacatgtaaaaaaatgaatattaaaatggttgtttcggttctgattatcaatttaacctagaattacaaaaccaaaaaacaacatcttcatttaagtcttggatatatgaagactacaaatatatcattctcttttaaaaagctagaaaataacatatgcttaagaattttttatggagagacttaggtcatgttcttttctcaaaaaaaaatgaagattttaccttggtttcaaactaataaacaacgtgttttatgcgaaaactttctataaaattgaananaagnttgnttntnttgaanaaaaanaanttaaattttttccccaaaaaaaaaaaaaaattttttaatattttttttaagtttgaataattaaaacttaattaatcatgcgcttatagctatcttgttttgttcaaacgcatttttaatataanagatcgggntgngttcagatatacttagngcttgataagtagtgtttagtcatata

SEQ ID NO: 32759 - DNA, 640 bp, Oryza sativa
  unsure (1)..(640): unsure at all n locations
ctaatcagcagaatcacttatttctctttcaaagaaaatcagcaaatagaatctcaggggcaaagcgcgctagaccgngcatacctcactcgggcgggtcatgctttgtcccgcctcgagatggatcttctgtccggatgcgtgtatatcatctgctgctgctatccttttggcagcttctgctctgctctgctgccttgctacaacctgtaaccatgtggatgttctctttcaacctctactctatgtactccaacagtccaccctccgctttcatattatgtggtgactcgggtatttatcagcccccctatagcagacagatgaacctcctgcttaggtggtaccattcgcggcgaagaccatgcgtcgaggtcctttgcattactgcgcccagagcatgaatgcgcagactctttggctgcgagaaactaacgatcgacctacatattaagctttatctttccacgtctctgcttgcgcgagtcgcattcattgctatgaaccctgcacggttccctagggaaggattaatgaccggctcatgcactaactaataccctattgttgcaattcattatggattcccctgaggaatgtgtgatttcctttctggtggcagaaaataaacatctcctgg

SEQ ID NO: 32760 - DNA, 640 bp, Oryza sativa
  unsure (1)..(640): unsure at all n locations
tgtttatctagtctaacatcattgagaaaaaaaatagaataatgatgaaattttctccagtattaataattcttaacctctccacttatcaaccacaaaagggatcatgtttctttattttatcaaccgtgaaatcttcattctttgccacttcggtatgcaaaaacatgagttggttgttgagctccggttgagaagaatcagcatgacatcatgattcgtccctttgcaaatatcccatcctctccctccgtccctctttctctctctcattttaagggtatgtttggataatgaaaaatgagaggtaggattaggattggaaaataaatgaagcgttcattggtggagaaaccatctttggtcggttgaccaaaatccacaatagtcccggttgcaataaaaacagggactaaaaatcaaccgggactaaaaacacaacaaccgggactaaaaatcatctttactcccgggtcatcacgtgtcagttggtgacaccaacccggactaaagatcatctttatagtcccggtgataatactaacccggactaaaaattatattgatctttagtcccggntaatattaccaaccgagactaaaatttaatacgtagtatataatctctatnccttatcct

SEQ ID NO: 32761 - DNA, 592 bp, Oryza sativa
tgtcccaaattcaagaagtgaatatgagcaggctcccaatatacatttatatgactccatgggttctaataaaatagttaatttctctttatatataagtatagaatgtataacgatctcaaacagtaaccactgatttggcaaactcagaatgtgtaaatcgtgtactatctgtgcatgtaggcagtaaaattcactgattgatagattcagcatgctgtagcaaaaccaattcaaccagtttaacacattgttttaactataagcccgaactcaggatagcacttctatatttccaggtcagtgtccagcatctgtatactattatgacatttttttttacactgagtgcaatgatcgttccttgcagagaacagtagtcctcggaattacagacttatagtagttccaagttgttccttgtttagtgccacaaatagcaggttgctccgtgtccatactgaaccaaggcgtgcaagtgtatcggcaatcctttagtcacttgtttcaggatcatctagtacttctggtagtagagtcacccatctatgtgcatatgcattgttcacagcaatcgttcacagtaagccaa

SEQ ID NO: 32762 - DNA, 697 bp, Oryza sativa
  unsure (1)..(697): unsure at all n locations
aaaaccagtagcaaatttgcaaatgccctctgagacaaaagatactcaacatattccagggaatatacgctgaagctcgaaatcccgttaaggttttgaaccaaacactccatcctacagaaacgaaatttgcatgctcatgcggagcaaacaaataatgcatgattttttgcgtaagcctccaaaactcgtactgcagttctccaaataaatgggcaactcactgatcactactgacgatataaaagagcccgaaaatctgcgaatcggagaagagatcccgcacggacacggtgggccggagcaaaacacagaccgttggatacgaaatggacggcccgaacgagacccaggatgtaatacgcagcgcaaaaccctnnnnnaggngccaacgagcaaaaccccccaaatgggggagaaccgatttcagttcaaccaatgtttttgcccgcgcccggcgcggaggagagggttcctcggaagtgggctcgacgaacccattggtcaaaacccggggggggaaaagaagaagggacgtgtcgcgcgccctcccgttcgcctcgcgctcgccgcagctcggcgcggcgctgatacgctcggcgccgatgcgctgcccgcccctccccgacggggagcccaccgcctcgctgctctcctggcgcgggttcacgccctcctcagagccctcgcgctcggg

SEQ ID NO: 32763 - DNA, 698 bp, Oryza sativa
  unsure (1)..(698): unsure at all n locations
ataacttaagcaccttacatcggagataatttgtgctactcctattttaaacgtatcctcagctcggcgctggccgaccagcggtccagcagtactatactattgcaaattgtaatgccgaacttatcaggcgagctactagttcaaagcttcccgtctagaacatacgtttacgtagggcagcaacttgcgaagtccatcctcgcgcgttttggctctcctcaagggcgtttcagtggggagtacggctgacccgattgttgagacgagtggcggtttcaactctcaactgacggaaggggagacgcacgcatcgtcatctgaccggccgctcacccgatgagnnnnaaagaccagggggagggggggggagagggaggagtggggggagaagatcagtgtccncccctnnnncnnnnctgnnnccgcccccnnnnaagggaggaggggaggaggaggttgccgtgcccagcccttctttttaggatggatttggtagaatggcagccacgtatatggggagagaaggagagaaagaacccccgcctgtcagatgcatggagcggatagagtcgatttctcttgtacgagtagatcacggaaggaatgatgatatttttcgtacataggcctagagaatttttagggcgtttcgtactggatgggtcaatgtatggagcactgtgttttaataagac

SEQ ID NO: 32764 - DNA, 544 bp, Oryza sativa
gagttgtgaggtccatatgattgcgtgtagagactatactgaatggagtaaaataacagtctgaaacacgtaaagtgctcattaccatttagttcagcctaaacaaatctctgaaaattgttaccaccatggagttgtgaggtccatatgattgcctgtagagactatactgaatggagtaaaataacaatctgaaacacgtaaagtgctcattaccatttagttcagcctaaacaaatctctgaaaattgttaccaccatggagttgtgaggtccatatgattgcctgtagagactatactgaatggagtaaaataatcccttcattcctagactggttggtggcatctgatgatgtgctgctacagacaaatttggcacaaacaaggaggcacattgtgatatcgaatgattgtactcgaaacacatgccatgcttcgaagttttactaagaatttaaccaaattgtgttgtcaccaaacataaggtactatctgtttgatgtatttaatagaatgagaccgtaagttacaggcaaggacca

SEQ ID NO: 32765 - DNA, 641 bp, Oryza sativa
  unsure (1)..(641): unsure at all n locations
caaaagttgngggtacatttgttctcgggaccgcggtcctcattcattttatggtgtctcaatatgtctgtaaccacgacaaactcttctcaatcctgacatttgactcggggacgaggataccactacgatggcctggctactaccaaaaatgatgtatatgcttgcggagtgatccttctgattaaattctggaaaggaggcgattacaaggattgttggataaatatcggattgagatcacaaaggcgttcttggagttaaaatgcaattttccttgttctcaaatgccattttgatctttatgcccccttttgctttcggcttacaatttgttggtatgctagtcggagctttctcctcggtttgtcgacgttatttgtacatgagtctgcttccaagtctagagttcagtatgaccggcattctaacatgaaatgttgtattgataataacttgcagatctgtcgagaggtcgacgttgcaaagggcaggtcgtgatgctgtgacgtggttcccttgactgcgtatattatgatgcctactatcgtgatgtggatctcgatgatcatcattattgcaattgtaaattatcttggttataacttatatttctgtactcttttatttcaactcccccg

SEQ ID NO: 32766 - DNA, 545 bp, Oryza sativa
cagatgttgaaacgggagatagattgtttgttgtcccacgatgagaagaagaaacctgcatcccgatacatttagcggtcactgattctctctagcacttaccgttttcctgttaaatttattcagataacgcagctgaagtcctgtaaatcctttaaccaacatttttcgtgacggtgcgggatgctatgttgaatgcacggacgccacattttcttttgcctattgcattatattattttgactttttaagctgttttctttgcttgtctgatctgtctagaagtgttgggttgatgagttatcgctaactcaatacacatagtgcttatatcatcttttcagattgataatgttaatacgatattttgagtttttttgggtaaggttcacctgaatgtttaaaacaactattttaatgtaactattatactgcaatttgattccaaagggaaagggtgatgtatgacagtataagttaagctgcaaagtttacttctcggagatttcttttcgcaatatgatcttgctagtttggtttttca

SEQ ID NO: 32767 - DNA, 1133 bp, Oryza sativa
  unsure (1)..(1133): unsure at all n locations
ccgcgcgagtaaagcactactatatgncgaattcgagctcggtacccaatagagcagagggaaagctcatgctttttggcgccaagaaatggatcaactgacagaagcagagcagagcagagcaaaatactacagcaaagcaagcttctgttatactaagaagctattcaaatacctgaacaatagtatatgtcttataaaatatttaagtatttatttgacaaaaatagcattgctgcactactactatgtcccagatagagtatttttcatccaaaaactagcagcgaaatgaagctactgctgaaatccttcataatacaactcacatccatctgataaaagattttgttgttctggttctgctgttcctgggtgaatagacatttggtgtcgatccatattcttggcgccaaaaagcaggagctttccctctgctctgcttttgttcccgcgcgctttgccgctgagattctatttgctgattttttgggaagagaaataagtgattctgttgattagtaatccctaattaatcacaaatggtgggatcactatatgcagctgttgacagaaggatgtgtggcagggatgaaggcaacggcaatgtttgccgtcagccaaaacggcagacgatgtgaacccatccaaagtatgtctggtacgctatggaatttgccacagggagcatgggctctaggccgaataccaacaacttcaggtcttggaaatttcatttgagatacccggcagcatcgaaagcctattgtagggctagatgatccaccataatcccatccggcaaggatcttgccaaaagcaggcgtaaaacctgcagactccataagcacatcggagaaagtctccatcaaactccatcgccaaggagggaggaaggaagctgtcacccagtcgcctgggcccaaattcggccccccaaaccaccccttataaccccccccccaaaaaaaaaaaaaacccccccccccccctttacatgatcatgaaatagtagatagatagaagggtgcgatctgtatacaagtacgaaagaactcagttaaaggtcanctccgagtaaaattttgaaagttatgtgtgccaaaggttccatttggttagcttgctatatg

SEQ ID NO: 32768 - DNA, 1247 bp, Oryza sativa
agattaggcctttttacgttcacaacctaaaacttgtccataatgatggtcctttgctgtcgatttgcaatgtactcagctttctaattgcactctcaaaatggacttgccaccctttttccctcccttatttcgtctaacattctctcaggtgtagctatcctgacaacttttggttagtactagcagttgccatgtcaatgatttatgtacaatgatatcatagtggtatggttattgaaaaacgtgtcaataaattggttggacaaaacgacggaagatttaaacttaccgtgagtactataccctaaactctaaaacctaaacccccttcgtactataatatagatttcgatattttgcttgcactgtttgacaactcgtcttattaaaaaaatttgtgcaaatataaaaaacgaaaagttgtgcttaaaatactttggataataaagtaagtaaaaaaaataattccataattttttgaataagatgaatggtcaaacagtgtaagcaaaatgtcaaaatcccttatactagaggacggagggagtatttctttaaaatagtatagtagtccagctgtacacacatacatactagactttgtcttgatatgtcgtttctcggtgtttatctagtctaacatcattgagaaaaaaaatagaataatgatgaaattttctccagtattaataattcttaacctctccacttatcaaccacaaaagggatcatgtttctttattttatcaaccgtgaaatcttcattctttgccacttcggtatgcaaaaacatgagttggttgttgagctccggttgagaagaatcagcatgacatcatgattcgtccctttgcaaatatcccatcctctccctccgtccctctttctctctctcattttaagggtatgtttggataatgaaaaatgagaggtaggattaggattggaaaataaatgaagcgttcattggtggagaaaccatctttggtcggttgaccaaaatccacaatagtcccggttgcaataaaaacagggactaaaaatcaaccgggactaaaaacacaacaaccgggactaaaaatcatctttactcccggttcatcacgtgtcagttggtgacaccaaccgggactaaagatcatctttatagtcccggttgataatactaaccgggactaaaaattatattgatctttagtcccggttaatattaccaaccgagactaaaatttaatacgtagtat

SEQ ID NO: 32769 - DNA, 692 bp, Oryza sativa
aatcataaatatttgatttttagtactatatctgaacaaacttttgaaactttaacaatcagtaattttttaaatatatagtttaaaacaaaaaagctatatgagtaaatcgcattggcggtacacgaacttatcaggtatgtgtaatctagtgcactaacttataaaacaattatttgagtaaagtgcattagcggtccttagacttgtagggttgtgtcatataggtccctaaactcttaaaatacatatcagggcctaaaacttgtcaaagtgtatcatttaggtcccaaatcgatacatcccctctagaatcctacgtggtgctgatgtggcataccacatggacgtgacgtgtcctttttatttttgtaacgttttttattgtaatttggggagtcttcttatgccaccgttttttgtcaagaatttaggtggggccacagagaaaggagacgaaaggggaaaagaacaagctacgaatttcactggcgcccccctgcagttaaaatcgaggcccctggatgcccaagtggcttgcctcattaaccctcctcaaaatgctcgcgggactgtgagccgcaagagcgcctcttataatatttctgtcgcaccttagtcgtcggaagcatcgcacttgcgtggtcgttgtgactttgtatgtctcccgtgcttcgggggaagagggatcg

SEQ ID NO: 32770 - DNA, 684 bp, Oryza sativa
tccaactctatctcgaagggccaatgtccgactagaagctcctttgggctttatatgtctcggccctgtaaaaagggaccacgtgggtctaacatttcaaggcttgggccagtccatatataggactgtgggcttaaacgtagcctgtccgacacacatcctgggctaggaaaaagtacaccaaaggtccctcaacttgtcatcgagttacaaaatcgtcctctaaccgcaaaaccatagcatcgcttaaccagtcaaaaccggtcacaacatgtcgttcggtggttttgaccctggttttgtcctacgtggcggctgagtcagcatgggaccatataggccccacattgtcaggctgaatcatctctctccctatcttctcttcctcggatcctcctctctctctctctctaggccagtcggcgactccgcgaggcaaggcgggagaggaggagggcggcgccccgacggctgacggcagccgttgcagcccaacggagttccgcgacggtcaaagatgggcttggggaagtggcaggcggtagcgaggcgagaacggcgcgggcgtctacggggaggcaccgacttgcgcggacggcgccgccttttactgggcgaggcatgaaaggaagatggctgctcccttacggctggcggttggcgaacccgcgtactgtggaatca

SEQ ID NO: 32771 - DNA, 579 bp, Oryza sativa
attcctgcagcccagatcagagaaatacagattaaatgtaaccatgttctgatgttctgtttcctgcgtctaaagaaacaacaattcccagagcaatgaactatgttcaaaaccaattcgcgcccgcatttggttgatattgtgttcagctgtgtatcaatgttatcgcctcatctcacctagtagtaaaaaggcaattaatccagagagggaaaaggtttagttacgatgtgcgtctcgcagtcgcaggcgtataagagatagctgagcggcgaagcacggcggccgtcatcgtcatacggcgtcttctctggagacttgattcgtgaactcgaagaactacaggagcaattttctggatttttccctccgtaatcatgtgtaacatccaaatctggatagggtgaattggtgaaatccattagatgaaaaattggtggccaagcagacattttttttggataccgttagatctaaactgcacggtccacgtcgctcactaggactggatggtgtattttcttcaaaaaccccctttagtttccgagtattatatcgctcttacatcgatcgtctctg

SEQ ID NO: 32772 - DNA, 696 bp, Oryza sativa
ctatagggcgaattcgagctcggtacccatcttagttattaggttgggaatagccttatactactaagttgtaccatcccggccgggagattggtcatgacatacaaagatcggagacggtaaggtgtagttagtggctgaaaagtttttagtatggttggtaacccatatgcatgtggatgcatgcaatagttagcgcccgcctcatcacctaattaattaaactacaaaaatctacacgccggccggcacacaaatttctcgcgatgaggttagttgagtcgggtcaatattcctggtacctatggcctttccattggtttctagcgcgatttcattacgtcgattaaagaatcggcatgtgagtcttaaaaaagacatgtgcttgggaggttaattagctttagggaccagaagtgtgttggcgacagtttggagcatacgggatcatcgctagcgcgtctcttctcttttcttggttttttggtggtggtggtgttgtgcttggggtaagggtggagctggaaagcttggacgattttgaatggcgtggacgaatcttaccggggctttcaagggcgtgacgagcttcttaaacacccgaaaggtgcaaatcgatgcgtatgcgtgaatatcacactgttcatttggcccaaatcttgctggatcactttttaccacttaacaaaacaagct

SEQ ID NO: 32773 - DNA, 572 bp, Oryza sativa
caaatgactaaggttcaggaaggttgcttacacataaggacaagttttatcctatccatactatcagaatattttgttgcatattttcaagataactaccctcttatggaccataccgctgaattcagaaccattaaaatatctgaccatctgcttgtctttgtttggaaattacactggcacagactagcagcaaattcagttatagtagcctggattctgtgagtgacaacatgtgaaggatcatggcggcatgggtgtgcatcaattaagatgtaagaagacggggagcaggactcaagatatgttcccactcgtttgctagtgatccggcttccaatctgtcaagcaaaaaaaaaaagaaaggtgtcattataaatatatcacataatgaaaaggaattcaaatgattaggtaatgcaaaagtatggaataaaaagaagaatcagtgaggagatgaacctggacaataacatctggagttttccagcttttaacagattcagacagtagaatttgatctatgtggtctataaaacaaatgctcttatctagtcctggaattgatttct

SEQ ID NO: 32774 - DNA, 551 bp, Oryza sativa
aaaaaaccatttcatactttgaatctaaacaccctctatattcaaattaatagtcagaactgattttaattttttttaagtatggaagggtgtgctcaagtacatatctttatgtcccgctagctgaaaagcagcctgaactgaaaacattctccatatcatgcataacatcagagtcagacacatcgccatgctctagcttactcgatttacttcaacctaaacatgagatatacctccgggtcgtactttgattcaagatctgcagtcaagtacacttctacaatactcactccgttaaaagatacaaggcagggtttcacttatcgcatgataatcacacgattatcgcgggggtacggtaggagaaatcgccgatatggtttggatgaattttgaccaaattcaaaattccggaaaaaataaaaaaaaattgaaaaaaaatcatggatatggttcttgatttgtaattgtcaatggtgaagaatttttttgaaatagagtaagctatattcaaatttgaggaaaaaaccgagaatagtttacaaatt

SEQ ID NO: 32775 - DNA, 671 bp, Oryza sativa
attagtttgaccgttagttattgtagaaattactttgttgtccttggtatattgttaaaagctagaaatgttttatgtgtaaattatttgagttgtgaaaaccaataaggaaaattactaaatatttgttatgaatttttaaaaataaaaaattatttcattaaaataaaaaagatttattgtaaaaaaagttctgcataaaatttcaaaattacttttcaacaaatatttagtgaaaaaagatttgttgcgaaaaaacaaaggggatgtaattagtttatcacaaattagaaaacaaatttaaaatttaaacctaaataacatttagtttttgctcttaattttctggtgaaactaatgtatggatttaatcataagttttaaaaaataaaaaataataagttttattttttaagttgggcattaaatgattatattgcttgtattttgtataagttaattttttcatatgaaaatttattaggtaggtaccattgtataggatgggtaatatagttattttaaaatatttaacggtcaactaatgatcaactaacggagatgggtatagaggagatcaaaatgaaaactcaggggtatataagggatgatgtcaaattcaggggtattgaagggattgagtaaattttcaggggtatattgggaatttt

SEQ ID NO: 32776 - DNA, 518 bp, Oryza sativa
atccctagtcatagactagcgcatgggttctttagttgggagtattactgcccgccgataatattataagcaacttttagttataaaattaaatatatagttgattagataactaaaagtttatattttaagatgaaggaagtaacaattttgacgatgtcgataggctatatcgtgactacaggatttgtagggtatggtgttcgtcggtatcagggtgtacgcgatattagggtaaaagagacaataggcaagaatttatatatagtgtcggcccccttaactgacaagctatagccctactcatattagccaaatccagagttacctttatatatcaatatcttattagttcaacaattgggtgacttaatccaatccttgttagcatagaggccttgcacccttacatgcagccaacagctagtgtagtctttttcttcgaatgtgaactcggtgagattggaggcagctctagatccctcatgtttgcctatcaagcttcagataggatttgc

SEQ ID NO: 32777 - DNA, 550 bp, Oryza sativa
gctccagtcataaatatttagcaaattgtaatacatgacatacaaatttttgtgtcatatgttgttggataccgcaaaaacatgtcacggttagagaacccagaaaactaataactcttagagaaaagtttcggtccaatggaagagagacattcttttagaaaaagtatctttataggcacaagttactaacctgactctggaataaaaataaaatatgatatatattagcaatatgtagttggggtgaatgcaaattgagagctgcatctcagttaggtccgaaacttatggccccaggggcattctctctttttctaaaagaatttctctctccaatttgacaaaaatattaattctttagcaaattaccagtttttgggtgttctccaaccgtgacgcgtttttcgatatccatcacctaatgacccaaactttgaaccgcatagcaaaatttgcctaaatattttacatttaaacaagaataggttagattcttttttccagaccaataaattatgaatatcctcaaattttcttacgtttaaaa

SEQ ID NO: 32778 - DNA, 558 bp, Oryza sativa
ttacactgtcagtgcctaccactgatttagcggaagaagatatgcactgtggccatgcaaaagaacggatatcgatgggtaatttctttcaacataaacatgcttatcgatggttaatttcttcatgtaatcaggtttagatgagaccttgaggttgaatatgtggaacagcttgtgatgcgaacatcccagactcaaaaacatcaagcaaaagagctttatgttcagtcaagaagtccaaaagggaaggatcatcagactcgctatatttccctgattgttcaggaaccacaactcggagatcaaggttcctagctctgatcaatgagaaccagatgcaacatacaagggacggtctgaagcaaaagctagctatcttcatgctggagaagtgactcaactgaaagcttccagagttcatggatgggatgccacatgtttacatcggctgccgataaaatacatggagagccacgattgtactactcaccttaacattctacggcttttgacgtcagagacatataatacacagcaatttttaccttgaatgaatcg

SEQ ID NO: 32779 - DNA, 609 bp, Oryza sativa
caaaaaggttgccataagacatccatgttaacacctaatgttcacaacaaacttttaccacctacaaagtttgtaaacctagctaaattctgtgagttgaagaaaaaacagttgctgtcaaattttccactgataacatgccggctgatattggatgacaaaatatcaataatcagtgggaacatttacaacctacaaatatagtaataatactgtttgtctgtttgatactggtttgggacataagctgattattgcagagtaatctatagaatagttgttttgttgaagtgacactgtccattaatgtaattttgcctaaagatctggttttactcacaaaagcaattattttcccatatatacaacgttatttgaaaacaggttatcaaactaaatttgcacattgcattgtatgatgtctctggcaaataccaaaaaaggaagcttgaactgtatttaaaaaaaaatgcttgaccagtgggtttaagacagcccgtgacattcaactaagttgagaaaaatcccccagaccgcagttgagcacactcaacttctcgtggggagcacgcttctaccagtgcctgcgaggggggatgttttttgggc

SEQ ID NO: 32780 - DNA, 635 bp, Oryza sativa
tcaaacataattgcaaacactgagagtaaaacaaatcaaacagctaaataggagaaaacgaaggaatgtggaagtatcaacaattcaacatgtacacaactgcagatgggcatcactatttcttctcttttttaaaagtaaattattagaaaagaaaagagaaaattaacagaaaaagaaaaagaaaatagatttaagatgtgagcatacatctagtcacttaaaaatttgcagagaaagaaatctactttcaggtgatataatctgtagaactttcttgaagataaacgatagaaaaaaaactaaaatattgcactattttttattagatgttccactccgtagcatgggtccacaatcacttagacaaactatatgcttaggttaagaatattaaaactaacctctgaatagagaatagaggaagcaaccaacaccctttgtctcttagattcattaattggcatattgagaatgggaccaagcacactgaaatcacaagagtaccaacaaaataagaattgataaaaccagagtaaacgccatagtcacctagatatattatcatgtatataggaagccaactgtgtttccatcaaagttgcggctaccaactgattgtgacatatcatgcc

SEQ ID NO: 32781 - DNA, 502 bp, Oryza sativa
tattttatgtgaccggtctgaccgggctgtgtatgccggtcagaccatcggtgatcgagcggtcagaccggccggcccccggtctgaccggccgacgctgtgtcggtttcggtttcgggttgtttctttggatatccgtgattgtttcatggatatggcttctagatggatactatacgtatgtaatactgttgtttgctaacaatgagtcaagttggtgataacttggtctcagaatatggtttctttatttgtttcatgtgtaggtgactcgatgcctcgggagaatatttgcggtgatggaccgggagtcggcttggtggtaagacgatgtccgtggtggtcagatatcatgcgggatactaaagctagagttgatgcacgtggttggtgaagattccatatggcatacgatggaggtattgtgtgcgtatgggatgcggagtcgaatttcgaaggagtcccaaattggtacaattggttatgtaaagcctgtgtcttg

SEQ ID NO: 32782 - DNA, 622 bp, Oryza sativa
ccatgttctagatctatgttgttcacctattatttatatcggatatttgcacttgagcttgcatacgagtatatgacacttgtgatgttaatgaatactcaacaaacatatccatatctttcatatgcaaccggttggtcatcaagtgaaggatgacaaccgatttgttgagactaatgtctcctttgaggtgtgaaaaggaataggtcccactacgatgaggctaatgaatgacaccatgggttagtggtcaccaagccaaggacatcgtcatgttggcaagaatgaagtcaagcttgtgatgagaataaagtcttgacaaaggatggacaagacctcggcataaacatggttcaaccggatggtcacaagtgttgatctcggctcaagcttgaccccaagatggatggcacaaggcaaaggtataatgtagctaacaatgttttcttagtcttttcccggtcttggaggttggtgtagaccggatttgctagataggcgccgtactatcaataagggtctatgaagcgagcttgttgatgatcttgtgccatattagttcatatgcatgtaggtgcattttgtgggtttgtctaaacaagtgtgatgagttttctcaagt

SEQ ID NO: 32783 - DNA, 515 bp, Oryza sativa
cattattgaccacttgaaacctgttatttgatcaacacatagacatgatgttgtggaagatcaggtagcgatcagtttgtgtaaagatatatagtatagtatcaattagttgtacccggtgaacatgcatggttggttggttttaaactttgtaaatttggttgcaaatgatcagggcaagcatgcaaaaatgattgcggttgagtaaccacttcgttattaggactgatggtgtgcattatgctttcttgatatgactataacagatggccacatttctgtaggcacaatgatatgcataataacgtgtcgacgttgttgttgcaggtatgccggtgctgggacacggttttccgccgtacgggctgccgacgtcgtcggctggtgctctctctcttctgtcatcggctagagccaccggcccatggctgatgccgacgcccgacatctccggccgctcaagcgcggcgctcgacgagctcatcgccgagaaccgcgcgggccttctctcgtgg

SEQ ID NO: 32784 - DNA, 833 bp, Oryza sativa
actgtttttggtaggtgattatcttatctgtcatctcatctttaaagtgtaatccctcttgtttcttacaaggtgctagttttgcgtctagaatttctgaaacaaagataagcatcagttggtgttcccaacttcccaatgttcccatcagtccgctatcaaggcagcgtacacgcaagtggattttacataaaatctttgaccaattaacggcgaatagtctcagcataacctctatgtgatggttgcatccgtatactcaaaacatagccaaatgccaaaatttacatgtacaaaaatggggttgctcacactggttcaccctacagagaattgtaagacagaaaactgtctgaaccgagcaaccaaaaatggatacaacgctgcaaacaatgtaaaatgactattcacccattctacaaaaagaaaaaccatcgggatttttacagggctactcgataaagttcgtttactcagcagttcgctgaataatatgatctgctggatatggtgtacgacctagcctttgctcagcctaactcgcaggtcctattacttatccactttgtacagatagtacatctcgagccatcgattcattatgctaacacgaacagaaaatgatctttaagctagtaatgatttaccaaaataaatgctttttgctcatgactgaagaagcccgtcaccttcccaaccaagacgtaacatctgatccactaccttcaagctcaactgcaacattaccagctctattagaacgaaggttaagtggcaacgtaagtactttatggacaagcaagtgctaaatggattttgatacatcaggaatt

SEQ ID NO: 32785 - DNA, 631 bp, Oryza sativa
ttgtaagtgcgtatgtacctactggttctagtggtcgtgtgactcagtgttagattccaaaatttcttatttctaaccccaacacggaggcctcgacatcttcttgttcgtagatattttggcggcatactccccatgagtgttcaattttaagatgacgattgcttttcaaggtaacatctatttacttttgaattgacatatttttttttgttatactctcttgtttattagcttttttcatatgctagtatttgaggttgtagttttggttaatactattggatatatgtcaattcttgagaattttggtgatatcgttggcaattggatgtctttttcaaaagctttgatttttttcttgattttcggggagaattggaggttattttgagggggagttagtgcttattcgtgaattcttttggcatgatttgagggggagtttgtacctcatggtttatcaagcaatatatgacaatgagaaaaaattaataaatgagagctttgttatacatatggtattttcttgtgcatgctaacaatactttgaaggtttatttgctatagcatagcttggatgtattctagtcttttcatgagattagatttgctttaagggagatgatgc

SEQ ID NO: 32786 - DNA, 2405 bp, Oryza sativa
taaagtgcaaaaggggcaaacatattttccctgcaagagcgtgttggctacttgtcttgagtcgacttttgcaggggcacatcaagcagtggtgaactgcagagacgccagtattaggccagctttcttttctatagccggtctggtccggtggtgcctcccccgggcaggacctttgagcctgccactcacaagttattcaggccgaatcaattcgttcacattgatcaaattcaatggacgcaaggtgcttgcaccaaccaggcaggggtcagtgagtgagtcagtgatctcgatgaaagctacgtgtgcatgctgacttgaagatgcaggagggcgtaaccgagtgaggacggataatagacaacgattccagaggaaaagggagaataataacgctcacgctgagaaaaaaatggctggaacttgtaacctgaccattcagcactaaagtaaagcacacggacatggtttattttcccggatttaccaaaagcaagatatactctccatgttttttctctgttatgatttttaagccttttttttaatcttgttatggtttttagccttgcaaggtgtggttcttcgtagaaatgacagctaactttcgatccgcacaacgaggattacttctagttccgttctagtcttcaataacttcgaaaaagaaattctacagtagaagtcaacagtaagtactaacaccagtccggtcaaaaaacagtaagtaacatcagaaaaaacctgtaatctctcgatgataaaaaaatatgtggactcgcgcttcaactccagtgttctcactgctgacggcttattcggtttgaaggaattttagcccataaaaatagaaaaaaaaatgatggaatagaaaggtatgcacacatcaattcataagattttttttttgatatttgagtgtatggaaattatcctatgatttctcaaaaacaacttgaagaaaaagaaaatttcctttgatttttctataccttatacctacaaaccgaatgacactcgtagaaattaatccttaagaatccaaatcatttatttttcttcaagccgaataagtcctgacattgttgcaaggtcacaagggtaaggggatctaaaccttttatgaacaaaatttcaaatatttgtatctacctatttcctttatcttaaaatatggagtatcaacttatgcaaagattagatatatcttaggataatgaatatgtatagatagaggatctatccaacttcattgtcttaagatatgtctaatctatgtctaagttactgtttttgaaacagatggagtaataagatagtttagggttgtctttcatatcgttattaatgatgttaggatggctaggagtcaattctatttttttactacctccgttcctgaattgatgtcatctgaaaacatgtacagtcaaaccttaaaacattaaatgattaatttatgaaacaaatatcagaatttgtgagaaaataatattattaaatttgtcatgaaaataaattttacgttgttatattgtaatagctttaataaatatatttactaaaagtaacgatgaaatatgtgcattgcagactgtgttggtgttctatgtaacaagtaataatagtatgtaacaacatttatcgattaatataatgtcttattgcattaaaaaaagggaaaacctatatttgttgtaacttgaatcaatcaatcatttgatgatatagtgcaattgtatcgtaacttgttatatttacaatgtaagttgcatgcaactttcaaaaaaacatatggtaacacaatattttcgcaaaatggaggttgcgggaccgaatcccctcaccgccactggtgcgcacactatgaattttttacttttttcgtttgcacgaatctttaagtaaatatgacagttcaaaattatgtaaagttgcatacaaattatattgtagttatatgtaagttacaatatatttaaatttgtcaaatttcaaggaaaaaattatcgataaatatatatcaaaactaaaaaaatagatatgacctacacccgctgtccaaaaaaataagcatatgaatctcgataaatgcatatcagtatatctaaattcatccttagaagctgttttttttttccttgaatggaaggtgcacaacgcaacgtgccaatagagcaactcgaacaccggcaccctgcgctgaacatgttaaaaaaactttgaacaagctagccgcctagccgcttgtatccggaagaggaagagaggaaaaacgctcgaaacaaaagccggaggctcgccggcgttgcgtagcagaggcgtaccggggggaggtgaaatgcgtaactgctttgctgacttgctcgctggtctgcgtcgagcttagcgtaaatgaatat

SEQ ID NO: 32787 - DNA, 2364 bp, Oryza sativa
gtatgcgagttgcttgtgtgagctgatgaggaagtctgcgttgaggggcaaagattttgtagggtcattctgcttctattttggggagtctaatttttgtgctcgttgcttcacttcggtgtacatgaactgctgaactcctttcttgcatatggaaaatggggggtgggcatcacgtgcggcattcctagataatgacaatgagcaaagcatgcacaatgctatgagaaaactgcaagccaaacgtgcaaaaaatttcaccagagataaacacgaagaacatgcattacccagggaaaacacgatgcctgatattggaggatgcagaacttgtgctggatgagaacgatttttgagatggcatagcgaagacgaacgcagtcatgctgtcatgcatgctcacaacctcggctgctaaacggcgggcttagtatccagctcttggcaaataagcaagccattgtagtcttcgggagctcagacaagtgcattcttcttagcgattaaccagggttgttaagtattttatgcccatcatggaggccctcatgtaaggaggccgacacaactgcggagtccaggcgacgccctacacttcctcggcgctctcatcgaacacgacacccatctccccttgtgtaaccaaagccgggtagagctttttttagcaacttgctactttccttgcaagggggctagaatagatcgtgtatgtactatatactaagtgcaacttttggaaataaaaaccccttgacattactctagcatggggaattgtctaggagctgaagaaagatcccctgagatagtagtattttgttgagaaaaactccgaattaattaccttgttgaattattgcgacggttcaatttacacctctaaactataaaaccaaaaattctacccactcaactcttcaaatcggacctataaccccctatcccaatccaaaatggatttgatcttatgtggcatcagacgcggcgattaattttttttttaatctacatgacagttggcccacttgacatcgatttttttttattttttttgaacatttttattttttaattttaaaataaacccttcaaaatattattttcaaaatctgaatcttttggccatgccagcccgcttagagtggcaaaacaacactgacatgccacacgcaacaagcgtgacagttttgtaccgtcgtgaccaaataacactgccacgccatctagaccggcatgacaatgttgttttaccacgccagtctggctggcttggctgaaaggttcatatcttataaataagttttgaaagggtttatttttaaaattaaaaagttcaaaaaaaattccttgatagctctatcttctctatttttttcttcacagcccaagagagaaaatgggagggcagggaggtagtgggtcatgggtgtccacggcgaagtcccgcgagtgacgacgctagcgagcagcggcgcggtagcaggagtctaacaccgaggctcgaggaggggcgcctagcggacagagctagagaagggggcgccgtcgtgctcactggccaggaaggcaggtacacaactagatctgaccacgggtcgtcagtgccttctggttgcagatgtgcaggtacatcgttcccgtcattgtgctgccgcacgtgtagctgcatccagcattgccatctagtgagctagctaagctcaaatactcaatcgtgaaggaggaagaagcttattaattagttggctcaccggagaggcagagacgatgttggccgtagctgcaagtgacatggttgcacccgctgcttatatacttgttgccaaggccttctactcctgccttgttggctttgttgccttgctcttgctgcttctgtttcaggacaccaggcggtgtcctccttgccgttttcagatacgaagaagaggaattggctccgcggaaaccaaaagattggttgacatgctagtacattgctactgcttcttgctctttgttgacatgctagtacattgcaaaagatagtgaattgggcgattttgccgcagcggcgcttggactcaacgcatggaagcggcgctggtgaggtttagatcgaaaagttgtcgtcgagttacttcccttccttcatcgctacatctgaggtcgagagagagatagagggagagatatgacatgtgggcccactgttgctttctttattttttcagttggaatgccacgtgtgtactagtttgtgcagaaaacaactcaaaatagtttttagtatttgtccggtttgaagaatcccgtacacaaaatgtctggtttgtagttcgcgggtgtaaatcggaccgatgcaataatttaggggtgtaa

SEQ ID NO: 32788 - DNA, 1786 bp, Oryza sativa
acgatgtttcgccgaagttattgatcgagccgactaacgactgcacgcacgagtggacaatgtctttgatcattcatcactgggtcagtttgctcctttttttataaaaaaaaaatcactgggtcagttagttagtcagaccttctttgtttaggcttagacttattggcctagattttttaagtcaacttattgacttatatgatttataagccagtggatttaatgtcctaagtttagtggtggagttatacatctatctcatataagaaaaaaaagcttctctaacctaacttttggcttaatagtattagagtggcttatggctttaaaaaagtcaaataaaaaactgcttgtttgttttggcttagacttttcgacttataaattggcttataagcctaagcaaaagagggcctcaaaacaatcgccgtcgaccaaccaaacaggaaacaagatttgagaaatagtacgagttagtagttcatatgctacggcgcctacaccaggttgtgcacaatgcaccgctaggctaattctgaatgtagacgtgcctgctgagcttggacgacctacacgaaacgcgatccgaagaaacatccattgttcatgggacgcgcgttaatgcattatacctggggctaaaaccaaatggcgatgggaacacctatatatttatcgataaattttctcctaaaaatttgacagatgtaattatagtataatcgtagtgtaattacactgtaatttgtatgtaattacactgtaatttgcatataactacagtgtaacttgtatataagtttcacgtaattttgaatcgttagatctattacaagatttgttttggtgaggaagaaaaaacaatcacagcacacatatatgtgaaagaatttgttcccacaacctccattttaccgaaataacatgttacggagagatttttgaaagttacatacaagttacattatagttacagtgtaattacactacgattgtgtaattacatgcaagttacagtgtaattacactacgattgtactgtaattacatctgtcaaatttttcggggaaatttgtcaacaaatatatagcaaaattgaatggggattcaccccctccatccggccatcccatgagatcggtgcacacacgcgtcggtgacaggcgccgcgcgcaatggggaaatgggaaacgggaggcaggcggcagtgacaaggttgcgccacacgcgcggcggggagcggttgcgtacgtcgattgttgcgtacgcctactcgcgctggcggggttttatggccgcgcgcgtcgggcgaatcgaaggcttcgcgatctcgcaaacacatgaaccgtggcccttgcgcgctcgacgtcatgcacgtaatctgggcagttatacacaccaaccgcccggcgtctggctcgtcgtcacgtcgtcccccgctatcctctccacgcgcgcatatctatctatctatctccgcttttgcgtggcgtggctgcgcgtgacggcgtgaggctgtgagatgcggacttgtggcacgtgcctaggcaagcgcggtgagcctctctgttttcaaacgcccggggcaggttgtaacgctccgcttttcgtgagtcgttaaaaaaaaactaactcggcaaaatcctaattgcgaaaattttcgttctttgtgtagagtctaagttgtgccaaggatctcaatttaatcccgttgttccctctcatcgaaatcagaatcctccacctcgaaaattcctcttccgattcgagtctccaaaatcaa

SEQ ID NO: 32789 - DNA, 516 bp, Oryza sativa
tccttggcacaacttagactctcacacaaagaacgaaaattttcgcaattaggattttgccgagttagtttttttttaacgactcacgaaaagcggagcgttacaacctgccccgggcgtttgaaaacagagaggctcaccgcgcttgcctaggcacgtgccacaagtccgcatctcacagcctcacgccgtcacgcgcagccacgccacgcaaaagcggagatagatagatagatatgcgcgcgtggagaggatagcgggggacgacgtgacgacgagccagacgccgggcggttggtgtgtataactgcccagattacgtgcatgacgtcgagcgcgcaagggccacggttcatgtgtttgcgagatcgcgaagccttcgattcgcccgacgcgcgcggccataaaaccccgccagcgcgagtaggcgtacgcaacaatcgacgtacgcaaccgctccccgccgcgcgtgtggcgcaaccttgtcacgggtaccgagctcgaattcgcctatag

SEQ ID NO: 32790 - DNA, 992 bp, Oryza sativa
tccacttgtgttcttcaaccgcatgacgcattgttgtttcccttagtttgtgggggaggaggggggggggattgacttctcgcatgtctgcttgatatggtgaagtgaatctgattctgcatgcggatcgctgggggtgcagtccgaaggtttgatccataggaggcgtgtgttttgcttaattgcttgtgataattttgggattgtttggtgtacatcgtaacttttgttcatttcatattttataatatgtgcttcgctgcgaatttggtgcctgttcaagtggggtgcctcatttgatgaattctatttagagcttttagcataactacgtactatgatctctgtataacttgagttatctgctggaggcagaaatttccatgtggttcctacatacacgaacataaatgcattccgtaatgccattatgaaacagagttctcattacgtgcggcataacagaaccaaaactgtagggcgtatgctagtagtctgccatatttactctgtctgtaactctgtaactttgtttatgtttgtttgttatctattgaacatacccacctccaactaacggattaatagcttataggctgatatttagggtggatgtggaagccaactcaacagatttgaagccactgcatgaggggctaataaataagtctacatgcttcactttcttgtggtaaacccttattcctattgttgaattttgagtttcacgggaactcacttcgttctggattcctgtcacctcatatactttactagtagtatttaaggaagagactgggccaatcaaatggttaaatcacatgtatattttcactttagctctgaatggagagaatcattctgcattcagcgattaattattgaagtttgatttttttaagactattgatgtttgagtcgataatatcattgcgccacataatatttttgtaagaaatatgatgtaaatttatcacaggtaaccttgtatg

SEQ ID NO: 32791 - DNA, 712 bp, Oryza sativa
tcatgtatacacacaggaagaaggtagaataatcaataataaaacgagtcaaacgcttacacttgcattacggagggatgtagtacacgcatcaagctccacgtttcctcctgttcctcatgtgacctcctatacaacagggatgcatagtcaccactactactacttccaagcattatcaagagtcattaattgacggaagaaaaataaaagcttacaagaaaattcaccatacttttcacaattccatttcgcttctgagtgcaaaatgcactactactaaaatgatcaggaaaattaatatttccccgatttcatggcatctgatccactacgcttaactgggttcacggaaccaacttggttacatgcaccctaacgtgaatggattaaccattaattaattactccctcagcttcccggcagtatccccttcattcaccaaaatctcgagaaatctcatggttgaggagttagcggtgagtagtaaattgggggagcgataatgaaaaggacagatacacatcagaaaagtaggaaaaaaatgactaggctaagtagttaatgtctgtcattaatcgactggtgaagtagactcgcttgagttgaattatgcacagcaaattcgttgcttttagactagtatagtgcaagtgtttgaagacttgtactagtactacttttttatttgagatggaatacttattcaca

SEQ ID NO: 32792 - DNA, 1107 bp, Oryza sativa
  unsure (1)..(1107): unsure at all n locations
tttttcctttttaatttgctaagaacatatatacaaagttttgtttttttacaccttatcagccataaagcaaacgacttaactgtggatcatcatggaacatgctttatataattgattattttatgcactcgataatacatgatctttaattcgatcaacgatttggaatagtaacatacatgatggagttcaaaaaaagtcaatacacatcgaatgaatgtgctaatattttaacttttttacatctttatctaaatcttagaagcaaccatactgcgatattttggccggccctgttttgtaactctccgcttttcgtgagacgttaaaaactaattcggcaaaatcctaattgcgaaaattttcgttctttgtgtgagagtctaagtcgtgccaggatctcaattcaatcccgttgttccctctcatcgaaatcaaaatcctccacctcgtaattcctccttcgactcaaatctccaaatcaaattccgaaattcaatcgcgtcctttgaatcctcggcagatactcgctcccaattccgaaaaatatcaaaccctaccttgagtcttccttgattcctccctgaaacctcgagttcgaatatcgaatttgaatccaaatacaaactccaattctctccaaatcagctttccctgcaaaagtctattttacctccctcgggtgttgtgggccgttttccccccttagctgtcacacccnnnnnnnnnnnnaagagagggcngaattgnnaannncagangaccccnnnaaaatgcagaggaaatcaggagaaaaccctaagaaggtaatgcaaataataatcggaattgacatgtggaatttttcttgagttctacatgtcgaaattcattaacaggatttttagtggaattttcagagccctagaaataattttaaccaattaaaaatcactaaagtgcaattgttaattccagggaaaattcttttcctttttctttttcttttccctccctttttccctcctttttccttttcggatgggccgccggcccattcccctccttcctccccctcctccttgctgggccggccgcaggccgaggcccagcctggcagccgcc

SEQ ID NO: 32793 - DNA, 701 bp, Oryza sativa
cgtcttctttttgtttgggggaggtttgaaaaaaacggtggcggtggtcagaccgtgaaaaaaaggctaagcatttctccctctttctttcatcctttggggcggtggaaaatgatggtgcgcggcgacgacaaaaatcggcgaaagcgggagagcgagttgtctctgcagtctgcactgacctgtggcgtcggttcatggggaggggaaaggggctcgggtcggactcgtccacaggggagcaagtgaaaggacatggaaaattgtatgcaaagctttactgctgatgcaagagagtgacttttatatattgggtttgtttgccatttttcgggttacaagcttacaaggcttgtactacgaaagcttacaagctttcgtgtttgccattttatcttatcaagattcaataaggtgggggtaacaaactaaacggcctccgtattcaaccaaaatttagcatggttaaatttgatatcaaaccaaactgctctacatatggaatttgtaccaaagcattacgctcaactctacaaaatctaccaaagatacacgcgccctttttgtttgaagaaaaagctaatagagctaaccaagtttttgtggcatgagaaccacgtgaggcaactgctacactcaagtacttggatttctaagaggtagatatttcttttttggctactgaagaaactgactgcata

SEQ ID NO: 32794 - DNA, 751 bp, Oryza sativa
ctcaaaaataaagataaaagcttttttctaccctttatcagctgctgcaatagtgccatcccactatttcagctgacaaagtggaaaagagcaaaaggaccaccaaactaaacttaccaacctgctacaagaccaaaaggaaagttcccagaccaccagaataatcagttatccataagcagttttccagcctcagtagtttgtaaaacaggaagcagcagctaaacatgataaaaagaaccatcagtagcatcttctatcttcttcttataggcatcatctcctccagctgttgtgctctgctcctgccgtgtcgtcttcattgcaaacatctggagctagaacaccacccatgtcttgcattatacacttcctcggctactttttttttttttgaaacctaagtcagccttagctgattttatattaagcagaggaagaactgtacataatcacccgcggtgattagagaggaaaaaaaaaagaggaaatacaagaaaaaacaacttgccacaacgaaaagttctagtgtgctattctcacaatgtctttaaccccacaacttcctcagctacttgctttagtagctacaccccccagagtaatcttctttcactacgcaatcatgtatcctcggagattccaatgtgtaagtaagaaaggccaaccgcctgatcaatactacatttttctaatagcataaaaagactcgaatttcttgtgcaaaagggtcatgtcattttgtacacac

SEQ ID NO: 32795 - DNA, 906 bp, Oryza sativa
atgataggtggggtccacgtgggccccaccattttttctattattgtgtgtgtgaactgatatgtgggccccatatgttttaatatttttcggatcgaatttccacgtcaatgccacgtcagatgaagaccgagtcaaattagccacgtaagcgccacctcagccaaaaacggggtcaaatactgccgatggaccttatttaaacggtttcgtaagttgggggacctgttgtacccggttttgctatcaagggacgaaaatcaaactgggcgacaaatagagagacccaaagtgaacttattcccctgaatattacacggttgctcctttgcttgctcggggcatagggctatgtgggccttccaataggccgttatatgccttaacatctcgaattgcattcgacccaggtaagatctggcctggcctggcctggtcaacaaagaactggagtaacaagggtcttgttcgtgtgcaacggcagtagttccaatcaaaaaacaacaacggcagaaacggtttcttgcgaattctgattcttggaggcttttatctgcacttctcattccgcataataaatttgacaggatatactttcctattagctcgttgggtcactccaacgtctatgttctgatcaagcagggtggtatatcatctttactataaaaacccaactcctgacattgaagtataaaaacccaacttctgacattgaagtactgaagtactccctccgttccataataaatgcaattgtgggttttagtgtctaactttaaccatccgttttatttgaaatatttttatgattggtatttttattgttattagatgataaaatatgaataatactttatacgtgacttaacttttcaaatattttcataaattttttaaataaga

SEQ ID NO: 32796 - DNA, 1557 bp, Oryza sativa
atattatgagtgggttcatatgagaaacattttttttattctttctaaaagataagatagagtttgtgtttagtatgaatatgcgatcaattacaaattagaacttggaattgtataaggataggatagaagttgagtcggaccctgtcataagtcttctcgcaaatagaaaagcatacatgttatatccacgtagtgacagtaacataggtgtggaaacgactagccgacgactgagccgatcgatggttgtgatacctggatatattgtaatatgctagtttgaaaatcatcgtccataattagtgctatgaagatgtaggtttcgactgaactcgatctaaatatcgggcatagatatcatcatcaagttttgatcttgtatgatgttcttccgtgtttagttaccgatatcgaattcagggccgattttataaacaagagggacggtcgaatggcatgaacgtaaagcaaacgttttcatattagaatcacatgaacaaaaacaattaaaacgaaaatgatagagagagagagagagagagagagagagagagagagagaggtcctcgtgggtattctaaaaatgatggaaggactccaaaatggctacaacagggagacttttacgagagaaaaatgagtggaaatgagagcaatagactcagaacaaagggtggatgtaatatcatcaaaggacaggaccaccacccatctcacactagctaattaatgggcaccttaaacatatgcaatagtagccccaacgagcctatgagacaagatgtcacaaagtaccaattttgttgacctttggtccattctcatcatccacaccactaaggccccctttgattcaaagaaaattggccataggaatttatttaggggaaaaaccttgcgggttagctcatcttccgttaacacgatgctaccgcatagtgccatgccttcggaaattggaatgatcaaagttttcattttttttccccgattacattgaaaacgtgcgcgcgcatcaccacacacaccatactcacacttatgcgagtgtgctcaataacacacgctcaaaaacaaaaacaaaaaccaattacatattgttggcccccactatatctttttttttgttgaccggaacccactatatcttttaaaagcacaattttacgtgaacaatattcgtaggcggcatgatttaaatcttagtggatggtcatgcatctacgagaccacgaccccaccatcacaacagtacacgtgctttctccgaagttttaaagtttgctaggtgaaatgccacattactgatctggatgttgatatttgagttgaattttatgaaattcttaactgaaaagtggaaaattcttaaggaccaagtcaagttggcaactgaagtatcaatattttctatatacacttgtcctcacaaaagattaaaaactatgcgcacttcttttctagaaggttctcctagtagttcctagcttggtgtgacgtaatttctccttcaaccaatctaaccaattgaaagaaaaaacactttctccaaca

SEQ ID NO: 32797 - DNA, 1319 bp, Oryza sativa
acgaaaaatgttggatcgatgtgcagctaccggtagagtttagctagcttcctataagtttcatgcgtgtctgttaggttctgtcagtttgtctagcttgacggtgtgtatgcagtatgctccattcccccttcccctgtacacatctctattttctgaattggaatttgaaagcatcttgatttgatcatatgtccagtgcttgctcctctgttactataccatcagacacctccattctgccctgcttgttccattttgatgaatggattaatgagtatgcttcttgaactgttatacagtatgattttttataggaaaaaaaactaattacatatgaatttcttacaatactgttctatattcattttctaactttataataattattcatttgtttgtaccttcaaaaaaattattctcacacattcaacacaaaaggaatacacatatttttttacgataatacaagtacaacttacgataaggaggttcgttcccttcgttaaactgagaagatcagaactgcacggcatacaaatatcccagagaaattgatcgtgtcagcattaagggaatcacttaaaagatttccaagaaatgttgttagtcagaactatgacttttgaacctctctcccgagaaaaaagtaaacgagaatcttgttcacccaccgtacactggtacagcactgctgctctggtacgacagccgtttgacataggggtgatttccttttcatggcgacgccatggattagtgcaatatttgctctgccaattcgttgtcgaaaggtcagcgataatgttgattaaacgagtgataaccttttcaacatagtgccggatcgtgcacgagtggcaaactaccatggcttcttcctgacattttctctttgattaggattattcaggcataaccgcataaaagagtaatgaagaagggggctgtttttcaaagaaatgaacgacaccaggtaaacgttgtggtgctcgacatcatcccgcacgctttatattgcagtatcaaaattgagcttcagcttcaagaaactaaactagcttgagaaaaaaattgagaaaatttatttgagaaaattctagctttcaagaatggagatgttagcatggaaggaaccatttgcaaccatatctattgtctatatttcagcttgcaggagttttggtgagaccattcaaatgaaagcaaaagtgatattaggaattgtcaaaaaaaaacaagcgatttttccctaattattgcacacgaattggaccttcgtctgtgaaattcttaaaccgtgaaatgtggtcatataa

SEQ ID NO: 32798 - DNA, 1577 bp, Oryza sativa
  unsure (1)..(1577): unsure at all n locations
tagttaatatagaataatttagcagcttcttcagattcaaattccataccctcgactggctcatcaatagggtccacctcaatagaatgtggattttccattagatcacaatcatgatgttctccagcatgaggttttcttggtggaaccggtccatgattatggatttttatgaatttggtaacaacccatttgtcaggcccaaactttttaatcattaacatggccttgcaaccaactctagttcctacccttgcttgctgtttctggtccacatggaggttttcacaatcacgagtttcatgaaacccctcttttgagcagacaatacgacgagaaattattgaattatcacgtctagaacgagtgtacctgctgattcgaattctaaaacctgcatgtcttgcatatttgctgtagaaatccctcgcagcatcttcagactcaaattccattccttcataagggttaattcagtatcagctccatgtccaaattagcttttgagcttcaggatcatgcatggctgaagtctccatgtcagtaatgactctgggaagttctattgaagaatcccttggctcatttcttgatttggttcccactgactggttaccacacctccaccattnnnatccacgttcagccaaatcacaacacccaagagaatcaattcccatcaagtcactaagctcaaagtagcaaagcttcagaaccatcatattgattgcagacttgttcctgtgaagaacttaggagaactggtccaaaatccgaaggtaatgattagatattgccatattgggggaaaaatcatcatatcttgtaaaggaaaactgtaatgactcgacagttataagcccaaaaccttagcttagcaaaaacatatgaaattaccgagaaaaagtactcagttactcaggcagtaagtaaatatggacatatggataccgaaaaggtatctggaacaactatttggataatgcaaaaacaaaaaacagatcgtatttacctgaattatttattgattttccataaagtacataatttaaggatcttaacaaagttagattgggaagttaaaggtatatggtgactaaaaactttaatatcaaactggaactgctaatttatgagcatcaagagaagtactctgtggtgtgaatattcttaaacatcttgaagatgaagttcataaaagatatttaaatgataatcaagtgcaatatgcggacgattagtcggatgattaaacaaaaagtggctgattaatccctaaaaatggagatgaacggtgcactggtcggaggttaaagcacctagttgtgagctctaggagataaaacaagaaattgtctaaaaaatcccttaagtttaatggctttagtataaggtaagataagtgtgaagggcgtttttttagcgtgtccaggaaactataggggctaaagtgcagagcaaacatcctagtcatattgaaagtgcacctttgttgttccttttctaaaacttactattgttgaatgtgcactagtcccatcaatgaaattaacaagatcttagaaagaaagtttcca

SEQ ID NO: 32799 - DNA, 564 bp, Oryza sativa
ccctgaatcgaaaaattgaagtcaccgatgagaccatttgcactgtaggtaaccaaattttttgtcttttgatattttcagctggtttgttttctcttgtttgaatcccttatatttttctccattttcctcttaaccatttttccatttccctctaaccttttatccttttcttttcgggaataaatcgtgcaatgaaaagtactcgtgctgacgtgcatattcacgtgccgcagcccgcaaggtcagtgtaaccatgtcatgtggaggtttttttttattcttttttctttttttaaaaaactactgtactgttggttacctctttcataatttggagccctggcccatcctgccagccgagacgctgagttcattgcagttggcccaggagcacaggatattggcttttctcaaacaggctctcccggttgtaaacttgtaatttgcacaggaacgggaatcgagggacgagagacatcaattcatccaatttgccaaccatctccatcaagtaagcacaggagcgttcacgaatcgtcgattagtgagagagaaaatcgc

SEQ ID NO: 32800 - DNA, 660 bp, Oryza sativa
aactaaaaaaatagatatgacctacacccgctgtccaaaaaaataagcatatgaatctcgataaatgcatatcagtatatctaaattcatccttagaagctgttttttttttccttgaatgaaaggtgcacaacgcaacgtgccaatagagcaactcgaacaccggcaccctgcgctgaacatgttaaaaaaactttgaacaagctagccgcctagccgcttgtatccggaagagaaagagaggaaaaacgctcgaaacaaaagccggaggctcgccggcgttgcgtagcagaggcgtaccgggggaaggtgaaatgcgtaactgctttgctgacttgctcgctggtctgcgtcgagcttagcgtaaatgaatattcttcggttcccatcaaatccagatgatgctgcctaattgccaaacgccgagatactaaagcgaggtttgctctgtatttatcgtctttttttgacggcttgtggtgctgctacagaataacaaaaactagggccctgcctggataatgtatgagaaccgtgggggcagtgggcatctatccttgtggatatttgagttgagtactagcgtgtcaccgcctcaccggcctcacgcgagctcattgtcgtgtttggtttcgtgtgattaattcatcgctgtttggg

SEQ ID NO: 32801 - DNA, 628 bp, Oryza sativa
acacttggcaagttgatgaaggtagttggacttgggtcttctaatgtggtgcaaaggagtggtgtcaaaaccaaaagtcttgtagagccgaacgggattctcacgagatcctacagggaaatcatgagatgcccttccagccccagaactgcgaccaccacctctcccccgtcctcttgtattaggtgcatcacttccttgactactgtcaacatccctaatctgaacagttaggttgcttgattgccttgtaaacctgggagaagtacgagtgccactgccactgccgccctcaacaactttctctttacccaaacgaccacgagggaaccgaataggaggactctcatcaccggacacatcttgagaggctttctgtcttttctcacgagtcatagtgcttactgcaacaggaatcaacaatttggagtgcagtagttaggcaaaaattaagagaagtaagaatgacaggctggctggacagcgcccagaggttccgggtgcaagaacaccggaacttccggccggcaaaaaagaagaacagaggactcaaaaaaaagccagtgcatgtgaacaaatcctatagatcggtgatctacaaggtagcagaaacaagactatccaagtg

SEQ ID NO: 32802 - DNA, 647 bp, Oryza sativa
tttttagtgtgaattgtgaaaccatgctcatatgtatcgatgttgaatagacattgaggtttatgaaaataaaatattactccctccgttttatattataagactttctagcattgtccacatttatatagatgttaatgaatttacacacacatatatgtcttgttttggttgatggtccactggagtcaaaccccggtcgcccagactgtcctttcccttttgaaagaatgggatttcatatccggggactctttatctttattttttaataaagtcttcagtcttaaaaaaagagagaaatgtgtgctatgcggttggtctactaatattgatacatgcaattttacattatgtactgtacattaactttttttactgcatgaagtactcatattggacagtaggggaggctgagcaaggagatggtacggaagcagaggctcggctggcgtggccacccgcaccgggtgctgcaccctgtacatcgtcctcacgcagccggtgatgagcgggtgggtacgaggggcgccaggccgggcgacggttatccttccccgaacctcagcgagagatggtcggctggggctgcctgcccgtcaaggcgccgcgcagcgtaccggagtggacagcgcgcgcgccgttgg

SEQ ID NO: 32803 - DNA, 1527 bp, Oryza sativa
  unsure (1)..(1527): unsure at all n locations
tacgtgcaaaattactttaaactaatttttctcttaaattacttattcaaatcatgatccgattgcaccattaaattcgttgcaattaaatctttaaaacaagaccacacatggatatattccgacggaagttttttttagcttattactgaattatttttaaatattgcacgatgtttcaccaggtatatcggaattgtttcactaagtagataaaaaatgtttcactcatttaaatcgggtgttgcttcaccttatataaaaacaattttcaacaaatagcgaaagaatgtttcagttcactgcaacatttgatccatacatagaaaaacattataagtacactaggtgaaacatttttcagtggaacaaaaaaataaaacgaattcccttaatagggggtttccaaaatatgcggatttttggttgcaatggaatatttcagttcactgcaatattagatctatacatagtgaaacattgtgagtacactaggtgaaacatttttggtggaacaaaaaaataaaccaaatacccttaataaaggtttccaaaatatgtggttaatttgttgcaattgcaggtggggcaggcactatggtggggcccagcagcatgcatgcaggcgcctcggggggagggctgcgtgtggggagcgcccgatccggctcccccggcgccggtcgcccggatagtatcattttccactttgtttctatgaaaaaaggattttgtatttattaattaatagtaggagcgatgaaaaccattggaatgacatccattggatgaggaaaatgactaaaattttagtcatacgaaatttagacgcctctaaagaatatttagcaatcacatgcatggtgaaaaaaatagtgattgcagtaaaaaaaaaacatgggcgtcacatttttagaaaaatgttttttcaactagtcatcccttattacaagttgtagagaacgaatgaagcatcgggatattgagtcaaacttttccggtacatgaaaacatacgaaaataaacaatggacaataatagaactcatagctatgctaattagaaatatttgttgacatgaaaaaaaaaaagaagagaaatatcattactttggntaacacaatgacttaataacgactcttagcctatgaaaaaatgaaagagtagcaattaaaattatcttttggactaatggttagaatcccttataaatgaatatgtatcgtctaatagtttataccgagctctacctttaaatgttacttaaaataggacatgggaatccccaaagataatactccataaaagacttgtgcccactccatatgttaatatgtacgtacatcagaacatcggcggaacatagtccaataaagaacataatgttccttcgacaaataaactattgtgaccgttgtacatatacaaatgagacggctacgcttgttcgtgtttacctatcgtgtcatctctttctatctctatactagggcattatcaatcgaaaaaaattacgggtgagcgttc

SEQ ID NO: 32804 - DNA, 574 bp, Oryza sativa
ttttccgctgcatttctgtagactttataatgttgaagacgtggatctgtatgtcaacattgtcgtttgtgtaccccggctggtcctggacggggattttaatgcacattctgcttgggattccatccgggaatttctgggcgtgacattagcccacctccctctttcagccgtttcttctccctcagcctcgcacgtgcgttgcacgcgccgagccgaaccgagagagagctctctcgctctctcgttctttctctctcccatcttcgctctctctctctgctcactcccctcccggcgccgattcccgccgccgcctctgaattccgccgcgccctcgcgtcgcgcacgctctcgcccgcgcgtggcagaccgcccggtcgtcgccgcgtcagccctggccgcctgcgccgcgcagccgcccatgccgccctgccgctcgcccccaccctgtgcgcgcgtgcgtccaagacgtggaggcagcgcgtctttttgcctaaggggttctcttctccttctcccattccccgtttcggcaagaacagagctcccttttccccctcctttttccatt

SEQ ID NO: 32805 - DNA, 1244 bp, Oryza sativa
tcataactcagccatttaaagaagacaatgtcagcttcggagttcaggattccttaccagcaagtaagaggggatatgctttccttacagtcattccagtatatagttcaccatttaaaccacttaagtaaaaggtcagttgattttgagtatatattgaaatattggactagtgcaattcattcaaagtaaaaaagtaaggtgaaggtttcattttgttgatagagtgaatttctgttatatgtttcattacagttatgatgttatttcaagacaatattttagcagtaggccagttacttcttcaggcataaagagtgaatctcattgaaggaacaaaatgaacatttcaatttttttcagcagtctcggtaatcaaagttatgaatataccattgctctatagcacctctctctggcaaaatattagcattttgtctcaagacctccttatgacactatattaaacactatgggcacacaatacctatcatgtaaaagttttttatttttgctaaactcaagtttcacaaggtcaattacatcactttactgtggcattagtgagtattcactccattttgttccatacttttgataggtatcatcttcacagactactgagaatgcaggccagttcaagatctgccgatgtggggaaggagacccaaatacaaacacatctgaaactggtgataaatcaccaactagttgtcctaattgccaggtttgtgagatttcttgcacttaaaacttgtgatatgtatttatctaaataacctggtgaacgacttattgtaagctacttgagcaagtgatacacgacttgacacatcactggtttgtagctaaattaccggattgtctatagatacataagcttccatttctatgcatatttgcagcttattcatacttgaaacttcacttttgatattgatatgtatcatttgtgctttggggagcatatgaaaggggggtttgttgaattcttatcgtaaaaccgcataattagttcagagctatgttcagtggaaaaagaagtagacatgattgcttttatgcttcatagtcgcatgcacaagtttccatgaccaattttaggtactcttctgatgcaggttcttaagagtggacatttactgctctcatctaaaggtacgatttgcagtaatatctgtaacggttgcatggattctgtttttagcattaatagatactccctccgtcccataatataaggg

SEQ ID NO: 32806 - DNA, 564 bp, Oryza sativa
acggcgtggtcagggtgttccacagggaggacccgcagacgtccagccggaccccggtgatcggcagggcgcgggtggcgttggtcgacgcgcagctgcgcgacggcgacgaggacgaggacaaggaccccgggaggaagaggagggagaaggacggcctccggccaggtcaaggggacccgggagttcggtgaatgggtgaagctgcagggctggaggttcccggcgcgggggccgccggccaacgtcgtgcgcggccggttggccgtgcacatgtcattggaggcgcggacaggaagaggtgcgttcgtggtttgaagatgaagaggaagaacgtaggagtattttgattggtgacagcgtagcaagaataaaggatttgtcattgttctctctgaaaacgaattacttcgacttattttcttttactgctttgcaattcaaatcaattactatgacacaatataatatattaattagagatcatatatatattcgggatgatggtgaacaaatagtcactgctacagaaaactacataggatcatgtgactgcaagtagtt

SEQ ID NO: 32807 - DNA, 538 bp, Oryza sativa
gtcattttaacttattaaaaataaaaattaacttataagtaaattttacaaaactacgaatattttgatcgaactatcgcaaaactatatatttaaaaatttatatcacaaactacagattcagcgctaaacttatcacaaagcaacagatatagaacatcatatcacaaaactacagatttagtgataaaattataaaaaaactacaaactttagagtttatatccgtagcactattgaattgcaaaagttattgttttgtgataaatatgataaatttattttttttatattataccttaaatatgtagttttaggaaaaaaatacgatgataaatttgtagttttatgatacacttttttaaatctgtagttttgtgatagattgatcaaagtatatgtagtttcgtgaaattttctcttaatgtataggtaaaatttttatatatgtgttcctagcgacttaaaaggtgacaataaaaatagaactacattaaaaatatattaaaatcaacttcaaattgaaatttcaaaattt

SEQ ID NO: 32808 - DNA, 510 bp, Oryza sativa
cgcgcggaccgggtccacgggaagtggggcccacgcgtcagccgctcggtccacggtggaccgggcgcacgcggctggcggcggtcggcgccgtgggtcccgcgcgtcagccgcacccgcgggcgcgggcggctgacggccgggcccacttggcagccgcgagggcgcgcccgagggcggcctcgccggcgcggccgacgggagcggcgcgcccgcgccccgatggtcaccgccggcgaccaccggcgcggcggagcggcgcccgagagagaggagggaagggggaaggcgaacggcggtcttcggctcaccccgggacaacgacgacgacgagaacggcggccggagcggaggaaaacggcggcgcgggtcgggatgacgatgatgacggtgctccggcggtcggcggacggagcggagcggcggacggggtcggcggcaacacggcgaagcgcacggaggtggcgccgagtcgggaggaggaccggagcgacgacggcggcggaacgg

SEQ ID NO: 32809 - DNA, 542 bp, Oryza sativa
aggacattaaatccactggcttataaatcatataagtcaataagttgacttaaaaaatctaggccaataagtctaagcctaaacaaagaaggtctgactaactaactgacccagtgattttttttttataaaaaaaggagcaaactgacccagtgatgaatgatcaaagacattgtccactcgtgcgtgcagtcgttagtcggctcgatcaataacttcggcgaaacatcgtcctcccgttactgccccaagagcaaggggcaagggcacgctgctgctactaggccatcacgctcgtgcttggagagttggagactcgttcaagtcctggagcttgaagccgccgagggcatccaactaggaacacgttgagtttcaaaaaaaaaaagtaggaacacgtctaaatacacgaagaaaaatccagaggataatgttgtgcatagccaatgccatgtagatgaggattgaggagtgtgacccggattcgcgtcggatatacacccgggcaattgacttccttttttatgaagaataaccagaaa

SEQ ID NO: 32810 - DNA, 1977 bp, Oryza sativa
gtctatccccaagaaagttctcctaaagattcaaaaaaataaaggactgatgctcagtgcaacaaattctttacagggctgtctcacaagtttgaatgtacttgagtgctcataatataatatttagtaaccgagcttatataatgatacacgaataatacatcacacaagatccaacattctgtaaacaaattaactacagcatataccggtaccatcatcagatagtgttaccagttgggagagatgtacatgaactatgaaatctgaatggatgcttaatcaactaatgattcagcttccataccggcaagcactagatcacataacttctcaactaaagtctacaaggttcggccagccaaacggcagcaacctccttaacctcctcgtttgacgactcatttcacacaggattgtgttcccatttcaacaagcaacaccagcggagcgcaatttttcgtcagtacctcacccgttacgcaactatcaggcgattttgcagacctcaagaccccccaaatcaacgaattcggaagcttgaacaggcaaaggatgcgggggctcaccttcctcgaccttcttcttgacgtgattctccctggcctcctgcaggtaccccatggtgcagcgaccaggcgcacgccgtatcggatcgacgccggcgagggcggtggccggcgggggggatcgttcagtcggagttaaaccctaactccctccttggaaggggacgcggacattgacggggaaggtctcgctgtgttttcccctgttcgttggtgggcgagggagaggaagtggcaaatgggctaaacttggtcgccccaaaaaggcccaattcatttggcccaacaggccgtgtaccatcagcctatatgggttttctcccctctcctcttcaccaagcaagttttgctgaactgttgaaaatggccaaagttctcatgaagcagcatagatgagagttgagaccagtagacaggtacagagtcgctgccaggatcaccactgaatcagaaaagatgtttctctgaattgttcaggttagagataggagttttttggagtgaatgctcggcgtagttagacctacacagattaatataactcatatatctgacacgtagccattcatgaattatggtagtataatgattatgtacctcctgatgaaataaggaatgtttcttcgtgtcactgtagtggttttcggttcttcacatgggacctgatgattggagattctggaattgctcgtagcttcaccaaatcgcacgagatccttacagctcttttgtaaggcggataattccaattcgttcaccatcaacgaccaaaccaggacaaaatcaaactagtactactactaatcaagttggtaaggagaccaactgacgatagcatccagccaagctcgacgcttttggcaccaacctacccttgtaaaatgccggatggcatcgccgtaggaggccgcgtgtttccgtactacactcaatgtgtttggtgaaaaaagaaaagcgtttcttgatgcatggttatttgacttaacactaacttaccaaggttaaaagcagatactactgtctgctactaaaatgactgcaggtgcatgtgttttcttacggatcaaggttgcagcagagccaagtcagaggtgtccactgcactagacatcccgccgaattcgatatgatactgaacatcagttgcgtttgaacacgtacgcgcatcggattctgatggttttgcggtagctgacgcctggctggagctagcctgcacgtagtgccgagacgtcctgcctgatcatgtcaaaaacaggtcagaatcaggatagtttccacaagaaacgaacccaaatcccatcggcgacagaatcacggacacaagcacacaactcgagctgattgctcactccacgacgggataagatcataagaagaaactgcaaattaaaccctgtcccgatcg

SEQ ID NO: 32811 - DNA, 581 bp, Oryza sativa
tgggagagtgaaaaggattaggcaactctcactaagataagaggaggatgaggcacaaaagaagcaacgacaaaagaagcaattaaagcctacgctatggtcgactagcttcgtcgctgggcgggcaaaagaaaaaaatcctgatttgagtgtgtcgacctcgacctcccacttgcggcaattaacaattttggaaaatcattggcgccattgatgttgtccacgggagtcaccaaccctgcctgccgggcttgtcgcccgacgacgacgagaaccatctccctactcaactactctaccctatatgcctcccactgctcggcacttcggctagcccgtatcaaaatctccaaagaacatggagccaagcggcatgttaggttgtctttgccggctgtggagccgcattccccggcgagcgatacggattgagatcctctgacgtaacttcatactgacttggtgactgatatgtgggttcgagagtggtggggaactatatgccagtcacggtgaacagtaacgtcagatgatcctcttccatacggtagacatgggccatcagtggccagagtgtagac

SEQ ID NO: 32812 - DNA, 1182 bp, Oryza sativa
aaacacaccatacctctcttttcctcctattctcatgatacattacttagaaatcataatttattattaaaaaaatagagaacagtatcatccaaagcatatagtgaatttttgatcgacttatttttgttatattatttataactaaagttaaagacacatattcacaatattcaaacttttgaaataaatatgtttgattttggtttatattcttacacttttgcgtacattcaaacaattataaaaaaaattatgaaaaacatttaaatgttcatattttaattattttatgaaatatatctaacttataatctattgtattcctttatttaaataaaatattaatcacatataaaagttatattgtagtgctaaatacatggtgccgacatatgacacttaatgccatcatataataattgatgacatgaaatttttttaaataatttcacatgataaaaaggatcaacttggtgtcaaatatcgcttgacaaatatattacactaattcaaatctacatgcagggagaatcatatgatcatcggtttaacttaaattattcaggaaaaagcaggaaaataaagtctccaattcctcaccgtccccataacatgcacacaacaccaaacgcccccttcccttttagcttaggctcttcgcactccactcctccctattcctactttttagctatcaaatttaaagacaaactatgaataatattgaaaaacccatattttaagctatacatctaatttctaatctaattgttgctctattaaataattaaacaacaattcatgatccattatgcattttgaacataaaataagagttgtataaagtaaattagaaaaatagaaaaattccaatagggattgaattaaatcaattgggcagaatataataaatttgtaaaaaatagttattacttttcacaaattggaacaaccatatatgttccatcgccataaccatgtttaagtgcttagatgttaatgaccatccatctatcttatatcatgtcattatgagtttttcaacgaattattacatatataaaacatatagttggttaaaaagttatctatatgctactattaactttaagtttaggactcatgttgactaggtatgtttttagaaaaaacactaaagatcacatatataatagggaa

SEQ ID NO: 32813 - DNA, 607 bp, Oryza sativa
atccgtcatccctccttttaactatcattacaattttatttagggttttgttaatagtttttagatgtgccatcaattattaccactctactctttttcaggcatgttgcttggaagtcccgtgaaatgctaccactataatcctctacaacccatccactgcctcatctctttattgtcatcaggaatttaaaaatcaaacataattatcatttggattcatcttttactttctagaagttccgccaaaccatcatcggctttgcaattgtacttctccatggctcgtccgctgcctcccctatttattgttattgagattttaaaattgaatgcgactatcatcggggataattttttaccttttggaagtcctgccaaccgatgagatcgtattgcttaacagtctgtccgtcgtccctccaattaatcgttattggaattctattagttattttgttaatagttttttgatatctcgtcatccatcaccactctactccttagaggtatgttgctacttccatatgtgttccaaatgaatattttttttccaaaattccatattttttattctgatatattttttttataaattatattccta

SEQ ID NO: 32814 - DNA, 609 bp, Oryza sativa
gcctaaaggctttcgtcttgacgggatggggcaaggcgtgcgtcagaccgccagccgccacctaacccgtgatctgaccggtctgtgactggtcacagaccggataaaggaacgcgctgtactgcgttgcatgcagcgtgacacgcttgaccagactgcaataaatgctgttaggtgagcacagctgtgctcacttatcccatatatgtggcgcaaacttccttaaggggtcggggtgcctcggccctcggggccggggcaagcgcaacctcgggggaaatcaggaggagggcggacacctcaccctcgggcccgacgttcccgaaggtgccaggccacgtgggcgattgcgtctgcctcaagcctctggtcatgatactcccggtcccatatcaccgacaaccgtgattagtcttacccctagttagctatcgaactggtgtagttcaagtggttggttgggcctgttgcaacgtggtgtagcgttagacaatgattggttaatattgattaatactacaactgttttactgctttcaactactgcttttaaatgctagctttatgcaaaaggacctttagcctcccttggatatatcctgcatcata

SEQ ID NO: 32815 - DNA, 1837 bp, Oryza sativa
atgctttctttaaggagtctctctcctatgaaatttggtgaactctctatgcaaagcagattatggacatctttacaaagattaacagaatcttcaaattatacattgaccgctaaatacacacacaatgtttagtgaatcttatgacaatccaatccaaggatggaacatcgtttgtatgtgggaatttctatgctcttgtcaaatttgggttttataccgttgtatggttcaggtatataccagttagcggtatagaagcgttacccgttgatctgtttccagaagattatcatgtctttctcaatgagagggcaaatgtgactgattatagtaaggtagttttcgtggaaacgaaggatcttactccagtagtgctgtctgcctttcaaaatgattatccatttaatgaaatgtttggtcctataccggaaacagagagtcctcataaaagaaaatggttactatccatgggtttaggtataatgatcactttccgcttatcggtaggtgtgctacctgacataaacgaaattctactaaattgaaaaaatgaagatgaaaccaaatactatgataggattgattggattaaatagataggaatgattggattgaatagaacaactatgaaacataatagttgattgaatagaatgttggtctcacaagtcggtacggtgtgcatatccatccttggaagaagtagctccgtcccagtctttgtcggaacttgaatcgaggtaggcaaaagaatccttactcggaacgagcccaagataaaaggtctagtccaattttagtcttggttgtacatcggtactacgcacggtaggcatttcttcccgttatcgggacttgcacttgcccggccttagtggtattttaatgattttcttccccagcaaatcaagtaaatagaagtaataattcaagtcccaccgtggatttgaacatacttcgcttcgtggagccgaggattagatcgatctgaactttcatttcttccattcgcagtaatcgttggttttgtccaattccttcaatcatcactgttttgttctgtaattccatttcattttatctattttcttcaagaaattccattgatgtgcttttctattgctctcattcattcctattcaatctattcaaaactacgggtactggtctcaatgggaaagagccctaattcaatatgtcgtttctagagtatcagcaagtggtaagcggattacaagcaagcggaaggtttgaattgactagcttgatccctactattaacaaggaagaagtaagcaagcaagaaagaaagtaagttcagtctcttatttcgaagttcgctgtgctcttgtcaatagacattctgctggaactcacctttatctttagagatgatgataaatattctttagagactcctctaaataaaagaaatactttacaagaaaataaaaattatgtttatacggacggaattcggtctatcctttattgaatatcattgggcctgcctcctatctatcaactcattactctcctttgttctctggtaagctctcgcattgccttaaaacaagcattctttcgtattcaaagaaggtttgcttgcatgttctagcactggaagagacgaatattggttgccggatgctattcacatgttaaagcacaaaaggtacctcaaagtttatagttctaagctgaagaaatagcctgagtcaacttatcttctttacaacctccaaacaaacgatttaggaaatggaaattggaaccttttggagttacctagtagcattggaaaccttatgttcctttgataccttggcttctt

SEQ ID NO: 32816 - DNA, 760 bp, Oryza sativa
cgattcatggcactctgcattcgctcatcatccaataataccacgtgcaacattcgtaaataagctagtgtaacatcaaaaaaaatatttattgggacatcaaaatattgccatgtgcaacatttttaaaagattcatggcgaccttaaatttaaaatgtgcaacatagtcaaattctgactgaaacattgtgcatcagacgctcgatcacgggcattgcgaaactttccatcggacgcccgatgcccaaaaaaattcactctgtcaaatgtttcagttgatcaacgcgtgaaacatcaagttatacatgcggaaaaaaaaatcactagctaaaacatttaaaaattttatgaaacatgatacagatacacgttggaaatatcgctatcacatgtgaaacaactagtgttaatggattgaaccatatgtttttcttttatccaaatataatcatgcgatatcttgtgaagattaactaccacgaatacaacagtgttatcggatcgtagattggttattaggttacaagaaaaatcgttttgaaactcgctaaatgcatacatgcatgcatttgcatgtatgaggtggagagggagaataatgatcgggtgctttgcgaatttgtgaaacacgcttaagacacatattggaacatattcctatcacgtatgaaacaaaaagtgataatgtgatggaaccatataattatttttctcagaattgatcatgcgacatcttgttgcaaaaattaatatttacg

SEQ ID NO: 32817 - DNA, 757 bp, Oryza sativa
  unsure (1)..(757): unsure at all n locations
cgatgattgcatctctgctgtagttcatcattctctttgttttttggcccaataaattttatattcagtccaatactccagttgtacgctaaactctttggattgcactgtgttcagtaatatcatgaattggttcacttttgaagtgaaaagaacacacctgactgggttgacagagggaactatatatatgactgaaaactttaaaaaacacggacgaatatgctatgagagtcctatatttaacatggaaaatgatgttattgcttcagactatttgcagcatttagcttgccgtagctaaatatagcattcctctaagcctcaatcagtcatttttgtcatttgacttagcatagaatgtagttctttggtcactgatatctatataatcatatcacaaaaactgcactaaattatatgtgtaggatgaatctcattgtaccaatctcatgtcagccatcctttattttgatatattgatggtaaaagctgggaaaaattgagcatgaagtgctagctacttataatattggaagggagtgtctctangtcaaatgtgcagattatacttgcatagaatcacatgagggaggtctagcccattatttcttgttaagatctttgtaacatcttgcattgggggcggcttaccatgtttattttggcatttctaataaactgagtcaaaccagtgatatgtgtggagtaacataaccatattttgaccttattcttttctctttaggtaaaatgc

SEQ ID NO: 32818 - DNA, 669 bp, Oryza sativa
  unsure (1)..(669): unsure at all n locations
agtttgttaaggggtcaagtctatataggatatgtaatcgtactgttatggcaactaataaactaatcaatctccaagctcatataattatcgttccccttttctcttcttcctcctacgttccctcttccctatgcatattctttctttcttgtatacagagccatcaccaccgttgtatatttctttacttggtctcagaatgcactgaacgtttctactttttatgtttactaaaatagaaagcacaaattgtttatttgacaatggtattagttgtatggagtattgtgtttttaaatttgagaaatgaggaggtaacggttaagatgcttgcatgacattactttgacattaaaccttgactcaaagtgcttattgccagggactcaactttaggatgtgtttattgccctgggagaaaaaaaaaaataccaaaatatattgaaagcccttcctgacttaattaaaagtcgttgtattgtgtttaagttgatggcaaatgcaagagctggcacctataaggaaaatgaggggtgttgaagcaagtgtagagcaccaaactttttctgcaacaaccctatcttccatgggaaccactgnggtatttggtttgctatagaatgagaaccattgtgtagaatttcgcaaagaactttaaccattgtg

SEQ ID NO: 32819 - DNA, 1315 bp, Oryza sativa
  unsure (1)..(1315): unsure at all n locations
aaggcgttctcgcagcaaaatccttcgtgaggtctatctactgggcttgagtttgaggtctacaccgtaggtagggtcttctaaaaaccacatgaaccttcactcttctgtctgaggagggcaaatataggtataaagcctgggcgagtgtctttgtccagcgcgagaaagctcggaattgaatgctttgaatgcgcaaaatgaatgctttggaacagttggtactttcagatcaaactctccatgatatattaggttgtttcaccaatctgttgaattggaatagagctcacgaccgtgaaacccctcgttgtttgatggcacctatcttgttcccttcggggagaaatactactcttgtttttcttgttcttctttctcgaagagatgggtgcaccgccttggagaaggtagcgtgcctccaaggtaggtggtacatatatatacatacatgtacatatacatatatatacatacatgtatatatacatatatatatatacatacatgtatatatacatatatatatatacatacatgtatatatacctatatatatacatacatgtatatatacatatacatatacatacatgtatatatacatatacatacatgtatatatataatcaaccatgcagcaaacagggccatgtaaataaaaaaaaatggtgcaccgatctttagtcccggttggtaacacaanccgggactaaagatggtttggccggccacgtggctgaccgatctttagtcctggttggtaacacgaaccgggactaaagatcgatctttagtcccggttatttcactcgggactaaagatagctatctttagtcccggattcgtagtcccggttggacaaccgggactaaaggggttaccaaccgggactacaaacggtttctccactagtgtcggcacgccaccagaacgacacgtgacaagacaatgcacaccagcctcgcgataggctttcaccacccttgtgtggataagggtggactgtcaggcagtatgattgactgccatgccgcgagactggagccacaaccatctcgcagtttctcttatccgtggctgataggcgggcccacgggcgtcaaccgtgtttcaggcttctactctaagctttgctagcatgctcaggacacgcggcgggtcggcaaggtctccgttccatctaggcttgacgaccaggcccactcaccaagaagaaccacgaccaacatatacctaacccctatgttgaggcccatttgtaagaaaccgatcattgtgatatccccttgcaactataaaggaaagaccaaa

SEQ ID NO: 32820 - DNA, 683 bp, Oryza sativa
tcgggaatttctgggcgtgacaaggggtcacatatagttggtgtgctttgtgaactgcgatcttgacggtgagactgataggaaaatgtctgaaaaatggggagaagccgagtaggataggactcgaaagccgagctattaattgaatcatgcttttgattgaacgacaaaacatcgatctgttaaagtcgataattctgattcgtcttcggggtatgccgtaaagatagccgagaccgaggataggtgccgatctgttttacgggcagtaagtaccgttgttcgaaaggaaaggttggcattgcctaaaccaaggataggtttgaccctaggattgggattttagaaaaaaagggatagcgctcgtcttttctctactctagcgtatggactcgtcccaggattgccggagctagcattaggtgagattcctttgattgaatttagcttgccatcatggtacgctgcagttagattaggaaccgtataggcggcctcatatacccggaagctttggattcacggatccgaaacaagacatattcactgctactgatatccctccctttgctttgagccgaagataacgataggatttccggaaccgaaactattattaattataattagattgcgaactcaggagggcttagtaccagctacaactatcaaatccgttaagg

SEQ ID NO: 32821 - DNA, 3027 bp, Oryza sativa
agaaactttgccacacctctagaaggtcctcgaatcgactatctgccctcctcttttcattggtttgtttgcaacggtttcccattctcctatgcccctctaggttaaaaatagttgttgttttggacaaggacatgggcacggtctccaaaaaataactttgaccactacttttatatatatatatatatatatatatatatatatatatatatatataggacactcatatggggcaccatggtatcaaatgcacaaaatcacttaaatttttcaaaattttcaaattgtgagtatatacctagttataagaattcgattcatacctatacctatcaacaaataactcaaatttaactttatttcacaatccatgattacataactaactaattatatatttggatgctatatacctagaatcaaaatctaacaaaaacaagttcaaattcagttcaaacttgctttgaactagttagtaaagtagttaatgttaatacctaaatatttgaaaaagtttcatactcatttgaattgggtatatactcaatttcaaccatggtgcccgggcaccatggagcaccaaacaaatttaattaccgtcctgcactccattcttcaggccacctagaatagagatagctaagctagacgacaggcatacaaaccaaggtttcaatgtgtgactatatttaatcactccaattttcttttgactcgactatttgatttatgaacaaattaaactgatatgcttgttgatcaaacaagcataccatgcatttggctctaactactgccatcattggataaatgagaaaactgctctcttgcccaatctttaggtgggattccctcaggtatcctagtgtttgttagattttctcaattcccccatagtttaatggaaatctgtgtgttttcctcaaagtcttctgaattttccttgttttcatctcaccttcccgtagattatttgtaattgcaagtactaggctattattttcactaacaaaaagctgatcatacctcaactaaattaaaagacctagaaatagcgtaggggctacggtcacacgaaggtgtgactaatgaactagtgactgtgattgttctttgtcagatatacactgttaaaagaccataatttattaatcaacacagaatctactgttttgttggaattgttccataagtgagttgtcagttatgaacacatgctgtttattgttcattttgacatgcatgaagcattgaacacatgttgctcctgtactaactgccttattattctttttcttttagctcgtagtttggtggtgcagcatttggggataatgcggatcctgctgtaaaatgccttctgcggatacaaccatcttaagagtgcgtgtcagttacaggatacgagggcacagcaggcccgcttgaattccttctccatgtggtggaaaatgcacctgcactggagattttaacagtagatgcagcctgtgcctgataaaaggggaactttttaatgctttttgtcaggcttctcgacatcacctcgttcggaggctgccgcctagcaaagttggtcctgctgtgagataaaaggatttatttgtactcaggaagtcaggatatgcgaggtttaagtagcaggtcattagtcaattactactactacctcccatctgttgctaggtttctatatattgtgacagaagtagtaaaattgcttttgccaatttcatttaacttcactatgtaatgctgaatgaagtatatgtatgttcatgaagcaatcccccgagaaatgctaatcttgaaattagatataactacatcttccgttgtatgctgccagtgaactatttgccatcccttgtgcaatttttgtccaatgtgtcaacacatactgtcaaagcgtttttccagcttggaaaaagtccactttgactcccttaaaaggtacgttgaatctaattcgtaccccttaactagaaaatcagattagacgactctctcgaactattgaaaccagtgcaatttgactccctcagctgttttggagggtggttttgttgatgtggcggtattgacccggtctttgttccacgtggcgcttatgtgacgttagaattaaaaatatatgtgggacccacttgtcattcaaacaaaaaaaatgtggggcacacttgtcatcctttctccctccgacccttcttcctcactctctctcccttagtgcaatttgactccctcagcggttttggagggtggttttgttgacgtggcggtattgacccggtcttcgttccacgtggcgcttatgtggcgttagaatcaaaaaatatatgtgggacccacgtgtcctccctctttctctcccttatctctctctctctcattcagcatggcggcggtgggcgatgggtgcggctacaggaggaggccaaggatttggggggaggggaagggggcaggcaggatcgctggggatgacggttggtctgcaccgtcggtcaccaccatcgtccattccggtccaccaccgccggtccacacctgcacgcggcgtcgcccgaggcggccgatgcaacaacgacggcaatcccatctcttcccctcctctcctgttgtcgccgctcgttgatgttgctgacgagggatagtagcgactccgtctccatctcttccctctctcttgcttggcggtgccagggtcaagcccgtcctagtcggcgtcgaagttgggggcacgctccgcctcagtcttgtctcgggcggcgacgtccacttttcctggtggctgcggaatgggtaggttaggagctctctcgcccccgcagtcggttgcccggtcgactccctgttggcggcagtggcagcggcagtctcattgggggactaagagacagatggtggcggttgaggaggccggaagccctggagcggctgctttcgcttttaattgacgggcggtcgttctcaccttctcggcagctacttgaacggagggagagagagttcacggctagc

SEQ ID NO: 32822 - DNA, 615 bp, Oryza sativa
gggcgaattcgagctcggtacccattttggtgattcgtaattaatattaaattattgagggatttattatcgtatttcggagtagtaagcatataagataagacaagtgccgcagtaacaaacatgtaatacataaccattaattcaattgtaatttacatacaaatatataatacaagtggcacagttttttcatcatatgtataagtagtgtacatgttattgcatatgttctttctcccactctctgagaggtttaaatttgtcgtccattgcgagctcactctggttgtcgtagaagagacctcttgcgttgcagacatcgcgacggatgaatcggcagaggtcagcggacacgttcaagatagtagtgtggttgaatcgttgtgcaatatatgggatttcggggatctgcacacagaaaggaaaataaaacggtactcagtgagaagtgtgtgcgagatgggtttctttgtagagaagagttcgatgacctactcggttactggttgttttgtacctaccatttactctgagcatgtcgcacacgtggtaagcacacaagttggttcctggtggttgtttgtagcactgcgatataattatggggaccga

SEQ ID NO: 32823 - DNA, 1540 bp, Oryza sativa
agagatagatccggtcaccggttgccgacgcatgccggtccccttaccctccgccggatctgcaagggaggataggagagccgtgtggcaccggcgtctcgtgccacctcccccgaatctgcaaggggaaggaggggagggggcgggcgccgccggatccgcggcccccaagcctcccctccgccgaatctgcacggggagggaggggagggtgcgcgctccgcccccgctgttgcctgtgaccgccgccaccgccgcgtgctctcctcccgccgcgcgccgccccctcccccggatatgcaaggggaaggaggggagggggcaggcgccgccagatccgccacccccaagcccccccccttcgccggatctgcacgggaacggaggggagggggcgcgcgccgccgccgctgtcacccgtggccgccgcgtgctctcctcccgccatgtgccgcccgatccaccgccccctcccccggatctgcaaggggaaggaggggagggggcgagcgccgccggatccactgcccccaacccccctccgctggatctgcacgtatgggcgacagcctggagcctgtcccctatttttccttgcggtttcacttacgatccgtatgggaaaaggggggggggcgtccaggaaaatctattctgtagtagtgacaacccaatggttgggtcgggcctgcacaggactgacccagttaagccgtgttgtactagggctgggccgtccggccccaggccttttggcattctatggatgtgtacattgtccgattggggcagtatcggatgtacgggagcaatgagccgggaggggagtacaatctgagcatacaggatccggactcccgaacggacgcgcccgcgaggagcgacacgctgtagcagtcgacggataaattttggcaatttgaccttttaaaaaacttatttgaagaatagaccatgtcaaaaatttattacaaaaatatatcaaaacctcagcgctaatgggtttagcgctgagttataatatctcagcgccacatattttggcgctaaaaacctatccgagtagccactatacatcatatcattggatctgagcgccaataccacaggcgctaaggttttggtctatttttgcaatatgtttttgacatggcctattcttgaaataaattttctaaaaggatcaaatcactactggagaactaatttttgttgggtcaaccaaaaatcacaatagtcccggttacaaaaagaaccaggactaaaaatcatctttaccctggttgaaaagcccataaccattttatgatctttagtcccggttgataacatcaactgggactacatatcattttcagtcccggttgaaaaagtgtccgccctcctacccgttttattcccgtttggaaacaccaaccgggacttaaaattgcgataatatataatcccgagcacttatcctccaaccacctctacccttatcctcgtccactcttttcttatcttctccctttcctctcgctcttttcctctaacttat

SEQ ID NO: 32824 - DNA, 590 bp, Oryza sativa
tctggaaccacggtcccacaacatatttacttttaatgcgataacaagttactttccttttcttttaagttacttatatagtatatgtaaattactttcaggcttcagtgaatttacttttatgactaagaagcaatttaataaaatctaaaagtaatttagataaattataaaagtaatttgtattttttcataaaaaatataatcatgaaatcggatcgtaaatcggatgagtaatttaagagaaaattctataagaacaaaaaaaaaatgcatgcacttttgggtgtactagactaatagtaacaatccagcgtacggtttcgtcgtagactaatagtaacaatccagcgtacggtctcgtcgtagtcacgtgaaaaaaaaataatagtgttcacagcttgaaattttccctctgtgcaagtcgaatttaacttttctttctaataaatatagtaattttgtattgtctaatttttatcctattttttgatataactattaggacgacattttgatacagtgcaccgtttggcatatatgccttgtgcagaaccttgtcgccggtggcgcggacaccagtgcagtga

SEQ ID NO: 32825 - DNA, 680 bp, Oryza sativa
gaattgaatggaaacggccgtatgacatggactgtctagcagcctctccgtgcgacactgcacggtctcacgctgtgatagtgcgagaccgtccatgtggtcattttcacgtcacggttacgcgggatcaatagtatatttctattgaacaaattacattccgcatattcttgagaaaagatgaacaatatattttcaaatttaattcccgagtaaatcacattggatggacataaactcgttaggtgggtgcaatttaatatataaacttgtaaaacgcttgttttgttgcatggtcttatctaattcgtgcaaactaggaccaaaatgtcttagcaagattaattttaccaagttgatgttgattagtatgtgacgttcaaatatgcagtgagtgcataacacatgctatatttataaacttggtctctactttccttcatcattgaaataatgaatttcatatcttcctatccttgtatcatagctcgattttcatatgttcatcgacaatcactgcctcattctatcttttaattgaactaaatgtatgtttaaattgcaacctttctcagatttatatttacgtctagtatcctaatcagcacctaaattatcaagattaacaatgtaatgtcattttagccctagttcgcacacacttgataagttcgtgcacc

SEQ ID NO: 32826 - DNA, 735 bp, Oryza sativa
  unsure (1)..(735): unsure at all n locations
attccaaattacagttatttttaaattgtattcgtacttgaactcttctttattttttttctaatttcgtattttatattattttatttttattctgaatttntaaataatctcgtattgggttattatgtggactcttgttttaaattccgaatctaagttatttttaaattttatttctactttaacttttttcttttttctaattttgttttattttatttttattttgaattttaattaatctcgtattgggttcttatatgaactcttctttcaatattgcttacttttaattccaaatttcaattatttttgaattgtattcctacttggatttttcttttatttttcttcgattaatgtggaaatttctagccccacagagaacatgatacctccattcaaagctgttttaataatatataatcgataaatatcattactattcacgatattggctggatgccattgaaatttttcaaaattgaaaccgtgtcatcgccgtcatactttacattatcacaaatcatatgtatgtcacagctcagttgatttaaaaagggatcctaggggaatcatcgggcatgcccttgaagtcttgcttttgtacctgtacgtcaaataatggagtagcatttatcccgtgcataagtattgtttcacggcttaatgactactagtgtactgtgtccatgaggaaaatgcaaatgaaatatataaggccaagcatgt

SEQ ID NO: 32827 - DNA, 828 bp, Oryza sativa
gatttaacatatcaatcaagcatgtaagatataaggtagttaaatcaggtaagaacggctgaaaccccgataaaaccctaatcggcaaccaaaaagcaggctagagattgagattctaatcatgacttataaggtcaaattcaactgatgcagctataagtatgaaaagaaggaaaatatctagacaatcaagccgttggatgtttcataggatggtggatatcctatataatctaagtcaatattggtatttaacctaatcggctaccttcaacgatagatgttagccgattgaaggttaaataacaatattgtcagagattatatacgatatatgataactcgacgaattacataaacaagattagagtgtcgtaaagatggaagcactaatcccgagaacgcatgccgccataacaagctttacctctagttgaagatcgaaaccgatgcagctcaacccgaaagcaagaactcgtcgaaaataaacaaaagtaaagggtggcgatacgctgagattgtattgaatgtctgtttttttattacatgggttcgggctctatttatacccgtgatacaagatatgtccgtgccggacacgacatctatctctaacaaactctaaaataccgtaagtctttgcggcagacttttgtccaaacatatctccaaggaaattacatgaaatatcctaattaatagatacaattaccttccgagaactttatctccatcgcggcaatcctcgtgaagcaccttgatcgattctagaagcatcttcgaaatcatcatcatcggaatcggctgcaccacctctaccggctgtat

SEQ ID NO: 32828 - DNA, 690 bp, Oryza sativa
tgaatagtctagagcctccgactgagcattaatgtggatacttatattttggttgttggccatgtttagcatgtttagagcctctatgcaaccaatgccgtgtttcgcccctttgatcctacagctcaggttgcggttgcggtttaacgcatccagcacggtattcaacgtgccagtgcaatcactcgacatgtgagggcgggctagttcatgatcttgccaagtttgcattgatgcgcgtgaactagaataagcatatggtaggtgcttcttttcaccatgttgatctgccgttgataatagtcctactttacattaccttgtaacactcaactcaatacctacactctgtactgacatatgagctacatacaattacctttctagactgatttgtgtttttcaccttagccaatgtctaacacttataatgatgtttacactgaatttacatgagttcgatttcccttttattatggtcacattttttatgtgcaccacctagttcagacgacggataacgttttgaatgatgatactctagacgcgccctccttacatgcaggcgtatttaatttatcacttatcctgaattgatagtaaatagcacgtacctggcatgttgctgcgctagattactcatttctcaagatcttgcaccatattacatccacctacctagtttatgca

SEQ ID NO: 32829 - DNA, 817 bp, Oryza sativa
gcggccggcttatgtcgaccgcatggaaagatatttttccatgcggtccctaaagccgcccgcatgcgatgatctgtgcctatatatagggagcgcggggagccaaaattttctaagtcccggctcccgcgaaaccctagccgccaggctgccaaaatttcccaagtcgccatcgccgtcgtccccgccaccgccggctcctcccaaaagtcgccccgccccacgccgccgccgccgccgccgtcaggacctctcccccctcgccgttgccgtcgccgccgccaggacctctcccccctcgccgttgccgtcgctgccgccaggacctctcccccctcgccgtcgccgtcgccgccggcaggtcgccgtcgccaccgcacgaaactctcccccctcgctgttgccatcgccgccgccaggtcgtccccgccgccaagtcgtccccgctaccgccggctcctccccgaagtcgccccgcccctcgccgtcgccgacgccactgccaggacctctcccccctcgccgtcgccgtcgccgccgccaggtcgccgtcgccgccgcacggacctctcccccctcgccgttgccatcgccgccgccaggtcgtcgccgccgccaggtcgtccccgccgtcgctcggtaacatttacttttaaaaaaagaaatgtgaaatgtgcaattgtggattgtggattgtttaattgtgcatcgtggattgtgatatgtgcaattgtggattgtataattttgagaatgtttaattgtggattgttaaatggagatttatgtttaaattgggacttatgtttaaattggg

SEQ ID NO: 32830 - DNA, 586 bp, Oryza sativa
cgaattcagcccaaccgcccagccagagtatgttcccattagaagcatgtgggagagacagaagaaaaagaaaataattctactttcgtttataatattttttctctatattttcagatcactacttgtagatatattttttatacgtattagtgtaatgcatttagatacacgtagttatataaattatcatgcacctatattttttaatggaatgaactgtgagttttttatttcattgtgacacatttcatttctcaacggttttgatataaaatatttattcatctcatgcacgtcctttttttgtgagtggcatgcgcatggttatatctatgggcgacattataatgcctgcacgttgttgatattttatacggtctatacatcctatatttatattataccgtgaataaaataaatatatattcatttaagttgtatggatgaaccatacagaagatatagaacaaaaaattaataagcatgcatctattaatgtatacaaaaaatttgtctatattttttcttcatatctactcggcttcaaatattttcccagtatattgagatcgtgttcctttgc

SEQ ID NO: 32831 - DNA, 703 bp, Oryza sativa
  unsure (1)..(703): unsure at all n locations
atcaccgagaagttcaatcccctcaggtgcaggtatgtctagttccaaggaaacgtggtcgctatggaccttggcgacctgtacccttgcgtaatcctcagggattgccgtgttgtggaattgacgtccgggtatcgctaaacccgttgcaacctccttagtctttccagcgcggccgattggtacgacgagactgcacggagttggtccagttatactatccacagggaaggtacttgtctgcactgagcctacactgctgggtacattagttgtttgctgtgcggattgtgtgggttgctggctatcnagggaataacctggaaatgctgtcgggttttcagctgccaacgagtagaagtgttccttcacttgcgcatagatcttgtccgatagttgttctttgtatttgtctctcttcttataacttggtgcgtcttgtggaaacccgaccttccaacttgtctttgaggacaaaccccttacacgtccagagtgttcagccgtccccaacgccgcagtaagctgatctctctccctccgtgggacgaactgtcctgatctttctttctcgactatctgctgcaaattagtagtcacttcttctatgtctggagtctcgaatagtatgtctccctcatccgagacttgacctgtgctgcgcgcccaaacccagttcttgctacgttcaaccatggggtct

SEQ ID NO: 32832 - DNA, 577 bp, Oryza sativa
attcctcatggagtgtacatcacgtgagaatcctactggacgtgttgtactaaaattaaacatgccaaagttcaaaaaaaattaaacgtgccagttgccaatttacaattttaggtacagcacgccctatacagctatatgtacctaggacaattctgtgctgttttgtgtgaaaagggacaaaacaaaatgtaacacatggtgtttatcatttgttacacactattagttctcgtatttctcttttgatttaatatatgttggataagaatgaatttattaactcgtcaaatgaactactccctccgtttcaagttataacatgtattgctttaagtttgactaagtgtatagtcaaatatagtaatatttacattaccaaattagttttattaaattaataattaaatatatttttataataaatttagcttaggttgaaaatattttttatatatataaacttggccaaacttaaaacagtttaatttgatcaaagtttaaacatcttataacctgaaatagattgagtatgtaacatagttcaccaaccaacagtgaatgcttaccacaaata

SEQ ID NO: 32833 - DNA, 583 bp, Oryza sativa
ccgtggttcttttgcattttagcttgatttaagggctcgtgctcaagtccgatcctcaaatggctcgggtcggggctagtgcctggggagatccacatgtcgagactggccaggccgggaacatggtgaccgaaggttatgggtgacccgattgtgggtttttgccgattcccccccggagttcaccacgccccggggcacggctcggttctgggccccgcttggcgattttagctgaccgaaccgagcccccgagggcaaggttgagcacgagtgaccttatttcaagttaagattcttcagaaagaaaaacggcacagacacaacctttaggaaaatgaaaccgttttattggaatgctgaaataagaaaaagtaagactgtgcatgtgtggtagcccccggctaaccctgcacacccgaggggggtgcggggttagcccgagcccgaaacctgacacccgaccccccctttcccttcagggtagaagcgaccaaagtgctcgatgttccacgggttcggcagttcaatgccgtcgcccgtgccagccgtaccgagcccgggcgggggacccccatcactc

SEQ ID NO: 32834 - DNA, 1268 bp, Oryza sativa
atcgtgggttctagatggtctcttctttcaatagtctttatttttctattagcaatttatttatttataaattgtattcctagttaaaatgttatttttctttttctaatttcaatttgttttttatttcgaattttacttgatctcgtactgtgttttatacggactattatttttatatttcttattttcttttccactttatgttgtttcaaaatggtattcctacttgaactctacttttaatttttctaatttcagattttattttattttttattctgaattctaattaatctcgtattggtttcttctatggactcttctttcaatgttggttatttataattctgaattaccgttatttttaaattatattcgtacatgaactcttcgttatttttttctaatttcgtattttagttatttttttattccgaattttaattaatttcatattgggttaattattatctggactcttattttaaattccaaatctaagttatttttaaattttatttctactttaacttttttcatttttctaatttcttattttattttatttttattctgaattttaattaatcttgtattgggttcttatatggactcttctttcaatattgcttatttttaattccaaatttcaattatttttaaattgtattcctacttggattcttctttcatttttctctgattaatgtggaaatttctagcccccaagtgaacgtgatacctcctttcaaagctattataataatataatagataaatatcattactattcgcgatatcggttagatgccactgaaatttttcaaaattgaaaccgtgccatcaccgtcacattttaaatccttccgacttcttccttcttccttctcttctcctctcctgccttctcttcgtctcttctcctccctatagttcggtcatgcctgctggtcctcgatgaacggctgccacgcctactgctcctccccccactgccctggtgcgctcaccggccgatgccgtcaccatcttcaactcctcctcatgcgagctccggggaggccgaatccaggcgtgcgtgctccctggccggcatcattgccagtgccatctgcaccacctgctccttgcacgagctctagggaagccatatccaagcgtcaccgtcatattctcttcacctcctcctcctcgtgtgagctcccaggaggccagattcaggcgcgcgtgctccccggccgacatcaccgccatcttcaccacct

SEQ ID NO: 32835 - DNA, 606 bp, Oryza sativa
agatgtcgaacgaaaaggttccatcgaacgcaccaatagcgcctcaagaaggtaacgctcctcaaaattccggtagcaataagcatccaggcgcttctagtgaagaacgtggcgcacaccaagtgacccgtttccaatggaaataacacaagtcgccccccgcgatgatgatccggactacatacctatcgaacaggccgtaagtgatgaaaatcgttagccatgtattattccctaactatgatgtgacatgaacctaatggtgtatagagttacctattctgtgcagatggtagtccgacgccgctcgaaacgtaaagccgggaggaacaggacagagcaagaagttgagatggacaccgctacgtctgcacctgaacgtacggagacatctacaagtgcaggcgggagtgggaaaaaaagacgtggtgagagaagcaagaataaattacccaaggaaacttacaacgtgattgctctcgatcaggatgggaagcccatcgagccaccgatagtgcggtccaagttcagcaacgcctgtggcactctagtcaggacgcgttgtcccattaatgtcaagttgtgggaaacagtggacgacaacat

SEQ ID NO: 32836 - DNA, 982 bp, Oryza sativa
  unsure (1)..(982): unsure at all n locations
cccttgttaactctcttgaggccagtggtggattgagttgaaaacttgagttacttgaggcatacccgctgacattctttcctttttctctgttaaacatctgttacagggattgaggtgagagtggaaacaagccaggaaagaatagaccagaactaaagacaggaccttaaaggaactaactcttctcgttgatgtgctgtttgttttacttattctgcaagttgattaagcaaacaacctagcatggttacatcacaacccaccgatgcaaaccacgcgctacacacacaagcaaaggagcacacgactaacgactctaccctagagggtggcttaggttctgcgacgggttcgctgtaacatgtgattttaatctgacctctgtaaactatcttcgaacatatcacttggttcataactgggaatagctcccatgaacaagcaactcggattcactttctttacattcagtttacttcccactattctcttcatgttgtcctcagtaagcattcaacgtatccttttacacctttgacttttatcaccttttcgacctttgtcaactaagtacttttcactcgaagagttgtgnatgcttttggtgacgatgtggtacttgagcctgcggcctttcaaaaaaaccttcaagtggttcgtcaaaagctagactggcggttgttgcctttgatccaaaaaagacacatctgaaactcttagtccaaacaaatgtctctttggttaatcgcttgattttcttttccatcatcaggttggttattaactcgaggttagaacatagttcctctgaaatgaggccctaggtctcctttgacagtaaacaattatacacataatcccatatcagcatcttccgaaataatcctcatagaacttgtttttattacacatgtctcccttattacatgaatacaaggccttgccttaaacaagaagggaaggtgcttaacatcggtac

SEQ ID NO: 32837 - DNA, 517 bp, Oryza sativa
tcatacttttggagaacttccagctatcaaaaagacaaaaagctaggcgcacctctcctaactattgcccataaaaaataatatatttaatattattatatattatatatatttgcccttataaaataatatatttaatatatattaattcaattttctattgtgtgaagtaaaagaagaaaaggtctaggctccgtcatgacggaatctaagataagaacctaacagaacgtaaaaaatgaaaaaagattctagactgttaatgtcttggctctggaaggagatcgcgtgcaagtaaactaacgtcgttcgttcggcgaccccgcctcacttcacttaacagaaagggggccctattgagaattacgagcatcgcataacagaaaatctatttacaagctattgattctccgactaccaattctcaggtctgtgcttcggttggagtcttggtccgcgggtggaggttcgcgagggggatattctgaaccagccgctatggcatattgccagccga

SEQ ID NO: 32838 - DNA, 576 bp, Oryza sativa
agatcttgttgctaggggctcaaccctggcctgcctgtcccgggataccggtcgtaggcagggttgggtcggtacttttgttcacggctaggatgggtgaagggttatgtcacatctttacgacgggttccaaggccatggaatgcggagtaaagatgtgtcttgtgggtaaagatgtacacctctgatcagagtaaatctattcgaatagccgagccctcggatatgggcaagccgagcaatgtacccaagtcagtgttttaattcttaaaatttgctcaacaactaaaatatggaatggttggcctgggttggcttgggacgagctggaacccaggtcgggttgccagttcggtccgaatcatcgtaggccttgggttaaggcaggttcgtgagggttcacggccttgtttaataatactgtgtagctctaggatcgtctttataaatggctttgggcaactaagtgactttaaatgctgtttactgcaaaacttaatccctattattattcccttgtacctcccttgcattaattatgcatccgccggtgtggcttgctgagtactgtggttg

SEQ ID NO: 32839 - DNA, 617 bp, Oryza sativa
catgatttttcgtgcccaactttgatcgtccggcttatttaaaaaaattttgaaaaaaattaaaaacatatgtcatgcataaagtattatttataatttatcatctcataacaataaaaatactaattataaaaaaaatgtaaataagataagcatttaaagttggacacggaaactcctggtttcatttaaaatgagacggatggggtagatgctaaaaatggagttgttttgtgatggagagagtaagtatttagggggataggaattaagttggggatggattttaatccctaaggggatgtcccctcgtatatatttttcttccaaattccaaccaaatactttaaagaaaaccatttgaaaaaaaaaatgacgtcgatgtataatgggaaagggggtacacgcttggtccatccgtccatggagacgtacgtagggggacacgaagctagggcatcaccatcactggccagctgccagctgccagctgcatgcggcacatcctgaccaacatggcttggccttatatatttcccttgtgttttcctcatgtacacagtacattactagtcattaagccgtgaaacagtactttccattatttggcgtactgg

SEQ ID NO: 32840 - DNA, 788 bp, Oryza sativa
cgacacatatagatcgacacgtgattcagtataaacatgggtgtacacatatatgtctatagttctctttccggtcgagaagaaaacaacgttttggaaattgagacagtctatagaccattatattgcaaaatatttaaaacttaaaagaaacctgatggaattcagacatcatgagagcgccctttgagataaattaatatacagatatgagttttattcatcttacataaaatatttgaaacatattgttctccgaagattattattttttatttattgaagcgtttgcaaaacacaattaatcatataaacctggttggggtcgtaccagctagtgcaaatcaaggtgcacttcttcttgtttttttatttttttgaaacatatcaaggtacgcttcaacttatttaccgtttactaataacctgtgaaatgtggtggtcaaggttcgaagcaaaaattcttcatgttgggtcaaattacctgggtttctgtgtgggctgaacactttggccccatgggctagaatgctggacaatctaatgggctagtcgacctatctggctcgatcggtaagtttaatttgtagccatggatcagccagatgtgatctagcccatggttgagttttttttttcttatgcattttattgattatagataaccagacacatatcgcatgagttatccttagtgagaagtcaactgcaagtacaagcagttttgcataaaggcctcttgaagatggccaaattgacatgagctcatgaaaattgctatggacgac

SEQ ID NO: 32841 - DNA, 637 bp, Oryza sativa
gaggtattccataggctcgtcctgtggatgtaattaaccagtagcctcattgctaggcgtcgggaatcaacggacttcacgcaatctccagtcagcataccttttcattaagcattcctcgcgaaggcaaaaggcgaactcctgcgggagccctcatgtatttgtaaacattcatgttaatgaatcataattaataaaatacagggtttccctattttctgtgtgttcgttgttttgttttcatcaaacagttttattccaaaattcatacacatatagaaagacaagccatgcttaaatgataaaataactcacagtaaaacagttaatatctatatagctagtcttctcataaattttaggcaaaatttgatacaatacacttaaattttgtgtaatttgctggtagaaatcttaaaaatgtgccacggaaaaaagacactctaaaacctaataatttgctagatggcacttttgtctcaattggagagatcaattcttcaaaaatacgagaatgcccctagagtcaaaagattttgagctagggctgtggagtaaaaatgtaatatgatgtatatatgctaatgacgtaattggggtgatggaaaatttagagttacataatttctaaaatttt

SEQ ID NO: 32842 - DNA, 500 bp, Oryza sativa
agttcaactagagctaaagagaattgttctactaaagctttgccatatgaccacataactgcaaaggtgtgttacagaaatcttactctattactgaaacatgtgattgttacaacatttcacaaagttgactttcaattgtagcaatcaagcattaaaagctctgtcaaaaggactagaactaactgtgtggattcaattttaccacctgataaagccaaacaggttagattcaaactattatgctcttttagttctagtattaatgctgatcaagcctgctcatccacttttgattctttaaaatttttaacacaggggcctcagagaaagggagtattagagaatacttcatctaaatcagtatgtggtttccattgtttatgataaaataaatattcatatgctcatgaatgacaatgctcctagttttgcgaatgacaatattgggtttctcaaaatgataggatcaaagggtggtgttctggttttcattgaat

SEQ ID NO: 32843 - DNA, 1036 bp, Oryza sativa
tttcattagccaaatttaactgatttcaaggggggcttagtccaatatcacattaactatataaaatcttcagatctccatgatgcaaagatggagtacactttgacaatatagtgcaaccaagaaaccagaatgcaatgccaacttgcaagacaataaacatgcaatctgatgtagaaaacagaacagagaacagaaggaagaagacataattatataaaaaagacattattagaaaaaaaaaaaggtgtcaacttaataggccaattagcactttattcaattcaactggactgtgttctgtcagtccatagtaaatggatgcaagatcatttatgaaatgacagctaaatttgtggtcttacaacaagtagagattagtattatgctttatatgccctcaaatagaatcagccagtactctagtccaacaaaaaggcactaaattcccaaggtttgaagtcacatcaaagcctgaatcatcattatgcacgaagacaagaaacagaaagaactccgatttcaccaacccaatgaactctgtttcatgcaagaagaccacatcaaatgctatgctttcatactcaaaacgttcaatagccttgtatgccaacaaaatagtcttaaaagtgtcaaaattttatggcgcacgaaacacaatttccttgcaagatctatacatcaagagtatgacagcaatctcacacagataagtacagcttcaagattcacgctgataatgtaagaaaataaagtgcatctaaacagtgagtagacagccatcttattccaaacatgcataacaagattttatcacctcagcacacttctttgatagaggtgatatagcattatcatatattgccatctgtcatgcaagctgcagcaaataatgttttttctggaccaccccagatgacaaaaggaagaaaagataacatttttcctcacagctatgtggctatgtgcatggctacatctcattgcagaaggccaacaaaatctttgcaaatgggatgcagcttcccatcctttc

SEQ ID NO: 32844 - DNA, 987 bp, Oryza sativa
tctcattggctcgttttttctcattggcgtgcggttccagtggacatcagactatccgatgaacacaatcgcgctcagccttggtgagtactagacattctagtgaagtcaccaacacacataccgattgatctcatcaacccatgcggctatcggttcatctcacgttccgatcacctaagaactcatgtacaatataattgatcttatctactacacctgcatatcaactatatgcaatgatctagatcataaactatacaaggcggctctgatacgactgttgggatatgcgtagactacgatagcataaatcaaaattttctatcgtgtaaaccaggaaccatgcaagtattagatcatagatcgttaccactcgacgcgctgcgcagcagaagaagacgctgagaaatcgaaggaactctcgcgaattagcgcgcatcgatgtataggaagtagtcgatcgcaccggctcgaccttctcctcctcgtgcgttctcctcgtcgtactcccacgtcaatcaggactgcaaaccagcggcgactctaccagtatccacacgtacagggacggaacgccatgcgcagatgtgctagcacccgggcgcggctagggttttgcttggggagggaactgacggctagggtttctcacgtgatgcaatgcctccgccggtcacacccctcacgaatatataggatccatcactcgggcctccaaggcctgtaggactcctattcggatccctatccgaattaagctcatattggatctccatccaatccccttattccggcccattaagcgtgcgaccctgtaggttcatgtatactcggctataacccgaaaactcctttttggtccacgtgtcaacagcggcccctagcagaacaaattgacccaccgggtatatataaagatcatatcggctgaacctctagtgtatacttgtatgaacccctttgcctcacgatatcaattaagct

SEQ ID NO: 32845 - DNA, 695 bp, Oryza sativa
gtacgcttactccctcgatgctcgagaagttttggttgcaaactgtacatataaaaaatggttccatggtagattgggccaatgcagtcccttcataactacatcagtacatgtacatggatagaacatcactatgtgattctagctgctatatacatgattctccttaattagtatcacttatcagttccattttttatccattaatttgcattaaacaagcttcaagaaaacacctgcttcggtccagatatttgaaaatttgactagatttgaataaactttgaccaaatccaaaaaaaattggaaaaaaaccaaaatttttgaccggcatttgcttgccaaaaaggggcgaaattaccaaaccgaaaatataaatcatcctcagtatataatgcttacatccctgtcccactctcatgcatgaactcgactgaccttggacgctgcaccattatctgtttataaagtatcgcagtggacatgactacattgcgtatgtttacgaccaccttgctgcgcgtatgctaatccatggagatggctcaattttaagagcgccggagacagcatcggcgccgtctgccggtgcagagatagtatgatacttgctcacctttctcgagaacgctggttcgattagtaagtacagatgaattgaggaaaagtctgtagaaaatgggtaaagttacaag

SEQ ID NO: 32846 - DNA, 1041 bp, Oryza sativa
  unsure (1)..(1041): unsure at all n locations
aggccaattaaactaaagtttgtggtatcgaagtcccatttttccgggtatcgattaatgtggctgtttgtcttcttaacctctcctttttccccatagaagggtaaaaaaggaagcttcggtaacagctacccctagcagcccatgtccgcctgttcacctaggctcccccgctgctgtgcgtactacagcggtttacactagccatcttccccttggtgggtccctcctgtcaatctgttttttgtctcgtgttgctgcagctcccgctagaaatgttgcatgtgctgctacgtctcctcccgatctcccgttgttccgctttgtgcgttcctaaggcttcctgtgctatcggcagcacctgcttgttgctgcacaattccagcaagaagtaaccaacggaatattagcttggaaagagagaagtttgcgggtttggttggatattgcccaattttttgtttttctcacaaaattatttgttctatataaacggtttatagcctgggtttgtcccatgtgagaaggggtgtagaataggttcgaaatatatatatatatatatatatatatatatatatatatatatatatatatatatatatatatatatatatgtaaattaactggtgctacatggagtatgggctccaagattcaaattgcgtatatacccaatttgaatgtttaaatgttttttttaaatgtttagatatgaatattaacttctttactaacaagttcaaacaagtttgaactgagtttgaacttttttttttagattttggttctagatatataacatctaaacatataattcgttatgtatgtaataatgaattgtgaaatgaagttgagtttgagttgttttgttgttaggtatttgtatgaattaaattcatatacctagatatctacttacaatttgtaaatttttaaaaatttgagagaatttgtgttttttataccttagagcccggacaccataaagtcccctatgnnnnnnnnnnnnnnnnnnnnnnnggagtctatcatggccac

SEQ ID NO: 32847 - DNA, 508 bp, Oryza sativa
  unsure (1)..(508): unsure at all n locations
cgtgtgaggtannnnnnnnnnnnnnnnnnnnnnnnnnnnnngccgctcgtgggagccgccgctgcgaggaattgcctcatggtttgtcgccttcgtcgatttcctggctccctcaacacccggacacccaagcgccttgccggtgagggccgccgccaagcttccgccgcttgccgaggccgtgcactgccacttggagcttgacaccgcaagtcaaagccatcccccgaaatcaggttggatctcatctcatctcaccaattgctccgtagcaatcttgtggaatcctagttgtatttatggggttgatttcatccgttcttgagtccaaatcgaatccgctatgtctttcgtgttgaacttggtatccgcccttctgtttttgtttttgtttttgatttggattgtgatggtttgagattttggagagaatgtgggattctatttgtgtgatatggaattccgactaggatttggggggcggggtgtgacgggacgaaaaatcacc

SEQ ID NO: 32848 - DNA, 644 bp, Oryza sativa
ctatatgtttgaacaaacgttactacgctacgagctttatatcaaggcttgtatgatcaaagaagttgattgggactaaaccaagatcttttctaagtctactcatatctcatcatgtcacttttggtctatagaagacaagagataaattagatctacatattttggatttagattcgggtctcccgatagtataaacttcaaataaaccgtacctatccgttcatctaaaaggaatcttaattgggaccaggagtacttgtcacaaagcttaggacaacaacaatgcacgtatcttgcctaattaggcaataagtagcgggattaaggtagtaggtctttgtaaagtgagtctcatgaggaaaaagtatcggtttttcacagttattctttgtccaactcagaatgcagtagaagcacgtccttgtgttgaaaagagatagatattatttttttattcttacaactgggtcataaacttactactaccacttctacaatgcttattgccagtcataggaataatttattgcctaataccttctttttcttaacatcgtggacgcccttatggattctaaattaaatggttttggtctaacgccaaaattccaactagtctgacttagaccttggatcttgta

SEQ ID NO: 32849 - DNA, 1160 bp, Oryza sativa
gcaaacagagccaggttacagctgattctccctccaaggattggtaaattagtatgtgctcatctctgctcttagaaacaggaaatcagcgaactccatgcagtttcaattccatccccagtacgctagcatgcgcagctcaccaatcctgtgtaaatctcagctgatttttctcagtgcaaacctcggccgtctgattagtcttaccacattgttcgaatggcattgtaaatgaccactgcaggccttttaactatttccttttttaactttttaaccttacccaggatgcctagtccggttgatctatgttatgctgctaccaaagtaagcaaaccagcacaaactatataattaagaccttcaactgtccacattaattatctctgtttgctatctctgtataaattactgtgaaccgtgtatattattgaagaattaaacaattcgtatatgcgaatagtcagagagcccaaactcttcgtattggttctttgtgctaccgtgttatccttctgtttcctcaaaagtcaaaaaccaaacgaatatctgaaattattggtgcattgttaagtatttgattcacctaattgtcacattgcagtttaccactgaccaattgcacattcattgtgtaggagtaatatttttctgaacgtttcgcgctctctggagataaatttcataaccacccgcactgatccttccctaatgtgattcttcatccttcatctgtaatatatttctaaatgtgatcgttcatcactaatctagaagatagaaaaaaatgttaattgctcctcccatcgtcaaaaagatatagttacctttagcattcaaaatttatctcaaaatatatttacgtcttcacatacccatcatcttaaccaaaccacacaaccattttctatttaatttcaccacctactacattatctcagccaatcataactttctttctcaattttatcgctcttcttaatccattaaagaaataaagatactgagagagtgcctaattaattaagttgctcaagttactaccaagcatgcttacatatgtgtttgggtgagcatctttgaatgaacaattgaaaacgttgattatgtatacataaatctataatatttaaatctagcagttttcacgatgtgtcggg

SEQ ID NO: 32850 - DNA, 801 bp, Oryza sativa
gatgttgatgaattaatgctgatgttgatgaattaatgctgatgttgaatttctatgatggtgagatattgatattgatgaattgatattgaggaatttctgtgacgatgaatcatgatttcttgtatgtgcgctggggagctgctcgatgagccgatgcatcgagccggtttttttttttttttttttgctcctgtgcgcctcaaaggtgctggttatggaaccggcacctataaccggcaccatttaggatttttgtagtagtgctgatcaatcatcgcatgcgctaattaaattaataattcatcttaggaatcacagcgtcaacagaaaaatcatactgaattcatgaaatgatcctgacagatcatacacgattgtacatgcataacgttatcatatattgtcatcaagaaaactcaaaaggtactattcactaatatttgagactatctattatttttcaagcagttgagatttttctcttgttcatcagacactcttttagtactagatcaatatgtatcaacaactcacacatttatgtgtttctttaattatctcgaggtgaaggagcgaggaagggtctgtcctaaaacttaaaaaagtgtattggcataaattcttatcagtatatatgaaacacaaagttatgaactgtattagcataataatgcataaataattattcagaaaagaaaaaacaaagcaaactgaaaattacacttcgatcatttgtactaataattaattgaacttgcaaccttaatttacattgtataagtgtgcgtaggctatgac

SEQ ID NO: 32851 - DNA, 709 bp, Oryza sativa
atgcatgcgcgatccccgttatttcctagccaatagcaaattaagatattacatgtgggttataaaaacttgtgtgcatgcatcaatgtccatttactccaatgcacaaataacgaatagacttaatgaataaacacaaatatgtatatcatttaggaatagcttcaaaaagactatatgtagatcaatttggaatggatggagtattaacaaatggtcgaagtgtaattttcagtttgcatttttttttattttctgaataattattgatgcattgttatgctaatacggttcataactttgtgtttcatatatatactgataagaatttatgccaatacacttttcaaaattttaggacagaaccttcgctccttcaccacgagataattaaagaaatacataaatgtgagttgttgatacatattgatctagtactaaaatagtgtctgataaacaacagagaaatctcaactgcttgacaaatactccctccaaccctaacattttacgccgttgacttttctaaatatgtctgactgtcttattaaaaaaattaagtaattattaattcttttcctatcatttgattcattgttaaatatatttttatgtatacatatagttttacatatttcactaaagtttttgaataagatgaattaatcaaaatgtttaaaaaagtcaacaacgtcaaatatttagggac

SEQ ID NO: 32852 - DNA, 646 bp, Oryza sativa
aggattggtgagctgcgcatgctagcgtactggggatggaattgaaactgcatggagttcgctgatttcctgtttctaagagcagagatgagcacatactaatttaccaatccttggagggagaatcagctgtaacctggctctgtttgcacctaatcgctcttgcccggatgccacctatttccatggccacatatatgcagttagttacatgcatgcaactagacagggatgaaagcctttgtactgcttgcaaattggaaggaagaataggcacaacataaatagcatttgctcttcaagtgtttcttgtggaggtattgattgcaatttggaatgcaagagccaacaggtgaattggcatactagcttagataggaaggagatagcaaatactcacctgtttgttattctgtctatttggtgaaacctaaaaggataatgatccaagcctccgcgtcgctccggccccagcttccggtgacgggcctctgcttcgcttcgtccgaagtgggccttaggtaagtgtaaataaatttggatcacaactcaagatgacatatttatcacgctgcactagaggtatgtgataacaatttacttctattccaggtgtggtctcatgaaatttgaagtgaaaccttga

SEQ ID NO: 32853 - DNA, 743 bp, Oryza sativa
gcttggtggatcttcagaataacgatagctgtgcattgatgaaatccaatttacacaataccaggatactcgcagatcgggcacactacaagcagcaacaattgcgaccacaaagacgatgacccaaggaggacttgccggccaccattgagagtttcaaccaagaaattagaaaaatggaaatggaaggtagtggaaccctacccctttaggtcttgttctgctaatccctctctcacaagtggaccgagaggatttggaagggatttattccacacctattatggtgtggaatcgttccccctcaatcctctccaaacccccctttctcttagggattaaacgaacccttatggcagtgatgaactgctgttgatggaggggaatagggggccaaactacagagaagctaggggggattttgaatttgcctaacttgttgattgactgaaattaaggagagaaggcgatgtactaacctagatcgattcaatgcgcaacaaagaaacagcaagaagaatcagcagaggttaattgacccacctgtgtgcaaggaagaacggaggaacagcactgccgggcgccggcggcgggcagccgtcgtgtgcaaggaagaacggaggaacagcaccgccgggtgccgcggcgggcagcagtcgccagattgggttttccaattctgttacaggagagtactatggagagggagaggtttagggatgtggcgtggaaaagtaggtccg

SEQ ID NO: 32854 - DNA, 666 bp, Oryza sativa
tttagcacaaaaattcgtcaaacaaaaacgaacaatttaacatcagccaaaaggtcaataatatcaacacttaaacacgctgggagtagaagttagcaaaaatctagaaaacgggggctcctaatgcggggatctctaattagcgcagacacgctggttagagatctagcgtgcgttttggcccacgtcctcgcgcatgatttcgttacggcccacttccctttttctcgacacaagaaaatagtggagagacttgcgaacgtggtgtgccgcagcgctggattagtagcttttacgtaattacttttctgattattgtgttaattaatctttcctctttttcacgaggttgtttcttttttactaaagatttacgtgaaatttgaaactttctgcaattaaaagtcacacccataatttaaaacaactcaaaatttaaactttcaattcaaattttgaaaactttcacctcgaattttgaaaactttcaactcgaatttgaaaactttcagcccgaaatttgaaaactttcaactcaaattttaaaaacatttaagtcaaaacttgaaactttcaactcaaatttgaaaactttcaagtcaaaacttgaaaactttcaactcaaatttgaaaacttttaagtcaaaacttgaaaacttttaactc

SEQ ID NO: 32855 - DNA, 688 bp, Oryza sativa
agggtttgcccgtatactagagttgatgtgtttaagaccattgattgtactgaaaaataatcgtttgcggtggtccaaatcgcaacaatggcaaatttgtccggttcaaagtgaaaagatatatttaagggtggttcaaagtgaaacttaggtaaaatgtttttttacgagttttagagatagctaaaagtaattaattaatcaagcaagtggatccgatcatatattgcatcttaattagggcacacctagccaaaatgatgccacaatagaaaggtaactttacacgttggtttatatgattctagagtattggttagatcgatagctaggaacacatcgatgatgcatgtccaacacgaaacacatccatgatggattgatggacatgtttctccaaccaaaagaaacaaagatttcaatcaatctgtactccaagtctccaacacatgtaggcaggacagtcttcttgatcaatcgagccgaccgagcgtgctaactttaaataacccatccgtgcaaattatataaatattatttttctaattataatctcatgtgctgtactgtacactccaattatatatgtatactgtacactctaattaatttgactaattgctaataaatccatgcagaataagaaggctgcatgaatgtacagtgcacttatagaagaatcgtcctg

SEQ ID NO: 32856 - DNA, 1015 bp, Oryza sativa
tatattcctgctaaaaatggttgccacaaaccatctgtaccacatgaacacatgattgccaaggtaacttatgcaaatctcactatgctcaccatatgcatttttacattatatatataattaaattggccttcaattgtagcaatcaagcattggaagctttgctagaaggtctgaagctagtcagagatacatggaatcaactatggcacatgaccatggaactgataaggtatacaaactaagcatgcacaaagattgaaaagattgatacaagtagaaggtctgagttattttttggttacaggttgatatgtttgatcaagttgacattgactgtacaaatgaatttgataataactttgataattcatttgccaataccaatgctaagtcaaatcatgtgcaggtgcggtgtttacttgaaaagttttaattgaggctttcacaatttctaaatattgacatttatcataagttgcagcaagtacattctattagttctgctaatggcaatggtcgtcgtttcaatccatctataccatatgaacgcacaaatgctaaggtgacttaggaaaatctcactacataatgagttctgcttgatttaaacaacaatacctaattttaatgaatttcaattacagcaactaagtggggaaagcttaggcaaaaggtccataacaagtcaaatgaatgtggaatcaatggtgccacgtgagaatgtgaccaatgaggtatatacaactaagcacgcaaatatcaattagtaaacttatttggcaatactgtgatttgtttgattttttattcaggcttatgtttctgaacaagatggtactgatattatgaatgggtttgttcacaaccgtgaggaaccacatgccaatgagaatgctataccaaataatgtgcaggttctggaatgtctactttaaaaatgttgaatcaaagtttgccaatgtcttaattctatcatttattattacagcaattatgttctgttagttcaact

SEQ ID NO: 32857 - DNA, 983 bp, Oryza sativa
gagtggaagccctgatattcaactttccttttgaagaaatattatagatttccttatagcagtttagaaaaacacgcacaacaagctgtaggatgttatatatgtgtgtgtctattgcactttagttttccagttagtcgtatatgtctatttaaaattacatggatgttttatttagttgtaaactccttgctctcatacaagcatgtacagcctttccccttttaatatattatatgttcttgtatatggtcgggaatatggtactgcctgcccatgtaattttttacatgcacatgtatatagactccattaatatatgattaatttaatgtgcatccatatatataattatatgcaatacgtactcgttacaatatactaaatgtataaaatacatactacgctatatctaaaatactgccaccgagacgcaacagaacgtcttaattaatgtgctaaaatactactactgagacgcaacagaacgtcttaatggatgcgtctatggacgttgtacattgttttttaaaagcgtctctatgcctatagaggtgatattccacgtctctaacaacgtcttaaaataaattaggtacgctttaggaaatgtctctatttttttgagacggtccaaacgaagacgttcctatgacactttataaaagcgcctcgcgagtcggcggagacgaaacaaaacgtctctatattacaaataaaatgtcttctttgggggggttttgttgtagtgagcggaggcctgtcgctaggaggcttgggccggagcgtagcggagaagcaaatgttccaccatatatatacctcttgtaagccgccgtgtggcaaagtaacctcaccccagatatagtgaagatattttgctggctggcgcccgtggtttttgctctcctgttttgggagggttttccacgttaaaatctctgtcttctatgattgatctattgttttttatcgtttgtttg

SEQ ID NO: 32858 - DNA, 1365 bp, Oryza sativa
ccattaatttctgacgttagagaggctagcgataaccaatgttcgggtagatataaggccgtgtttagttttcccctattcccaacttttcatcatatcatatcacattaaaaacttttctatacacataaattttcaattttttttctaaacttctaactttcttcaaacttccgatttttttcaggaactaaacacaccctaagagtagtttttgtcacatcaccaggatagtgcaagagggtagaggagaggaggagagaacagttgggtgctacttgtgcaagtttgctcttccagttatccacggcaacaattaacttaaattttttcataacaattacatatatactttgcaggaactgtagctagcaaaattatcttcatttgtaattattatcatagcataaaacaatttaccctacattaccacgaccaattacatacttaaataagttttcaaagaatttatcagctggaagtctacttataatagattagtccataataaataaatattatcatgataataaatatgaattccgttttacttatgtcataaattatgtgtgcgtgttttcattgcaaaataaaaaactaactatgcatatctcatacttcttttgtaccaaattacaagggtttctatgcgtatcataaaatgtcatccctccgtcctaaaatataagcatttttagctataaatctagataactgtgtgactagattcatagttacaagttgttatattttgatatggaggtaatatctggaacgagggatgtgcatataaattttagaaaacacttcgaattctttatactacggaacggatggagttccataattttacctttaagattactaactcgttctctcatacacattttgctccttctagaacttcagtcttttagcaagtaacaaaactaattcccgttaagaaaatattaataaaagatgtgtactccctccgttttatattgtaagactttctagtattatccattcatatagatgtttatgaatctatatgaatgtgagcaatgctagaaaatcttacattgtaaaacggatgaagtatttatgttggaaatgtacaaactaaatctctttgaagtagatatacaatgtgtagggacttgaatgttaatttacaatactttaaaataatgagtgtggccatataaaacagggacttaaacggaaaatgtacaatttgctactaatgtttatttggattattctacaaacgtgtgtgactccaactgtcacatgtatttgttttgttttgttaactcaaattttaaatcgttcgtagtaacaattgaaaattaggtgttacgtatcaacagctccaatcca

SEQ ID NO: 32859 - DNA, 513 bp, Oryza sativa
ttggctcaatagaaaaaaagatcttagctcacacaaaagcagtaaaatcaatgaagacaaaagatgccaagcgggagaaaattaaatgccatgcaactgcgactacaagattttaggactaatttgcaaccatcagagagaatttaatataaaaacgtccgcaacctaagttttatcataaagaaaggtatatatcttttctatccattgctagaaattggaatcccaacccatctcactaggccatctgccaaccacactctatttctctcaattttcttgtcttttcttcccgttgcaacgcacgggtacttttctagttaacttatatttgtgcaagggtttgggcgccctaacaattggaactcttacttattccagttcctaatggcttaaggcccaaactaaccctttccaatttaaccatacttctaatttaaataactaagggctgggatgctgctgccctggtccctataaccataacacattcagagttcaatcaacctagta

SEQ ID NO: 32860 - DNA, 650 bp, Oryza sativa
cccagaactcgaactacacacaagctccaagtcacttccatatcttcattgcttgcatggtgtgtcactcgcattgtgttcactctaatatccttcctgggtgccaaccataacttgtttacaagatttcatttgtgacttggtttagcagcacatccacccattgcagcttgatgacttgcctcctatgatttatgtagaactaaatgacaccccgcgcgttgttgcgggcataacttgatttacatagtagatttttttaaaaaaatctactgatcctcatcatcaagcatcgaagttgagtactcctaccttgctcagaaagcgtaaaaacatttgacatcaatgatgcaagaaatcactatgagagcgaagaaaattaaatataaagaccttttgatcattacgattttcaaatgaatgaaatcacagcacatgttagtttgactccatatgcatttgcatgagcttgaggtagcacattggggaatgcacatggccacaacccacaactatgtatcaattgtatacaacaaaatgagaaaaaaaaacagcttgtaaaaatagataaaatagaagaaatgagtaaagatcttgcccacctcgcattaaatcttggataataacatatccaatattattagttttta

SEQ ID NO: 32861 - DNA, 1680 bp, Oryza sativa
ggctttttataattcccataattttagggttttgtatctaatggattcctcatcatattaatttatcatttttaattgtaataacacaacaaattgacaattaagaggcaaatgagaacagcacctagctcagctggcaaagagctgctaggagcagcgagctggccttagttcaaatccctttgaacgcatgttttctcaccatttctttcttctatatcaatactggtgctaagttcatccttagtatttcaaaagtttttgatgcaattttattaagaggcaaaagtttttgaaagtacacaattttgggtttcgtttctacttgtcgaattttcatttcttcgatgattaagaggcaaataacatcggcatgatgcaattttattcaaaagtttttgaaagtacacaattttgggtttcttttctacttatcgaattttcagtgttacaggattttaccctgagaggcgattctagaagaacttgccgatgcaatttattcaaaagtttttgaaagtacacaattttgggttttgtttttacttgtcgaattttcaaagagttacaggattttaccctgagaggcgattctggaagaactactgtgttcgagtaattccagacactagaacaattggttcgggaggggttcgactaaaaaggagaatcgaactacggaatttgaatcctgcgaaaaatatagcaagagttgggattcacaaggatggattaaccgagatcttggcacaaacacttaaatgcacacaagtaacacaaatcccattatgcgggttgggccaggcctttcaaggaagaaaactagacttttccatgaattctttcgaaataaactctatcaatattttagttcgtaaatagagttttgctagtaaatttactattgtctttatttgtaaaactactccaaaatgtttaacttctagctaggatttttcagagattagttaacattagccctcgtttgtaaaagtagttttcctcagggaatgtttttctaaatatttagtgtttgtttttatttatcaaacaaatacatcaaataggttctaattcatagaaaagggttttcagaaagataaatggtatttacaaatattttattaattagtatattttataatcatggttcttttaacaaataatatttgaatctaaaatagattttgtccctagatttccgtcctcgtggttcaagcgcaacagaaaacatgagataaaatctaataaaatccaacatgacagactttggaaaagatttttttattatccagaattttgttttcgtaatgcagattcaaaatttttagggtgttacacaaggctggtgtgatttgaggggtggggcaaaagttagagatggtgggctattggttccaggggatttgagtgggaaggtgtgggtaggagtgcgtgtggtggacgcgcgacgtgggagtgacatgggcacaatggagcggtggttgcttggccgtaggtaggaaacgtggctgacaggtgggtctcggtgctatctgtcagcgaacggatgcgggggcgagccgggctgggcccgcatggttgggcccaggctggctggaggagggtaaaagagggaaagggggaccagaccctcgggaaagacagaaaagtatgggaaaaggactttggccgaattct

SEQ ID NO: 32862 - DNA, 1489 bp, Oryza sativa
ccaataccggccacaacagccataaggatgtcggtagcaaccgtcagaaggcagttgtggttggaccgggataggttcaggtcggccaaacccaaggtccgccgaccttggccagctcccctggccgtgggttgtctcctggactttagcaattgagtccttggcctagtggtgtgttggtttcgcccaatttctggtatttcgatgagtttgtgggcccaatactcgatgggtgagagcctcctcttttacatgtaattcgtctcaactttgatagtttgtcacttgtatccaaatatacaccaacacttgtgaaaattgttagaattatatcataccactatgttgaatattttatatttttcaaacttatgtaggtatatttaccaatgccacatcatgtcaagagcacacttagaaatgttgctctagatataggcaccttgtgtgcctcactatttaattagaaaaatattagttgcactctacttgtcacgttgttccttcagaaagatgtggtatcgtatatctttggacaattacttatttgactctattatgaacttagctataaacactcctgtattaatttttttctaacttcgctaaaaaacattaaaccagtgctccgtaaaccagtccaacgccagctggtagctgcattactactgttgcttgcgttagctagctgcttcgcttcggaaaagtattttctacacctggtatcatgtcacctagatgtatacatatatattatatagtctaaagaactataaaatcgtgcagtttaaaagaaaaaaccaaattttatgaccgttgtataggtaatatgcactgcctaatttaattattttggtttctcgagttgtagatcaaatttaatcttacatgtttgtcaatagacttatagcatcccaaatgtttagcacccaagaacattaacctttgccacatcacgtcaagagcacacttagaaatgttactgtacatatagacaccttgtgggccttactatttaattataaaaaaaatcagttgcactgtacttgtcacgtcgttccataagatagatgtgatatagtatatcttcggacaattacttgacaattacttgttggactctattatgaacttagctataaacactcatgtatttttttttctaacttcgctaaaaaaacatcaaaccagtgtgctttgtaaaccagtacatccaatgccagtgggcagctgcattactactgctatatgcgttagctagctgcttcgctttggaaaagtattttctacccatgatatcatgtcacctatatgtatgcttgtagattatgtagtataaaccactatacaatcgtgcaagttaaaagaaaaaccaaaatttatcttcgttgtacaggtgatatccaccgcttgatttaattatttttggttgtcgagttgtaaattcaaattaatcttacatgtttgtctatagacatatagcatccca

SEQ ID NO: 32863 - DNA, 834 bp, Oryza sativa
agaaaccccacacagcacaacagggaccacggattacacccacaccaaagcgacggtgggaccaggacaaaccctattttcacttcacttattcttctcttcaggcggaaggaactatatattttatatagagcaagggtgagtactttcgtactcagcaatcaccggaatttaggtgtttgatgcaagcttgaaagagagcaaaggttgttttggtaaatcttttgtttgaaatcattttgaaatcactaagtgatttatttctttttaagttcgggtcaaaaagagacttgcgtatcaaatttcaacaactcaattgataatgtaccaacctcccgggtcagatcattacttctcggctcccagagccatttcacttgattaaatcggctcccagagcctttttcattttcttggactcccagagtccagctgcccagcagcacaacaatccgcttccactcgggaaagcctagtctatgatgcccgcagacatcccgaatcacatagattcgtttctgaccactcaggtcatccatctgccacataggctgattctggttacgattcccacaccacaacaacttttcaccaagcacaagcaaacaaatctacgcaacgggaaccaccttacatccgcccattaccgtgggcacgctgttcgaacagtaagttaacctctgcagaggggtacactttacccataagatacgaacttattccaaacacccatcggtatcggaggttcgcaaaaagcctttcccaagccgacccagggttacctcatgccacatagaagaatcaaatcctcacataaatataggccattttagt

SEQ ID NO: 32864 - DNA, 1383 bp, Oryza sativa
ccattcgtcttatttaaaaaatttaagtaattattaattcttttactatcatttgattcattgttaaatataattttatgtatacatatagttttacatatttcacaaaagtttttgaataagacgaatggtcaaatatgtttaataaagttaacggcgtcaaagggaaggagggagtatattttttctttcttttctctttcttttttttttgtctggtagtcacaatgttgcagtcgatagtggaagacagtgtgaactacgtgcaggtggccagctgatccagctcaatggcagatcaactggcccaatggcctccttcagccgtggtgttcctccaatctacagaaattcggcttattttcttccaggtgactctcattctcagtgtgcgaataaagctgagtcacaaattaaagccggccgttctttagctggctagtaggtagctagttgactctcatggatgtatatgtttgcttctttttgcaaccaatttatacatgcaattttatgatcttcagtaagtaacagatgtaaaaggtaaaaaggaaggaagaggcagatgtacaaatgaacaaccctagcaaatttagattttttttaaataagaccaattaaaatatggtacctcctcctccttaaggaccatgtaaagatatctcaatttttgattctagaaaatctttacttacgtacgcaatgcttgatgaggtgtagcatacggatctagtctaggctcgacacatcatccaatcagttgccggcaaaactgacagatttaaatatagtagatttatatacacaaaaatcaatgttttcaattgttcattcaaagatgccaaacaaacgcatatatgtaagcatgcttagtagtaacttgaacatcttaattaatcaggtactccctcaatatctttatttctttaagagattaagaagagcgataaaattgatagaaagaaagttcggattggttgagataatgtagtaggtggtgaaattaaatagaaaattgttgtgtggtaggttaagatgatgggtacgtggcgacgtaaatatatatactttgagataaattttgaatgctaaattttgagtatatctttttgacaatgggaggagcaattaacatttttgtctatcttctacataattagtgatgaaggatcacaaatatattagagatgaaggatgaagaatcacattagggaaggatcagtgcgggtggttatgaaatttatctccagagagcgcgaaacgttcagaaaaatattactcctacacaatgaatgtgcaattggtcagtggtaaactgcaatgtgacaattaggtgaatcaaatacttaacaatgcaccaataatttcagatattcgttgggt

SEQ ID NO: 32865 - DNA, 2661 bp, Oryza sativa
tactgctagatataacaattatacccctccacatgtttttttacaacaatacccctccgcgtttctactaccaccaccactaactaggatggtagcataaataaatctaaaccctttgatcaaatcgcgatcaacggctcaaattgctagagaacatcttagtgggactactaatattccttttaccttgatgctttcttattgggtctgacatattgcatgttgcactaggatatgcaaaaataaatttcttttttctccatgttatgccatgatatctgagtgaaaccttatgaaacttatgtggagctttgaggtactccataaatttttaccatgcctttaacaggaggtatgttagcgggtagctgatatagggtggaaaaattatgctaatatgtttaagcgattacacactttgtggatggactaatggcaggaacgaatgattttagagtgaaataatgattgcatatatgtaacttgtggaaagactattttccccagtgcatgcatatcattcaagagccaattgactttaatttgctcacctggtgagaaaactttataaacttggtctgagtaacttgaagaaaaaaaaagaattacttaggttcttaggaaaacatgatcaccaacataacaacctaatattcttcttaattttgttattttatttcttgtggtattcaatgtggaacaacacgacaattcatattggacgttctctcctgtataattcggcagattattgatcagcagtttgcttgcggtgtgcagagttcatcactcagggtccgatcgagagtgagggacgaggaataatccctctggcaccgaaaacatagcaggccattagcgcatgattaattaagtattagctaatttttttaaaaaaatagatcaatataaattttttaaacaacttttatacataaacattttacagaaaacacaccgtttaacagcttgggaagcatgccctcaacctgtctgcggcctcgaggagatgctggtggcagttgatacatcatacaatgcgtgagcacacgacgacgaatcgcagtgctagctgccggtgttgctacagctgcaagctgatcatccgctctgaacaattgcggagctagcaatgctgtgaagctcgggcgactagtagtgttttcgggtgaccgatgactgaattttatgcgcgtcaatggctaacagcaatggcgatggcagcggcagagctcaggtgactgccttacctacccgggagctatctctcgctggtggctctggatggcgatgatcgagtcactccacttactctctgatttaccatgctgctcctctcaagtactcaggaacatcctacatgtttccagctacctctcattctcagtgtcatcccctttatctaaatcaaattgatacatgggctgaacatgtaaaaaccaaacttgatctaataaaaaacttgtgaaactaaaaattattttaagaaataacaaagaaggtgaacaaggatatgcatacatgagtagttgatcactaagaagattgcatctcgccgcttcttccctgtattttctatgtttatttgtagtgataataatgcatgcatgcaaagatatatagatgttgttttactagtaagctaggagacaagtttaatctaaagtaaaattcactgttggctctaaatgttttccgcatcatccacaacgaatcttaaagtcgataggtcaaataatcacccctccactctagcaagtcgttgtccaagtctagtggtttcttgatatcaccagcaaccgccatccctattatacccagtgaatataatttcggttcgaaatttcgacaattttggaccccttggaagtcattatctcagccaaaattttcgcttttctctctcttttttaatttggttaaactttattcaaattcaataaaattgtgttgaaatttcaaaaatattcagttcaaaaggtgccgaaaatcacaaaattctgggaatttttcagtgctaccgaaacggccgaaattttaagtgaaatcaaaagtacttgaaaaccctgatttgtacctgctctaactaatggtttaacgtggctacattgagcaacaaacacaaagctatgaagcaactcctttctttattactcgatccattgttctatatatgtttggcagccatctagatttaatgaatccatgtgttgtccaagtgaagccaacacacacaatatgaagaagaggctcaactagtagctgccgtctcacgctgaggtaacatatattagtgtgaataataacggtgactcttcctctctggtgatcctatgttatggagctcttttgctgtccataaaaaaaaatctccagttttccctggtgcctctcgttcccatagtcacccatattgaacacaacaacatgtacatataatccatgtcctataaaaaataatatttagtttatttcgaagtcaataacttggacagcacaatactcaaactagtcatgtagctcatgatatgatgcatgtttgattctttaatgtcacccaatatatgaatgatgatgaccagttcatatagggaacacatgaggctacagttttcggaacagaagttatatggtttacatttagactgatgagtaatttgt

SEQ ID NO: 32866 - DNA, 683 bp, Oryza sativa
ccccgataaaaaacttttaaaaactaattaaaaagtctgtatcgagcaaacatgcatctactaaatggagtacccaggggaaactagaacatgtaaatatataaacctttattaaatttggagttagttacacctcaatttgcaggagcaagatcgaatgaagtgtggcagttgttagcaaatttatctttacagcgagcgaaatggtgtatatatgtatgtggttaggcaaccaagtccaccattaattcctgagttcctggcattcttttaaattaaaaaaatattattgtctgagtatttacaggccaggtcatctacaacgcatattatttgtcgaaactctaaaaaggaaggccgtgcaccattgtcgccatgctcaaatgctttgaaactctagactgacttcacttctgcatatcaatatattagacgagagaactctaacacatgagttaaatttgtcgacatgttcaatatatatcttgtacatatggatgaaagcatactagagatgacagattaatagtcaagtactcttttttatttgcttctggagaacaaaaaaagtcgtagagtacatgccaaaataaataaataaaaagctatatactttaagtcagctcctctcgatcgtcgtcacatttctatactgaggccgagtttagttccaaactatttct

SEQ ID NO: 32867 - DNA, 634 bp, Oryza sativa
ttaactcaatacggagtggttttagctctatatgtggtagttggttttagctctatatgtggtaatctagtcagcactttttttttataaaaatggtgggacccttcatgtcatattcttttccttttaacccctttttttttaacctttccttctaagtctgtccatcggcaggggacaacactacacaacagcagggcggatgagctagagcggcgaaggcagctgggggcgactagcgggggaggcgggtcctcctcagcctccgccggcatgcgcctcctctacgaccgcataacttctcctcggcctccgccggcgcactccggcacatggtgggagacggaggcacactccgacgacagttgtgacgcgtgaaaaggatgttgcgggcagtagctctcttagccatcacatgcgcactccggcggaggtcgtcgtctccatactttccgtcgcatctcggtcatcgtcggccacttgcaaaccaagagtcggagggagaaagcaacttgacaaggtggtgacaatggcgatagaggcggaaagctaggagtaggcatccgacttcgccaccttggccgttccatgccactcaacgtcgtcgtcgccgctatagagaactgtcgcaccc

SEQ ID NO: 32868 - DNA, 712 bp, Oryza sativa
gctaatattttggctgtggccaaatcaacaaatgttcgacctgccaattcaattgctttccaaaatatggctcgacaaaatgaacaactactccgggagaatcaatacatgcgcaaaaaacaggaacgaactgacaagttgttattggtatgaagttacaataatacttttactctcagttttactctcagttttagtttttagtttctaaacccagttggctactttttaaatgtaggcactttatgaaaagttgggtgaacaagtaccacaagaattggactgtccagtagaagaggaagatccatttgcacaggtaagcggagttcaattattttagttatttacctaagtattttctcctatactgctgcggttactcatagatgaactagctgaatatttatattgtgccagtacaatttggttgccctattgaaatagcaaactaatttgcattggtatgtcagagtgagaacagacaatgcagcacttacagtgagggattgggctcatgttgattgttgtaacagttggccttgtagtcacattctcaaataattgagatggtaagacaaaatatattattttaatttgagatgacttgcatcttgcacaaaacagaaaattggtttagaaggttatagttactccaacatttgttcaatatagtacaaaaggattgcataggaactttgatagaccactgtgt

SEQ ID NO: 32869 - DNA, 614 bp, Oryza sativa
actataggccgaattcgagctcggtacccgcagtgcaatgcaatgcaaggcgcatgcaatagtgatagagtttggtgtgagatatatacatgcatggagtagtatgagtaccttttttgttttgttccctttggtgatggtgatgcccttggctagctagctgacaactgcctaacctttgtctgcccagtgtccaatcaggccatgtaagtgggagtcttgggagctttggaggtatctcctcttctttccctgtcacttgcatgcatttatgctctctggaggaattgaagatggtgatgttcttgccaagtgtgcaaaccccacgatgacacgtgtcgttcgagttgtttattaattcaagccctcaataatcttgctcaaacaactgtatgtttgatggcttatcaattaagtactccctctgtttacatagttctgacgttttagataagtttgaaatcaaagaattagactttaattatttataattattagaatattcagtttgaagacacttgaacacgatacatagattagtaaaagtatttgaatgaacataaatacatttacttatttttcaatatattataatatataggaaatcatagtta

SEQ ID NO: 32870 - DNA, 1069 bp, Oryza sativa
tagtcttcaaaactaatatctgacttcaaattactcgtatgctataatatttctagcaataaaattataatcatataaaagtaaatttacatgacatgatattattttcatcaaataaaacttaatctataataaaatatttattgatcaaatatttaaagagttgaattttaaaacgcgtgcgcaccatagtgagtgggacggaggaagtatatatttattaacaaattttatcctaaatattttatggatgtaattatagtacaatctagtgtaattacattgtaacttatatgtaattaaaatataacttgtatgtaactttcacataattttgaatcattagatttgttttaagatttgtgcaagcaagcaagaaaagaatcaaagcgcgcgcacacaagagaggattaagtctcacgacgtttgctttacggaaatagcatgttacaaagcgatttttagttatattgtagttacaacgtaattatattataattgtactataataatatctatcaaatttatggaggaaaatttatcaataaatgtatatgtagtctcaaatcctttattagaagtttgactgcttagtaagctttctctcttcattgaattgcttcaaacaatgaaaaatggtacggttagttctattaaattttaagagagtgacaccttttactactcgtcttcaaatatacttcgcgttgaagatgtactccctccgttttacaatgtaagtcattctagcatttctcacattcatattgatgctaatgaatctagacatatatacctatctatattcattagtatcaatatgaatgtgggaaatgctagaatgacttacattgtgaaacagaggaagtattatttaagataaaataagctttattaatctgagacaacgacacgtaaatgctacaattaatttaagaccactctcgaccttgtatagtgagtgtgtacacaacctggaagtattgagaaaaaacggaaagaaatatgaaaaagaatgtcatgacaatgaatatcatgtcgctgccaactataaagatgaccttcaact

SEQ ID NO: 32871 - DNA, 1893 bp, Oryza sativa
ctcgttcaacttatacagaattattctttatctcgtttgttatcatcttacatcatggtgatggtgccgtgtttgtgcatattgaaatatcgaatggcattgatttctgaaagtacacttctggaaaatacttcacactgctaaagtacaaccaatccctaatgtagagagattgagtggcttgtttaattctgatcatcagattttttttaattttttttttgtaaaagctgtgcatctgtgcatattcaaatgtccaatagcattgatttctgaaagtacacttctggaaaataatttacacttctaaattacaatgagaccctaatttaaagagaaattgagtggtttgtttgcttctgatgatcaggattgcaacctttttatagcttttacatatttctgtatgattaatgtgtggttatctgtattactattagcaagcagagaatcatgcattccttcttaaacaacaaaatcatatctcctacctacattcaaaagtgacttaaccacttctgaaattttcaaacctggcgaagttcaataaccaaaaataagcaaaactatttaaagtgcaactagattcaaagcaactatatcttaacaaacttttatgtctcatcatggacatgttgccatcagatgctaattggtctcaagtaatcaaaagctagtcttggataattggataagaaggtctgttgctgctgagctgacccaaaaaagaagaaaaaaaaaagagaaacaaacattataggccatgaggccatgacaagtgctagtagcactacacaaaaagttgcatcaattcatttgctacattatgggttaccaaagttgcatcaatcatttgttgtaaatcagctattacattgtgtttggtaactaattgtagtgcgtattaattgtactaccacaagattaggactttgcttagtgccctgcactttatctaatctgggatgagttgtccagatgcatagcgttgtctaccattcttgagttctcagttgattatcactaggcaggcacccgagaggcttttggccgttgtgcaagctgagtgtgttagctcacaaaaggagagaagaaatttgctaacctcacaagctatgatcccttcttacaccaaacatttttgtggccatgatatataatggctaacctacacatgtttcagttggctcttgtgtgatgtgctagtgctacatgtacttattatcatgtaaaaactactacaattattaaaatgactatttccttgtgggccagaggtagtagtatatatcatttgtaaccttgaccaatataataattttatatgtaaataattagactatgacaaaagaaagaaagcttaatgcttaattatatttaggatgttacacactttaataatacatcatattcttttggaaacagagggagtacaaatgtcacattgacaggaaaaaaattaaaaggtgcaagccgtagactgtaaatcatgtcatttctcttttcaccttctacttgaaatgtacacatatagaatgatcttccgatcaaactaaatgtccatattggtttgcgacatcaaaaaccatttttacaaacggtccaaaacgatttttttagtttgctatccactccgcctgcactttaagacctacgaaaatacacgacttttgtaggcggatattagttccatctgcgaaaatgatttttgcagacagtatctccatcttcacaaacgctatagccacctgcttgcgaaattgttttaggcgaaaaaaacgccaccctccccccatctggccgcgctgccgccgttgcccctccgccagatctaggagagagagggagagggagggcaggggagccgcaccaccgcctacgtatatcaaatat

SEQ ID NO: 32872 - DNA, 558 bp, Oryza sativa
cgagcagccatggcgtctgcaagctcgtcgtcgttaagcagtcgacgaaataggttagttctaccgttgattgtgtgcccctcatgcaacgtgaagaccattgtgagatgcacagcgaagacggatgctaatcgaggccgtgttttctacacttgtcctgaccatgaggtgattattagttgagttcatttggttggattttgttaactgggaattacctgagatgtgttgatttgagtttgcttgttcttggtgtagaaagatggatctgggtgtaacttttggtattgggagcaaggttacatcaattttctcaagaggaatggcttcattgaagatggcactaaggggaagagtgcattaagggtggatctggagcaagatgattttggcagacaagatgaactagagaagaatttgatagctgtagtgcccattgctagagaactactgttggcagtgaagggcatgctagttttagggtatttggagttgttattttagtactccctccgttttttaatagatgacgccgttgactttttctcatatgtttga

SEQ ID NO: 32873 - DNA, 535 bp, Oryza sativa
catcagccatgttaatctcagtgattatctccaacaccagcaactctatccgcatgcatcaggtggccggcatctgcatgcgtcgcacttatctgcagtagcagatcgatgaggccaaaacagattatgcgttatcacgctcgattcgcggaggattagcgaggccgttgtggtcgtcgctgcctatataaagcagttgacccctcgtcgcggctggggggaagaagaggaacacacggcacaagtgctgcgccattaagcagcaatatgccctagagaggttcacacatgcacccacgtatattcagagagagatcagaaagaagatgcacgcccatggcgcaagtcgcggatcagcgatctgcagtcgccggtgctgatggcatctctatcggtgagtcctcaacaagaagccgatcccgttctccgtcaagctgcttatccaagataacacaacaacgtcgttgtgctgtgcagatattatgcatagccaggcattatctcctagagggagcaaatatacaccgtagtgttg

SEQ ID NO: 32874 - DNA, 715 bp, Oryza sativa
cacttgatccataagttaacgaaatattgaacttgaactggaggtgtgtatgtgatcatgatgaatactggaaatgagtacttttgctattgtactgtgtatatttgattcatgcttacgttctggtaggttttctcctgatgatttgcggctagttgtctaactgtcagggaaatatattttcctgactgtcataaccatcagaaaaaaccactgcaaaactgtgacaggggagaccatcagcgatagatgaatatcgatgactgctcacatcaacgtcaggaaaagtatccctgacgtgagtacacgtcaggaaaattaatcctgatgcgcctccgtcacctaaatttatttttctctgacaagctagtcctgacggaattttcctgacgttgacacatcacaaacaatttttctgacgtgcatttgttttatcctgacggtttttagccgtcataagtaatctagtttctggtagtgtatgagacgtcgtatatataactagtgtgtcacgagtatatatatgtatgacactaaagtgaatatatagtgccattatatatattcttagtaatcactctaaattgtaattacacatgcatgtgcaatccatcacacatgatatattccaatggacgcttaattaaatcaattagctattctttcggtacaaatctaaaccccttttgagctcttattttagtttgtctccgat

SEQ ID NO: 32875 - DNA, 612 bp, Oryza sativa
tgcacatgatttgaaaaatagatcttctcttgcttgtagttttgctttgcacacacgcactttggatgagttgtttttaactaaaaagttgttgcaaaaatatcaaattgcttttcatgctagtttgatgtttaatatgatttctgctaaaaagttaaaacaacctcatgatgttttggattgctcaacatgtaatttgaataagatgaaactaaaagatgctttaggtcgtgttgagtacatggaagatgttgtgaaaaacaatgaagtgctttcttgccccaaatgtcgtaaaagcaaaggtgtcatggtagattgtgaaaattgtgctaatttggaaaaagaggtttcttatttgaaaaattctttgctaagattttctgatggtaaaaagaacctcaacatgatttggatcaatcaaaggttagcacacataatcgtggtttaggttttgatccttatgctcataattctagacatcctcctgttgtgttagatgttggtgctagaagtggtgagattttgattaaacatgatactaataaaactgtgtttaaatctgctggtatcatgtctaccatgaatgcatcttcttcaaaatcaatgttggca

SEQ ID NO: 32876 - DNA, 922 bp, Oryza sativa
taaatatgtcttttttccctgagaattaacggtcaacacacagtcaactgacgggagtggcatgagagggtgtgcaaatttggatcaaaggcatataagggaagagccaattttcaatggcatataagggatcaaaccaattttcagtggcatataagggattctctcttttaattaaccaacaccggaacggtggcaataaccaacatcattagtagaatctgatacctatgcattaatgtagtccaccattgtgtgctagttgaactaagcaaggctaggaacttcctaatccaacagcgaatcattttacaaccccaagctaacaaaggagcgaggtacaaaaatagcatggctgtaacagtaggtaaatatcccatagtaacaatttaaaacaatgcagtatttaagggaaaacggtagagcatttgcaacataggttcaatatgttcaagtgataagcatgacttgccttgctctgctgctggaggagcctcggcgactatttcaaaatacaccggagcgttgggagagccggaatctaagcgacatacaaagcaaacaatacaaacaggccataatactactgaaacagagaacaaaaccatttttaatggattctatgcatttttcttaatttactgagacttgaatgggcttaaacggagctcggatgaattttctatgaattttagaagattcactgtgttttactataaagagaaaaaccttaattatttattgcgcaatatatcccagggctgacgtcatcaaggagggggcggcgccgacatgcgggacccccgggtcagtgacttcgagagagagggaaggggccccggcacttcgccccacttgcaaaggcacaaagcgggagggacccggttggtggctccgctcggcttcaaaacccgccggccca

SEQ ID NO: 32877 - DNA, 1673 bp, Oryza sativa
tgcaggtcgactctagaggatccccatttatcttgggttaaaaatgtttaagtttatcttgggttaaaaaatttgttcaaacttaaagcagtttaagtttgatgaaagttaaaacgttttataacctgaaacggagggagcatttttttaatagtggaaataaataaatccgaacctttagagctcaagagcttcagttcaatgtttattacagtaggtaattcggcttttcaagctgagacatttcgtttagctaatttgggcgcagagattaataattttcttggcatacaaattaattagaaatgtacagcgtaaaatatatataattcaaaagtacatgtttagttttaaaacaatggaatgacatcaacctgttcttttattatgtacagaccacatgattatcaaggtgcacgaattgcatttaattttattaaagctctagtatcatactttttttttcggttcgttgatattccggtggattatgagataaaaaaatattgcttaattagttcaaatacgtttcgatgcttgggtgcttagctaaatgcatttattttattctatagccgctgtcctatatatatagatatgactgaactatcgtgttgataaaagatagagtgattgtttgaagcacagtagttggatgataatatatcgtacaatagttttatatttttgtttctacaataaccacaaaccgggcctaatagttatcattactgcttataaaaaagagtttttgtggcaatgatgtgctctacattactatattatatcgggaaaatatatactgtcatggtaaaaaaaattagtgcatacttttgaacggataaggtggcaatatatgtactggcatggtaaaaatagtacatatatatcagatatgggtaaaaccacatgcatataagttcattttaaaattcgccgttttattgctagttagaaattatatacgggtcccccaaaaaaaaaagaaaggataaggtggtgatatatgggattccaatccaaaagtcaagcaagtaattacttgtaattgtactacttgagtaaaactacccaaaaacatacctatcatccattttgctactacctaccgcaacacatattttgccatattcgtacggacaattcatttattctctctacaggatttccctttttgtgcatgactgaaaatgacttttgctgaagtacctgagaagaaaatgaaatcctaataaatgctgtacctattttgtgatcccatcagataattaatgttatgttgtattttctggcacgtgccacgcatggcccatataatataatccatctgtcccaaaacaacttcatctttcaccatcttatttatctcaaaataaattcatcttttaagcaagcattatattgaaatttatgaaagtaggagacaaatagattggggtttgttaaaataggggacaatagtattagatttgttaaagtagagataaattgcatttagggttgtcaacgtggagggcattcttttttttttttttgcctttgtattggaatgtatgggtaagttcgaaaaataaagtcagaggtacttacttgttactctatcctttctcaaataaaaataatataatcatttgtagtattgatgtgtctcatcacttaactcccgtacaaaa

SEQ ID NO: 32878 - DNA, 696 bp, Oryza sativa
cttcggaggttgtgccattaagttggcccgttctgtataccagtaggatacttggtgacttaacatgcatggactgaagagttgggctccatcaagtgtagtcatacgtttttgttcaaaacctagatagttcaattgtcccaaatttagtccagctggttaattaaacaattaagtccctttaactccctgcaatataggtacaatcttattcgaatccctttagccataatatcaaatgttttgagccctcaactattagaaccaatgcaatttaacttcctttgtggttttgatagtggatttcgcttgtgtgacactttgacaagtccaaccggctaagttagcaagtggggcccacatgtcaccgttcctaactcttcttcttcctcctcgtcttcccttcatccctttcctttctgctgaggcggtggcatggagaggcactgggaggaaagatggaggagggaggctacgcctggtcggtccgccattcacgcgtgtgtcgcgcgtcaggagatctctctggcacggaccgatgaatggtgataaaactctgccaatacgtgtaccacctagtactattacttctgcatgtggcagctccatttttttttatttaggcactaggctgctacgaggacatcacatcatcaaataccacgctcaatgctgccataggagtcactttgtacc

SEQ ID NO: 32879 - DNA, 1913 bp, Oryza sativa
aatgcctaccactatcacacttgaatcaatcagctttgatgctacaccccctcgtgctaaaataaattcatttatgggttttttttgtccaacgatcgatcgtttgtcttatttgaaaaattataaaaaaattaaaaaataaatcatgcataaagtactatttctgttttatcatctaataacaacaaaaatactaattacaaaaataatcgaataagacagacagttaaacattggaaaaaaacacataaataaacttattattggaatggaggatgttgataaataagtgaaggaatagttgataaatcagggatatgcaatcatagaaactatactgtgctttgctagttagttcaacttatacagtaattggtagtatgatttatttgaattaatctggtacttttatttgtagctttctaattaatggcttcgaccgctactgttaatttttttaaaaaaaattatgagtccatttttttttccattcgtagctttcaaatttacgtgttcgaccgctacttcaagattgcaccgatcgggcattaagattgcgagtccaattttcaagtatgcgtctatcgggcattaagattgacattgataccatcatcaataggttcgcatctaaaaatcggaatttctaattaaggtaatatgcatcaagtttcttacattacatgaatattgcttttggatgctctttaattatttattcatgaagttttgtatgcgtactagtatattaatattaagtcgcacaacacccgtgcgttgcaaggggattttaattaaaaagctaatataaacactttcaaataatcattttgtaaataatcattttgtgcatatgtttattactgacacgtgtgctatctagcctaatactgtcaattttttcctttccagagaagattggtgcagattgctacatggtggtagatttgtcaccgaccaacactatactccctttttaattaaggtatatctaatatgtactttctccattctaaaatataataactactactgttttaaaaagcaatattatatatattatcgcttttattcgaatattggttccatcaataggctttccactcatcccatccctttcccatatatacccaatctcctcctaatataataaatcagcctaacctatttcagtgtaagaaaattatctcagtaacccactttatacatggtcacgttgtaaaaaaaattactagtggaaaaatattatcatcataataagatttttaatgttggttcatattttttttctaccgagagactaacgagagacccagtgataaataatttaccacgatatattttctacctgaaggggtcagagtaataatttttgcatcaggaggggaaggagaggatagcaagagaatattcgataaaattaataccaagataagtcaaagttatgctggaaaaggtgagagtagtaattcgttttttacattagggggagagggattgaaggaggcgggtgaaaacggtatgaaaattttccaaccgtatcgataccatttccgaaaaactaatataaaaataataattttatcggtggttactgttttcaaaattttgttttcatgaccgttttaaaagaaataataaaatatgatactggtcctgaccattaatttctgacgttagagaggctagcgataaccaatgttcgggtagatataaggccgtgtttagttttcccctattcccaacttttcatcatatcatatcacattaaaaacttttctatacacataaattttcaattttttttctaaacttctactttcttcaaacttccgatttttttcaggaactaaacacaccctaagagtagtttttgtcacatcaccaggatagtgcaagagggtagaggagag

SEQ ID NO: 32880 - DNA, 549 bp, Oryza sativa
tgagttgtgatccaatttcatttgcacttaataaaggccagcttctgccgtagtggagcgcactacaacaaaaccactgttataagacatttgacttaagacactctgtaagttgtctcaactttgagaattacgattaaaatagaggcgacttttgagacgctttacaagttggagacatagtttaagacactttacgattagcataagactacatcgtttagatatgaatattgagacgttttcagacgtctcatttctaagatgtgtttagatatgaatactgagacgttttcagacgtctcatttctgagatgagtttagatatgaattttgagacatcttcattatatgcatgtcattgacatcaaacaatacaattattatttacacagaaaaaaagaatatttgaatcatttagattccatcggaaaactacataattccttatcatcttcatcacataatattataattatttaatcatttaaatcatgagggtttccgagactaaaataatattataataatttttgaatcattcagact

SEQ ID NO: 32881 - DNA, 632 bp, Oryza sativa
attatttttttattcttacaactgggtcataaacttactactaccacttctacaatgcttattgccagtcataggaataatttattgcctaataccttctttttcttaacatcgtggacgcccttatggattctaaattaaatggttttggtctaacgccaaaattccaactagtctgacttagaccttggatcttgtaatagtgtcataggctaagccaagggtggacaccctaaggctaaccctaggatatcccagtagccgtcacagtttagagtcgggttttagttagattatttctaccagtgtagtttcgtcggtagtttggttcgtggaccccaactttgagatcttaatcattcatctccaaattaagttgtaatctaccttattcttgtattcttcgatttgcatgcagggattggccttctcggttataaggtcacctgggcaatgcatggttgataaccttaggagacgtggtattgcaatagtagtgttcggattgtgtattaatcataagtcgaatcatgtgtatcaagtttttaccaaattgatagttatcaatgcctatcgaaaattcgggacctagtttttcatcaacgtcaacatgagtaaagcctttacttcta

SEQ ID NO: 32882 - DNA, 565 bp, Oryza sativa
actatagggcgaattcgagctcggtacccatgagagatcgctttaacctactggttcaaaaaccaggagtaggagtctgtcaaccgtttgaaattgaggtgcgaggaccgctacactgctaattgaggaccagttgtaatcgtaactcgacctttggaagacatggtacgaggaccactacgctactggtggaagaccagtcatagtcgcacctcgaccattagaagtcatggtacgaggatcgctacgttgctagtagagaaccagttgtagtagtacctcgaccacttgaagggaatccagagtaatagatggatgacattctcgtgacctgcgagaactgcctcctgatgacgacgaaggcaatgaggaattaccgtagtcggaggttccgttcctggacctactacctcatcctcgagccctctagaagtatggggatctcaagttttgtcgtcgtcgtgtgatgtcgtgatgtcgttaaccttgtccgttgtcgttccgatgtcattagtcctggacgttgtcgtcctggtgacaacggcgatctagtcggtcttggttg

SEQ ID NO: 32883 - DNA, 1043 bp, Oryza sativa
cagatctcctatatgttatagaaaataatacaaccaaattaggcttgtttaaccagaggttatataaaatttcccctctaattaacctgtgtttatctcttgtagatgctcctaccactactaaactgaaggaatccagaatctgatatgtgatcatccatggtcactttgggtggtcaactaaagtcagattcctctgttaatttgtgttaggccacacgatcgctaagtgtacgtacctctgcatttcaccttaatttgaacatggtaaattttagacaacttggaaaatgacacatgccaagaaaagtcttcagctgtgagctagaggccacacttaatttgtcctccttcacacttgaagccatgaaaaagatcttccttagctttcactttacgtttagagctttcactttacgtttagctacctttccaaccaatttgagatgattgtatataaatgtttccagccaaactaggttgcataaatgagtagctcacctatcatttgcatggtcttaattttgccatgcatactacttatttttagatatataattcaaaccatatgctactctacacatgtgcctgaaaattgtaataatattgattcacatccaaaatatatctgactatacccctattttccaagagaaacattactgggtgcattattgatattgcaagttgtgcacttattgcttaacatgttgtcatatatattccggtgtatacatatgcatatagtgtttggtatggttgtgtgaatctcacactacaatatatatgtggtgagaattattcttgtctcatctgaaaaacacacagatagagtttctgtacttctgcctttcttggtgccatgacaagtggctggttttggaatgctctttagtttttggtagctaggttttcctagttgctaacttttgcagccatagcagggaagaagagagagagatctcaagaacaagttgagcaccttgaaagggacaaactacgaggagaaattctttgaatctgcacactactctgaatctctg

SEQ ID NO: 32884 - DNA, 2126 bp, Oryza sativa
tgtttggtatggttgtgtgaatctcacactacaatatatatgtggtgagaattattcttgttcatctgaaaaacacacagatagagtttctgtacttctgcctttcttggtgccatgacaagtggctggttttggaatgctctttagtttttggtagctaggttttcctagttgctaacttttgcagccatagcagggaagaagagagagagatctcaagaacaagttgagcaccttgaaagggacaaactaggaggagaaattctttgaatctgcacactactctgaatctctgcagaatgttagttagcacgaccaaatcagtcagtcaatcaatcaatcaatcaatccaactggtgtgctccagagaggataaatactgacatggaacttgtccccctggcccccttttgcatagtgaggtgatgtagatgtctcaagtgcactgcaatgcaatgcaaggctcatgcaatagtgatagagtttggtgtgagatatatacatgcatggagtagtatgagtaccttttttgttttgttccctttggtgatggtgatgcccttggctagctagctgacaactgcctaacctttgtctgcccagtgtccaatcaggccatgtaagtgggagtcttgggagctttggaggtatctcctcttctttccctgtcacttgcatgcatttatgctctctggaggaattgaagatggtgatgttcttgccaagtgtgcaaaccccacgatgacacgtgtcgttcgagttgtttattaattcaagccctcaataatcttgctcaaacaactgtatgtttgatggcttatcaattaagtactccctctgtttacatagttctgacgttttagataagtttgaaatcaaagaattagactttaattatttataattattagaatattcagtttgaagacacttgaacacgatacatagattagtaaaagtatttgaatgaacataaatacatttacttatttttcaatatattataatatataggaaatcatagttaaatatatattttggaaactgtgtcctatatagaacctcaagaattatgaagaaatattgctcacataattgtggtacgtacggtgctactagctagtatcgacagtagaagatctgtacagatcagttacacaaaattatagccgcaaattgaaggatatatggctccaataaattttttttataataaatatagatggcacttgtctgaagtctgaagtctgaagaccgagaaaagctagcttagggtgtgtttagtttacgctaaaattaaaagtttgattgaaattgaaataatgtgacgaaaaagttaaaagtttacgtgggtaggaaagttttgatgtgatagaaaagttgaaagtttggaagtaatctcggcattggaatgattattatgcagcagtcatatatgcaggacaagggcagggcgttcgtccgtcgatggatccgtcgcttttattctgtggacgatcgatgtcgtgtcaggaagggttcatgtcacgtcaaatcgatcggtttcatgccggtgcgtcgatccaaagtacttggagaccctcacataggctgcgtttagttggatccacggtttagattttggttgaaattaaagatgatatgactgaaaagttgtgtgtgtatgacaggtcgatgtgatggaaaaggactgaagtttgaatccaaattttagatctaaacacagccatatttccacaagtgcgcgtctcatcgctctcatctgcctccaaatcagaagttttcaggttcaggcggccaaggaattgcatgagaaagtttctctagcttaattggacatgaagttctcaggttcaggccaaggaatttcatgagaagtttctctagcttaattgcacaaattttgacaatttgaccctttgcaaaaactatttgtagcaatgtactccggtccagacttcatggagatcaggcctttaagttcagcgacacatgatttggcgttgagtaaaagggtcagatttgaaataagttttggcagcggttcatttgtaaaaatagtttttgtaaagggtcaaattgtcaaaatttgtggtttaattggacatgaagttttcaagttcagg

SEQ ID NO: 32885 - DNA, 1005 bp, Oryza sativa
atattttttaaataatcataattttacaaacagagaatctaccatcatacaactcatagataactaaattagctctacaattttggaaaataaaatttacaccattatatgttacccattaaattaataatgtaatataatttccatttaaaccagtgtactcattactttgtactattatttttaaataatgcactattttaaaataaagttctcacattatattgtatacatacgtatgtgtacgtacgcttctttcgcttattttttccctttttttcttcttttttctatttatataatggatatatttttttaaataatcataattttacaaatagagaatataccatcgtacaacttgcatgtaactaaattagctctacaattttaaaaaatataatttagaccattatatgttacccataaaattaataatgtaagataatttccacttaaaccagtgtactcattactttgtgctattattttccaataatgcactatttaaaaataaagtttacacaattatattgtgtagctatcaaataaacaatttaagatctatattaactaatttatacgtgcatttaagctgatggacccattatttaaatcactggatttattttttattacattggactattattctccaataatgcattgtttcaaaataaagtctacactattatattatgtacccattaaattaaaaatttaaaatctatattaactaatttacacttacactagaaccggtggacccattatttaaatcatcggatctattgttttcttataaataaagcgttcgaagttctcttttttggcccgctacacaatgcacgtttgcactttttgccttttgcacgcgtgacaaagcgtcatgtctaaggcatctaaggtgattacgaccgccgctacgctaccactttgccacatatcaagtcatatatggagttgattaattttattaataacatgtaaagaaaattaaaggtg

SEQ ID NO: 32886 - DNA, 644 bp, Oryza sativa
acacaactttaacttcttggttctataaaatctatctattattatatactaaaagtccattaaacttcctacaaacgctctcaagtcgccacgtgacgctctaataaattagaaaaaatcctagaaattctaagaaaaaagcaaaacatctacctcttaatttttacttaaattggtgggtccaatattatacaccgttagatgaaattgatcttaacataaaccaaactaaatactatgggccccacctctcctcctccctagatatatacgtacgtacagtacgtacgcttcttctttcctttctctttttttttttcattttttcttcttttttccatttatataagtacgtacgcttcttctttcctttctcttcttttttcattttttcttcttttttccatttatataatagaaatatatatatatttttaaataatcataattcatgcgtacgcttcttctttcaattctttttttcctttttttctttttccatttatataatagatatatattttttaaataattatattttacaaacaaagaatctaccatcatacaacttagaggtaactaaattatctctacaatttttgaaaataaaatttacaccattatctgttacccattaaattaat

SEQ ID NO: 32887 - DNA, 662 bp, Oryza sativa
aactcaagatgacatatttatcacgctgcactagaggtatgtgataacaatttacttctctccaggtgtggtctcatgaaatctgagtgaaaccttgagaaataagtggaaaaatatgtggtctcagatataacgaaaaactcacttttatgttttttattggaaataaattcacttttattttgggtattttatcccgaaaactgtctttgctggctgacctctgcaatggtatctcatgcatccaactagctagttgtccgaccatgagttgtgaaagtgccatcactgcggtttgccctctcgctatctcgcagcatcgtctagttaacactccgttattataaatagtggatcaagaaaattttttgagcctggacaaatctagacatctagtgatagcctaataggtaagtataggcggccaatgtatattatctttcaaaaaagacgctttggctttcaagctacaaagtgcagacaataaaactacatgaccagcagatatcaatatcatcggacaatctatccactaaaagctgtagagttgtatactctacatatattatattttttaaacaagccgcgcgagatagtgcgaggtaaattaaaactatgtactacgtagcagatcaagcagtaacgacagtcaatgaatagaa

SEQ ID NO: 32888 - DNA, 1918 bp, Oryza sativa
tttaaagtgcctctataaagtgtctctacactataaaacttctgattttagaagcaatttgcaaaacgtctctacaaaagtgcctctatacgaggtttttgttgtagtggatggatggtcccaacaagtgtaaaatacggaaagaagtccataaaaaaatacggcccatatggaatccaattcatgggacattattttggggaagcaaaggtcccacatatttggaaaaaaaagggggaaaaatccggtccatatgtgatgcgtcaacctaccctttagcagaagcctgataagataaatgttcttgagatcaccaaacttcactattgcaccagtgagaaggaaatggtaaatttattgcatatccaaaaaaattacccctgctctgccctcacattatatttcctctagcttcttacatttttttttgacgaagtcaatatatatatgctcctatatatgcatggtagaagagcaaagaaaaaacagttaataataccgagcaaattgctaccacgggtaaagcttttatatatatatatatatatatatatgcattttcgctcttctgccatggcaaacacttggagaaactgaaggctatagttaattttatttaaactactcgcatatactaccatggttggatttctacccattatcaagaaatccacttgcatatacatgcgggggaagatgagacaggaggatgagaatgagaggcaaggaggaaaaatgaagtgcaacagaagctaatgcgtcgagcaaacctatgcaatattcagcaatgataagcatctcatgctgttgataattggagaaatgcacctaatgttatctttactgcagttcgaggtgcctctaaagttggtctaatttccccatggcagcaagacgaaagttgtactgccctgcaggcatctccagaaatatttttattctaaccgaagaaaacaaaacaagtggaaaattccaaagatgtacctctgtggaatctggtactaaagtgtgaaggaagagggtgggtggcaacgtcactggcagcggcgaggtggtgtgcgcggaggaggagcgggcctcggcaatggttgcctcccgggtcgccctgcagagagcgacacgggagtcttttcttctctttcaaatagtacttaattaggctgtgcatactcttttgtgatgaaaaattgtatagcataaaacatacacaccgttcaagatatattaatcatcactatagaaattgtgtatatagccacccaagtgtacgggactaactggatgaaagaataggcgagtcaggttgtaggtgttcacaaattaaatgctttcactatctagaaacaaatgaaaacgagttgttcttttaatttcccagctggtagaattaatagaccgacaaaagaaattctctccatgcatggccctaaagaaaatcacaccccaaatggcttccatgcaaatacctatatcagcccatgcgattgatttgcacacctgaatactacctccgtttattaatgtgtttttttaatatatgatgctattgactttttaattaacatttgatcattcgtcttatccaaaacttttgtgcaaatataaaaatatttaaatcatgctttaagaaagtttgatgataaatcaagtcataataaaataaataataattacataattttattgaatagtcatacgtatctcgaacagtgaacgccatcatatattaaaaaaaaaggaggcggtacatgagatatatatatatatatatatatatatatatatatatatatatatatatatatatatgtgtgtgtgtgtgtgtgtgtgtgtgtgtgtgtgtgtgtgtgtgtgtgtgtgtgtgtgtgtgtgtgtgtggttctccatataaccagcttactagctggtactatttgtt

SEQ ID NO: 32889 - DNA, 2383 bp, Oryza sativa
cgaggaaccatgccatagctggtactgtggcaaattctgcaagctgatcaaattctgaacgccggtgatcgacacactccacttgctcttgctgccatgctgctcctctgaacttcacagcaacagcctacatttttccagctgcctctcattcccagtgccatatatatccttctttttgaaaagttaatactagaccggatccagtcatctgtgacgggctctaaccctcacctttaacggatttggttctggtcaaagacaagtggtcactgatgactacacctcatctttgacgggtgaaagcccgtcactggtaattaaaacctttgacgggctaaaaaatatagccgtcacaggtgactcacacctgtgacgggtgactctttgcaacctgtcaaaggtgacgaaacagctgtgactggttttagttctcacccgtcacagatatcaaaaatcacccaaaaaaaaagaaatgcctcagcccaaatgtacgaaatgaagaaaaatcaaatacatctcaagatgcacatgatacaacaactttgtattttaaatcaaatacatctcaacaaacaactacacatgaagcaatttgacaatatacatcacacaagtatccatgtccattttaacaaactacacatccacacaagcaacaaacatgagcaaatcaagcacaaacaacatcaagcacaaacaaattcggcagccggcggtcggtggcggaggcggccggccggtcgtggcggaggggaaaggccgcggacgctagatccgcctcccccgaccttgtggaggccggatatggcggtcatcgcactacaacaaaaacctcatatagaggcacttttgtagagacgttttgcaaattgcttctaaaatcagaagttttatagtgtagagacactttatagaggcactttaaaaattgcctagaaaacttttactctagagacatttttagatcagtttgttagattttatctcgtagaggcattctttcggtactataaaatgcgtctaatatgtaaaggcatttcgttgagacattttaaactatgtagagacactttttagaatgataatatgtactaaaggactaaatataagtaactagaggaacaagcatacaagtaatgacatggagttgagttggttagtgtattgaagattaaaatgatttaatcaagagatcataagttcaagacttgtcaaaaccaaggaaactattttattatcttttttgattggttttatatgtttgcggtacaatttaatgtctctagaaaatgcctctaccatcttatagacattttataaaatgtctcttcgtttgtagagacaattcaccataagacacttattagacattttttaaaatgcctctacattgttgtaaagtcatttgataagtgcctctacagtactagaaaaatgtctctacaaagcatttttgttgtagtgatcctagctagcaggcctttaattaattgtttatttcgcatggatttacactggtagtttattatgaattttacatgttttatactacatggatttaatatgctataaaattttctctatttaagctgttgctcatttctagtaggagaaatgggagctgcaaagccgtagttaaaaaaaaattctgtggaattatcagagctagttttgtcaaattattgtgcacaggattaaagagtagaaatcatcggtctaacaaaatttggtctgtctcatttggtgctaatatgtttcccacgaattttaaaagtttgcacattttttagttcagcagaatggacctgcaggtcagtgaacgtacggcaattacgcaggaaatccccttggctccatggaaagttacaggaagcacgtgttaaaaggaaaccaaccaatgtatatacaattacaattaagtccttggatccacatgcaattctaagcactcttacaatataaaaccctgaaaattttaaacactcgctaagaccggtcctggcacactaagcacagtatggcccacttgtcaacgacacaacaccgaggtagaaaaaacctctagcagatttggggatgaagacttggggctcctcggcttcgagtggcaggtctcctagaccgatttgaggtggcgatcgacgaagactgctaagctatcatgtggtggctgcatccaccaagctaggccgaaagcatgaaacacagaagcgaggcggcgagctcgactagagactgagtggcggtggcactcttggttctccgcggaacgagatgcaatgagagaaagaggaggttggtacagcagcttgctaaacaccgaggtcgggaggtagtcaacggtgaggtggccggctgacggcatgcactactacagaag

SEQ ID NO: 32890 - DNA, 1190 bp, Oryza sativa
caatgttttgtcagtgtatatgtactactgaagtacaagttacagagggactgaattggctcaatctgtacccgtgtggaatcattatttctacaagtacattatcagcttcttttttgaatctgacatcatgcacgttgcaataggttatgtgaaagctaattcataaattttgatcttgttccacaattttttcatttaaattgaatataacagtgtcgatccaaaacaaaaaattacatagtaggctctggtgcaaaaatgagtgtctagtatttcatttagattgaacgtaactaggtaattggattggtaagaccaacctagctaagttcttgttcctcttcggccagcccggatcgagctcatcctagtcaggaacaaaatattatgcatggatctaggtgctctagtagagaccgacaagttttgcacacacttgcatttgcatgccccaactgagctgcatcgatcgatagatcctgaactcaacgctcatcaagagtctatgaggttgttgcattgctaccaaacgtacgtactgagtctcacggatgagggaagacgactgagctgctttcttaggtagcacctaaccttgttacaattttcttacattatgtcttcaaatttcaggacatatcaccttctctgccacttcatttttcctagatgcctctcatttccatttgcccttatttactatttatcgtacttccctattaattagtaattccagcataaactttggaagctcctagctagccatctaaccactattacttcaggacataggaatttgttagcaagtaactagccaatcctctagtactaccctttgacgcctctcacacaaattgatgttgaattagttgatacgaattgaattagtcgccctctggacatcgaagacctgaatttttcattctcatgatctaagaagaagatcgcgccgagacaaattcaaacattaattgaattggctctgtttcagttgaaagaagttcaaactgcgctagctactgctatcgagtgcggttatgacgtcaacagtggggaacgatcttcctaattcctctcagcctcatcgctcatcatctccatgcctgccagtagcatccacactttgggatgttgttcacctcaaatatcgtcttatttctcgtgtgtgtgtatataggattgaaatt

SEQ ID NO: 32891 - DNA, 3729 bp, Oryza sativa
caaaaacttgcttaaaatttcttatttcgccatgtattttttttagaaaactaacactccattagttgagttatatctatagtaagtcctagtcttgtataatttctggctctaccactgaatacaatattcatgttagtgtacgtttgacccactacctcgtccattcagtccgccctcgtgatcccagctcatgcatggcctccttcaatcttgccttcctagcatacttggtggcggcgagttcgaccccctatcaccaatggaggcctcctcatcggctatcgagcctcctcatctccctactctgacagctttgccctagggtctagtgacgtctggcttgtgtcggtcaaatgtagcctccttggtgccggcatagagagaggggggcttctctcgttgttgcagccgccttaccaccgtctttgtcgttgtcgcaaccgtggcgaagaggggtgtagctctaggcggagtgcgtgcgtgcgaaagagaggcgaggaaaaagatgaagtagtggataacatgtgggcccaattatactttttaaaagcattatctccttagcttgatgactagattaacacatggctaaaacatcatcacgcgtgcgtcacatatgatcgatattgtctttgaaattttcggaggataattcattcggttttacaattccgaaatgtcaaatgactaatatcatatttttttcgcgaacgcaaaatgacaaatatcatgaaatggtatatataacagtggcggacgcaggattaaaagcatgatggggcggagatattcgtttcataaggacactaaacgcaactaataccatatcctatatacctatatacctatatactataattaaggcaaacaaaacaattttaaaacaaagcaataatattcatcatacaccaaaagactcataaagcattgttgatagatatatttaaaaaagataaatatatgagaagacataccggcaataaaacactaagcccttctatctagaaggcttaggcaactctattcgccggtcacccatggcttttgctactctgtgctccccctaccggctgagacagtgagagtgagacattgatttagtgatttgtttgttgattcactgagaggagtgagagcctgagacattgcttgcctgattcgctagcgccagcggctggcgtcgagctgcccgagcaggaggcgaggtcagcagacggcaggtcgtgactcgcggggaggtcaggaggactagaggaggccttggcgctggtggaccttggcgctggcgggcggtggcctggccggctgcgagcggcatcgggccgggcggccggccgtcggccatcggccatcgctgctcgctagggcgccggacggcgggcggcggcagctaggcgtcgtcgtctcgtcctctgcggtgcgcaccgtgtgcggcggccggcggtggcggcctgcaggtgtcgctgcgcgtggcgcctggcgcggagacggagtaagtcgacgtctcggcttctgtctctctcggcgagcgggcgatgcgtggagaaactaaacgtcgcgcgtggggtagcgagacagaaggtgaattggacactgatgggctttctacttatgggccaatttggcaatttgtgaatagatatggcccaagggggtgtggggggttggggcgacgcgggccgtagctggccgaccgcccccatgctgcccaatgggcagttccgcccttgatatataatgttgataccgagagatccaaaacaatttacgtctttctttccgacccgagggagcatacgcgtggcaaacacatgatgggttggccaaacgctacacgaaaccgggccccaatcatgggcgatcaaacacaaccatgctctcaacatcccttgcgtgatcgatcgaacatggctccgtccggaaaacgccgtctacgcgcggcgtcaccatcacctagccggccaatacatgtgcagttcccgcttcctcatagaccttttcatgtcgatcgaggcccaactcgccaagtcactcgcggtctagtccttgcggaagtacgaaacatacagagagagcagtacgtgtacccatgaaccgtacgtcctccctccacgacatttctccatcgtgttcgttctccacgagaccacgagagagaccggccgagggccgcggccgcggccgcgacgagacgacgaccaaccggcgacgttcttttgttgcccctctcgtccgttcgatcggtggagcgtcgcaactcgcacgcaccacacgcggtcgtgggtgtggcggtgaaacgacctgtggcgtgtgtaggagtagattagatggttggttaggcccgcgggatacacgtgcctccgtgagacgtggacgtagcgaaactggcacgtgattttgccgcccggtttcctacccaatcccggggcgaagagccgatcgatgatatactctctgctgatcaaagcaccgatgatcgactcgtttatttgtttggagtaaatctgctactccattaatgctcactataaattcgtgtacaccacattaatgctcactaaattctaaccctgcatatcatgcacctgaagaagccaaggttagttagggcctgtttagatccatttggaatggcaaatgacaaatggcaaaagttttagtggcaaaagttttagcattgcaaaagtactagttggtgtttagatgcatgttaaagttttgccattctagcactaaagtgagagagagaaagagagagggagtggtcccaaagcactttttggcacaatttgctactatggactagcaaatgccaaatgccaaattgccaacttttgctacaagtgtttagatctaaaatgacaaaaagtgctacaaaattttggaggatctaaacatggccttactagagtaatcacgcgagatcggatagggtgaggaactgagaatcttctattataatatcattatgggtgtgtttagttcacgtcaaaaatgtaagtttgattgaaattagaacgatgtgacggataagttggaagtttgtgtgtagaaaagttttgatgcgatggaaaaattaaaagtttgaagaaaaaattaagatataaaccaggcctaactcatataccagtgtgtaatagtaccatattatgatagatgatgtaaacctgatcagatttgctcgagttggtttgataataaactgaagtactgacaatgcaaacaaaatctcccctcccccaataaacttgatttggcaagagcgtaaatacttacttcctccgtcaaaaaactaaccttagtataaataggacattttctaaaacaaataatctgaacataactaaggttggcgttttttcgtttttttacggagggagtacctgctactacgtgcgactatgccgagatgcgaccatcgtcaccgaatttgctgccgaacagctagcacaagcagctccatcctacgcaagccgtaacagattggaggaggagcaggagtactcacgtattaccagcagtctagcactgtccacgcgggccccacgccgctctcgggaaaagagcgcttgaccgtttccttcgcgccaatcccaccgcgcgcgcccacaaataccgcgcccctcccataaccccaccccccccccccccccgatccggcgatccccctcctcgccgtccgtgccaccgccgccttctcctccctcccatcccccgcgcgcggtt

SEQ ID NO: 32892 - DNA, 3100 bp, Oryza sativa
tttttcgaggggtttttcgatttttttctctttttttttggaatttttttgcagaggaggcgacgaggcaaagccgcaaaggagaagagggagaagagaagacgaggcgaggcgaggccacgaggtagagggggactcggagacgggcgcggcggagtcaatggcaggtgggctccaggtgaggtggggcccacctgtcattggttaaagcggcgtgggtaatgggaatgggtagagtctagagtggcgacggttgggggatacactattttggactgggtctacccaattagactggcgggtggggtcgaggagatcgtggcgtgggggtcgtcgaggggatcgtggcccacctgccaagtccgcgaaagaatcggaggttgtggatatcgattcctggcttcctgtcctgggggccactagaaacacggggaaggtatttttcactctcaggaaatgaaaaggtgatcctcgatcgtttctaagcctcgtttgatccaaagaaaatctatagaaattttagaggattttatttctataggaattttttctataaagctctttaaattaaaggaatgaactctatagaatcctatgaaattcctatggaatgcctctttccatataagttttggaggaattttaacaagaggtagaaactcatggaagaaatccttggagtttttatctctccttaaattcctgtgtttttcctgtggttcaatcaaacggtcatacatatgtttttcctgtattttgcaatcctctgttttacacttacattcctgtcagaatcatatgtttttcatatttctccgtttttgtcattcttgtgattcaaaggatccctaaacaagtttggtattttcgtgctcctatatgcttatgcagtatactccctccgtttcagattataggttgttttgactttggtcaaatttaaaccaatttgaattatagatttaataaagagtaatttgcacccactatatatcaacttggcatgtgggtgcaatttgatgcaagaacttgagaaatgagtatgctaatgcaacaacttgacaactactcctaagtgtaatttggtacaggaactttataagtgattgcataaatgcaacaacttgcaagatatgtacgattttgatacaataagttaagaagttatgcaacaacttaattagttggagcacttttttatacatattcaacttttaagtacttattttgacagtatactagcatggatttttatataagcatatttatatttttatcctaataactaataattgaaagtcaattaaattggatatataaattattatatttcggttgagatttaggaaggtgaagaaaacaaaaattcttaaaggtaattggatgtgcagtataattcttaaagattaaattcaatattataaggtaatatccgtaggattgctatgtaatggcatattgacatcgtaaaaaaaactcatctagcatatgcttagctaagtttatgcaccaaaatactaaattgtcaagttattgtactagaacacacccatatgttatgttgttgcactcgaacgttcaattctcaatatcttgcactatatcgcatccacccgccaagttgtttgtaccgtggatgcaatttactttttaataaaactaatttggtgttgtaaatattgctatatttgtcaacttagttaaatttgaagtagtttgactttgaccaaagttaaaacaacttataatataaaacggagggggtaagtacatagtccatccattttcaattaatcatcctatagtttctttaagtttattttcaaataattatcatattagtatacattctctaaatccatatattatctgtatatggaaatggaaagtaaaaggacattgggacatgcatccatacatacaaccagtaataaaccaacatgtaatatctttgcttgttattggttagaaaatagtgataattgtgcatgtattgagattgttaccatagcacatgttgtacaggttggttttgcttgttttttatgtactcatgtaatgtgatgatcgattgggatctgagagagtatagcaggtataagtaatgtttgtgacttttttttaagaaaaaacatataaaccgaacgctctcaaacatttcgctctctcactcctatcatcctatggacacacaaatatacaccttggccatcgaatcagcatatattgatattaacaaagtcattatggatatctcgttgtcaatggagaagtcgtctgccagtgaataaataattaaccgtaaatacgagcacatgtaccaaatgtaagatttaaaatcaggtagacaggttccacctgcccctattattttcttattaagaatcatattttaccttggtttccgttagtgcgtttttcaaattattaaatagtatgtttcgtgcgaaaattttctatataaatattgctttaaaatatcaaacatattcattagtcaagtttgtaataattaaatcttaattaatcatatgctaatggttttctcattttacgtgacccaacttatggtgtgtatggttgttggccacactttaccaccacaactaaggttaggctacttgtggtagtcacaaaatgtgtcaaagttgacaagaaatttgagtatacgacgtgtgggacatgctattgaaaaactgtggcaagccacaagtgttatagtgaatcaaacacatgcctaaaaactatgatagccaaaaatttggcgtggcaaaatgtgggcatgaaccaaacacccacttaatcttcatcttaattaatttcaaacaccaagactaattaagatcaagattactgtaaaatttaattatttggtctttgagatctatatatggctttataatgggcttggcacttgtttacagtaaaatttaaattataagggctcatttggaactaggatatttggatgaattttaaatgtgcgagacttttcctatacgctccattgatattgaaccaccaaatttctttgaaatttatatggattttttcaatttataggaaattcaaagaatttctaacatgaaatccaacctta

SEQ ID NO: 32893 - DNA, 514 bp, Oryza sativa
attaaaaaagtaaaaagattgagaaagatttattatatatccatcgaggtgtgaaattaattctttttaattcccttcatctcataaggagtaacccagaacaatctcgataacgaattggttaattttgcgtctacgatcaataccagttttttccttcacctgggctaggagtgtagattctccgacaaacaaacgaaattcatgttgaggaatgcaaattttgtcccccactctgatggcctttatcgccattggattctgttctttttctgatcttaaaggtccagccaacttgtagttatgctgtactctagtagcctttcatttgatagagacggtttataatagcaaatccaaatcgcaataaatcaaatagttgatgtagatggcaatctaaccaaaatttagatcaccacgagagggttttgaagcgtcaatagaatccaaacagtttatgcatagctggcaagcatttcctggcatgcgtatcatataattggccacaatgttt

SEQ ID NO: 32894 - DNA, 607 bp, Oryza sativa
caaccctagaaggaggggacagaaagaagaaaaaacggagctagatattgagatggctgaaaggcttttggccatggatcgcacaagcaagaagaaattgggcaagcaaagaaaagagatcgaagaatttcagaagtttgtttgtgggatcactagttgtaatagtgtccattttattcaagatagttgacaatttgttcaatgaccgctgatgttaattttgtttaagatgaaacagtaagtttaaggtctacaacgaaagaacagtttacacatcagagcaagaaactacaaactttcagaacatctacttcttttttactattattacattcatactttcagcaaaatcaagtaggttcattacatatatcaaaagacaaggaactaggtccagaacttggcacacaacataaatcaaactcagcctctcccatcaacatagcagattcttccaatgaatatagcagcaaagcaatgtccagcaggaaagaaatacttcatctctctcatacatcttccataaagaaactcagggtatcgtgatcctgtgccggagactgcgtaggtgccagcagccgagatgcataggggacggaggggaggg

SEQ ID NO: 32895 - DNA, 654 bp, Oryza sativa
gtttgcttttgtcaccaccgactgttctttcgttgttgttgggcgcctacatcttcactgctagctgacctgactgttgctgactggtttcttcgcctccatggttatacaacttcattacatttgattggtggcatctttactaccactgacatcttccgttacttctgatgagcaatttcgtcttcatgttggtcatttcatctccatgccgactgcgtcagctattgccaatagacaattttgactatgacagaaggacaagctatatgctcaggggctcatcaactcaagcgtgaggattatatctccaatttggacttgttccggatacattccacatggattcatagtcatgagtttattttctatgctcaaagactggaccaattattattctccgtaagggctatcaaccgaatacttgcgccagtcgggattcaattattatatttattttggagtatcccataagggataatcattcagatcagaagctattcatatgagctacacttggtctatattacccggaagatttattactcgggagcatgttacatgcgtcatcctttaaagggtgtcgaaggcatattttttggcctaggcctaatatgcctgcagcccatattttcaggtgtggcctgtcacgtt

SEQ ID NO: 32896 - DNA, 692 bp, Oryza sativa
tgatggcatctcataggatccgtcaaaggtgaccctcatcactaaccaacacttatgcccgtcacatatgtgccgtcacaagtgtgaggatctggcgtagtgctctctctttaattgacctatgctttcccacagacaaataaacagtacttgctagcatgaggggaatactgaaaatcggttctaattaatagattgatagctaagtgcatggcaaacacttgtatatatagtttctcccggagtttggagtctcgactcgccttctcttccctttatattgatgcacctcttttctcaatccgcgtttttctttcttcactacttcatcaccaaactctaaatacgaaggaaatacatttttcctgcaggttgctagagttacaatttaggactgggagatgtcaggaatagacactgcaggattttgtgtcatgtaacaatatgtcgaaggcattgaaagttgtgatgctttcatgactgctcacctaattcgttggttccattacaagtaagtggcatgttcggctgctttgtaccgtcgttgcgctgccacagccagaagaaacaacacactgttcttgttgctacagcacagcaaaaataagagcagccgaccagagccaagaatgaagatccatgtagaaaaagaagtacaatggcatgctggaacagaaaacgactgtaaccaa

SEQ ID NO: 32897 - DNA, 640 bp, Oryza sativa
ctaggcgttcagtagcatcaaggatattgaaggctaaggtctgccacaggccacagcctatgggacctgaggcctgaggttattgtgaaggtctcagtaaattcccttggtacttaacaaagtacaattgcttgctagtcttagcttgtgtaaggaccaatgtttccctagtgaaactgtttcccaaaagaaaaaaaaatcttgaagcatcatttattcaaaaatacacattttgcagatttattgtgtttggttaattcttacagattttcgtgaacaacaatataatatacatgtgttaataacatatgcatggattttagctcagaaaaaaatggagtgttctagctagctaggtgcagtatagtttggcagaacatatttgattaagtagatattcgaccggatcgaggagggcggatgcgcggctggtatatggtttatcatttgtggggatgaggtcctgccttttgcatctgttttcaacagttttccttttccacttgataattatagttctttcaatctcaatatatagtttcagtcatgaaatgttcaccttttcattcccttgctgtgtaaaatgtttatatacatggtcaagttgtgttataccgtacaagcgccgggaacgggagga

SEQ ID NO: 32898 - DNA, 657 bp, Oryza sativa
ttcttatatggattcttctttcaatattgcttatttttaattctgaattccagctaattttaaattgtattcctacttgaaactcttcttttatttttttgctaatttcgaatttttattttatttttattcccaattttaattaatctcgtattgggttcttatatggactcttctttttaatattccttatttttaattccgaatttcaacttttttaaaattgtattcctacatgaactatcctttcttttctaattttggattttattttatttttttcaaattttgattaatctcgtattgggttcttacatggaaacttctttaaatattgcttatttttaattccgaatttcagctatttttaaattgtattttttacttagactctccttttttttctaattttggattttattttatttttatttcgaattttgattaatctcgtattgggttcttatatgaaaacttctttcaatattgcttattttaattcctaattttagctatttttaaattgtatttctacttgaactctccttttctttctttttcttttttccgattaatgtgagaatttctagctcccagagtgaacgcagtggctacttttaaagctgttttaataatataatagatagatagattcgg

SEQ ID NO: 32899 - DNA, 718 bp, Oryza sativa
caacttcattacatttgattggtggcatctttactaccactgacatcttccgttacttctgatgagcaatttcgtcttcatgttggtcatttcatctccatgccgactgcgtcagctattgccaatagacaattttgactatgacagaaggacaagctatatgctcaggggctcatcaactcaagcgtgaggattatatctccaatttggacttgttccggatacattccacatggattcatagtcatgagtttattttctatgctcaaagactggaccaattattattctccgtaagggctatcaaccgaatacttgcgccagtcgggattcaattattatatttattttggagtatcccataagggataatcattcagatcagaagctattcatatgagctacacttggtctatattacccggaagatttattactcgggagcatgttacatgcgtcatcctttaaagggtgtcgaaggcatattttttggcctaggcctaatatgtctgcagcccatattttcaggtgtggcctgtcacgttcttttagggacttaggcactttttgcttaggccaaagtgcgcgtgatcaagtgcccaataccttaaaatccttttataccgcagttacttaactttttaggagttggtacaatgcatcttaaaaggtgtcaaacagtaaagctttatatagctgtcccgctgacggggtgcag

SEQ ID NO: 32900 - DNA, 918 bp, Oryza sativa
gaatggggcctgcacccagctcgaaggcatcggcaagcgtattgatgaggctcttaagcaggagtgccgtcgatcgagccgatatgccggatggcatgtattggcttgcatacgagatcatcgcccgcagctacacctcgagtttctccacgaagggttttctcgttcttggagaactcggacggagatagatcacctggcaaagtcaatggcgccgctggcagagaaggtgttccagtctatggactggcgttggccttcctggtagtctctgttccctgtgacaaatatcttagggaaaagtgtaataggatttttacggaattgtaggaagtacttgtgaaatagaaaagaaaactatcttaactaagctttcttactctggacgtagtgtgtaagagtgtcttctcacttcgcgactccaatcagtcgtttgagttatacactctccctagcccccagccttgtcatcggagaattcttctcggaagataaggctcttggacctttgacctgcctcggttgaacaagcactgatcctagcccccagctgtgaagttggaaaattaatttccgattacacggcttggttaatacacacggtgagaactcttacacgaccagatcttacatggtctttcgtctctacaggatccgacaaggccttatcggctctgggcgtccccagctgaagatcccttaggttcctcggaggccttgtcaagacggcgtaacgggacatgaggataggtttcaacgctaggtgtcatctgggttagggaacattgggaaggaacactttgattgtaatctgtacatgaaaataggctttattgaaactgtaagatgtcttgcaagtatggatactattgacttaaacaaagaatttacgtaattaatcaatgttccaggaatttg

SEQ ID NO: 32901 - DNA, 709 bp, Oryza sativa
agcatacaaccaaccaatcatgtctgttaggtaatgtctagtgtagatgaaactaagattatcacatcataccatgccacatatggtttataatatcttctctctctccttaggctacattaggcgtgatctcataataaaatctagggccactagagaaaataccttgcactcagcgaataaagcctgtgcgggtcgccgcacagtggcagtgctaactggccacttcgatctcagcttgactgaaactccccccaaatacagaaatgtatgggtacgccatcgactcaatgcaatagagtgatactcggggagtagtattaagaaatgcttcatcgtggttatatgtgtgctaagagaaaacccaacgaaatgagtgcttggagcatacaaccaaccaatcatgtctgttaggtaatgtctagtgtagatgaaactaagattatcacatcataccatgccacatatggtttataatatcttctctctccttaggctacattaggcagtgctccctccgtcctataatataagagattttaggtggatgtgatctaattgggagaaatactcgctccttcttcacgcacacgcttcccaaactgctaaaccgcgtatttcttataaacacattttatagaaaagtttgctttaaaaattatattaactctcaattaatcatgtcataatggatcatctcattttgagt

SEQ ID NO: 32902 - DNA, 699 bp, Oryza sativa
tgtgcagtttcagacacttgattgaggaggcagcagagcaagtggtggtgcagtggtggttaagacatgaatggccatgacggcaatgggcgcactgttactggttgaatcgggctttggatgtacatggacatgggcatattccagatctagggtaagacggcgctgtttacgattggcacgttctcttcgctgaatttagctgatatttatgcaaagctgctagctgctgcgtaacattgttttatcggagataattgcatatggttatagctgggtaagtattgcctttggtttatggctgccatgtgagcctttggatgctttgttgacctgtggtcaatttgtgtttttagccatatccgcatcccacgcggttggctgacttgtgttggtgccatgcgagccagtactagctaggtacccaggctaggatctactacatgcgtatgacagcctgtgtgatagtaggagcaatatatgcgagatgttaacgtgtttggtaggccgcttaattgtggtcaggctcaggcgaaaaaaaaaactacttactccttttcacaacctaagcattaccataaacatatatatatatttagttatatatctagatttattgatatctatatatgaatatagataatattaaaaagtcttatatcgtaaaacggatagagtactactgttggtactactgag

SEQ ID NO: 32903 - DNA, 567 bp, Oryza sativa
aatgttatactctcgaatgattgtgcttcacctcattgcatgtgtgaaatgctcaccatatataagcaaacaaataatatatattttttatatgtccatgaaatttcagccaatgctttttacaggctcgctccgtcacatatcgtaaattttggttttgatctttctatacccacactaattaatacgcgtagtgtctcaagccatcgttacttaattagttagttaaacagataaggatactttacacatcaataatgcggcaccatgcatgtacgtacatcaccacttgctatttattttgtaggttttaataagaaccaactgcttagttcgaaagaaaattaaattagctaactaatgcatcaaatgatgttagactagtttagattatattagagcgtgggggtcacggttcagattgtagtgtgtcattatgtgcatgagtgtaagtcccacgttctgtcagcgttcaattttgagtcctatcttcttcgtagtattatattacgacaaaagagaattcaaatgacttgaactaactcaatcattcaagcgcggaaatca

SEQ ID NO: 32904 - DNA, 512 bp, Oryza sativa
gcgtgggagatctggaagactggtagggtgtggccacggggatcgggggcagggagggaggcaccggggagtagggacggcctaatgttatacgggactcttgtggcaaatgaaatgggctcctcccatgttgattttggataagttaattttacaggtgtttcactcccttatctaatgttttcattttcatttaaaaatatatatgtttgctaattttacatatttggaatatcctatgtcctcttttcttcaacttcggtttcccacttccaccgcttaaagcttgatggataaagtggcggtctctcctaattatgtttgtccatcatgcctactagcaactcagcaataaaatgcgtcaaaaaagaagtaagtcaaactcatgagccacaagagcattggtgaagataaatggagctcgagcttgagatggcactctaggcaatgcaaatagagatcgagctcagggtcgtatcgatgtcgttaatcttagtgcatggagcggattt

SEQ ID NO: 32905 - DNA, 672 bp, Oryza sativa
caacatgcccaccaaacccagattacggggatcactacccagttgttttgccaacggaaatgcgtcgcccgtgccacgaaatgataaaaaaacaactaaacaaacgacgaataatttgaaggtctacttcacatcaatctctacctcttcatgcccatgccttgtttggaacgggaatagtactacagattttacaaattttcgcaaggggaagcagtaaagggtgccgcagaaacgggatgacgggccctttggcagaaacgggagggggacccgtgactggcccccagcaccggcacaggcgtagtgaatgcacggcgtactacgagccaaaccatcgttgctcacacttggcgcgtatcctcggggcgggcacatgcgaggcgcagcgccagcgcgctgctgcaaagggacgcggcccggcggccgcgccatgtgtcgcgcgggcgaagcaggggaacgtgcaagtgtcctgtgccgtgcgtgacacggggtcccctcgccgcgtgccccacggtggtcacctacacttgccacgtgccccacggtggagtaactaacctaactgaactggaatgaatgctgtgggctggtggtgaacacgtcgcacatgcacgcaggactactactacttttgcaccccaagttctagagcaatggtttggtgtgttc

SEQ ID NO: 32906 - DNA, 837 bp, Oryza sativa
aaatgtgacattgtaagagagctatgggttatgcatggtgatgcagggtacatgatgcatgggatcacagacgatgtgctactgccacgaggcatgtaatgatttctgttgccaccaaaacaaattttgacatgccaaaccattgaacagtggcctcaccgcgtcacgaaggactgtgcaccttatcccaaggcaagctacactaggctgcaacacagagaactgggcacagatgtcgctgttaatggtctgctacactgtttcagaatgcaatgagcaacatcacactaaggcatacattagtgaaccacaccaagatgccaagagttctgccaggtcatttcatggtaaaacattgttgttggcagtgtttcaacagcaaaatgatctcttcatcagcaaggcttcctggaagcacctccacaaaattgtttttcatgtgaactgactggcaattcctatttagaatcaataacaaaacaacaacatcgacttttggtcccaagaaggttttgggttagtcgagagatgaaacctaccacacgaacaaaaaggaaaaatagtgctaaaaataataaaagatatcactattagaaatcaaattatccaacaattaccaacctccatgtcattgtggcataaccagaactacagtctactgcacatatatatataaatatcacattctacaatcttagttaacagatatcatttggatttgggtggtaactattgattcttaagaaaggtacactggcactgcaccattcagatcaagtattttgcttctcctatgacatcctacaacccaatgtcaattatctacaatctacattt

SEQ ID NO: 32907 - DNA, 668 bp, Oryza sativa
cactaaagccatgctagaaaaactgatacaacaaggggataagcctcacctagggtttctttagagaacttgtgaggagacaataggggagactccggtctaacccctccttctactcctctcctcatcgttccgtttttctacttcgcttcttgatccaagctatgaaggtggagatctagggagagcaatttgctgtagatgggagagatgcgaacacaggaggagaggaggaaggaggcaccggccagggagaggggtggcggcactatgaggggaggtgggattcggttcccctctctctaggttttaggggagaactaatgggctgggtttatgggccttctcatgttggcccacttctaaaaatatttttcttttatttttttctgttaacatctttattttaacaagtcaactgtcacgcccagaaattcacggaccagaatttctaagctgaatgtgcattaaacccctgtccaggaccagccagggtacacaaacgacaattgttgacatacagatccacgtcttacaaaaatataaaagattacaaatgcagcggaaaaagagaaaagcgagctaagcctgaagacttgactcctgcagcgggcgactccattccacaggcatccttgacggcagcgacgaaaccaacctcttcgaga

SEQ ID NO: 32908 - DNA, 713 bp, Oryza sativa
tatggataccccagacccacacggcatgtgtatccgactgggtatgggatgccatgtatagatagaatatctttaaagggactcgggttaaattctaaacttgtatgacaaggaaatacccgggatcctagtcgtttacgattgtatccaatctgtaactaccaattccgttagagatatgggctttattttgtaatacggaccccttcccttatataaggaggggtccgggtgcctcaaggggcacgattttgctcccagatcatacgatcaataatacactcgacggatcaatcgttgtacaggagtagggtattacttcttattaagaaggtctgaacctgtataaaatttcttgtctctaaacccatccacttttctagcttgatagccactccttttagtattgccgaaatcttgtttcgacaccgttcaaccttcctaaagatatctgagttgggcagtagcgacgttaatgtcctaggggaaatcgttttgtgcctgtgatatgtaatggaagctagtgtccctagcgcaaacatggatgtttagtttctgctgttatgtgttttttttttctgttttttctgtatcagactatgtttctgttctgggcctgtgtttcagactgggtgagtaaaattacctgctgtcaaaaaaaaaatccatctgcagactccactgaaaacgttaatccacagggctgcaggaat

SEQ ID NO: 32909 - DNA, 619 bp, Oryza sativa
tgctttccttgttttacccctttccttgtgttaagcgatcgaccttactatatactcttgcattttgtcattattacatggaaatatcaccataatgtagtatgatttagtgcatggcttcctattttactacatgatcttcatttgccgacagttgaggtacatagaactgccctcacatgctattttttcaagcatcacggcatcccccttttttctttgatgtgagcatcacgacattcttatccaccagactaccactagcatttatttactattagaacaggctgaacagaagccaccatattctctatcaagggctagaaattacaacgttatcaaataaaaggagaaatatcgtcactgttcatcaggatgagctcagattataatggtgaagatttattggatatattttagagctttctttactatacctgtatgaaagttacaattgtgtttctagaaataaacctaagagttatatagcaaatgcatttctactttcaatagactataatctagccctgcaaattgcatgaagaatccggctatctctttattacaagagatactgcacacttttgtgtggttagttcttatatccagctattagatt

SEQ ID NO: 32910 - DNA, 515 bp, Oryza sativa
cacgtgtttttctctttaaaatccacaatataatagtatgtactcgatgtactaaatagttaatacatatagaagtttctgatacatgagaactaggagcgagaactagttcttatatgagaaatcatccaagaaagtaattttaagagggcttaaaaaagaaaataatgaaacaacccatgatcaattataaattaagttctacaactcaaattcgaaaagactggtaaggcaacgagcaaacaatgaaaaagttcgacggttcatatttttttttactatagatttgtatcattagatttatcatcgaactgctttaataacatacggtcataaatattcgacactttagtcaaacttttgaaatttcaaaataagtttttacaaaatctaataaatttatgaataatattttaggtaaatttaagtgcacttttttactttctaaaattaagtgtttcaaatggttgagatttaaaaatttgcccaataatcaaatataatgactagagatc

SEQ ID NO: 32911 - DNA, 626 bp, Oryza sativa
tcctacatatgttcacagctcataaccgctattaattcaatatctgcttgtttcattctttctgcgacatagaagttccgagagtatctacaagaaggatcacatgaagcagccacatctactagcaaatgcacgtaatagtaaatgcataataagataaatagatgcaaggacctcatcagttagtacaactgcgagcttaccttaccaacataaatagtgtctattattttcataagtaaaattgcatatacaccattacatgagaaatagatagatgctttccaaacattttcgtagcttgtttagtgacaactataacatcgataagaggctgcgatattcgaagaacgtaccatgaacaagaagtattactttcctttcgtcctcatcatcaaattctgtctgcacctctgttcctctgacagctccagatctcaacaactgtctatcctcccattgagcattatcagcagtcatctgtgataacttcttgctctgagcaagggtcatcagactgccatctttacgagtctgcacccaataaaaataggtagaaatcagaatacaagacattctctacaagttaaagatatgaaaaattattaccaaataactatatttac

SEQ ID NO: 32912 - DNA, 507 bp, Oryza sativa
gattattgagcatgcaatgcatgcattgtttgttctcatccgcacctcctcctgcgtgcaggcagcatgcaataattctgatgcatcctctagtggaattagtactctgtaaaacagtaataatgcagagtacagagatgaatataatgttgattcaaccatgcaaatcattgtgatggctgatcacttgttgtttactgaaggtaaaaggcgcctgctaaataaaggggcacgtctcacatatattgacttgataaaacagtagcgtacgtagtataccatgatgttatacatacagatctgtatgtataacatctaagctagatattcagatgttaaaaataattgcgaatttggctatacttttatgatgaaacaaaacatgttaaaagttgaaactgagcagcatgtgtacgcgactactctcatatgttttttcttcgataatttcttatttaaatatctcaaagctctggttcgtttcaattgcttctagcggcggggaca

SEQ ID NO: 32913 - DNA, 672 bp, Oryza sativa
ctccttcaccactttcgctgccgtttccaccgccgcctctctcatctaccgccgattccattttcgccgccaccatctccccctgttacaccaccgccggtgcctccatttctgccgcccccaccgccacagcagccgaagtccccgtcgtccgccggcgagactaagccgacggccccctctcctcatcggagtaagagaccagtcgggttcggacgctgttcccccccccccccactccgttcgggagcgtgcagctcgaggagccacatgaacggcgcggaaagtagcggggaggctgagcggcgaacgggaaacggtgccggcggcgactctatctccagtgggagggagcactgctcgccggggggcgtcaccgctgtccatccatggagcctggacctggacgcaacggggcaccggtgcactcgtggcgggcgcttgtggtggtggagtcggaggtgtggcagcgacggcaaatgcggcgccggggatggtggcggtggccaccaaccctagaatggcgcccagcatggcgatggtggtgactccatcgaatcgacggaggaggtggcgaaggcgatgaatgcggtctcggcgatggaggccgagaacggcatcgaggatgaaatcaaggtagacgtacttacgcgatttcgggctgcaggaatt

SEQ ID NO: 32914 - DNA, 579 bp, Oryza sativa
taccctacagttgctctggctacaattgcggtaactctgtcctgatgttatttggttgcaggccatagtagatagtcagagaaaggaagcatacaatgcattagagagcattccatttgactacataatgaatgaaaatggcgcccctactaaaatttcccctaatagaaatgtttctgaagacctatctttgtcaatgcaagacgcagcaccaccgccaaatccttctaatcacaatgcagcatatcaaggtcacaaagtgttttatcatagcttttttcttctatttacatcttaaaatagttttgacatttacaatttttttgtaacagtcaataattttatccccgggcttactcacgtctctcaaacatgtccttcacttgaaaactgcaacactgctgcacgtattccagttccaggaggtggcggatcaaatcctttgcttgctgactctgagaatgacctatctgtcagtgatggtaagctctcccataaactgctctttatacctgatttcttgacgggataaacccaaaaagtttatagaagtcactctcttaatttatcgcttaactc

SEQ ID NO: 32915 - DNA, 671 bp, Oryza sativa
tgatcaggcaagacaacgactgatggagcacgtacatggcaaattcttatgcattaaactgaacaaaagctgtcgctgtctgaatttcagaagcatatgcatgtgtaattaacaagcccatcatcagatcaacatcaactaatgactaatgtaatccaaactaagtatgcatgacactatgacagtgatagtcgtggtattccacgcggcagcacaatgtgcgcatggactacaggactgcattacccaccacgaaattatgttctttccttctacaggtaacatataacaactactaactactctgctgaaaaatgttttatttcttcggttgatcaatgacgccattgctgacactccattggagtatatactacttcctccgtttcaaaacataaggatttctacgttatttagctaacactaaggttcttagtcaaaagattctctgatatatcctttcacttgtcaattttagaagtttgaattgtttagattcttttcgaagcatccaatatgcaactagctaggtttgaaattattggagtacttaaaatcatgataatcaggtgcaaaaacgtcttatattgtaatacaaaatttaaatgctatttatagaaaggtggagtaattactatttgtgataattatacaagcagtaaacctcactc

SEQ ID NO: 32916 - DNA, 628 bp, Oryza sativa
tttcaatcaaaataggggattttgcacgcaatttacgctggctagctagttaaagtggatttgttgtacaactttgaaatccttttttttgggtgaaactgaaatcctaaattatacttcgtgtacaatatatattaaaggacttgaatcaatatgcaagtcaattcttctgtttctatatagagagaagatttcctgtgtacccctaaactttgtctaatccttccctgcgctcattcacttttgcataccccaaattttagtttggatcccttccgcaccctttccagtagttgaccattaaattcttatggaaaagtccattgtaccctttggtgtgaagaaactatatatttatgtagtatattattggagtatagaaattttttgtatgagacttttatttatttatgagtttgttatgtgagatattatttacgataaaatgtaactaatgaaaagagtatagaagagattcaaactaaaatttaagggtatgcaaggaaatgaggaaaactcagggttgagggaattttctcttctatatatatactatcattgcactttggatatatataaccattgttatcaatctacaatgttataatttggtcccatcataattaat

SEQ ID NO: 32917 - DNA, 580 bp, Oryza sativa
ctgcagccctgctagtgcttcatgagctatggccatggtcaagtcttcgatgacttacatgtctgccttgcaggctgtgatcggaggagctgacaactacgggctctgaacattcagacgctgtcgggattgacgaatgtggattaccagacatcgcttgcttagaaattggcacttaactggttttgtactggtaaggagggagaattgctaatagcttagcatacatacctatttaatatgatcagctggcagcgaatcaatcttggattcatgtcattgatatattgctggcggatttcatttgacatgtttgatatattacgatcattgcacaatgttcttcagacattgatacctaagagaatatttgcatgagatgcgagaaatactttccaacaattccattgtcagttattaaactcagtgcgagcatatatgctaacaggatttccataacgacattatgcaaacgggtgaacgttaggcagctattgcaatcacgcatgaccaagtggatatgtggttcatgccttccatcctctgccagcgtattatgccatgtggagatttgcatgct

SEQ ID NO: 32918 - DNA, 545 bp, Oryza sativa
ttaattagatatatgctgccggtggagcttggcgttttgcctctcaccagcatcgggggctagtctcgtcggcgtcgccaaggcgcggcagacaacgggcaggtaggaggaggcgatggtggcgttgcagtagacggcggcagtggtcgtccaccaccacgtcgccacggccatggccccgccagtggcgcgaggacgaatggaagacggcaggacgctggcgacacgaggatgagcagacgaagccggcgatacgaggtggacgagcggacgccagctcaagattcggcggagctcggagcggacgaggctccggccagctctcggtggattcggcgccccctctctcgctttatctggatctgggcgaagccacttgcggcggagctcgggccaggatgcaccactgctccggctagacggcgtcggtggatctgtgacagggaggctcgggcgtagctgcgcacgaccggtggcggagctccatcgtggccggcctcgtcaacttcaaaagttcttccccggcgccgtctcccggcggcggg

SEQ ID NO: 32919 - DNA, 580 bp, Oryza sativa
aaattttttataatagttaatacttaataatcacatgttaatgagttttctcgtttcacgtgtgctacaaatctctctaaagtcatggaaagaacgctgcacaaactacatgtaatatagaacacattgctctatgtgtctctctgtcccagaaactcttgcctgcattcataactaaaaattgttacattttaggatggaaagaacggtatttattaaatactcaaaaaatatataatatttactttctactttataggatagtgaattgatgtttgtttgacataattgttccttgatttactaatcaaacaactttagatgggtggggataacacaaatgagaagattatgggtgttcaacataattggctaacatcaaggccaagtacacaaggtttatgggtcctaaaataccttatattgcatatcttaatccattcttattctagcacggtactagtaaaacatttcatgactaactacatcctcataggtttgtatagaagaatgatattttttagggtaaattggatacatgccaatataaatttgatgtggttttgagaaatgccattat

SEQ ID NO: 32920 - DNA, 654 bp, Oryza sativa
atcgaaaatgtttcactcgtttaaatctggtgttgtttcaccttatataaaaacaatgtttcagcaaatagcggaaaaatgttttagttcactgcaatattagatctatacacagtgaaacattataagtacactaagtggaacattttttggtgaaacaaaaaatgaaatgaattcccttaatttccaaaatatgtgggttttttattgcaatgaaatatttcagttcactgcaacattagatctataaatagtggaacattgttagtgcactaggtgaaacattttttgtggaacaaaaaataaaccacattcccttaatatagggtttccaaaatatgtgggtgatttattgcaacggcgcgttccactgcaacatttgatccatacacagtgaaacatcatgagtacattagctgaaacattataaaactattagttgaaacatcaaaagagaccacatgcaacattaaaaaaatcaataaaaaaattaaaatatttttttgtcgaaatataatcatgtgtggtcttgttataaagaattaattgtaacgaatttagtggtgcaattagatcgtagattaaaataatagtttacgataaaaaaatcttttgaagaaataagaaaagaaaagattttttggatactggcat

SEQ ID NO: 32921 - DNA, 621 bp, Oryza sativa
ggacgaaaaaagatgagtagtaagaccgccctcgcagtgatcgcaattaatttttggtttctttaaatttgattaaatttattactgtaaaatttagtcaaaatttgttaatttaaataatttcatgacaaaaaaaaaatctgacccccaaatttcgatggaaacgaaagtatagaccctgcactctcgtgtcgctcccgtgggacgtcatgggaggtgaccaaagcgtttctccatcgctatccaacctcccacctttcgttccctcgttgccaccgaagtataccgatggagctctatgcggttgtgatgacgacaacaacagagccttcatgcatcttcctcggtggccctcgttctccaagaaaggccgacggtgacacagtcatgcttaaaaaggatggcaacaagcggatgggaacaaacagatccaacgcttcctcaactggatctggcgtcctcctagctagatatgacgcccttcaatccgatatgtgcatggtgaccagagatgcccccaaggcgcggttggtggtctaatgcgttgagaggccggttgttttatctagggataggcaaataaggcgcactcagtgggcaagttgctagacccgtgtagtt

SEQ ID NO: 32922 - DNA, 681 bp, Oryza sativa
agttcattttcccatgattgtcatttgtctttgctaatgctccaatttcttatggactgaaccaggggctgattttatctttaggctgtgtttagttccacatcaaaattgaaagtttgaagaaattaaaacgatgtgacagaaaagttgaaaatttatgttgcaggaaaattcaatgtaacgaaaaaattaaaagtttgaagaaaaaaattataatctaaacagggccttactatttttttggtgtacagaagtacagaacgaaaagatagaaaaattagacgatcgagcaagtgtagtgcagtgcagtactagtaggtactggtagggccctgtttgaaaaaaaaattagctcagggctaattttgagagctaatgtttagtcatgaattggtaggctaaacattagtctagggtggtatgtttgtatccatgggctaatttaaggttaaaaggtagagagagagtagaaagagaggagagagctgtttttttatggtccccacacaaaattagccctattaacattccatggagaggctaatgttttgagggggctaattcactttagcctcaattttagcccacccgtttggatcttgaggactaattcagcactaaaaggtgagagctaataattagtctaaggaccaaacagggctgtctagttgatttcatggt

SEQ ID NO: 32923 - DNA, 569 bp, Oryza sativa
acataaatatgcaagtgcacggataccgttgtaccactttagttatgcgtattttcaagggcatcgtatttatattttttaggaagacggtgctacgaagacatacttatatcttttcaatccatttataactaattcaccatagtctagacatgagttataataagaggcaattacgtttttggccctgctttttcgagttgctcatttgaccttctttttttacaaacgaggatgagacttggccctattccgtgaaggcaacatgcggtgttaactcacgacaaaagttccatttatacccttgtgaatttaacgcggtttctcaaagttttttattcaatacagttttgtgcacttattagtatatatcaaattgcgtcaaacacaaatacatggtacaaatttatgtctaccaaaaacaaacaaaaataccatgtcaagcaacaggacaccgcgccacagacggctaactcctgagcccatccatgcggagcagccgccgccactactcctccctccgcccaccggctccgctgctccgacccggccaccgactgtgcagctcc

SEQ ID NO: 32924 - DNA, 529 bp, Oryza sativa
tatccctctttaaccttgtgttgtcaaagaaaatctatagtagctagaatggtgttttatctaattaagaatgtggcaagatttttagaacgcggataaagcataacacctatctagttcaagaagtcagaggagatagttggggtcgagcacaacttcagatcgagtaaaactgagcataggtaaacccatacagatgtatttactttgggcacattaataggtaaccacatatggtaaatactaccctgttcgccaacaccgacatgctagagctaacgtggtgaaaggatgctgttctccaatttactatatctgtgcgtttctctaatttaactttcttgaaaatagagtaaaatacatggagggtcatccaacttatttagttgtgtcatatagaatacacatattgataactaatgtgaattaagtgaaacattttagctatctaactatccatgtgaacacatcatgtacacaaagcgtgccagtggcggatccaggatatttcatgagcttgggcaagcta

SEQ ID NO: 32925 - DNA, 751 bp, Oryza sativa
tgctcaggataatccctattctcgatataatcttgatcaaccttcacctcctggaagttgcagacgttgcctcacgactaaccgatacacaaagtctataatacgcgagaaaaaccaatattcaagcaacaatcaaatatgcacaacaaaatatatttgctgaggtcgaacctaaggttgctcatattattcgcgcttgctaatggactctaatcaagctaagagctagggtttcttagtctttctgttgtcatggtggtgcagtctagctaatggctaaggaaggattatggttacacatgcatctatctaaataggacggttatttactagaggttctgttgttagatggatttaggatcaatcaaatagttatagtgaatcatttgtattattattttattgatggaagctttactttaattatgaacatattttacttgtcacaataaattataaaaggttaataattatccatgctttgtatgttagagttgttcacgttaatcatattatgggtacagattatcccatcacataattttacaatgaataatcctaatttacagttgaactataattataattatatgaggtcaagatttataactagtatatatctaatatacatgcttgacatactctccctttaacttaatttatgccacacacaaattaatactataccgtaccactataatgggatgtataatatatgtgtaagcaacaatattttatcattggatcatat

SEQ ID NO: 32926 - DNA, 524 bp, Oryza sativa
aattgtaggacaatgcacagaaaggaggcaattaaaactgtgtatcgtgaagttggtggtgaatgtaaagatggatcaactattggtattgacatgaattcccataacacatcagttaaggaggtacaataacttatcacattcataacattcctcttctgttttcttttcctaattcctacatatctcttgataaactgattctctttctctctctctctctctctctctctctcacacacacacacacacacacattcataaaaaaacagtgcttgagcaaaacagaggttgtgactaccgactcctgcccagaccgtgtaatcatcccagaccctacacctaaggttgtctttagtttataaaattaagtgtcaaatcttcagttatattaatgttttgttttgaagtacttcagtattttgagtatttaacctgtctatagcaaaattggttttgctgttgtaagatgcactgcagaaagttgtcattttcttctttttcgtgtttcttaattgcataat

SEQ ID NO: 32927 - DNA, 719 bp, Oryza sativa
tcattattacccatcagttttcgcagtgagctaaactttccccaaaagcttgcgtgttgtgttttgccattcatcggtcctttcagagcaccgcaccaccattgttgcatgtccaagctcaagctcacctattgcccaaaatatactgctgtgccctccccattgttcttcgcacagaggacatctcgaggtcgcctgcaggagtatgaagaccggcggtcgtcgaatctcgaatcgtggcagcaagcatagagggcagtcgtcgtctgcatcatcttcatcgtcgccagtccgggcaagcctggcagaccacgcgcatggcataggctgcttggcctaaaaaggaagcatccacaagcccactttggtgtggtgcatcggaggaggagaaaggtgccgttcgcaggggcatcggcgcttcgtgcagagggaaggcatcagctgcccgattccggaatcgctgtggccattgcagagaccggtcatctccgatctcgtgctgcacagttgaaggggatttggcgcccttgcatcgccattgcggaaaggggatccagctctatataagggcatggctgcggtaggcgtgaagcgcaaactcatcgtcgacaaatcccctacccatcacctcctccatttgcctccgtcgcccatcgctttgcttagaaggagggggctaccttcagatctggaatcctctgagggtttcttcacatctc

SEQ ID NO: 32928 - DNA, 1108 bp, Oryza sativa
ttaggttataagattttctatcattggccacatttatatagatgttaataaatctagattcattatgtgtctagattcattaatatttatatgaatgtggacaatgctagaaagttttataacctgaaacggaggaagtaccatataaaaatcttaattttggtgggaatcgtcaatttccataacactttatccctattaatatacccattaatacatggatcgaacataaaagataccattttgatgaatgtgggaacaatggattttctgttgtctcccttccatagttccatggtatactcccctgtcacagaatataaacatttctagctattcctactagaagttattatatttttggacggaggtagtagtttttaggcatggatgaaaatccgttgttaagtacagttttatcccaagaacggttcataattagcttggatgcgacacgtgcgacacaaggtaagcatttggtaaaataaaaacacgtactccctccgtcccgaaaaggaggtcgttttagcgctgaagcaatatcccgcaaagagtgtcgctgggagcctgtcttcgtagttcagacctactctgccccagctcagctagtctgacgttctgccacatcactcaccgctctctcaccccaaaccaacagacatgaaggtgtagtactagtattagtaatgatagaagtataggcgccgtacaggttatttttacactgtcttgatactctcaccagaagttagaacgtcaagtttaaagagactgagggagtatatccgtgttcgaccgtgtcaatctcactcttggatttttgtgatccggagagcaatgattctgagaacgagaggcacaatatgcttccacagggtgtgtttagttcacatcaaaattggaagtttggttgaaattagaacgatgtgacgaaaaagttggaagttcgacccgagtttagttccaaactttttcttcaaactttcaactttttcatcatatcaaaactttcctacacacacaaacttctaacttttttgttacatcgttcccattttaactaaactttcaattttaacatgaattaaacacaccctcggccacaatc

SEQ ID NO: 32929 - DNA, 1932 bp, Oryza sativa
atcaggaagcggactagttagggggcacaggcccagcataaagggggagctttaaacctcgggtgggccgtgagcccgtcactgcctgggatggggaggctgagcaggctgcttttgcacggtttggttgcagaataagttcatttaaggtcccttaacttgtaaatgaatccgattttcgtcctccatccagaaaaccagatacaacgggtcgctatacttacaaaaccggtgcaaaattagtcctaaggcagtatgacgagtggttttgtctgatgtggcattttgacttgtcctacatggcattttgaccactgagttagcacaatcgttagggaataaatggggagcggtggattctcgcgcgttagtcgccattcctctcccctttccgaaaccctagcttaatccggggcgattcggagagcggaagcgcggcgatgggagctagaggagtgagggttcgtcgtcttcttcgcggcaatcgtacggctcacctattccctatcgggttgctccgttggattacaaacccgcagtgttgtgcagatgcagagtgaaggccgcgaggtgcaaagtgaagcacagcgcgtgacctcctgctcctctgccgccatgcggcattgagagcggtgctcggcgtcgccatcttcgcatcgaacagctgcagcacgctagcaattgtcccctcttcgtcgccctctctgtcgcctaggaggagcgcacctagagttagggtttgtggaccaaagaagagagaaggggcacacccttttttaaccctctggctgacttagcaagaagcgcccaacgggctgtgctgacttaaccgggcttaaccgcggccaacttccccctttggacaaaacaaccctcaatactgctttgggaccaatgtttgcaccggttttgatacttgaaggacccgtcctatctggttttctggtttaggaatgaaaatggattcgttgataagttaagggaccttagatgaacttattcctttggttgcagtccaggtgcatcaagaaggcccaacagggatgcacggtaatatggtatagcacacatcgtggtttgggctagttgccaggcttgaaaagatgaactttcgagtgattaccttaaggctgtgtttagttcctaaaattggggagaagtttgggaaaagttggtagtttggaaaaaatgttgagagtttatgtgtgtaggaaagttttggatgtgatgtgatgtgatggaaagttgggagttggggagaagtttggtgtgaactaaacagggcctaatactgggaacaatattttttagataatgggtaaaatccaatctttagtttaacagaagctactgccacttattacataattcttgactgaaaatcaagtataataatttctaacaaaggataaatagacaacccaataataaacgccaccatcaaagaagagagacacttattcaaagaacaattttattgttaaatctccattcaaagttgacaaaaaatttgcatagcggacgtctccaaattccaacatgcaacgtgaataatcaccatgtcctcttcacacttgtcccaaaaccgaacctaatatgttgctttgaagagtacctgcatataaaatttagttggtgttttgttaaaaactgtgtcatttatattcaaccatagagtctaacataaaacatatgttccaactaaaatatgttttctttggtctttgtgtcaatcccaatcagccaagtatcaaacatatgagtcaaattatgtggtgattgtaagtcaaaagagataaaaaatggttctccaaataaatttagggatggtttggtttgagacctaaattggccttaccaatttttgtcaatgataaattttggtaagttttggcatggctaattttggcaaggtaaatgatggactactgt

SEQ ID NO: 32930 - DNA, 627 bp, Oryza sativa
ataaccagactgatccacaaactaaggcttaaccactagacatgtggaagtacggcagtgctacgcaacagaggcccggagaccggtccttatatggccgaggtgctactatcaaaaccatgcaccccgagcccagcctaaaaccattttgagggttttgaatagagggggaggtgtgaatccaattccacaataatccaaccattccataatgtccaggtgatatgaatattcccaaagtctagagctgtaaaaccacctaatggtgcctaattaagcggcgaagcatctacctaaattcatactagtggtaccatgagtagagtgtccactagttggggttttgtttattctagggtgaacaaggtaataataacaatcgcaataataataaggtcataacaaaggtaaataggcatggctaaataaaacagtgataacgcgggaatttaaataaagcaataatgcaataatttaaatcaaaataattttataaattgggattcaatatgttcaaggatgatgtgacttgccttgctcgctttcccaaacgtcggcttcaacctccacgaagagcggatctacacgaccaacggaaaagaaaaggcttttactctaataaactcc

SEQ ID NO: 32931 - DNA, 2196 bp, Oryza sativa
tatgcaattcagtgatcgaataacgaggttggcaatggcattcacgccggtgagcaatcttgcacgtaccgctggcttggctgtaagtcaatttttcatgtctgcataggcacaggcgagttaatactactccaccatgtactctatctgactctgagatccttcattcatgcttcactggcatccacaatggtagagtatcctttaagcttctgttcaggcgtccatttcatatgtacgtacactatacgtgaggtactagtacaatatactccgtactagtacaggttaatgcatggttgtcccgttctatttatctactttaccatattattgtcataaattatttactccacacctataataaaaccaaagtagacaattatggcgaacaatctgcttcaaacgggagtgagtctttgcaaaggggtagtgaatgagaattcgaatttcaaaccacacatatccgagaagaacggtgcgcgcaacgcgacaacggttcgcgcaagcagccaaggctaacgtacaggctgcacaatgatgcaccaccgttcgcagccaacggtgagaagaaaaggcaggacaacggatggcgcgcggcagcagcggcggaacggggagtcgaggagacgaagcagcagcagaggggggctcggcttcggactccggtacagaagaaaacaagaggagacgtcgtgaaaaaggattgatggatcgaacgcctgccctgtgccctcatcgccatgatgtactattgtactcctcctagtgtgaatatgtgatgatgacgattgacagctacaggcgacgtacgatggctggccggagaacagctgtgaggggagtcgggtacgtgccgtaccgacgagggtccccgccggccgatcagtgggcaccgcctagactccatatagccgcagtgcgaagctgaaagagcgaacggccaatggcccatggccaatggaaaatacgtgctccctccatccaaaaaaaaaaaaagacaaaccctgatttccgtgtccaacgtttgaccgtccgtcttatttgaaaaaatataaaaaaaattaaaaagataagtcacacataaagtattaatcatgttttatcatctaacaacaataaaaatactaattataaaaaaatttcatataagacggacagtcaaacgttggcacgggaactcacagtttacttcttttttttttttttttgagacggagggagtatagctcaacagtactgtacatgcaattgcaatgcaagcactccagttcaggctggttctgccaatggggctcgggctcatcattggcatctctcgtactgctgtactccgagtacactatacttcgagcaggttgggccatcgctgtcgtccagtgtgtactgctggggttggcctttgtgtaggtcatagtagctgatgagacgaatgacacggattaggaacactggaacagaaaagaagcagaggcaaaatggaaagagacgcgacggccagtgaaagatttccccgtctccgcgtgcactgaaacgaacaaatgcaatggaacattgctgttgagttttaagagcaccaagtgagataaaacaggtgccagatcctttttggtgtatgtacatctgcactatgatattgagctgttgatcattcagagtgacgacaaaactaattttacaaaggcgcaagacttggcgtctactttcgaataaagtgaaagtgagaagcattccattattattcgtttgcgtacaaatgtacaatcagagagtgaccaatttattgccactttataagatgcaaaagaaccatgactgccacttttttcatgctagcttgcctcttggttgtgggggcagatacaaacggctacatactagtataaaaaaaatcaatttctaactatatatttggatattagatttcataaagaacaacttccgatatggcacatccaatatatatttgtttcatgatgatgtgtatcattccgagccgatatttattgtagcaggagagaaacagggatgtagcaggtgcaagaaaccaacagagggatgatacaaacattatatatagactaaaatacaccagcggttcttaaacttcttatcagtaggtttcacttaggtccacgaagttgtaaagcgcacatcaaggtccctaaacttggtttattgtatcatcccggtcca

SEQ ID NO: 32932 - DNA, 599 bp, Oryza sativa
tttctacaaattaacagtcccctcaggtgccccacaaggaggtccttgaacacgtgtcatcgattctcaagttttataatttttgtcctactggagaaggcatcagcattgaaagcctaaacctgtacattcttgcattcctttatattttttctgattatagtttgtatgccataatgccttacatgattgacatgatgtttaattatttcttctgcttgtttttgaagctcccgctacgactgccccttgcccagtggactcatacttgacgaatttggtgtgtgtgtatttgttttagcccaaaaccatcctatcgtgatttctgcaaatagtcccatctaattttttttttgtggtaaacagggactactgtagctactcatctgcatgctggaaaggaaaaggtaaagatgtttcttacttcactgcatgatgtttctttgttgtgaaggtatttttggtgtcccatttttgttttacttgctgctgtttttactttgggttagggcactgaatccactgactttgtgccaagtggccttgattcttgagtgtttctgctttttaaagacgttccttgcatgtttgtttcccca

SEQ ID NO: 32933 - DNA, 554 bp, Oryza sativa
tcatagatagtataacatgtgtacaaggtatgctcatgtggatagttagaaaggcaaattgattgacttaactcacactagtgatctagatgtccattttgaaagtagattgacctacacaattccgtaaacaagttaagtggtcctccatgtattttactcttgaaaatataaagcctaggcaccacacctaagacttatactaaaactcttcctctgatgaaaaggaagaactcctaatttacctaggtgaagtaaactcgaacaacaaacccataaagaactttataagacttgcaattcataaacgatcggctgaaaggtcaatccgacaagtaaacgagtaatgtgcacaaaagaaaatatggaagataaatgcggaaagtattcggcacaaaataggaaatgtacgaaatcggaaagatacaacatcattactgaacttccaaaatagatccttcagagtcagttcaatcaaccgactcgacttgactccaacagaacccctcctattccttgaactagagtcggttgatccatctcagactcctcct

SEQ ID NO: 32934 - DNA, 566 bp, Oryza sativa
tttgagtttatctctcttatcgaatttatgtgtttttctgcgttgaatcaaatggttatttaagcgtttttaatgtgttttacattctttattagaatactacgttgtttctatcaaagagggcctaatagagacgctaacaaagcatattttgaatttgtcgttgtttgtaactccggaatgtgtgtgtcaacataaatataccagagtacgatgaagcacaaaacgtttctgtttacacctaaaattggcatgaatgttcaaattaaggaaaattgctaagatttgggaaaaatcgctggtttcctccatagggccagtctgaccggcgtgtattggccagtcagaccgttgattgagggtcggtctgaccggtggcatgtggtcgatcagaccggtagagtccgagaccgagtctgtttttgtcaggtctcggaattccttgctcgagagactatgcttttggtttcctttggtttctataccgagttgaacgtggaggagaatctgtaggagacaagaccaacccctatataagggacaaagccggttcaattggaggagaa

SEQ ID NO: 32935 - DNA, 580 bp, Oryza sativa
cataacttcaaggggacaaggaggtataattttgtgtgtgtgcatgaaaagtaaaggggaacaggatgttggtgaacagtgataatgttcccacgttgaaacaggataatgtcccgcactgaaagaatgagatatttatattgatgacttcacagatggagcacttgtgagagatgaagcagaggccaaaatcttcaatgcataagggtactccaaggaggtcacaaaaatcaaggactgagaagaagaagactccaggattgctaacaacgttgacatccatcttttccttggttggctctagctaagggaatgacctcagcctaatagagtgtgtttttctcttcttatgtaattcaggtcttcctgaactagaaattctcctctggtatcctaaactatgtgtcctcactgttgtctctgttctgtaaaccagaatatccctttagggtgttaggaccctcaacattctttgtagaacagtttcttcatctcagtctgccatttctcaaagtccagattttagataatggtgtaatgctaagaatatctgttttttccagttctcccaaaaaaatgc

SEQ ID NO: 32936 - DNA, 559 bp, Oryza sativa
aaaactatgaggtgggccccccaccaccaaaaaaaaaaaaaaaaaaaaaaaaactgaagaaagaagagaggagaggaaagagagggaaaaggaaagaagaagagaacctcgcggggtggcatcagcccacgcaggccctcagcattcagtgtcattgagcatgtaggctgtgcaccacctgtgctacccatgagacgatcccaggtgcctgtggaacgcagagcaagaacaccactccctccctctccacctgcatttccatcttgatcatatggaggagaaagtcttagtttaaagctagcctgtctttgacactttcctactccctgtcaatctccattttaaacaatgaaaggcccggtctcaggccataactttggcaggtaacagtgtaaggttagaatttaatgatgccatgtaagtttcatatatatgtatgtttagggttgccatctatgtaagacaactgaagattgttttttacttacactggtcataacaacttttaagaatccagttcaagtgagttgataaaaaggtcaagtccataatagtgcag

SEQ ID NO: 32937 - DNA, 508 bp, Oryza sativa
attgtgagctatcattaagccatcattaaataatagtgaagcattagttatcccaattgtgtgctaatgtttctaagcatggctaagcaattatgtctaacatctagctgaaccaatatataaagctcaactagtcaaattataataacacaaggtatcaaggaatagagtaatcaatgcaaacaggccataacaaaggaataagttcacaccacccggtgacattaaaaaataaatgcacagttgaaacaaatagagaatttaaatataggatcaacatgctcaaaggaattgtgtttaggatctgtgtgacttgccttgtaataacgggtcttcaattaatcttcttgaacacttccggcgcactcgcgaaccttcgaaacgacggaaacgacaagctaacacgcaaaacgaggaaaaagactaataaaaactaaataaacaatacatataaagtaaacaaacatgagacttgaacagcctcattctgacttcatatgaatttatt

SEQ ID NO: 32938 - DNA, 630 bp, Oryza sativa
cttgcgaagccaagggaggcgacggcgtgggtcggcgtggaccaaagcggcattgtgaccgcggctgatggtggcaatggcgacaaaaagaggtggtgcgcgtggcggcggcgttccggagacggaatgggaaaatgtagtaggggccggggtggagatcggcacgccgatgccgatggtggtgtcatcgcggctcggtggtggctagtgcggcgggaggcggcggctggagcacgccggtgagtggtggggagtgggagcaccgtggggaggtggttccggcgacaaaatggggaagtggaggggatgctgggttacggcacgacgtggcgaagacgttggtggcggtcgtgcggagcggcggcggcaggagcagcggtggcggccggttggagggtcgccggcgagcggcggcgcttgggctcgcgtggggaaagtgggagagagcgcggggagctcggggaggaggaggaaacggaagaggagagcccggggatcccttttataggctcgggaaggcgggatcgatcccgggagaggcggcaaccgacgatggggtgggctccggcgacgtggtgaagtggggcagttcagcggcggttttggaggggagaagagggggaaggggtg

SEQ ID NO: 32939 - DNA, 583 bp, Oryza sativa
aagctccggctccactcccacaggcagctcaactggggtataagccaaacgtcttctccttcgcaacttgttttcaactgaggtttgattgattatagcaaggtgagcatatgacatactcagcaagccacacagcaaatatgcaagtgcacaaggataccaaagaatggcataatatagggttcatttgcaaaagaagcatttagcaaatagtaaaaattgtaaaacagtagagtaattaatcatcaatattaatcaactctgaacagcacacccatgctgcacaggcccaaccatcctgaacaaccatacccggctgcacagatttatctccaaaccaggaatgtaccattccaaaccaggagctaaattaattaccatcaattaccacattattattaatgagtagtgtgggactaatcacgaaagacattgttcgacccgcccataaccgcgggcacggctattcgaattgttttactctggccagaggtgtaccattgtacccacaagacacaacccaccagcatgttaccgtgcccggccagacacgtcaccatgttgagtgattgtgacaagaccc

SEQ ID NO: 32940 - DNA, 634 bp, Oryza sativa
cagggagtgatcaggagcatcaatgccaaaccccagcctgaacgactgagatgttggttcggccaaaccatggctgggcccttctggcctggcctttggcccatctcccgctctgatcctactctatctaattttcagagttttgggctgattctcaaatgttttaataaagttgaaagcccatccttatatggatatggttccttctccactttagtgtgattttcctcccaacttcggggtttatcatctgcatacaaatatacaccaacacttgtagaaaatgtgagatttaacacctattactatgttggatgttttattatctgtactttaagcagatgttggcggtatagaatcgatatttaacagctgccaacaaaaccacccacacttagctctttagtcgtccctgagtaaaggcagtgtagaatgaaattttccaagatataactcaagcatatagattattcaaaaccatacctgtacctgtgaactttatcagtggttatcttatcatcttgggtaattgataaatggaacggtcatgattccagtccttcctacttcctctgtcagactcatggggttttatgaatttttcacaaaatagctcttttcctcttactgactt

SEQ ID NO: 32941 - DNA, 554 bp, Oryza sativa
aggcggataggcctaaggtactcagcccaccctatgctaataactcgatggttcactatgaggtacccaggtcccgtataccctacagtagccccggggactaagcttggtactagttttctgtatcatcaaaaccgtcaaagaagaacaaaacgtgatgagtactcaaagcctgaatgccgccgagctatatatcatgaccgagtaacctccacttgaactgaggaattgaatcatcaaagaggtatttcagactttatcgaaaaaacttctagggctggcccattgaagcgccttcttactctataaatagcgacctagacggaacgaatctcacccaaatcccaatttgagcaacagtagtcgtgcctcttcatcttcttcacctcacccatttttcttcttgattccaactagggttttttaaacctaaaccaaacaacttatccacccaaaatctgaaactttccaaccttccggattcgaatccccgaacttctcctcctcaaaatgtcgggttcattgggtgaatccgtgttctaccagatcgcaat

SEQ ID NO: 32942 - DNA, 2572 bp, Oryza sativa
ttaacggcgtaatcaaattatgccgaaaccgagtcaatctcattggctcgtttttctcattggcgtgcggttctagtggacatcggactatccgataaacacaattgcactcggccttggtgagtactagacattctagtgaagtcaccaacacacataccgattgatctcatcaacccatgcggctatcggttcatctcatgttccgatcacctaagaactcatatacaacataatagatctcatctactacacccgcatatcaattatatgcaatgatctagatcataaactatacaaggtggctctgataccactgttgggttacgcgtaggctacgatagcataaatcaaaattttctatcgcgtaaaccaggaaccatgcaagtagtagatcatagatcgttactactcgatgcgctgcgcagtggaagaagacgctgagaagtcgaaggaactctcgcgaagtagcacgcgtcgatgtagaggaagtagtcgatcgcaccggctcgaccttctcctcctcgtgcgttctcctcaccgtactcccacaccgatcagcatcgcaaactagcggtgcctctactggtatccacacgtacagggacagaacgccacgcacagatgtgctagcacccgcgtgcggctagggttttgctcggggagggaagtgatggctagggtttctcacgtgatgcaatgcctccgccggtcatacccctcacgaatatataggatccgtcattcgggcctctaaggcccgtaggactcctattcagatccctatccgaattaagctcatattggatctccatccaatcctcttattccggcccattaagcgtgcgaccctataggttcatgtatactcagctgtaacccgaaaactccttttcggtccacgtgtcaacagcggcctctaacagaacgtattgacccaccgggcatacataaagatcatatcggctgaacctctagtgtatacttgtatgaacccctttgcctcacgatatcgattaagctcaaggctggatatgtgccatcctctaatagctcaatcattcactcgaacctgttgatagattatataacttgtgattgactcctcaatcacctttggcatggccatgcacttccataatctacaacatcgaggggcccagagatatctctccataggaggggcaaatcctatcttgattattcatatcccactacatgtttcatagcatactcgaaaactacttttataactacccaattatggagtagtgtttagcagtccctaagtaagctactacacatgttgagaaccatgataatctcaggtctaaggattcaacaccaacactaaataagatcactgatgacacaacacatagagctcttgcagtgtctcatgttgggtctatccaacaacatgttcactaacatgtgtccacattattaatttggtatctctataccatgatccatgagacatgatcatcaattaatacatatgctgatcatataaacatatttgttccacatatgatatttgattagggatcctttagaaatagtaacaaacaacatatagagtctcatgaaagaataatatattcattaaccaataatgagttatctatttcaaggaacaatgtcggataaatatgtaaacatagtatgtgatacaatcatctctatgattgcctctagggcatatcactaacaaaagccgtcactcgcccttcaccaccggatgtggttctttggtgccaagccccttgctttaccttcaccgctgcatggtccatcgtgaccgagcatcgcttgcccttcaccgtcatgccatagtagccacttcgtatcccacatcttcaatatcttcaccttgtcattcatggtattttaggtgtaatgatatcacttgagcatcaacacctttgcaatctttgggacctatttctttcatttaactcaataaaattattagtcacaatgatccggttgtcaacttccacatgttgaccaactgatcgcatgtataaaaggatatgaataaatgatgagtattaatcaacaccacaagtgtcatatactcaattatatgctcacatgtaaagttcccaattaaataaaagtgaataacttggatcaattacattcataactaaagtataggatttgctccccctaaatgtatgcatataaaatatttgtgtgaagcaagagtatgcataaaaagatattaaacattgagagcttatcctatacaagaatagaaggcacttatcaaatatagacaataaaataaaaacataccttcatcatctccatgttctcaatgtaaagagactaaacaagatatggctcaaacaaaacattagtctcacatgcttatgtaatcacatgaaaatattatatatgaatatatcaatatgtgcccggatagaaagagtgatacatatagcttgatctccatgtatttcatccttgtgatttaggtacaccatcaatgaacgtttttctctcaactcatatgaagtccagaaatcacctctcacatattccactttcatatccatat

SEQ ID NO: 32943 - DNA, 538 bp, Oryza sativa
gtatattagaagtataggaataggttttctttctcttttcttcccacttggcttagataatatattaagagaatgagtagctaatgcttgtgtgtcactctacccttggattattttaacccttgcttagaatatgattatcacaagtaatatataaattattagtcaagttctctctacatgatcttatcacgggataaaataaatacgatacccttggaatactctcgggtgaaatgctacaatggtatatccgtgcgcctgcagatgaactctgtaaccataatataccagaagtatttctacgccattgttggaaattatatttctagtaatgttgtaagaaataccaacaaacatttctagcgccgttgccggggaatattcataatagagattacctgaactaatactttatatttacctctatataaccattttcctttgcaggctaaccttaattgttttcacttttttgtgaaaacagggtagtgcatgactggtttcaacttgccggaaaacttcaaagaaaatccag

SEQ ID NO: 32944 - DNA, 640 bp, Oryza sativa
tttttaggtttttctttttaataaactttgttaattgtttttgttgcttaataattatttccggtgctctgaaaattcaagtaaaatttgagggctccatttagaccaaggagaatttaacaaaaattctccgggccacatttgaatttttcttgtacgtattttagtgtttgccaatttcttttcgaattttaattaattctattattccttttagaaaatgatttttatttcgggatgaatttatcaggacgtgacaccctatacctcgatcaattctaaattaaagcgctagttttaccttcttctttccctttgcttttgcgccgtcaattttaatccatcgataatcatccatgcgcacatatgacgtggacctaacttaaaatgtatagctcaaagacaacggttagtccaaaattagcgcttgtcattaattaccaaaattaacaccgggggcctagatgcttcaatctccccctttttggtaattggtgacaaacactacaaatatatataatcaaacatagagcacatggacatatattgcattgacaagcaaaagcttccccttaaacatatgcataacaatcacaaatagcaaatatggagccaatgcacgattcaatttcacaaatca

SEQ ID NO: 32945 - DNA, 1168 bp, Oryza sativa
acgattcaatttcacaaatcaacatagcacaacacatagacaaattataatgtgaacttcacatatgaatcaaccgaatgcataagatggtcacaagtatatcaatgtcataccgaccatccatcatagcacaagttcacattaagaccacataaaagggctcataaataaatataggctattacaagaccacgaagggtccaaatgacatagagatcaacaaaacgaaaaagaacacacaatatagagtaatagcccatacccatacataatatagcccaaacctccttaacctattagatatcaggtgactaacctcactaccactagtcccaacccacaagacatagaaacacacttttctcccccttttggcatcaagtactaaaaagatcttcattcttgtggtggagaaggaggacgcgccgaagtggaaggatgatgagcatcacgacgacgatgatacacaaatgcttgggtactctccaaagtttggactcgagaatccaagacacccaccgtagtatgcaatcttcccaccgaagtattcaagttgccaacatcggtgcgcaagccacgaacatcctcatgcaaagcttcatacccggtagacaagcgttgaatgctttcacttagggtattaatagccccaagtaccgggttgaagtacttattgggttgcattccaaaataagcatattgtggatggaaaaaagcacttggatcatacccatgaggaggaggaggaggggctgcacttgagcttgcaccttgatcaaaagttggttggtgcacaagaggagctctaggagtggagagttggagacgaggcttgtactccttatgttcttttaaattgtgaccaatttgtcccaacttgctttgtcaacctcattatgtagggagcataatagattccttatctaatagttgcctttgagatggcaatctccttcatcataaggttgataacatcaaaccgacgaccatccaaaattgcatcaatgacatgccaagcaactccgcgtatgtcatcattgttgccgcatcttgggaggatggtggcccttactatgcggttgatcacacttgggagagccctcaaacccgccacctttccatatgtgtgccttcccccttcttcataaaactgagaaaagtgatcaat

SEQ ID NO: 32946 - DNA, 1710 bp, Oryza sativa
ctaagagtgcccgtcgtggtgatcttctacttgtgtcatcagtagagccactgcctgctgcttcggtggcggcggcgcaacccttccggacacgagcgtcgtcggagaccaccatgctcgtcacgggtgccacgggctacattgggtgttttgtcgtccgcgagctgctccgctggggccaccctgtagtcactgactcgctgtcacgcgctcccggagcggcttgggcggccgcaatggccccgacgagttggtcgcggacctcggccccacctgcgtcgtcttcttcgacgtcaccgaggcgggcacgctcctcattgacctgttctcgcgtggccccatccacgccgcggtctgctactctgctgcctcgccaaccgcggcggtggcgtccaggactcgtggcgcgtggaaggtgggagaaggacggaagaagacgaaaaatgaagaggatggatggaaaaagtgacggcagtggtacggttttaattttgtaaaattttagtggcatagttataaatttgcagtggcatgaatcaaattaacccatgtttctaaccttcctttatctatcccgggggcccagctcgacatgctcccacctatcactgacttaggctctccaccaagccccatccaacctctaggtcgtgcacccacctgttgacggtcgttatcgatcagtttcggccgtcaatattaccaaaacagaggagacctagtgatgcttgcaatgcatatatctactagaatataatatcccactactataaggtatactaaccttttgcagagaatgacaataaagtggaggagaatcgacatcaactcaatcgataaatcaatcggacgatgtcgagaaccagacttatgtatgaatgggccaagaactcagaattaacacgacacactgagccaaaattcacaagtctacggagaggaacaccagaggaggacaccagccaacttgtgggctggttgggccagcccagggttcggccgaaccaatgctcgcgccgatggatgcagggttttgagggaacggtggagattcacgccctatggcggttggagggtattaccgacctttccaaccaccataaccgttactacctgcctatttaaggagttcactctcttcacttcaacacacaccttaagcatgagctcgctcatttctctcaagtttagtttagtagtatctagctggtggaataggaatagagtagaaatcaggagtccggaagcctttggaagagtttggatatggctctagtagctttccttttctcttttgtaagctttgtacttttattagaatactcttctatatacatttatggtattgaaatattttccgagtatatgagtacctactttacattatgttcatgctatactgaatatacggttagcatatctgggagatgctttggtgagggtataatgtttgcttatgcaattactctatgtcatgacgatgatattagagtagtatctgatagtttaggcgtggtgtctagattacgggatatcattatttggggttataaactgtggatgagaggtgagctactgatggtgacagttcagtacgagtattcctccgcactggtatataatcctaagttaattccctgcggagggtattcctctgtatttagccccggttgtatggtcatgacgggctgtcgtaaggaactcggcagt

SEQ ID NO: 32947 - DNA, 692 bp, Oryza sativa
gtttgggtttatcaagcaattgattggatacaatatcattgctttttgccacataagtgtgcatttttattgaccaatattatggcttaggctgattatatattttggtcattttccagacgattgataaatccttatgagtttatttactcggattttataccacatatgccatatatttccaggtatggtgaaaccatgtgtcttttagggactcaagcacatctgttaaagcagtgtgcgcatggtgtatgcccaatactttggaaatttatttattcacaacatacaagcttctttatagctgttatgctatgtgtattcaatgatgtaatcagctttaggttgcacgcatcatattttacaaagcagtcggtatatcactcggatcctgttattcagggattcacaccgcatatgctatatattaatattaagtcacttggttgactataattatcaaaaccactcagttggtgcatctattaggtacatctattcgatgcacctgagtttatttttcagccctccacagtcttcatatttggtaaaagtactcgggagatcatggcgaagatgattgaagcactcggctttgaagtaatctagttcgagagaagattatctttccgactgtgaaggtctcaggggctactgtggagattatgggtaccgcatacccacacggcatg

SEQ ID NO: 32948 - DNA, 633 bp, Oryza sativa
gtatcagagccaccttgtatagtttatgatctagatcattgcatataattgatatgcgggtgtagtagatgagatctattatgttgtatatgagttcttaggtgatcggaacatgagatgaaccgatagccgcatgggttgatgagatcaatcggtatgtgtgttggtgacttcactagaatgtctagtactcaccaaggccgagtgcaattgtgtttatcggatagtccgatgtccactagaaccgcacgccaatgagaaaaacgagccaatgagattgactcggtttcggcataatttgattacgccgttaaggttttcacatggcgaatcgtagatgagatctatgtaccccgtgacctttattgctgttgtatatttgatatgacatggtaggatagatcccctcagaaaaattaagtgtaatttatgctcttccaataattgcacctattacggttgtgatcataagtgatgggtttgccatagcaaagtgtcactttttatcatgataaaataggatagatgtcggacatctatatgcggagattattggtttacttgacaaggttatcaaaacggttttggatcttggggcataggttgggttggacatggagatgtcaccctaac

SEQ ID NO: 32949 - DNA, 691 bp, Oryza sativa
tgtagccttcctcatgatgtggcttgaaaagttcttgttttgtggtccgagctgtggtcctactgcgaattggcaacatatagctgagaacttggtagaaaagaaacaattcccccatggaaaatacttgctgggctacctgtaccaaaccctgaacagtgcaataaccaagatggcctctcgattatcaatcggcacaggaggtccttggtggctgcttcagatctggttaatcctgcacactatcatggttgccgatcagccactgttaaccaatgcaagatttccaaggtttgagccgatcatcggtgaagatggagaaaacatcaccacatgccgatgcatgtcttttggagaagcaacatctgtaaataccgcatccaagctattggctgagcccttcagagaatggttcaataatttttatgatggatttcccaggaacactagaatctggtttcctatgaaggacatggcacctttgaactaccgggtgatttttgtttcgaggagattaattcagaaaaatatgagaaatccagagaagtgtattcaagagcctccagcccttgcatcctcgctgtcggcatccaccaaggcaagaatatccaaatgacttatgaattctatcatccgacaagtgttgcaaggcaactcggcatgggtatacagccgatcagcttgttctttg

SEQ ID NO: 32950 - DNA, 543 bp, Oryza sativa
tcgttatgagatacgcaccaaactgctccacacttgggttttgccttaggggacaccaaatgtgaagtgtgtggcgttcgagtctccttcagaatttggtccatcagcaaagcactgaggttctagagatgatgtatctgccatgtttttgggcatcacgtgaccatcattcttttttaatcttaacctgaaatggatagagaccaaaagtacccgatagcaagacttatcctaaaaacatatacctgcttttttgatgaagggaaatgataatctgggctacctcccggtagcgcgttttttatggtcgaaagctcaaccatggaaaatctttacgttgcaaccaccattggcgatgtagttcacacttcaccaccagatggtgattcatcattgaagtagtatctgcactgttagtgccacaggtgcaaccacgaaatatgccatgtttatgataaacatatgcatctacatgcagccttgtgaacactatgtcggctaggatcttaaggcggcatgaatgtgcttgtggcacaaaatgtg

SEQ ID NO: 32951 - DNA, 1397 bp, Oryza sativa
tttccatagaaccagcaaataggtatcttcaacatagtaaaataaaatttggcatcttttgtagagaacatagatcaaaaccttaacttagtgaaataagaatttaaacacatagtgttgtttaagtaatacataaacatgtataagtatatatacactttaggtctaattaaacctaaataaaaacttgattgaccagtgaagccatagttccatcctcatccactaaaacttagaagaacttagctcatatgacaatttctaggttaatataatatattgctagtttagattagagcatctctagtttataaaatatgaaccatagtagtaaagaccataaacatgtgaaataaaaatgttttagttaaccaaattattccttttattcaacttaaacaggaagtagcatgttctgaacctataactcaaaagtcatgaacatataaaacactatatgcctaaaacacgttgtaacttgtaaaatctataagaaaatcattataactccaaaaatggtgaaaccaaatgtgttagtcttagaaaacacatctccacacccctgtgaagtctaatctaataaaaatcactttacaaaagtatttcataacactacctaagactatactactataaaccgataaaacttgtaaaaattcataactccctaatggaataagataaaataaaaattctttcacctaaattcattttagatcagtaccaaaccactgtgcataaatcatgcattttagagcattttggattttcagctctttcggtgtttaattgcatattgtgtcctttatctagataattgcataatcggtgaaggagtggattaggtgctaacatttatctgaccaaggcaagttttctcctcccatcctttgaacacattgaatcccatgatttgaggaatgaaaatatttgtttggaaagttgcatgtgaacttagactatatcggtatttaaaattgggttaaggtagttataacctatttgctgcattccctaccttgaataattgatcctccctagaaatggttagagtacacttgttgtgctcaaatgggtttatatatgctctatgtgcaactacttgcttagccatgtttagaactatgcaaatgctcattccatcaataattaaaatgtggttttgatacttgaacctttgctggaataaaatgaatatgatgggtatttgcgaactaaaatgtgtaaaaatgtgattttatacttgggcggcaagtggtgtgcatatggtgttagttgcataccgatagagggagtgttagccaaagtccataaggaccgaacttgtgtcacccatttaaagatattcgtacatccacatgtgctagtatgggatgactaagctgattaatctattt

SEQ ID NO: 32952 - DNA, 553 bp, Oryza sativa
cccaaacatatctctaagcaaaacttgttaagcacgtcgatcgattctagaaacaatcgcgcaaccgtgtttattagaatcggttgtgtcgactgtatcggatatatcagctgacctcatgacgggccatatgagccgatacaaaccccaggtacagccttctcagccgagtgcatactctgaactttgaatcctactctacgccgaatccgcttcgatcccaatgctgaacctggatgatatcttaccaaatgtggatgctaacacatgccccacaagaagttgctatataggaaatcgatgggatctgcttaattatcttgtccgaataaaactagggcgtttcattaccgagcgtaattgggccggtactacgctcgctgttaaataatacccaccgctttgatcattgcacggcgtcacttacggtttaaccgctctagccaaaacttttcccaatttgacagcatgagctctccggcgacctcctagaattatccggcgatccacaggcggataccctacgacaccaatcttcgatatggacaatgtc

SEQ ID NO: 32953 - DNA, 867 bp, Oryza sativa
acctttgttgtttctgtcctcgaacaacggtcgatcgaactcctgatcctttgcatcaccctcgctgacaacttctcctaccacatttttccctcttccttcctttcgagtcaccgatgctcctaaatccccagccttgttttgccatgcttccttctttcctcccaaaaccttccttgaaccttcagctgatttatcccatcggctcacaagtgtgcctcccttgttgctccctgatcccgttgttgttttctcagccctgccagtaccgctgtccattgccctttggccataactgggcagattcgaccgcccggcatgatgtgctccgctgcgacctggccttccagcaaagcctcctcttatggtcccaaaacttctagcccctcttggcctgaagccctgactcatccaacctctccctcctccctccctgttaatccctaaaccaggatgaaagcgaaaatggaagtcttctcctccacctctctcctagaaaaaattgccttcctcctcccaatgtgaatcatctcttcttccccagcctcgattgccctgtcggtctcaatcttctctatgcgccatggtggaaacctcccgaatctgttgctcgctctccgttgtctgctctgtttctgaactgcttctttgaaggatatgggtatacgttctcacgggatacgaggggccagctgtatttcttaggataccaagcgttggtggctaacccaagcgtttcttcactcgttcatgctgcccggcccatgacagcagttggcctgctccaaagtggaacttgatttggactttatgtccagaccccaagtaaaactgtttggacggcccactatccttctttagtttgaa

SEQ ID NO: 32954 - DNA, 722 bp, Oryza sativa
tagggtgtgccttcctactctgtgctgcgccgtcgctcgtagattactccatcccgctcgccggcgtacaccggcgatcgggagagcaggtctccggaacctctgccttcgacgtcctgcaccgggagaaggcggcaataaggtttttgggaagcgctttgcgcaactgctccctgttcgtccgcgacggctcgtcttcctcttcgctcgcgtgtgcatgccttcgtagacgcctgcgaaaagtttcgaccaagcagccggtctttccgccacctcggtacgtgttcaatatgttgcgcatatttgatctgttcatgttatactgtgtagtttatatatgtagatctaatgatgcgttcatgctagttttcatctgtaatgtcatgatttatttatggaatagattaaatcattatatgcttataatctcaacaaatggttccacataaagctaaggaacgtgatgctcttcttctactccaaaatgaagtaaagaaaaagactagaagttcagagtaggaatgtacgtaaacgatgatcagaaaaaggcagtcaatttacacacttctccaatccgtttgcaccagacagctgcaagcattctgcagcatcttctgatgaaagccccttgtgaaatgtattcagctcctcaaaaacatctataaggggaagattcacctgttattatatgcccttacaaagcacagcattaagagtgcttt

SEQ ID NO: 32955 - DNA, 512 bp, Oryza sativa
ttagtatctcaatatagagttgtatcgaagtattagccgatacatgctagatctatctaatcgactacgctatgaatgcttataatcttcttgttaatatatatttcgatctaagtgatttatattgtctcggcatggcgaccgatctatcccaatcatttgatttaagtatatatcgatattaggattatatttcattaataaccacagctgatcgaatagatttagttcgttcttgtttatttatatttgcgatcgactcaaatacaacattggctcaaagatagatgatatgtcatcggcaactggccgatcggctatcatttatagatttaactgctatttttctgtctttatgttcgacgatattttgtgcattttttttataaatgaaagaaatgaagtgtgtcaaagtattaatttcgggaacggcgatataataacgaaattggtgattaattatcactaataacacaacctggcgtacatggcgtatacgtatgaatattgtg

SEQ ID NO: 32956 - DNA, 822 bp, Oryza sativa
aaccctagattgatttcgcgtatattgcgtgaagacggcgggttggtttatatagagaagggtcgcttgatcagggcgcccgcacgatctccactgcgcgtaatcgaatcggataagtcgcgcgtaacttatccggactccacgccgtttgcacgcaccggatttttcagaacgtttccaaaacaaaaacgaatccgaatttgcagcaaaacaaaactgcaaaaggaggctgcatctgcgcaaggtgaggaacctgccctgccaggcgaggcgaggcgaggcgagcgagtgcgcgcgtgtgttcccccctcttctctccaccacacatgcttcaagtggctaggagggcatcctcccttttaaggaggtccccctctcctagaataagcaaggtggtactaaactccacatgcatgtcatcccatgaggtgggcttttgtgattttccaaataattaatcttcgagtgagctaaggctcattcattaattccaacaatcccccaccaaatctcaaaatcccactgagatttgccttttccaatgtactgtttatataccagcggttcgatggagaccgattaaggttgaacatccacctagaactccaagctacacttactcacaaattgaacaatggactatgccttgaattgcaagtcttatgcaagcaagtttcactcagagtcttatctggtactagaccgtttgtagactacccctcgggtggagcgtataagtcatactcctaggtctatagtaagcttcatagaagattcagccaaaatctccatagactgcgaccaacagtcaagctcacaaag

SEQ ID NO: 32957 - DNA, 593 bp, Oryza sativa
tcggcgggaggtgtttgttctcgggtgtcactatcgtgttcagccgcttcatccacatcttctgccaattcttcaccctccaggaatgctgctacatctagatctatggctggcagaacatatgcagtagccttttgtttcctaggcttgttctttgcagccgatggtgcaccagccgactttgctcttttctttctaccagcatcaagggctatcggcacacggggcagatcatgcaacaatgttgaagtcttgggggtatggtagccaatgactggtggagccaaaccaccactgttgggcaggagtcctagagcatatagaatttccacaccactgttgctatgatgaggaggacaagattctgttggctgcaaaaagcaaaattacataagtcaagattagtacattagcttacaattgatagaattgacaaagaataagattcttacttgagggacagcttcaggaatagatctgtcatatacattgaagctgatcgatgaaacaaatgttttttccactctatccaccatcggttagatgcagcacttctcaacattctcagtttaatattgtcgatactgcctaaa

SEQ ID NO: 32958 - DNA, 1195 bp, Oryza sativa
tagtagaaatcgatccagtaaccatgttctttgcagcataacctgtccaaccacatatgcttctagttttgaactcatgggtggatttggtattcaaactggccaagttagccgatgaagtgatatctaggcctgttatcattttaatatccaagagagttggggtcatgggtccttgagagaaaagaaaagcattcatagcagtggaccagaaataggttgcagctaccatcataggttcttccttggccatatctgccacagttagggctaaagcttgagatatgccaatttcttctcaatgggttagtttgctagccgacattctcatgtaccaagcgggccagctcttctcggctgatggccaagatttgaaggtgttcttccaaaggctcagatctgggttggcgaatctaaaggggattcgattggtttcaccattgatgaactctgtgggatctggattgctgactgggccaaggaaaatttgatgttcatcggttatgctagggactgctatctgatgagaaagatgctccagaggacaagaaatcgaagattgatcaaagaaagaaccaatctcgtgtgaaaaagagggagtttagccgatggtgcttacctcaacgtactcgacggttgatgctctcggagggctggcggaggtcgacattgtcgatgacgaagattggtgtcgtaggggatcgcctttggatcgccggaaaactcgaggaggtcgccggagagctcaagacggcaaattggggaaagttttggctagagcggttaaaacggaagtgacaccgtgaaatgagcaaagcggtggctactatttaaaagggagcgtagtaacggccaaaataaaatcggtaatggaaaccctagttttattcggagaaggaaattaagcaaatccacaacatttccaatatagcagactcttggggggcatgtgttaacaaccaaatttggtaagatatgaaccaggttcagcattgggatcgaagcggattcggcaaagagtaagattcaaagaacagagtatgcatcggctgcgaaggcattagctggggtttgtatcggctgagatggatcggacagagggcagccgatatagccgatacagacgatacaaccgattctaataaagacggttgtgaaattgtttctagaatcgatcgacgtgcttgacaaggat

SEQ ID NO: 32959 - DNA, 599 bp, Oryza sativa
caatataaaaagggggtagcgcccgactcctaaaagtggatgtatgtggactcaaaggatttaaacaggttcaagccctctgattgataggtaataccctactcttgtttggggatttaatcacccggggtgtatattgttctgacgatcagtttgtgtcatgccccctatagggcctcctgcccaccttatatagtatggggcacagtatgcaaggatagaaactttacccaatacagtatcggtttcctaaatctgttttccaatattatcaaatcagcactttagaccgctctataatataaaaggaaacgtaatacccgagtcatgatcggttacatattccatagatataagcgatcccttatggctagtcggatagccatgccgtgtgggtatgcggtacccataatttccccagtagcccctgagaccttcccagtcggaaatataatcttctctagagctagtttacttcaaagccgagtgcttcaatcatcttcgccatgatctcccgagcccctttaccaaatatgaagcactgtggagggatgaaaaataaatcgaggtgcatcgaatatatgcacctaatagaggca

SEQ ID NO: 32960 - DNA, 724 bp, Oryza sativa
actctagaggatccccctcagcaatattccattccatttccatttttaccaccaaaataaattctccatgctttcatgtgctttcttctcctaaaaagaaaagtccttttgaaaaaaaaaggacaaaaggagggaaaggcatggttatgaaaagaaaaaaaaaataaagttatgctctcacaagcatgagcatgatgttgaaaaaaaaatgtttagccatgccctctcctaatcaatgaaggaaggatttttgggagaagaaagtaagcacaaaggagaagcatttttctttatttttcctcatgtgacatttccatcatataccacacacacattgcacgatcttgatcttgagtatgcttagttatctgctttagtctgagcttttgacttagtaataaatgtgaatgcaagtatgccatgattgatccctaccgagatccacatatcaaaccttaggataggaatcaaaaaggcaaaatatggtgaggaattcaaattgatacacttggagagactgagtgaatcatttgaggaacttggctttcttttttcaaaatcatttgaaaacttccggaataagagttgaataaatattgggtgattggttctctaaattgcagttctgtcttccaaccgcccaagacaaggagaagcagtgtctcgtgtgaatcaggggtaagggtaagccaccatgccaaagattatttaatctgcgagagag

SEQ ID NO: 32961 - DNA, 942 bp, Oryza sativa
cttctgaagcagctgtcacagcctgattttctgtttcaggatttataaattatttaataaattattaatagaatttatattaaatgttcattaatttacaagtgaagttaaatgtgggaaataaaatttcctaaatataaagcatggctggatttaattcttattaaattctccatgattaattatactctctgaaattttctcggatttttcggagctcaattcttaattttaataatacaaagaacatttcagtaattatccacatattaaattaatcattaaatggtcttattacaatcttgttaagtactttgggtgtccaagtattttcaggatttttcttgaaattatttgagcattggaagtatttttaacaattcaaagatcatttcagtgattaatttaattgggaaaagtaattaaaatccccttttcattttcgggccgaaacaggaaaagttcacctttaattcttggcccattcttccttcttttcggcctgcagccctctccctctctttcccgaagtccaatttgcattcctccttaggctgtgtatttgaggcccagccaaaagtctaaattccctccctgcgctactgttcatcttccagctcaggcagagcccgagccagccgtgctcgtgcacagttgccgccgcctctcctcccaaatctggcctccacttccccggcgccgaagacctttagaagtacctcgccaacgtgaatccaagcttcgccgccgggggacggtggtccagccgcatctcgccgtcgcctcggccgtcgccctcctgtgccgccacctctctcggctccgcaaggtcaagagcaagcccggcagccggttcccttgcgtcgaagaccccgggaagcccgtcgttgcagtcaactcgaagttcgccatcgcgttttgatctccggcaaggacttgctg

SEQ ID NO: 32962 - DNA, 1288 bp, Oryza sativa
tatatggtgaaatagtttcggcactggcatcccttaagacaatgaaagaaagatgaaaagaaggcattcctattggtatagttctcttcctatttatatttgagtttaggaatgccgtactattaagagggatgcaacgtcgatatgtttgcgtatgtctcggtgctcaatgtgccctattatatttgagttttagggtttagggttagggtttagggtttagggtttagatcttgttattggttgagttgggtagtcctctgagttagctttccatagaatccaagttcatcaaaaacagactcccgagcgaaaagttattgtcgttttactctgtgcttttcgaaaactccgaaaatttcagaaattccgaaaatggctgcgaatctgagattggcttctgtatattgtcggacatatccgaaaatgcttttcagaacttccaaaaattacagtattggcctccaacagctagtttttgaggggctcgggtatataaactcctccacccctcctttgagtggctgctgttcttgggcaacattagatacatccaaagccaaatagccatccccatttccccacctttgtggtgcctctttgtgacggtgatttgagaagggaagagagttggattgagagagtgaagagttgagagctagtgagcttcacttcatcctttgtggttcctctttgtgagagggatttgagaaggggagagagttagattgagagattgagaagttgagaactagtgagcttcactccatactttgagcactcgagttcatagcaagcaaatcttcggttgtgtttattactcttggggactaaggtctcctagacggcaaggcgtcgccggtgagcacccaaggtgtggtgtgccacggaaagtttgtgaaggcttcgatttcgcctccgcaagggaagaaatcaagagtgaaaccgaggagtgcatttgtgcaacctcgtgaggaaagggttgaaatagacccggtcttgtggcccctcaacgaagatgtaggatccgtggatccgaacttcgggaaacaaatcaacgtgtctcctctcttggtttgcttgttcttgccatctctcatattgtgcttgagcttgtttttacccgatctacttgcatgcttaactaatattgttggtgaccttatatcttgtttagataccctgtttatcactttttgattcatatacattttgtttatgcgagctacaagttcatagctagtgtttattctgttatccgccgaacttttcggttgagaccggaact

SEQ ID NO: 32963 - DNA, 569 bp, Oryza sativa
aaagaacgaatgcaagattactgtcattactattcttctccccctaagttgaacatcaaatttaagtacaccaaaaaggtttccttccacaaattttgagtatgcatgttcttcatgaacatattaatagtataagtcatatatgtgcgtgcaaatgcacatgttgacaataatacaacttcttggtgtatcaattctaacaactaaacatgttgcatttaggccaaaattgcttcaaatgttaatgaccaatttactcaaaataatttacatacatccataaaaacaatacttcatttgtaaagtcatttatacgtaaaagatggacataacattatcaatcaaattaactatagacactgcataggtacatagtcttttgatagataattttggtgtagggcatattggcatatagacttctcgactaggtattcgcaaattcaatgacattgtatatacttggacacaattaatataaattagttgaagcttatcttctatgatagtcatgcactaataaatatctctaagtcaataatatactctcttcatggctaccgagctcg

SEQ ID NO: 32964 - DNA, 615 bp, Oryza sativa
aagcttcatgaattttggcataatttttagacccctgcatcatagtgaaacaatctagatacttagcataatcatattctggaaatttgtagtagctgcattcatcttttcatgtagcccaaaacataattgataaaatatgcatctttttacagtagttttcatacataacctgtaggctccacgaattttggttgaatttttgagtcattgcgtcatggcataaaagttcatataatactgtatagttctgtcctgaaatctgtagattgtcagtttcacaaatttgtgtagcctaaactataaatgataaaatcatgattcctttagggtagctcctaatctaacccatctatctctctgatttttgtcaaaatttttgtatctttagagctagacctaaaaatttgattaagacagtaaagtgatgaatcccagcacctagcactcatgtcggattaacccctatcctttgaagattattagaaaaccctagtgcaaaaatttattttattttaagggggatagtaagccatatttgtatcaaaaccaaagataaaatttttaaccctgcataattcttcttagacctaaaatagaaatcccattctaagt

SEQ ID NO: 32965 - DNA, 660 bp, Oryza sativa
cctggtttggagatagatctgtacagccgggtatggttgttcagaatggttgggcctatacaacagggtatgttgtatagcgttggattaatattgtttaaatattacttaactgttttattaaattctcaaatgtttgctaaatgctgtttatgcaaatggaaccctattatgccatcctttgttatcctgtgcacttgcatatttgctgcgtggcttgctgagtatgtcatatactcaccttgcaatcattcatcagaggaagagttctacaatgatgctgatggtgtggaggattaggtgtagccctggtcaagctgcctgtggagtggagtcgtctgcaccgtttatcttattttccgctgcttagatctttattgattgagaggaactatctacctctgtaatgacattttattcgcttattaattagagtaataattgtactctattatcaatttgttattgtgtgcctcggctgattcctggacgagggttcacacacatgtaagcgtttggaattttggatagaaattccgggcgtgacaatgagttactagaaaaaaggatttattgagtcgagtacttcagagtgggtatttcatgtgctatttgccaagaaaaaggatggaagtcaacgcatgtgtgtggactatagag

SEQ ID NO: 32966 - DNA, 615 bp, Oryza sativa
accatttattacctactgcagatccatttgatgatgatgcttctagagtacgattactcatcaactgagttgcaatagcctcaagaaacttcaactgattcattgcattaacactttgatttctctcaagggccgcaaggactcgagccaaactaggctcttctacaccattgccattactttctaacatgctgaccactgtcctaattagtcaaatctgcagcgatttaaatagagatagataagaataagctagaatagagtaagttaagacagaatataataaagacaaaagagaaaagaatgggtagaaatgcagttttcgtaaccatgatgcataaatctacctaccacaacaaaatactttttaaaagcgaaacccaaattaaacccacaaggggaaattttggtttttaagggccccttttttaacccccagaaaaaaaaatttattttcccccctagtggatttggcatacagcttgcataaaacatgccaatcaacacgtctactaaggttcaaagtctaattcttacgtgagaacaaggcaagagacaagaaattttgaatttagaaatgattagacaaaaaatatttagaaaataaaatatatt

SEQ ID NO: 32967 - DNA, 727 bp, Oryza sativa
tgttacttgaaggcagccgatcaggttaaatactgacgttggcttagattatataggatatccaccactctatgaaacatccagcggcttgattatctagatgttgtccttcttttcatacttatagctgcatcagttgagtttgaccttataagtcgtgattagaatcacgatctctagcctgctttctggttgccgattagggtagtatcggggtttcagccaatcttacctgatttagctttatgttccatatgcttaactgatatgctagatctgccctttatgttaagatcttgttacaacaaagtatattaggcttctgtttgatatattttacttgctttaatatcttaatatagattagtatcggagtattagcccatacatgctagatctatctgatcggctatgctatgaacatatataatctcattgttaatatatatttcgatctaagtgatttatactgtctcggcatggcgaccgatctatcccaatcacttgatttaagtatatatcgacataaggattatatattgttaatatctacagccgattgagtagatttagttctttcttactaattcataattgccgatcgattcacatatgacattggctcggtttagagataaatgatatgacatctgcaactagccgattggctatcatttttggatttaaccgtggtttctttgtctttatttcttattgattgcaggat

SEQ ID NO: 32968 - DNA, 1261 bp, Oryza sativa
cggttggttgtcatgcctggaaaataactatccagaatgctagtgtattaatccccgtcccaggaaaagccaggtacatcacacatgatacaaaagacacatctttattaattatcgcgataatatttacattattgcataggcacataagacctgacaacaaaagaaaaacaacactggactagcatgtctacggttccatcttcacaaacgcttaactagggtataagccaggactctgcctaagacttctgttgtcgaagcgacaactacgtacgttgaaggacgtggttattcaacagtgttgggaacaataaatgtattactttaagatttttcttcgggatcccccccttttacatgtcctagggggctatttataatcctattataggttcccccattagggcttaggctttacagggaaatttacatggctgcccttatgaaagggacgtttgcttgggtatatagtgatttggatacataggcctctaatgggccaattggcgaataggcctaagcaactgggatggcctcttgggcctcttcaaagtcgggcttgttatggcgaagcccccatccttcaacctacacactttgcccaagatgcatttgatcttgccagataccagcgcgatccttcagccttcgccatctctgctttatagtcttcgccatggggcttcgcctagatgatcttagcgtcttgggcctgaatcctcgctggttgcatggtttcggtaggtctggtcgaagggtctcgtgacataccgccaacaacttctacaaaagtttctctgactggagggtgaaagattaagcaaggatgagtacaaccaccatactcagcaagtcacatcagaaaacacacttaatgcaagggagtacaaggattcatttataaaagggttattttgaagtaaaggggcatttcaaatcatttaattgtttaagggcattttagtcaactcatgacctatctctagtctaattattatcaagccgtgtactcaggcgatcttgccttaaactaggcccaaaggtgataaatctagtcattcccgattattagaataaaacctctaactttaggtcattgctaggcttgcctataaccgagggcgcggctattcgaatagtttatactctagctaggggtgtacatctttacccacaagagcagtgttgattacatgtcagccgtgcatcgtgataccagaaaggtacccgaggagtcaagatcgcgacataacccacc

SEQ ID NO: 32969 - DNA, 1414 bp, Oryza sativa
tgcataacccgattaagaaggtgatgtttgttttcccgtttggatcaactgatcccgttctgtttgagggcagaaaattttcctcccaggaagagcacgattcggggaatgagattgaacgatcgacatcacccttgatcgagtttaagcctcttccctttggcccacattatcgtgttctcaactacaatcgagaactgatcataatctgtcatgacaaatctcttggggggagaacttctaggccatggaaaagctagaggaactgactctgaagtccgacaggaaggaccatttaaacaagcatgaatgtttttttcttgaacatcaagaatcttgctctcttaaagtatcttcgaggtccgccacattttgtgccacaagcacattcaaccaccttaagatcctcgccgaaaaagtgttcagaaggctggatgtagatgcatatgtttatcataaacattacaaatttcgtggttgcacctgtggcactaaccttgcagtacaacttcaatgatgaatcaacaactggtggtgaagtggggactacatcgccaatggtggttgcaacgtaaagatttcccatggtcgagctttcgaccataaacaacgcactaccgggaggtagcccagattatcatttcccttcatcaaaaaagcaggtatatgtttttaggataagtttgctatcgggtacttttggtcactaaccatttcaggttaagattaaaaaagaatgatggtcacgtgatgcccaagaacatgggagctacatcatctctagaacctcagtgctttgctgatggaacaaattctgaaggagactcgaacaccacacacttcatttttggtgtcccctaatgcaaaacccaagtgtgggggagtttggtgcgtatctcataacaagttcctttcatgctaaagttttaccttggtttagatatgatgctagttctcacatcttgccttgctgaaaaaaaaagagtttgaactgtcctgcttttgacattaaacaaagctctgctgggagatactcgaagttcaccattcaaatacttatatttatctccatttgaatataacttgttcatgcttcctttatctattctcacatgctctggtttgaattttgaagtccattcaaaggctattcaaattaagcatggtgctaggttaaaaagtcttctttaatcaaattagatatggtgtctagtttgcttagtgaaccttagagttaatgtttgtatagatcttggttgtatagatatggactaacccctgcaggaaaatcttcaaaattgagcgggtaagtctttaagttggttcaaaatggagataactaaagggtttgcatacacgacaaagttgcacaatatatagaggaggctcaaaacgctcttgtgattatgttgag

SEQ ID NO: 32970 - DNA, 1350 bp, Oryza sativa
cgaccaaggacgtgaacacgcaccccggccgagccgaagaagacagttttcggctgcgtgaactttacgcttcggccggagcgttcggacgcctggccggtgcctgcgttgatggcaaaatgggaccgcaactggatgcagaagtggttctacgtcgacaacccatactccaccgaggacgacaaggcgaactggctccgctttcggcgccttcctgtttccatcatcgccaagccaagtgtagagatcgacggcacactagtcccggctcatccttcttcacaacattacgcggcggctaagtacccgcgacctctatgaggaatggtgcagaaatactcctggtatattatggttatagagtttatccacaagcgcacggatataccattgtagcatttcacccgaaagtattctaagggtatcgtatttattttatcctttgggaagatcatgtagagagaacttgactaataatttatatgttacttgtgataatcatattctaagcaggggttaagataatccaagggtagagtgacacataagcattagctactcattctcataatatattatctaaactaaatggaaagaaaagagagagagaatctattcctacacttctaatatacatagtatacatacattctagttaaccgatatactagctaatacgctctatctgatgccctcctggtacttcgagaagctatccctaactgccgagttccttacgatagcccgtcatgaccatacaaccggggctaaatatgaaggaataccctccccagggaattaacttaggattatatataggcgcggaggaatacccgtactgagctgtcaccatcagcggcccacctctcatccgcagtatataatcccaaataatgatatcccgtaatatagacaccacgtctaaactaccagatactactctaatatcatcatcataacatagagtaatttcataagcaaacattatacccacaccaaagcatctcccagataagctaggcgtatattcagtataacatgaacatcatgtaaagtaggcattcatatactcagaaagtatttcaataccataaatgtatatagaagagtattctaataaaagtacaaagcttacaaaagagaagagaaaagctactagagccatacccgaactcttccgaagacttccggactcctgatttctactctattcctattccaccagctagatactactaaactaagcttgagagaaatgagagagctcttgcttgaggtgtgtgtgtgaagtgagaatggcaacttcttttatagcctcccaatgacggttttgacaattggaatggtcgg

SEQ ID NO: 32971 - DNA, 560 bp, Oryza sativa
gcccggctccgattggtgatgcttggtgagccgccatggatgggtcgaacgatggctgggaccatgccacggcggcctggtttggtgcttggtttgccccgaagcatgctgtcggtgcttgcggtcgaacggttggtgccgaagcagcgttgatgaaatcgaactgtggtccttaactccaaggcgaagcccccagacccggctgattcggcggcaaccagctaggcgcaccttgacctgtattcccctccggctgtgccgaaggggctgtacctgaaatactgtgggactggctaagttgttgaaggaaagcttgaagctgcgtttgcaaagccgaagccccttctgccattgtttgtgacacttggccaggcggctgagagtgcgcttgggcagcgaccggctgagcttgcagctacgcgtgaggggccggatgtactgctgtggtcgaaggctgcccggtgaagtacactggtgcttgcatggcttgtgtcggaaggggctggatcggtgcttgcggatagacttggggtgagacgtaacccatcgaatactggagg

SEQ ID NO: 32972 - DNA, 644 bp, Oryza sativa
  unsure (1)..(644): unsure at all n locations
tatagtataattgggctgaatttattaaaatctaattggacttacaataggtctaccccataaacaagttgctcactatatggaccttaataggccacatagaatctcattacgatttttaggcttgatggtgacgaaaatggatgtcataactctatcacgacagaagaatcgtcactagattaatgacaaaaaataagatttcgtcatagaacgccattagagacgcatgataggtgacgaatgtcacagattacataacatgacgtaaatttcactgtttgtgacgtaaatgaaacgtcacttatcataaaatctcttgtagttgtgcctgatgtgcctgccatcgtcgagttggccacctgcatggctgccacatgacgtcctcgagcttccctggcaggctcacatatatgctctgctgccacaaaaatatcaaatggaacaagcttttaagaagtggagcaggggtgataggaactgaccttggtggtggtgacaatctgtgactccgaagtangctgcagaagaaaaggagttcgcgtaagtgaagagcccaggagggagaagtcaagccacttgcaagagagatgcccttcaccttcaagagctcatcgatggctgggtgtgggtgtaagtccccc

SEQ ID NO: 32973 - DNA, 876 bp, Oryza sativa
atatatggaaagtcacatatgaaccgaggtgcatctgcaccatgaatctagaccattgaagaatgccaagattcacgcatatgtatggacttgtgcctatattcgggtgtgtgctgaacgcattaatcaaggtgaaaagctagtacaggacggcatgcatgcacagtttttttttcgagcggccgataatacccttcgactccaagctatctgatcaactcattttttggtgtcctgttgctttgctcgagtagggtcggataggacgcgatgacccttgtctttcatgttgacctgctaggggagacagggaagtacacggcgagtgtgctgctacgtgcaggttttatcatagtaggtgaaaccccgcgcattgctgcgaaaatttagtatgataacaataaaaaaaagcgtgtaagatagctagataacatcatattagtaaattaatgtggtttatgataatttaaatttaaatagtacgtagaatggtgattcaaacgtaaaaagtaaggtgatatgactttaaggaaaaagaaaagtagggagatagtttggacggtagattaatcatctaaaggctaaaaacaattgatgtgatatgacttaattagagaaaaaagagaaagataatttaaaccatagattaattatttaagcactaactaagtgaggatgaactatataagtatatatgatatcataaaacataataaagatatacattgaaacattatgtgaattatgttggatgataatttaacatgtttgtatttgaaaagcttttaaattataaaaactataaaaatatagcatgtttgcatgatgtttaaatgtgatgattgttagtggataatgatgtggcatcttgttaat

SEQ ID NO: 32974 - DNA, 577 bp, Oryza sativa
aatatagttaatttggatattcaattttaaattttacagaaaataatctaatagtgagcacaaataaaaattatttatatgatttagataatataattgtttaaaattggactattataaaatattttttccatgtaactaaaagaaggaaataggagagaagaaatatgtgggggaggtgatatttttttccatataactaaaagaggaaaataggagagaaaagacaagtgcatactggataggcggggaaggtatacgggccccttttttttatcattgtatttggataaatcataaaatgttttttccatctaactaaaagaggaagatagaagagaaataaaatatatgggggaggcacatacgcacgtacacaagcatatgtactggacgggaggggtaggatatgagggccactttttttatccctttctatttagataaataaatctaatggtataaaataatgggcccaccgtatattagtgaaaatcgatggctagatgattaaatgccacgtggcgatgtacgagcgattgtgggagttctatgtggcggcttaatagtgtttata

SEQ ID NO: 32975 - DNA, 2010 bp, Oryza sativa
agccacctcagcatcgccccgccacgtcggcggtgggacggcgccaaagaggctggcgccgtcctattgaacgacggcgccagccactctggcgcctcgaaaaggaccatttttgggataagtttttctagagatctacttgcgaaataagtttttcaaaaggaccaaaatatgaaaaatccagtatatttgtcgcatacttaattagccacggatatatatataacgaaaggatttttcacactatgatatacttatgagaaaaattaatatactgataagtgaagcgctagttttgcatgtgtgggagatgctatatatacagatgcatgtcaatacattaactaaagtagatatagaatacataatctgtagtacttaaacataagttctacggctctattgtatactttaatttagacgtggtcaaaattaaatttacctaagctatatgttatctgaaaaatcaatttttatcacgcgcatttagacaggtgtgtacccaactagaaatgggtatttttccaaaatatgcatttcagtgggtatatgcacgtactcaaatcttgatttcctggaaccatgaggtcccaattcatcttccttgcctaatttattagtttgtactctacaatatattatacctagtttaatagtatatatatatatatgtgtctatatatatatatagtgaatctattctacacccccctcccatgggccaatcccacctccccacccttcctagggcccaaatcccctctcccatatcagtcaaaggctggtcaaaaccccctcccgccggtcagacctcggtcaaacccgcccattgactccctcccccgcccaccacttcgttgttcacgtctcgcaggaattccgcagtaacataacggtcattgtgcagtaacatgacaactttcttgcagtaacaacatcgaaaaatagtcatgatggatacatttttttatgaacatcatggtgcagaccgattagaaaaattctatataacgtgggagatattgctctctaaagattgagatttactttttttaagttctcgtctctttagaacggcgtagtaacgcgatgatcaatgtgcagtaacacaactactttccgtagtaacaacgttataaaagcattattgtctcgatcatcgtgtagtaacaggattattgtctcgttgtaacattgttttaaagaattatggtgaaaacagttctaaaaaataatatgtgatgtgagagatattattgtttaaagattagaattctaaaagtttacttgtactaagcttgctactatgtatctttgtatggacaaagagaagtattttttagcacttgtgttttgcacaagattgagatttaaaaatttagctatgcacaagcagtggtactgtagtagtacctttactatcatatgttctctattactgtaatttcatcatgatgttactgcaaaacgtgcagtaacgacctataaatttcatagtaacgacttatacatttcgcagtaacgtaccatgttaagcacttctgcgataatgctagttccaaattaaagtaagaagcttcgatttctatagtaaatataactgattcgaacaaacatataaagcaaacaaacgataacctgtaatcacttagtgtcataaggtgaattggttaggggagttttccgtgaaccatgagatcatggtttcaagttttaaattctcttaatttatttttcttttttttagaaaaaagaaaccggatggagagattaggaggaggagccgggaagaggagggagagaaaaaaaagaaaaaaaatgaggagggagattgggaggagtagccggaagagaagggagaaaaaaaagagtagccccgagagagagaaaaaagggggagggaggcgtgcgcggggtcaccaggagggagggaggcgcgcgcggggaggaggcagggaggcccgtggggagggaaggaggtgtgggctaggctggactggtagggagggg

SEQ ID NO: 32976 - DNA, 667 bp, Oryza sativa
ctatagggcgaattcgagctcggtacccgaattctgttatacaatgctccattgcaatgcctggatgttttacagaatacaatatagttgctatctcatgaagtagaaacgttatctttttcatgctgtgttctgtatgcatgcaaagtttatatagcctatatatacatgtcttttcttttattgaactgatgtttgcatgcatgatgaatgtgggcaaaggttctgtacctaatctggattacttaaccagttctaataatatctttactgtgagcaaggttcttgccaatttcatttgatgtgctcaaatctctgtcagactctattccgaagtcccttggtatcaagaatttttagagtaaatgctgaggaatgtcttttgccacttgtctaatgtaacatgcctttagttctgccttatacgtagatggaactctgggaccattgatgtcatctttgctatttagtgattaccctttaagtccatgtgttattatttgcacttctttaggaggcaattattggctagtaatctaagtcctatgtttcaaactcagcactttgtttaatcaactttgtgcaaacagtaaacagcagtcaaaatattgcaattacattctattattttttgatttgatgatcttttttgggataaagaaaatta

SEQ ID NO: 32977 - DNA, 665 bp, Oryza sativa
cctataaatagataggtaccccttcagggtttcttgggttttgtttagattaaagtttagctttgctactttgccgggtaatcccgtgatcggttagatcgccggtttactcattacggaaccccaagttatcatttgtactcaattcctatttacaattcagattgcttttatcttgttcttgcttgtttctttgatttgcttgcaggaataaggttgatctgcactggcaagatcaacaacctatggagaggtgtatcgatcgctaaggcgcaacacaataatgtctagtacggttgtagttgggtcgtcaacgtttctcccaaatcgtagttatcatcaactcaccgaaagatcgggccaacaacagcctagagtggagctcaaggttcattaggtggtatcagagctttcgttgctcggtgagtttttttctacccataaccagaaaatagccataaaaaaataccatcatttacctagccatattgtgccattgcattggtcttttcagttttttcttttttgagttttgggttgcatcgtcatgtgatgttgctgggcttaatgtctaggtcatttaaaggttccagttctggtcatgttttgtaccacagtcatcgcagccaccgtgtctctgttggcgtcgggacctacgaaaacgg

SEQ ID NO: 32978 - DNA, 651 bp, Oryza sativa
actcttatacatgacagtttttctttttatgctgcggctaaaatataatgaattttcagagaagactttacacatatgtgtaatactccctccattcgaatttgatcaacctatttcacctgggctccagactaaggtacacttgcatgcaaaatgaaaagacgagcagccaatttttatacaatgaagcatcctatttttgctcaattgattggcttgaatgagaacggaagagccaggcattccttgcatgccaaagctataaatctgcatgcaaatctgattggctagcatgtaaatcaaagagccacccaatccttgcatgggaaatcaataaatttacatgcaaaactgaacagctaccacatccttagagcaagtccaatagtatagctcactactagctccaattcatctatagccaatctaatagccaattcatacaatagttgcttactatactattaatatatggtcccacctgtcatacacacattgtgtcttggagtccgtgctgcagctggctacaaatctgtagcccgctgctcttctctctcatcatttatctcattaaaatatgtttatagccggctaatagcctgctattgtacctgctcttatgcactgatcaattctgaatgttttgctttt

SEQ ID NO: 32979 - DNA, 847 bp, Oryza sativa
cctgaaccagtataatccttgctttctgtttgcttgatgtcgtactacgtagatcctcgttccaacggaccccaataccctctatatctggtctagggtatcccccgtcgacatatatatatatatatatgggagcgtatcctatgcacacaggccctcgcgtatatacaccgtgtacaccaactaaaaattatcacaaacaattctaggaaaattcatacatgtactttcaatagtattacatctacgtgcaaagtcgcatcttcaaattcattctacatagagaataacaaaaaagataaaattctgacaaaattgcaaccttaaaactgtcagattttttgtttttttttgttacggctaaaatataatgaatttgacgttaagattttaaccctaggtgtaatacaattgaaagtatgtgtatgattttttctagattttttggtgacattttttagttggtgtgtacgtgtgtacacgtgagggcctgtgtacataggatatgttgcctatatatatagtagctctattatatacccctcccttagaataactattctacaccccctccctaccagtccagcctagcccacacctccttccctccccacgggcctccctgcctcctccccgcgcgcgcctccctcccttctggtgaccccgcgcacgcctccctcccccttttttctctctctcggtgctactcttttttttctcccttctcttgcggctactccttccaatctccctcctcattttttttcttttttttctctccctcctcttcccggctcctactcctaatctctccatccggtttcttttttctaaaaaaaagaaaaat

SEQ ID NO: 32980 - DNA, 1355 bp, Oryza sativa
  unsure (1)..(1355): unsure at all n locations
gaatttacttttgtatgtctaagaagtaatttagtgatatccaaaagtgaaagaggatcggatgtgaaggaggaatcgagatagagattgtcccggaaacagagtgaaaatcggctgaagtccgaaccggctacgactaagatcgcagagttcgagtcgaacgggttagccattgagccgaatccgacaatatgacccagcatatgttgtcggtttaggttcacgtgcttcatgatgatttccacgcatggatagagtcctaacaagtcaattgtatctattccttaggatattttatgtaatttccttagagatatgtttgggcaaaagtgtagtgcaaagacttatggtatgttagagtttgttagaaataagattagtgtagatatggaacatattttgtaattntggccccccccccccgaaattttttatttttgttttatttgtttgatatttttttcatgcttagggacacacaagaaccaactatagaaaaattgaactcaaatggacgtaatatgtgacatgtagaatttttcctctcctctcctctctccgaactagtgcagaggagagagatgtgcaacttttttatttttattttattttgttgatattttttacacacttaggaattcacaggaaccaaccacgtaaaaaataaactcaaacggacgaaatatgtggcatgtggaattttccaaagctccaccgaaaaacttctctcctcgaaaacacaatcttgcaagcggaatttggaggttttaatatcgccgaacccggcaaagcggggagaatcggatgtaacattttctgtagatgtccgtgcatatattatttgtctgattccgagtccgtatgagaaagttacgcctattttaatagatggcatattttgtccgtttcggtagagttttggaaaattctacatgtcacatattttgtccgtttgagtttattttttatacggttggttcctatgttctcctaagtgtgaaaaaaatatcaaaaaatgaaataaaaataaaaaaattgcatctctatgtactatttaacttatatatgtcatttcatgtggttatattttgaattagattaagtaatttcatatagtggtagagtgcattatgtttaacatgctgatcaaagggttttactaaaggagttatggtctaattttagtgaaggtgcaaagtagactaagtggtatgctagatattttcagacttagctaagtggtagttcgagtttaaattttttttgtggttggttgtatcgtgatcctgagtgtgaaaaaacatccgaaagaataaaataaaaataacaccgttgcaactccatacaaagaaaca

SEQ ID NO: 32981 - DNA, 2687 bp, Oryza sativa
  unsure (1)..(2687): unsure at all n locations
cccttttgttttctattagatcgatctatttctattctaatggaggatcatccaggcgatctcgcagtcatccgcagacggcgtcatcggcaacctcagttgttctcagccggcgtcattgtcaaacatacgttggtacttggtaggtcagagtgggccgggatggtgttatttcatcgttctgccgtcagctcgattccaggggtcggtgatgcccattcggatgatccctgggtgttgaatgctgcatgccatgccgttcctcattcttttctgctagatcgaattcccattactgctgctaaatggcagtatatatatggcacatgattattcatcttcgtgctgccaagccgatgataccttgatcgattactcagtatgattacatactgctcgttcttctacaatatgtactgctcttttttttttggttatatactgtcttttctacctatgatatgatatagtcagatgtatatactaagtaaaagatcatatatactgctttctttggagaaaaatatacgtactaaaagtacttgaaaaatagtatatactgctccatcgagaaatgtagtatatacaactaaaaatgactatgaacatggattaatttgtagtatgtactgacaaaaagaaaagtatgaacctagatttgtagtatgtaatggcaaaaggaaagttgtatcctttcattctaagtagaaatcagtatatctcaattcataaatcagtacatactgattacttgaagaaatcggtatagcccagctcttgaagaaatcagtgcatatccactcagacaaaaatcagtatatactcattccaagataagtcagtatatactcgttttaaaaaaaatcagtatatactcattccaatatatgtcagtatatactcattcggtcgttccaacagtatattgcagctaccaatataacacaaagtagattatactgaccaaacataaaaagtagtctacgtggtatatactgagcaaccaaaaaagcagtataaactcctttagccacgatgatgcagtatacactgaccaaatataaaaagtaatatgttcagtatatactgaccaaacaaaaagtagtatgcagtatcaaacaaaaacgtagaatgcctaatatactgagcatacgaaaaagtagtatatgtctgaccaaacagaaaagcagtatatactcattcagtccggatcgatgtagttggaaagaaaatttcaaagcaactgcgtgccaacgctctctccattaaaaaaggggagtacataacacctaggtgtacagagagtgtctgtctctctctatctctctatatatatatcncngatgncaactacttcgtcatagaataataataaannncccctttgatttnacaatctcctccttgatgaacacattggcaaactcattaaaaatgttttggtgtttggaaaaataaaaacaaaaaaaggggttttgggggggggttttaaaaaaaaaaggctacactttcgtacaaacgtacacatcgtgctcaaaaatccaaaagaaaacttatccccctttgtaaaagaaagaaattcccaattgaaccaacaaacgtgctcttctcaacaactctccaaaaattcaccttgcttcttctaaaaatccaaaaaattttacattacttctcccccttttggcaatgatttcatcaagcataggaattatgttcattaatgttcaaaagcttagcatacatatagcatatcaagtcatgtgttgcaataaaaagaagatgaacccatctataatataacaagcatgtattaaagtataaccatgaaccaaagattttacaattaagcttgaatcaacaatcaaaattcatgatttcaaacgatttataatgcaacatcttaacaaatacataggttgaagaataaacactaaacacatatacctattgcatttatcactctttctcaaataacctttagcacaaaataaccaagagaatttttaactttttcttttcttgagccttttttctcatatttttctcttttattccggatacgtccctgtcgtcaagacagtttccagagattcggcacctattattttgctcacatcgaatacgtccttgtcgtcaagactgtttccaaagattcggtattcattttttttcatatttttattctctttttcacaatgagcaattaaagctatttgaggaataacaattcaataaagcatatatatagagtatttacaaatcaaaccatatgctagcatcaacattgcattttttttaattcaagtatagaatttaagtgtcatgcatcatctcccttaagagcaaaatctaaatctcatgaaaaaactagaatacatacaagctatgctagagacaaataaaccttcaaagtattgctagcatgcacaagaaaataccatatgcataaacaaagctctcttttatcaatttttctcattgtcatattatagcttgataaaaccatgaggtactaattccccctcaaaacatgccaaaaggatgaattatgcccaattcaccatgaagaaaagcaaatcgattagaatccaaaggtttagtgaaaatatcagcaagttgcaactttgtgtccaaaaactgcaattcaacatctctcttctcaacatgatccctcaaaaagtgaaaac

SEQ ID NO: 32982 - DNA, 534 bp, Oryza sativa
ttcttccgagtgggccggtctgaccgccgtgtgttgggcggtcagaccgccggttgagggccggtcagaccggcggtgtgtggccggtctgaacggcaggtccgagtccgactgtgtttcatcgggtttcgaggtttccttgctcgggaaagcatgtttcgggtttcctttagtttctaccccgagttggacgtggagaagggcctgtagagggcaataccaaccccctatataagggacatggctggttcattgtaaaaaaccaatctacaatcaatcaatcgaatcgtttttcatattgcttttagttttctcttagtttgtccatctttgtcggtttgcgccgtaaaccgtccgacgccgctgcgagagtgcgacatctctttgtaggtttgtcctgaaaaccttccgttttgcccacgagacgggtagttatctagaaatcggctccactagccggtttagttatcaaaacccatctaggtttagctctttgctagatcaaggtggttggcgcctctaggatcaccgcaa

SEQ ID NO: 32983 - DNA, 1478 bp, Oryza sativa
tgctcacaatttctatgtggctgctgtagtgccaaataaataactgagataataggcactattaacatgacaactaaattgtaatagaaattgattggggtgtgaatttaatactaatatgtactggaactgaccacaattaatagattttgagtgtcaaactatagttaaaagtaatacaaactgaaactataactatagttcgaaatacacatactatggaaaaaacgtgatataatacaaatatgtacttgtacctgatacataaacagagttaggaaacaattgcatcaatgcaaaataaaataaatcaggaaatgtaagtaggaacattactttggtatcgcagtcactgaggagcaaccaccagaatagctagatcaatatggacttgctgtcctatgatagtgagagcatgataaaaactaacacggctgagatgggctttattttgcaacagctgagctggcagactacaaagcaaattttgaaaaaaaaaaagagaaaaaaaagtgacatgtacaagtcaaaagcattgtgttgttcaatgaattttgttgcaacattacctcagtttcccatggatcgatattcttcagctcagctactgttttctgttccactcaagccagacaccgtgatgcgccaaaagattcagccatgtggtatgtcaattactgattttaaaaggcgccatttcatagagtgcattgaaaagaacagacaaaagccataatcaggatggaagtgcataccaaacatgtgtatgtgtaagcggatttcatatagaaaaatttccatcatatcttgtctaaaagcaaatgaaatatgatgcagcaaaatttatcaccactccacaacaatgtattgactaataagaaacaatccgaatagctatttcctggtaatatatagtggtagtattttacgacaaaattacagatatacaaaaggcacatttttataagtaaatcaggctaatggtacttattctttttattgtaatgggtgtgtggaatgtgttacaacacatcagaccgattataatttataaactgtgtatgatattacagttatatatcagcctagatgatatatacagttatataagtaattataagctggttatttcattaatatatagctgagccaacctacaaattaaaaccgaaagtatgacagatctttttacttaaattgaagtgccatgtgtaattaactcgacacaacctaggggtgacgggattaattaattgatacttactattaatctttgtagtgccaaaaaaaaattcccctctggcttgttagagacgacggacctggcgtagtcctccacggtgatgttcttctggtagtggtagactggtagcacacctcgcagcctcagaccatcttgttcagcggctcttagattgaccccagcatggctacgtgatatacggtgacccaccattgcccgtgagaacactggttat

SEQ ID NO: 32984 - DNA, 697 bp, Oryza sativa
cggaaataacccaacgggcgttccttacgtgcgtgcattattccttgtcccaggaggcaaggtacaccaaaagttgatacaattcagagtttaacaagcggaagcgtaaatagttaatttattacatgggcggcgaaggcccagcacacacaaagacaaacgggaaacagcggaagactagggcgacgaccacaggcgcttaacggcaggcacgagctaaacaccaaagccttcatcatccaggggctcctcttctgggtttgggaaaaaattgagcaagactgagtacaaccaccgtacttaacaagacacacccataagtgcagaataaatgcaagggagtacaagggggttatagtataaagggttagggtttgcagtaaacagcattaaaagacacttagttgctcaaagctattttgtaaacacggtcctagagctatacaatattattaatcaaggccgtgaacccacacgaacctgccttaacccaaggcctacgatgattcagaccgaactggcaacccgaccctgtgtcccagctcgtcccaagccaacccaggccaaccatttcaacattttagttgttaagcaggttttaagaattaaaacactaacttgggtacattgctcggcttgcccttaaccgagggcgcggctattcgaatagattatactctgatcagaggtgtacaac

SEQ ID NO: 32985 - DNA, 2197 bp, Oryza sativa
  unsure (1)..(2197): unsure at all n locations
tgttttagaacgtgtgcagtcaaaccttggaatcttgactcataaacaaatgcaaacacctcctaatcgctataagatttataggtgaatgacattaataggcctgtcatgaagaatacctaaaagatttataggtgaaaatgaaattaataggcccgtcatgaagaatactttcatatcgctatcaataatgaattttatgactatgtcatgtcccaaaagtcaccaaaaaagaacggaggtagtaatataaaagctccacgaaattttcatgagcataatcaaacaaagtattcaaaggcgcatattggagaccacatacatgtccaaaatgtcatatacaagcattcatgggatgtcatatatgcaagaaacaaatataacaatacactagaatggaagattaatgaattacctgttgttcaggtggcaaagaaccgtgaagtggaaggacaagagcatccatacaagaaccttcctctagattttgaattctttcctccaattttgataccatcttatcaatgtcatcctgacaaaataccattcaattaattcaaaaggtctgtgtaagtacggagtacaacaaaagaaagggagaaaagtttagcaaagaaatggagatcatccattgatccataaatgtttagttaatcagtgttccaaaaacagaccagtaaacgttgtgtttttttgccatactagtaacatgcccatgcattgcaacatgcccatatgattagaatgggttgcatgggcccatatgactagggatgggttgggagtgtgaatcgagacccaaccacttatgggcggtggggtgagagaagggatggagggagaatcgagatacaactgattacacgatggaagaagagtaaggaggaggactccgcttttaagtagtagagatatacaataaagtaaacacggggctgttttggggcattaaattataactagatgaaagcccaaaaatccaggagtattactgattttatagcatatctctgacgatatccttagtgtcaaatagaacaaaaaaaatatccttcaaagtttcagaaacatcaagctcaagcatgcaaaaaaaatatatattctgctaacctttcctgtcatgaatattaagacatcaccaggggattccttaacatgaatatctgttgaagaaaaagaatgtttggaactgttagaaacactagctaaatacctgtgatttgctatggataaaaatgaattatacatgtgctaacattgtttggaacaagttaattgtaagatttttggaacaatatcatccctgattccctgtggatgtctttgcatggtaaacataaattctagggatgaaataagatattaacaatatgtagaagtactgttttataaaattaaagtacacataggagtagttggtaaaaaaatacaacagagttggtgggtggcagattcactgccaccaccattgtcttcttttaaaggagtatagatatcaaatagttaagcaaatatgaaacaccatggcccaaaagtttaacaaaatatattgttattattttcaaataataaaaaatttgatttttccagcatgaatataaatcatatgtcagcagacatactcctctgacactaatatgtgtatttcgttaaaaaaatcatggtattgttaaggcggtaaggcgtaaggcgaggacccagcacaccttacaccttaggcagtaaggcataaggcgaggcaacgccttatacagatagaaaaataggaaatgaaagactttttcgtaatatctagagtccaaggattaaaatggaagatgaaaataggaaatgaaggacttctttgtaatatctagagtccaaggactaaaatggaagatggtgacagatatttatctatccatccccatccccgtccccatccccatcctcaatcccatcggcgccacctactcgccttcgctccactgccaccgacggaagacctctccgcagccgtcgcgtccatcccctctggtccttccttttnccctgccgccaccgcttctcatcatcaggtggtgctgggcatcgaggaaggtggatctggctttggcagtggtcggggacgacagcgacaaccacataggtcagctattttcattccttcccctttccctgctgccgctccttctncaggaatggnttatccccttga

SEQ ID NO: 32986 - DNA, 554 bp, Oryza sativa
caaagcccgattgaaatagattaatctctatcggccgtaaaccaaggcccgtcaccgatgactcattttccatctttcatttgttgtgagtgcaaaatatatagcctatataatttttattttggtcattattctatataatttttttcccaacagcttgaaattatttcgacaatatgacaaatctaattaacagcatttgtaaatactaaacgatttcaaattgaaatatggtcaacaacaaagttgatcctctcatcacgatctacaacttttattttggtcatgtgtaataaaacaaaattagccatattaatgactacacatatcaagtctttgcaataaaacaaaatacttcattcattacaatagataagtacaaatgcatcagtcacaaggttatgccttcggtatgatctgaacgagcatatgccacaggctcttggggatcatcgtcaaggtcaatgtgaggtcttacatgaagattatggttgtattcttcttcatcgacgatgttgtcaactgctacaattcggcgctttccatccctcacg

SEQ ID NO: 32987 - DNA, 803 bp, Oryza sativa
agccatgtccgctgcaaaaatgacagaaacaaacacagatatccaatatccccagctccccagcatcacccattcatacatatgcattaacatacacagacatcaacatatttcacacaaccacacattcaccgccatctcatatttcacatccattcacatatttcacatccattcaaatatttatcatatttcacctgcaaaaccgagttaattggatcaaatatttatttagcaagtcttaacataaacatatgaaatatatacataaatataagcatcacagttacatcatcacagttgcataataagtgttcatcattgcctaaacatagaagttcaacattgttcatcattttagtttaagcctaaacattcctttggggttaattatttcgcggaggatgaagctggctatctcctcgcgaacctcctcaaagctggtagtcagagacttggttattgtgccctacattgtcataattccagattagttgatcgatcatatataagtactaaaatgtagttagtctatcacaattgagaccaccgacctcaaactcagccaaagtcttcaccttttctctatacagaagtcgcatgttgtggcacacatggaattcgcactggtcacctatttgttgcttcaccgggaagtcttttttgtggatgagggtgtcatgtcctgtcttcctgaggcctcctctttgcacgtattgggcccacgcttcatctatcgctagttgaattggggtccaatcatatgcgttcttatcaattctggagttcaggtaatgacatgt

SEQ ID NO: 32988 - DNA, 629 bp, Oryza sativa
cctcatcgccgtcgcgcccacttcctcctctggcgcaggctggagcccagacgaagacgacaaacggtgagcgagtggcgggatgcgtgtcccactcgccgaggagctctcatgccctcccgccccttccccattgccgttgcacccacctcctcctccggtgcaggctagagcccagacgaagacgacgagcggtgagcgagtggcgggatgcacgtcccgcttgccgccgccctcgccgaggagctctccacccgtcccgccccttccccatcgccatcgtgcccccttcctccctcggcacaggttggagacgaagacgaagacaacgagcagcggtaccggcgagcggcggtgggatgcgcgtcccgtcctaccccttccccattgccggtgtgctctcctcctcctccggcgcaggttggagacgaagacgaagatgacgagcggcaggacaggcgagcggcgtggtgcgcgtcccggtctcagccgccctcgccgaggtgctctccacccgtcccgccccttccccatcgccgtcgtgccctcctcctcctttggcgtaggctaaagcccagaggcgaagacgaccagcggcgagtgagcagcagtaccatcgagcggcgggg

SEQ ID NO: 32989 - DNA, 1157 bp, Oryza sativa
aggggggtaattcgtactttttcctattagcagagacaagtgcacagaggatgcataaaatctgactcggattttctttttctttgagaaacctctggattcatatcatcgagtaaatagctgagaaaatctcatgtacaaaataaaaaaacatgtgtgggacagtaaggaggaacttaatgtcaatttattaaggcttggtttaaataaaaaaattgggtcaaaaacgtcacatcaaatgtttgacatatacatggaacattaaatgtgggaaaaaaccaattgcacaatttacatataaattgcgagacaaatcttttgaggctaattacaccataattggacaatgtgatgcgacattaaatattggctaatgacggattaaataggcttaataaattcgtctcgcagtttacaaacggaatatgtaattggtttaattataagcctacgtgcaatactccaaatatgcgtgtgtatacttcgaaaactttatgcccaaacaactaaacacacggccacaccctaaccagggtgaaagcgtccttggagaaccaaaagcagaccgcgagcggtacatcgatcaatgtacagtcccaatttcagagccaaaaataatatttgatttaatatactctaaaaaaaatttaaccgacacataagcatttttatgttgatacgatatggaaaacctttaacagagttcagacacatatctatttgtgcagaataatgtttaacgagtaacatcagtgattgtgtctctggttgagtggggagatctgcattatattacttgtcaccagatgtgatgttagaaaaagggatttttaaagttcctgcaaatatatatttttgtgtgcatatcaaggttgctttgcttagggatcaatgggaaatcatgtgtgtgcatgggaaaggcagaattgtgctgcatgcactcagaaagttaaggggagaaaattcagtggtccatcacagacaggagggctaccaggggagggacatcacatcaacttctttaaaaaaattcctattggcattagagatgataatgctcccctctttactctgcttcctattaaggcccttgcgatttaataatttctatcttcattattattgcactttatatgtgataagatcatgtttttttg

SEQ ID NO: 32990 - DNA, 983 bp, Oryza sativa
cactcggatcctgttattcagggattcacaccgcatatgctatatattaatattaagtcacttggttgactataattatcaaaaccactcagttggtgcatctattaggtacatctattcgatgcacctgagtttatttttcagccctccacagtcttcatatttggtaaaagtactcgggagatcatggcgaagatgattgaagcactcggctttgaagtaatctagttcgagagaagattatctttccgactgtgaaggtctcaggggctactgtggagattatgggtaccgcatacccacacggcatggttatccgactagtcataggggatagcttatatctatggaatatgtaaccgatcatgacttgggtattacgtttccttttatattatggagcggcctaaagtcctgatttgataatattgtaaaatagatttaggaaaccgatactgtattggttaaagtttctatcttgtaatcctgtcccccatcctatataaggtgggcaggaggccctctagggggcatgacacaaactgatcgtcagatcaatatacacccggcggattcaaatccccaaacaagagtagggtattacctctcatcgagagggcttgaacctgtctaaatcctttgtctccgcatccatccacttttaggtctcgtgcgctacccccttttcatattgccgaaaatttgtttcgacaactttatagatcgaacttaaccgatgcagcatcaagcataaaaataaccgtaagatctgaacaagtcaatgaaaacctctgagagatggtagatgcacgatataatctagattaataacgagatctaactctattggctacttcctaacagaagaaaccagccgatcgcaaattatatagcgcaactaacagagattataaagtatttatgataactcgacgaattacataaacaagattagagtgtcataaagatggaagcactaatct

SEQ ID NO: 32991 - DNA, 523 bp, Oryza sativa
cgagaaaagaatgcatgttcggcatttttggtcttcacattgctccgagaagcttcttttagttagccaagcgggtcatgtggataggtcaagagatgcgtaaacgtgcccaacaaggggtcgggagtgctactagggacgatcagagttctggggccagaggaaggggaacaaaaggtagaatatgcgggttatcgtagaatagaagcgagtcgcttccggcgttggcttgtagtctctgtagtcgggtcacacgacaggtgcacgatcgactttgtacactccatccttcggcccttcgcctataggtggcttggcgggcaagctaccttaaccctgctttcacgtggcgaatcggtatgtgatcactttacggtaggccaaattggcgtattaccaaaccacgcccccattaacacagcccgaacccccctccgagaaccgtatatgagaatttcatctcgtacggctctgacacaaataatcgaccttcctggtacagtgagactagtggatctgatgg

SEQ ID NO: 32992 - DNA, 567 bp, Oryza sativa
catatgaaggattactacacggcataaaataagaataagagtaccatgtaaagaaataagcaacaagacgagagggcgcccgatcttttaggcatggattgggcacccgatgggaagcattttcggatacgttgttggattcaagtgttgtataatgtatagggcacgaaacatgataaatcattacttcgttaggactcatacatgtttaattttgatgctggattcatttccatataatactttaaaaactttaactatactattaagccccaaaaattttttaattaacccactatttctagtgatatttgtgcttgtcacctcacctcttgggcaaacagtctattttaaataaaaatcattgaagggtatattttcaaattttgaaaagtacaagtctaattctaaagaagaaaacatagcatccaagacatgtccacatgtgagtaatgttatgtacacagaagggaaaattatattatacttatgcaaaacatataatcctttattttttaatctatgatgccgttaattttcgacataccgtttcatcgtattaaaaaa

SEQ ID NO: 32993 - DNA, 1052 bp, Oryza sativa
agtatgtcttgtatttccgtggatccattatttgactttgcaatatatgtgatgcaagcaatgctctactcttttctataccctaagttccacataaaccttattagatgggaggaaaagaaaaggcacaatcatatgcctttgtgaggaatcatacactttgagtaatcgagagaatcaatcgaggagtaaagcaaagttataattttgtgttacttgaaaaacccccaagttgttcttcatgaaaagttagggttacttaagtcaagattgttccatttctcaattgctcaggattgcatggtagacactacaaagatccacaagtataggtatgactttgaataatttgtttacgtgattattagtaaggaagtcgtaactttgttgtagagtccatagccttcactcgggatgagcaaaggttaagtgtgggggtgttgctaacggtccttaaatcataatatttgaccgttaatacctgcatataatgcaataaaatatggtatccaacttagtggtagggattattactaataatttctactagtgttggtgaaagatgtgtatgtaggtaatttgaggagaaaaaacatctgtcatgcgacaaaatgcacctccgcgcatttaggacgcgtttacatggattggaggcccaataagtcaataaaaaccatttagaattgggccaaaacatagcctaggttgttgggggcccattaaggaacctcccgaccgaaggagaggccgggaggagtgtttttgggtttggccgaaccattcctggcacctcccgccatctgcttccacgtggacaacttggattcctcccctatgttggttgcagggtgttttggtcatttcccatacccctaaccgtcatttggagcctatataaggaggtcttcatctcacttcaagcacacacaactttgagctgaattacaagaggctctattgtatcttttgtacattagaataaggtcgagagtggggggaagctctggaggagtgcccagaagtttggcgctcatccgacttcttccttaacg

SEQ ID NO: 32994 - DNA, 927 bp, Oryza sativa
tctatttgcatatgctctgttttgggtgctcgcacaagacatctataggctttttaaattaagcatggtgcttaggttaaaatagtctggtttaatcaaattggacatggagtttagtttgactaatgaatttcggagttaatatgttcatagacattggatgcatatcttttgtgaactaacccactgcaggaaaatattcaaattgacgggtgagtccacaagtttaatttacaatgaaggtaggtcagggcgggaacaaatcaattgctgacatgaaaaggagacacatatcacctatcaaggtgcatggtgcgtatattactaatcgctccattagcatgttcatgcaaatttacctcaaccttgtatgagttgtgcttaaatgaaaatttggtgaaaaaaaagtgatttcagaataaaggatgtctctctcgaaaaataaaataaaatgttggcaaacttgtgggatccatgcttcttaagttttgaatccaattcctttttagcgtggatgtgaataattaatcttgaggtgacgacaaaatctttttaaatctttgtagtgcttcgagtatttttttgtccaataaccttttgcaggaaataaaatgacaatcaaggagcagtgtacaataacttcaaacacttatatcatgctccttggtccatttgaaagagatgcacaaggaaccaagtagaacaaatgcaaaactttgttacattcgatttaattctaagcctggtaagacctatctggtaagaatctcatacaccatatgcatcctcatctcatgtctccatcctgctaggatacccaacatattcattgttgccataaaataaaaataaaaaaatgattaaaaaacaattaaaaaataaaataaagttggctccttggtcttccaaccaagtgagtcatttttg

SEQ ID NO: 32995 - DNA, 802 bp, Oryza sativa
ctattctctcaaatgtttattgaatgatgtttatgcaaataagctatagtatgccatcctttgttatcctgtgcacttgcatatttgctgtgtggcttgttgagtatgtcatatggtcattcttgcaatattcattcatcagaggaggagtacttcagtgaaggtgatgattaggaggattaggctttgttcatgatcaggaggattaggctttgttcgggtcaagttgcttgtggagtggagtcgccatagctgtttagtcttttgtttatttttccgctgtgtagaattttattcttttgagaggaactatccacctctataatattttattattttgcgaatattaattagttgtttgataggactcaattatcaatttgttattgtgtgcctcggctgattcctggacgaggatttaacacacatgtaagcctttggaattttggatagaaattctgggcgtgacaaccttccccacttcgccggcgcaatagggccccttcctggccacgactcgcctcccccgctcctatttaagcacccccgcatctccctctcttctttccttttgtagccgcactctcccgagccatctatcgccgccgcaccgtttctccctagcgccgccgccaaccgccgcctccagccgccgctaatcgccgctagggctgccgccgtaccgcgccactaccgccgtcgggttcgcacggccgaggtccacctcgtccacctcccctccgtcgagttccgccgccggagcacgcttctccccacgcgccggtgagcatctccattaccc

SEQ ID NO: 32996 - DNA, 719 bp, Oryza sativa
gagcaaccacgccgaagaagaagctacctgggagcgcgaagacgagctgaaggcagcccatccagatctcttcgccagttcttccgaatctcggggtcgagattccgtttaaggggggtaggcttgtcgcgtcccaaatcgactctaaaatacatcctcgaaattatgcaaagaataagtaaaatccatgtgaaagcctccaacaattaaaatgtgcaaagctaaaagtcaaataaggcttggaggatttttgtatatttcctaaaagcctaaaatgcgtaaataaattttagtggaattttcagagcacaaataataattaagaagaaataaacaaagttaaagtggttttataaaaagaaaaatccctaaaagtccttttcccccccccttcctctcttgggccggctcggcccagctccctccctctctctcctctcccccgcggcccatcggccttcccccgcgcgcgcgtcgctgacaggcgggcccgcccgccaccctcgctgacgggtggggcccacccgtcatcccctacctcgcgccgcgcccgccgcctcgcccgtgccctagcgccgccgccgccgcggattccgccgcatcccgccgcccccgcgcgcaataaagagggggaaatcactccccgtgattccctccctctttccccccacttttccctctctctctctctcggattcgtttggaaatcctcccgcaaa

SEQ ID NO: 32997 - DNA, 1390 bp, Oryza sativa
atatatatatatatgggggacactcatatggggcaccatggtgcccgggcaccatggtatctaatgcacaaaatcactcaaatttttcaaaattttcaaattgtgagtatatacctagttataataattcgattcatacctatacttatcaacaaaacaactcaaatttaactttatttcacaatccatgattacatatctaactaattatatatatggatgctatatacctataatcaaaatctaacaaaaacaagttcaaattcagttcaaacttgctttgaactagttagtaaagtagttaatgttaatacctaagtaattgaaaaagtttcatactcatttgaattgggtatatactcaatttcaacaatggtgcccgggcaccatggagcaccaaacaaatttactatatatatgtacatatatatatatatatgtatatatgtatatgtacatatacatatatacatatatatgaaaatgtcgtcaacctaaaccgacaacatatgctgtgtcatattgtcggattcggctcaatcggctaaccccgtccgactcgaactctgtcgatcttagtcgtagccgattcggacttcagccaatcttcactctgtttccgggacaatctctatctcgatttccatctcaattcctccttcacatccgatccttggattaccagatttggtcattaacacatggcccccaagtctggaatattggataatgtttcggatttgccatacgccgactccgagagaaatccgcacttgccgtttttcgaccgttacacagtgctttaaatactaactgtcatccccgaaaaacttcatccgttacttccgtcttcactgccttagccaactttgtcctctctctctctccggcgatttccccgacgcgcaaggcgatttccagacgttctcatctccggccagatttccgcttgcaacgatgttgtcttccgccagcccgtctgccgtatcatcaaccgagtacgcgggggtaagttctcatcggctagatccttctttttcgcaatagattggttttcctcttccttatcttattttcccctttctctgttcttttggatttgtagcatctctccaacctggttgcaattccaagcctatcccatgaaaaccattactttctcggcccaatcggcaaccttgatcctactgagttcatcattggccagccaatagaattcctttcagattagccaacccaaatctaggtcactggaaaaatacttttaaatcttggccatctcttgagaaaacttcacctgagaagagctggattacatggtacaagcgcatgtcgactaccaagaaagttcactgggacgaagggtaccgagctcgaattcgccctatag

SEQ ID NO: 32998 - DNA, 580 bp, Oryza sativa
ctccatgcactcttgtctttggggtgggctggtccccaagtccctcggctgctggaacagtgaaggtcagcatcaccctaactatgagggtgcagctcgttggtttctgcgatagattaatcaatttttttagaatattatatatcatatggattcgttatgtctttcatgtattgagtaagttcacggttaccgttatgtggtcgacggtgctgtcgaccgatgttggattttccgccactcagttgatgtgcaactgctgcgtttttcgatgggacttcctaactctttgtgcgcagcagcagtggcggcctgggggatctgttgctcttctcggatctcttgcctaatcttggccctcatcgactcgagcttttcgtcgaattcatatgtcagctcagctcatatcgactcccggatcttggcttcaaggcgtgcatctttctccgccttgttggaagtccgcttcttgtactgccacgcgtagtctggaaatccatacttccagggaacagaagacccaacgccccgtgtccgtccacggtgttccttgttgcccaacgctttcgtgaggaggtcg

SEQ ID NO: 32999 - DNA, 1157 bp, Oryza sativa
gacatggattcaagccatatatatatatatatatatatatatatatatatatatatatatatatatatatatacacacacacacacatatatgtatatatgtgtgtacacatatatatatacatacatatacatacatgtacatatacatatatatatatatatatacatacatgtacatatatacatatatatatatatatatatatatacatatatacatatatacatatatacatatatacatatatatataacatattgtcagggttatggataccacatatctaatagtcgtcgtcgccactgccggtttccggtgaggaggttcgtcgctgccgtcaccgccggtggcgtggtttcgtgtgtaatttattttaatctattcttatattttggcggggtttcggttcaactgtttcgcaggttgagtactataacaatttttctttgtttgtcaagaccttaagacgggaatggatcctactaataagttgttggttcatcctcctagtgatccaataactgtacacgtatgtatatatgttgccacaggatgatcgggagaaaatggtctggtcgtgggtagaagaagcaccagttggatgcacgcgctaggagctagtaggctgttattcacattatgtgttcgatcgatcgagacaggattagttttttgaactgatgttcttagacagtgtattaactttaaaactaatttgaatacaataattctagagtatataaaaagcttgtgtcggataccttgatcgcatctatatgatcacagatttttctagaataagaaaccagctagttttaaacatttgtgttaatcacttatcactgattactgaaaaataattttaaatgtgaagcactaatattaagtcgaatagactcagtcagacaggtttcaccacactcaattcgcaaaatatccaatcatgctttcaaattttagcggaagtttccaagttccatatgcttcaattgcatcggaattaggtatatttgtctggatttttcacattttgattcttttgaaaaacttatttcgcaaatagacccttgaaaaaacttatcccagaaatggtcctttttgggcaccagagtggctggcgccgtcatccaacgggacggctccagcctctctgg

SEQ ID NO: 33000 - DNA, 992 bp, Oryza sativa
tggatcactaacatcatcatcttcatcaccttcctatcatgcctccaaaacctagcctactctactgccgttcatgggcaacttcgtcttcgtagccaaccatctctgttgccgccggtcatgattaccgcaggtcatctaccgttgtcgactagtttcttcgtcttagagggtaaacatactgacacctgtcgccaaaagacatgcaggcctgttcgcaaaaaaagagttcaagatgataaaggatgtgctcaagattgttcgtcatcgacccagcactaaccccgtgcaaattgaaactttgtgtatctcatgctctttgtttctttaggagtcctccaaaatctatttctgaaagcttccatctcagaaaagtgcctaggtgcaatccatccctattcgttttaacacggaaacaaaaattggatcaatcaaaaatctttttctaaatccttgcatgctggattttattggatttcatttctcgttttcctgttgtgtttgggacaaaaggacggatgtctgagaatatgcttgtattttgaattcaaaatattatttatgaaaagaaccatgattaatgaaatatcttaatatttgcaaataccaattatcttcctaaaaaccctttaatacatattagaacctctctgatgtatttgctttataaatgaagttatatattacaacattgggggaaaaatcttttacggggtaattctttgaaaatactattttacaaaggaaacataattttgattatttgctatgaatccttgaaaaggaacaagccatttggagaataacttgcaaatgacatctattagtaaaataaatccctaaaaggctttaaaaggaaagtccttctcagacaaagtctatctttcctccttaaaaggcctagcccagcccgcataatagcattcgttattatccgagtatgtttattttttttaaccaagatctagattaaatccattttcttaaatagt

SEQ ID NO: 33001 - DNA, 3292 bp, Oryza sativa
atgacattctaaaacaatgcaatttaatagaaagcaggggattttataaaataggttcatcatgatcaatgttgtatgtatggcttgccttgctcttgagctgacggaacctcggcaaccacttcgaaataaactagatcaccggaactgccagaatctaaatgacaaacaaagcatacaagaaatacaaccttaatcatttattacatattaatgcccacagataaatagatcaatagaaatatatctccggtaagcaagcctcatgaattagcgactcaacgagccaacacttcgtgacacgggaccatccaaacggtcaactgaaccggcgactcagaacgactctaaactaaagaacgactcggaatgaccgaatgaactaaaactttggtaatactacgtccgagcgaatggttcgcggcttaacgaacggctgcagcaaaatcagcaactaaacacagtttgtggcaacgactcggtacggcaaactaaaggccggtaacgactcaggtttatgactatggataggcaacttggctaccaagctacggatagcggctagggagaatctaacatgatgacgcacgggaatggcacagcagcaagtggcggcgacttgcaccagtggggggcggcgatggctggtgcgcggcagggacggcatggctgcggcggcagcagcggtacggcgcagcacagcaacggcggcgacacgaacagcagcgacgtggcagcgatgcacggctggcagcaagcggtgcacggccggcagaggcggcatgtggcgctaggcggctgcgatgctaggtattggcggggctacacaattaggattacaataacgacgctaaaagaattaacacctaaaccaggagatcacttataggttcctcaccaaacagagacgatcggcgaggaggagatgacaacagcggtccggcagcaacacacggagacgacggcgacactagatcaaaacctaggacggagtaaattagaatatagatagatagataatggcggtagccatgacatagagagggagaacgaattactggcgatgcaacggcgacgatagcgactgtcacacctagaaatttatcccaaatttccagactattttgtgtattaaatccctatctaggaatcagccatggtacacaaaacgacaagtaatatacagtttaaaacataaataaagagtaaaatacttacagaagaggctcagtcctcacaccaaaagagaactatagcagtggaaaaggcgatcctagcgggggcttcggctccactccacaggcaaaactcaactggggtctgagccttggtcctctaaattcgtgttcagctcggaagcacacacttttaatagggggaaatagcaaggctgagtacaactaccatactcagcaagccacaccaaagatgcagacgtgcaaggggattcaaggatagcttgtggctattttcataaaggcagttgtaaaacattttattgagcaaaacagtaaaaccgtagagtaattaagggtataataaatcttcactgatcaacgctacaccatgttaaataaggccaaccaggccaccttgactacacagtgcattgggtcgatttgttggggtgagactaatcacaatattctggtgggtcgcccataaccacgggcacgactatttgaatagttttactctggctagaggtgcacaactgtatccacaagacataatccacttgcatgtcaccgcgccaggcctgacacgacaccatgtcaagtgattgtgacaagacccttcatataaccccctctgaccaagcacaccacacctcaggtttcacccccactcctcaacaagcagcgggcagtcccctctcgtgcctaggtgaatccggaagcgacaaaggccgtcgcagggcccatcccgctccatcacgcccacccttgcctggatgcgtcagccagagaaaagctatacttcaagtcaggcaattacccattcccgcttgtggcaagcgctgtatgtcttccagtgcatcccacgaaccggtccttaattgccatgggtgtgaccagcaaaaccatgcacccacagcccaccattcagtcgcattttagtttgataattatggccatagaaacatggtcggatgtctcgagcacgcaactcatcatgatactaagagatctaaaactgtaattatcccatcaaccaagctagtggtaactaagcatgcctaagcatatatgattttagctaggtcaatgtaagtaacacaagctagtcgaattatcacccaaggttgacaaaagatggatatcaaataaacatggcacgggcgagcagataggtaaaccctaatcccatgtaattagcaaaacaatgcatatttatttgcaaatgataaaacatttgtaaaagtaggctcaaaatgctgaaggggaatgtgtgacttgccttgctcaaacaatcttctaaactcttttcttcgctatcgccatcttccggaacggcgacatctacgtgctagaacgcaaaaaaaggaaaaaacactaataaaaaccaagtaaacagtacataaaaagtaaacaaacatgtagatctcaatttgagatgaattttgcaacttgaatggcccaatttggagttcatatgaattagttatgaattttggaagttttgagccatttaaatcattttctataattattatcggtttatggcgcatttattaaatattttcccaaaggaaatggtctaccgctaacgtcagcaaggggagcaggcaccgacaggcgggccccacgagtcagtgagtcaagggggcagcccacggtggactcggtccaccgtggcacaagcgcgtgcgcacttaacaaggaagaccacgtggcggccatggcggcacagcggggtgaggtggtgctgacgtggcgccacgagggcaccgacgcgtggccgagggggaacgccacaaggacggcgtagatggaggacgagaccgatccaacggcccagatcgaccacggcgggggccaaggggaggcggccagcctgtgtcggcgcgggagcggcgctcggcggaagcggcggcgacagcccgccaggacggccaccggcgatggaggcgcgacacagagcagccgacgaaggggagatagagggagagggagagtatgctcaccgaggggcggcggccaaaaaggcacggaggcgagcggttgggcggcagcccgcgaagctcggcggagggagttggcgatgctccggcgatggcggcgctccggaa

SEQ ID NO: 33002 - DNA, 740 bp, Oryza sativa
tatgggccttcgttatttagctagtttgaggtggtcctgtatgattctcccttcaattaaaaaagggtcgagttgccttctagcgagcgctataacaccacttgtcatttttagggatgtgtttttttttaacaaagcactttttaggtgcaataggaggagcggcacggagaggagatcgcttggcgcgagctctctagctccagtccacctcaccggtcagtggctctcctctttggcgtgcactgcttgccggtcaccggcgccaaccgccatcatcaccaagatgcatcatcgatcaacgggctgtgacggtggatggatactagcggatgcggagccatcgcttcttcgtggaataagcgagacggcatatttgcaaacgaaaaataatttgtgaataaaacttttatatacgtgttcttagcaatctaaaagcaaaggctgaaaaataaacttcgatgaaaaaatctcaaaatcagatctaaatttaaggttgaaaattcaaattttggctgataagcataagcataagcgaaaaaaaagagaccctagaagtagtaaatccaagaaaattggggggggatgaagtgggagagagaaagcggttggttgattacagtaaaagtagcatatactttacaagatgaggttgtaaaagaattactactcggaacgcaacaatggaggaggacagggtggtgttagttggtgggatcgctgggtgtagaaagaagcga

SEQ ID NO: 33003 - DNA, 2725 bp, Oryza sativa
tagaaaacttgtctatcaaaccacagtatattaaaactaaggtgtttttttatttttttaattcaatcttagtgactgttctttaacaaatccaaaaaaaatattattactaataaatatgttttttataccatcaagataaccctccttccgattggttcattttaacgtaatttgttacacctgcctatgaattaatacatatggagaagatatacaaaggctagacctcgcttccctatgttatgaattaatgtgttattttctgaaatacctaatcaacatgacttctaaaatttaaatttaatagtaaaatatattttttccaaacaaaatatgtactactttagtgtggcttaaatatatggatgcagtggtataggacagatggatggcattggcaaattggcataactgcgctagctatttacgcattccgtcaaaaaaaaaacaacttttgaagacgaatctgatctggaccatcatttatcctgatttatccccaaaactacaaagtttctaactcgaatgtgaaacattcaaaaatcaatttgaagaaaatatgaaacttttatctaaatacccaaattgatagagaagaaaggggttcaaatgagattgattgagcgaatgaatcaacaaacgaatcggattcatgagcaagaatttggctagacgtatgaggctatgaaagatgagactacagaagatgatgttgtggtattatttatctcttttttctctttatttatctttgatttttcgtaacagagctacaggcatgaggtgagctagcttggttctcgttgaaatggatagttgtgcattcaataatatttttggatggttgtgcacaatgatgaaatctcgttgatgttgaattaaacaaataaatcacagtattaactacacaatatatgggaaataatactacattaagtattttgaactggttctgatgttaggtgccaagcaagatgagtatataattataacattctagaattattatctctaccacggtcttttgtgtgtgcataaccatattaagattcaatactttttcatcattccatccaccccactagtccccaattatatggacatgatccattgcaaagcaaaaacatattactaataattataaaactaagaattaatgtaggtgacacatttgtgcgggcatgtatcctagactgagtttgataaatttataggaacggaatatcaaccgtatgatacctaccacactttaaaagtattattttttcacaaaatttctttatcggcattgctttgataatttttcaagttattagttagctttataatatataatatctagttcatccctataagcaattatttgtgtagaaaaatttctaacaaacactacaagaaaaatgttttacagacattttctctttgatttttctcattatttctctttattttttgttgcagctgccagcgtgaggtacgctaccttgattcccgttgaaattgaatggttgtgcattcagtattattttggatggttgtgtataattaagatatctcgttgatgttgaatattagattattaaatcgctacattaactataaaatatatgagaaatctatactacattaagtacttgcgaaaagtccgaattacatccctaaactattgggtgagtgcgaattagaattaccccgctaaacccaaaaaccagacatctttcaccttcagctattgatagttgagggtgaaagatgtttagttttcgggtttggagggcaatttgtgcattattgtgaattgtgtctacaaatgaaaaggcattttataaaatgtctctatgtcttatgacatcttactagatctcttgagatcaacttcttggcgatgatctcgaggagctcccttgggaggccagagctccagtccagcagtgacctcacgctcacgcacgccatggactaggatatggacaaacgatttcaatggaatatgatgagagtttgtgcagcggcagaagcggactgatggtgatgaagaaagggattcagctcaaactaatggattcatgaccaaagaattttactagcatgcatttgattgagactatggaagatgagacttggatgatgatgctatgatattgtttgtcattttttttatttatttctctttgctttttctttgcagctgcaggcatgaggtaagctacattgtttcctgttgaaattgaatggttgtgtattcaattttattttggatggttgtgcataatgaagatatcttgctgatattgaatattacacgattaaatcattacattaactctttaaagaactgagaaattaatactacattaagtactttgaaccagggttggaaatttcggactgaaatttccaaaatttcagaaatttcggtcctttcagacccctccgatacgatattatttcggccgaaatttttcaatttttttattttttcatgaattttggtaatatttgttcaaatttaactaaattttgttcaaacaaattggaaagtttggaccgatttgtttgcccttccacgctaacgtcaaggagtcggaattcgacatagaaatcttcggttgttcaaaaactctgatgcgccagaaactttcaatttaaaaaattgaaaagtttttaattcaaatgtggaacgttcgaaaatcaatttaaagaatgtgaaacttttatctaa

SEQ ID NO: 33004 - DNA, 598 bp, Oryza sativa
gttgggccgaataaactttgacagatatgataagatctggttgggctcaaaattagatgggctgaatccggtgccaaatatcagcgtccagtagcatatgttgcctgccagataaattcttgaagtactaccagcatgtttggttcttaactaacattgtcataactcactttagacaatgttaggtaagtgtggcttgccacactttttgtggcctacaaattgtaagccacatttgtggtaaagttaggcaaaagattgagtctatgacatgtgggtaagatggtaagaaagtgtggcttggcataattaaggtaatgaaccaaacacaaggctaaggaggtgtggcagtctaaagtgtggtgtggcaagttgaagcattaaaccaaacagcccctacctccatcccaaaataagtgcagcagtggaaatccgtgtccaacgtttaccgtccgtcttatttgaaaaaactatgaaaaaaattaaaaaagataagtcacgtataaagtattaatcatattttatcatctaacaacaatgaaaatactaattataaaaaaattttatataagacggatagttggcacaaaaacctatg

SEQ ID NO: 33005 - DNA, 590 bp, Oryza sativa
tacctacagtactgagtataaaagtgacacatgtcccaatttgttgcgtctcgctgcacgtaatttaattaagcagcgtagtcgttgctaggcgttgggacagaagcagaaagaataaatctaagccaaagatatgattttggttgccaaaccaagcaaaggatctgacgctcgaatctcgatcgatcggcaacaaatctagtgtgttatcatttggtgttaattatagtttgcttcactgctcttcggcttacccattttcagaggaaaaacaaacaaaacgtttagttcgcttctaagcttacacagccgcgatcaaacgtacgctgcactcgatggtagagttttttccatacatgcatggggggatggcatggcaaatatagtgttacatttttgctttcttttgtttttaacaaccagtatctaaagtgcaccaatattgttaaatataccagagaaaaataagataaacaaagctaaaggataagttttgagagtaattttgcttttgctagggctcaggttttaattagcatcctccttaactttcgctgctaaaaattcgttgcaagttttctaacactatg

SEQ ID NO: 33006 - DNA, 1274 bp, Oryza sativa
caaaaatcccttatattgtgggacggagggagtatatcacttcacaaacatgcaagttcaaattcgacttctacaaattgtaacaaaaataataaatttgactgtgaatatacgtatactagttagagtttgatttgttatttttgttacaacttgtagaagtcgaatttgaacttacatgtttgtgaagtgatatattacatattaacctatcttgtgtttttttttaaaattttttcataattatttaggtgacatacaaaaaacgggtggacgttcacccgagagattagaatccatcctcgtagtggtagccatttctgacatgtaatcgccttcgttgttctgcttgctgtcttgcttttacatgccgggcttgatatccatataaatataaatagatcgcgcacaagcttccttcgttaattagttggagggctaatatgtcaagatcaggaagatgtgtcatggaagctgcgtcgtgtattaggagttgactgaaagtacacgcggcgacgtgttcttttcttacagggcgcgctgtgtcttgtagtattattagttgactagaaagtacacgctgctttgccgcgtgaggcctgccagtggtttcaaatccaccccgcacctacaccaacccaaaaacaactacactagcccacccaatccaaaccaacccacaaaatacacgcgatccaatccaatccgcaagttgttctccacaggcaacccatggattctacccacagcctgtttggttggggggagtttttagaagggattgggagtttagagggatgaggctattaactgttttatttggttgggagacatgggaattttggtgggatggggatggggatggggaattgaggaatgaactccctccttttcaatactgggtagggggtggtaattgggagggaattcttcctttactttgcctaaacaaatctcagccatccgttttcattaatgacctaatctccaactaaacttcctatcaatttccaccacctctaccaaacaagagactggaatgaaaaatcaaattcccatcttaatctcaccatcaattccctcgtgtaaactcctaatccccttccctcaagttcccaaacaagccgccatggcacacagccggctaaccaaaacacacagccacacatagataccatagtcactctggccgcatacataggtagttcgtaccatagtcaaagcagtatgcgtaccatagtttactttctaatttataaattgtcatcaaattt

SEQ ID NO: 33007 - DNA, 1098 bp, Oryza sativa
ccccccaccccccaaaaaatttaggcccaaataggttgcttggcccaaatagcccataaaggtctaggttggagggattcctaggctcccagccactcaggctcagccgcccaccaccagcgccgatagccgaccgcccccggcgcctcctcctcaactccgcgccgccggcgccaccaccggcgtccccaccccgcaagcccgcgtctctgcgccggtgcggcgcctccacctccgtccgcacaacaaccgtcccctcccctcctccgcgccggcgccgcgcggcctcccctccagcctcccctcctccgtgccggcccgcgcggcctcccctccgacctccccgccgtccgcggctcctcgccgagtcgccgacgacgacgccgcgccgtgctgccgacctgccgactgccgtccgcccgtcccttccccttccgtggctcagcccactagccaggtaacaaatagatgcctaaactaaatggctagatttgtgaatttgtgattagaagatttgtgaatttgtgattagagattagttagtctgtgaataactgagaatgcaatttataaattgttactaattagtgaatgtgtgctaaatggtaattgctattgtttgtaggatctatgttgattgttggactctctatgttgtaatatttgcacatttcgaacttgcttgctaagtaagccgcttatggatgttggaagacattatttctatcgcattttcactaaatttgtatttgtatatcagttttatggtgcaagaaaattttatcatgtgacatgaacttgtgaactaggactacccaaggaaaaattcctgcctacgccactggatgccggtgtcaccggcgccaagcagacgagcatgacggctaataaggcaaccgcctgatgcagtgtactagtggtaggagaaactcttttaaacactcgggtggacgtccactcgtttcttgcatgtcatctaaatagttatgaaaaattttcaaaaaaattgacatgataggttaatatgtaatactccctccgtcccatattataagggatttcgagtttttgcttgcaacctttgaccactcgtcttat

SEQ ID NO: 33008 - DNA, 602 bp, Oryza sativa
ggaagatgggccgagagaaattcggcccatcgaccccgggggaggcaaaatagacttttgcggaggaatttgatttggaaagatttggattcggatttgaacttgacgatagatcggggatttgagatctgagatggcacggacactagacaacaagcaaagaaacaaatttcacaattagggtttttaagagataatttttcccgctaggcgccatgacggaacgggcgctacatagatccctgtcgagattattcgacgagatctcccagcggcttcggcttgagtccttcggctttgtagactacggtgggtgtgttgacgctatgattcgatgatcctaaacccctctgggggtgtgccttttataccgtgagttgccttagtctccaagtagaactcgtagacaatgaaaccggcacgatatagaacagtcccggtccttttcgagtaggactctggtagtctccagcccgtaaggacattttccataatgtctatatttccttatcatgtacgaaaacatattgtaggatatgaggtatgtcaatccagtataattggtaaatcatacgataagaactactccctccatattttaa

SEQ ID NO: 33009 - DNA, 508 bp, Oryza sativa
aggggagagggccgagggagaggggaagatgggccgagagaaattcggcccatcgaccccgggggaggcaaaatagacttttgcggaggaatttgatttggaaagatttggattcggatttgaacttgacgatagatcggggatttgagatctgagatggcacggacactagacaacaagcaaagaaacaaatttcacaattagggtttttaagagataatttttcccgctaggcgccatgacggaacgggcgctacatagatccctgtcgagattattcgacgagatctcccagcggcttcggcttgagtccttcggctttgtagactacggtgggtgtgttgacgctatgattcgatgatcctaaacccctctgggggtgtgccttttataccgtgagttgccttagtctccaagtagaactcgtagacaatgaaaccggcacgatatagaacagtcccggtccttttcgagtaggactctggtagtctccagcccgtaaggacat

SEQ ID NO: 33010 - DNA, 624 bp, Oryza sativa
ttcagtccaactccagggcttgggcgaacaaggatattcgttgaggtggcgccgcaagaaactttcttctgtttcttcatagccccagaccaaacaaaacagagagaaggaatgaggcctggtttagttcttaattttttctttaaacttctaacttttacatcacatcagaacttttttatacacataaacttccaactttttcatcacatcgttccaatttcaattaaactttcaattttgacttaaactaaacaatccctaaatcgtgtgcaggcaagaaagtctgacgagatgtttgcttctaaatcacgtacaccctaagagcaagttcaatagtatagcccactactaacttcaatttatctatagccaatctaatagtttattcatacaatacttacatactatactattaataaatggtcccacctgtcatacgcacactacgtcttaaagtccgtgctacagctggctacaaatctgtagcccattatccttctattttctcattatctccttaaaatatgtttgcagctggcttacagcctgctattatacctgctctaattcagttctatccgtttcatattaaagaaagaggacctgtgagactagagactg

SEQ ID NO: 33011 - DNA, 562 bp, Oryza sativa
  unsure (1)..(562): unsure at all n locations
tagggcagtcacaatgcgtcacgtaacgtagttttgaggagccaaaactgccacctagactgagaaacttcataagcaacaagctccacaatgcatgtggtctactttttccctacactgggtcccacccgttatctctcctaactttttctctcctctctctctgccgaacccagccggcgcgtcccctcctctactccgccgccggcgcccctctttctctcccaagcggcggcggcggatggagcggcggacacaagcggcggcgaatggagcggcggacacagggggcggcggcggacgacgcggcggcccaagcggttgacagagaggcggcggggcgatcccagcgccggacggagcgccggcgtattcantgatggcgcccggcggagcggcgataggacagccaaatccaccggatctggcgtcggcgtcttcctcacggagtcttcctcgcggacgacgagcggcggcgtggtcgtcctcgcggaagtcgctgccgaccggagccccgtcgccgtcctcgtcttccagccgccgcacttgctcccctgctttt

SEQ ID NO: 33012 - DNA, 594 bp, Oryza sativa
ctctagaggatccccttacaggcgatagccacggcgcgcgcttttgcgatcgattggcctgttgcatgatagctggcgaccgatcgagtagagatgagaaaattctcgagctcccaaccgggcgtgacctaatcctgtcccgcccgaacagtgctgcgattgccgctcccatctcgcgcggtcgcgttactggttcgccttttttttcgccaacccggccgcgcggtcgttgtcgcctcgtggaacctaccattcatcgatcggtggccgatggatggatcggtcattcgatcgcgcgaggcagaccgggcatctccacgaggcgtgcgaaaggaagggaggatggcggccggtgtcggtggccgtcgtaatcgctacctcctctctctcctactactgcttggttaccgctacagcaaagtgactgaatcaaaagatgcaagccattgcgtttacagtaagattccaaaattttcagttaagcttagatgctcgatcaacgtgccaatgtatatatacgcgtctccgtgtgcactgacacgtggatttgggcggagatctcatcgaccgaccggctttcgcgacgccgaaagt

SEQ ID NO: 33013 - DNA, 524 bp, Oryza sativa
ctccgtcacttcctcaacctcactaatgacaatgcacagtgcccgctggaaggccacttcatggtaaacccgcctctaaccgggcaatcacaagattaaaaaaataatatttatatgatctaaattattattattaataatagaaaaataatcttgttttgtttcaaaggagggattttccttttttttcatttaccttgagcgaagctggaccaaattgggatctaatatttttttgtccgttgactttgagcccttcttttttccctccctcctccccgcacaaattttcataatctctccttcattatatatgacaagccatcccaacaactttgcctagccactaaatctaaccatcttgattagctgaccacactaccaagggatccctccttagagtggccctattaaagagaataataataaaaaaaacaccgtacatgatgtataatgcttggtcatacctcaaagagactggtgattgtgtgaagttagagctatagcattgacacacagcgaga

SEQ ID NO: 33014 - DNA, 578 bp, Oryza sativa
aagacagggatacaacaaaacttacacaaccagctagcggtaattcgtagattcttttttaacaaatcccatccacttattctacagaagatgtgaatatcacacctgccaaaaccaagagatgaaattaaaattagtggaaagacctttgcctaagctaaaaggaaaatatcaaagtgccaatcaaataatgttggggtattggtggcaaacagttaaacagcaaggggaaggactgtgaacatctagggagctccgagcctacgacgaaacgatgccttataggatggctattgttagggctaagaacagattagaatcaaacgagaacacaaggggggtcgacgggaaggcgaggttgttaacctcgctgccccgtgccggagttgtgtaacagatcgagaatgacactgaagattgcttgctttattcatcttagaggcttacaattgtaacgaactctccaaaactaagggccactttgaatcaaaggatttatatagaaatttcgtaggtttaaaaacttataggaaattttgctatttggccctttgattcaaaggattaagctttccaaa

SEQ ID NO: 33015 - DNA, 654 bp, Oryza sativa
gtacaactccatcttttttaggaatactcactcatcggttctagtgccaaagattaggctcctgaattttagatggatttattgtgcctgcaaaaagtttggtttcttgcaagtcagccactggtactatgatcctattactgtttttctcttctatcacattctgccctgctacttgcaaaaaagaaacaaaaaaaaagagggggggaaggggtcagaaggtccttacctggagaattataagttattgtagggttttccttttttttatgttaattaaatgatattttgctgctcgatgtttataaacttgtgaagttcacagggctggccctgaggcaggtcagtaaggacgaccgatctggacccccattagttaggggctccaagcccatagatggtacctctatatgcatgataataaaggtccaatcgggccaacagtatggctaccgaaggaaatcaggatcaagggagaggacacgtcactccagtctccagacgtgctctcgtcctcgcctgttcctcttctatttcccccagacctcctcgttccttcaatcctttcctgagacaagcgttggtgttgccacccctgtctcttctgatttctttctgtgatttgtttaccactcggaccagttttgctgactt

SEQ ID NO: 33016 - DNA, 683 bp, Oryza sativa
atgggctggtatcctttccacgccgggattttccacggggattagaccccgatcccagccgggaacggcccaaccgaacaagccctaacggggaaacttaggctggctggccacagcatggacctcactcatctacagtaaaaatggtcggagacaaaaggaaatcaaccgaagctggccaatacaaacaatctattctcagggatgcatgcatggttgtgaagataactgagaatagaaggcaaaatatagaatctaacaactagcttgagttcatacggtgtgcttgaggtgaagtaaatacatgtttaaatgtcacaaataatttaagaagaatattaatggaaagaaacggcaacgtaatggagagaatacaaatcacggatagactttacaattgctcttacatgcatgaaggtatatttaaagttgaatgtgccataattgttggtgaaacggctggggctctaataatagcagcaattggagagcaaataaagacctatgattttattgcagcattttttaagactaagctatatatatgtggtctccatatttgcaggacaaatatcctataaatcattcacagtcaaagattctaaagtttgacatcagttatgataagtattaattatcagcctggaaggggaccatagtaatatccttaggatatagctaga

SEQ ID NO: 33017 - DNA, 654 bp, Oryza sativa
tctttaacaaggtaagagtggcttggctttaaaaaagctaaataaaaatgttgcttatttgtttatgcttaaacttcttagcttataaatcagtttatataagcctaaacaaagaggtgttattataatatgaaatggagggagtactatttaggagaacatttgttgaaactcttcaaactttaatgacaaatatttttttcaaatgcttagttgaaaagaggcatgcgtagatttgctttggtgaacactatcagaatattataaacctatatatattagaatttacagatttattttaatgtaaaattgatggtcaaagttttgaaagtttcacttttctaaatatcaattattcattaagagaggaagtatcggtatcttaccgctgctatgctcacctagggcgtatcggccagaatatatttgtgctcggacaatgcagatgagatttgctcgatccaagaaaaaatatctcgttggatgtaacaatgcacatcggaaacgatttagtaccgtgaggtaccagtacttcaacatacattttgctggaccagagcaaatctcggatggagatagctgttgcaactgtctgattctttacagtttgtagcatttcaaaatatattctcaaagcgtgtttaccatggattg

SEQ ID NO: 33018 - DNA, 604 bp, Oryza sativa
tgaatttcactctgcatgcataagttgcaggattaggctgattgcagaagattcggtgagttgtttgacactcgagagaacttggtttgttttgaatttcggtctgtttatttgacctgttcttgtacctgaaacttgaaagactccgagtaagaggggagtaaacgagtgataagccccgcgatttgttagcggctgtttttcagctaaccatctttcaatttctgtactggtttgtcagtgacttctgcatgtggctgtgttgtgcgactaccttggtccttcctgattagtgatggggtttagcgcatggtaatctgtttaatgtgcatgcatgccgatgatctttcatgtagactgtatattcctgtgcttagaagccatctgtggatcaaatccatgttgtcttccaagcaattagctcatctgtgatttgatttgtactttactctttgggaagaatttttttgtctttatagcttttcttgcatgaattccattccatgatgcatttggtgtttcttgattggaggcagtgtttgaatgcaagggtcaggttgcgctggtaggtatctgaggaattcaggaattgaggatgatgagt

SEQ ID NO: 33019 - DNA, 523 bp, Oryza sativa
cagattactataatccaataatctcctctagagaagctagcttttttcagattattgagtggctaaagatccactactcttagatgcctctaataatccagagaaacaaacaactcatagcttattttatgtcagcttattataatacagcttagagtaatctgatttaataatctagattacaataatcttaagctgaaacaaatatggccttaatcgataagtatatcactcgcttaaaacttcttccttctaatataatatattgatgtgtaatatttttcgcattcgaaacaaaattcagttaaaacttaaaaccctgcccctcattggttgtgtggctaattaaattggctatactcaaactcggaattcggatccggtgcagttacagttgtaactgcaagttaacactgcacacaacaccagccatccgtttttctgatcaacggtttagatgtaaagctacagtggccacgtgaacagtacccgtgctacagtgctacagttcgcgatctgagct

SEQ ID NO: 33020 - DNA, 517 bp, Oryza sativa
gccaaatactgatggcatttgcaaaaatcatccaacttgaaatcatcaggtcaatggagtcaccagggctcaaaaaccgcccccaccaaaggcccaatcgccattgcccgtgcccacagttctcattccatggtgtccaaaggggagagagcccccctggggcttgatccatggtagaagctgataggattcagaaggaatctttggaagtggggagcaagctgaaatgcgatgtgctcatgtccactaccttggcattgtgatgtgttgcactcattatatacgatgtatgccacgagaagttcattgttccttttcttcagggcactgttacagtgtccctttcagagtttcaggatccatccatctctaagaagcagtgactggatggatgggttgttgagaagaaactagtgcatcactcttggccaggaatcgcaaatggaagcactagagaatggtaccttattaggagaagaacaaaaggaggtaaagtattacatgtcatctactcatg

SEQ ID NO: 33021 - DNA, 584 bp, Oryza sativa
tcgatctggtatcaacgagaataagtcaataccaagtatcacatgatacctcgtaagtataatcacatgatacctgataggaatcgtctaataccttgcaagtatcatttgatacgtggtagaaatcgcatgatatctaataggtatcatgtcctgatacctaaccggtatcatcccgctcgaacgggattccgttgtaaagcatccccggatgctgatgtcgccgcacttgtcggggcagcccggcagctgctgctgctgagccgacgccgctggtgtcactgccgccgcgcagacgaggaagacggttaaggcaagcacctgcagatgcagggcacgtcatttctgtcatgatagctaaaactattgtctcgttgctctgtttgcttaaatggccgcctgatttccatataaatagattatagattttactccctccgtattttaatgtatgacgccggtgattttttaacaaatgtttgacctttcgtcttattaaaaaaattatataattatcatttattttatggcgacttgatttatcatcaaatattctttaagcatgacataagtatttttgtatt

SEQ ID NO: 33022 - DNA, 526 bp, Oryza sativa
agattcaaaggtggagtagtattattttaagacaaggtgctactttatttacttatgtcctgcaggagttggtgtgataatttgatcaaggaaatgaatagcgtgggttcgatgatgaatgtgaatgaaagagtcaaatattatgggggtttactacggaattaggtacaagctactccgtagattgtaatcatctgaaagagaacgttccgttctagcactgatttttctcaaggtgcctcatactgtacctaatttttatatgatcctgtctgaatgtgcttgttatcttgcacttctctgcgtaagatgagatgtttatctattctagtattctactatatccaacttaagatatccgcatattcgaggaagtaattatttttcttatatgcattgctagtctaaacaatcatgtgttgtacatgtgtgaaaactgaagctttttgtgtctgtgaagaatacttccatagtaatcaattatttcctactatgtaatatactagtagttcaaaactatccacat

SEQ ID NO: 33023 - DNA, 599 bp, Oryza sativa
tatgaacctatcaaaaagtaggagataagaagtgatacatatcgctttatctccatgaatttcattcttgtcatgattaaggtccatcaccaaagaatgcatatctaccacatctcattatcgggaaataaccttgttgaaaacttatgtaaaagagaggttaatcccataaacatcggtttatcatctatcaccaaagtaacaattacacaaattgtttaatccaagatctttcaatcttttctctcttctgtgatagataataatccgatataaacaatacaaagagatgagatgaaagataatttcaaatcaaggtagagatcttataatgaacaaaatatagaataagctccccctcaagatgtgcatacatatggatatgaaggaatgcatatgcacataatcaatcaagatcaatgagggagctcacactatattttggatccacaagagagaccaagttagaatatgtgaagtttaatacatacctcccatcatttttacttttatatccaaataatactagtcaaagaaagactcataaaaacgttagtctcatataattagatttgtcattaatcaccgaaaccaaatgg

SEQ ID NO: 33024 - DNA, 562 bp, Oryza sativa
ttcattgtgcttttattaagatgcactctgacatattttttcaggtatataccagtgctgctaatctttttatcatgaagaataagtttgacaggacatcacgcattgggcctaaggtatttttcagtccttgtttggatggtcagggatccgtggccatcacggcccatccaaaatatggactttgtttttgtgatttattctggcaatagatatatcctcgaaatactcctatatgggttggtctttaattgacctatcatcctaactttggtggaatatttttaggacattattttttttccatgttattctacctgaggctggccactggcatgtttatttattaaatttcttcagaaattatattgaagtcataatattatatgtgtaacttccattaatgatagtgttctagtgtcacaacacttcagccggctttgtttctctgtatcattacagttctcttgcatcccgacgccctaggatattggatacacagaaagtacttattaattactatgctatgatcctgttccaggtaattgtcagtgagtacgct

SEQ ID NO: 33025 - DNA, 1193 bp, Oryza sativa
gccgcccgccgctccacttgtgcccgtgcgtcgtgacgatgatgatgagagagagaggggaagatgggaagatgaggtcttacaggtgggccccaccattttaaaaaaagaaaatgctgattggatttcaacctcagcgccacgtgtatgccacgaaagattcataccgcttcagattgagtgaggggggtaatttgtccggttttaatagtttgaggtttaatatgtctggttttgtggtttgaggaggtattcggacgatcgcgatagtttacaggtaattcgtaccttttccgagattgaatgattttgtcaaataaacgtgaactggttaaataggcgagcacagtcagctaagacagcaagtctgggtggtgtagttggttatcacgttagtctcacacactaaaggtccccagttcgaacctgggctcagacacaaacatgttttttccattttttttcaacaatatgaatatttttcttaataacaacagcataattacatgcaaaaaatatttctccataacaataaccatttttttcaacaatttgaatatttttcttaataacaacaacataattacatgcaaaaaatatttctccataacaataacataaaaactgtaaccacatgcacatgattttttttttcaaaaattcgaatatttctcaataacaacagcataattacatgcaaaaaatatttctccataacaataacataaacacttgataaccacatgcacatgattttttttttcaaaaattcgaatatttctcaataacaacatcatacttacatgcaaaaaatatttctccataacaataacataaacacatgcacatgcacatgcacatgcacatgatctttcttttattttaaaaaattcaaatatttctcaataacaacagcataaccacatgcacatgatctttttttttaaaaaaaataaccctccatatcatcgagcaactttaacagcataaccttttctttttcaaatatttcctccataccaacagcataaccacatccacatgatatattttttttcaaaaaaaaaatcttcatatcatcaagcagcagtataagctgcaaaaccatatgcacatgaagtcaaatatttcctatacgacctatatagcatcttagcagcacaaccatttgcagtaatgcagatgatctcatt

SEQ ID NO: 33026 - DNA, 629 bp, Oryza sativa
ttcctgcagcccgtctatttgtgcatagagtctatttcaagaagaagaaccggaggaggaagaggtagaagcatgagagggccgacttgttccacgacgttatcgcgcccacgctgcagccgatcacgcacgtggagaggacctgggcggctacggcgtgtgcggagaagagaacaccaaccggctgcgcgtgagggaaggagccgcctgccgtggcgcgcgtagacaaaggagctcgccgaccactactccgccggcaaatagagaacgggagaggtgaggaaaaaaaggatgagatgttttttttttcattttgctcttactgatatgtgggtcccataagagccacgtaggataaaaccgcttgaaaaccattgaaggagtttatttgcaccggttttcaaagataagggagatgttatacccggctttacgattaagggagacgattcaacaaagggtaagagatgagggaggcaaaataggcttattccatgacgaatgcttctctccccgtagcagcccaggtgcacatgggcccagcaaccgcagccgcggaggcagcactcgcccgccgcgccgccgacccgctgcccgcgctccgccgccgcgacgcgctcccgctcccg

SEQ ID NO: 33027 - DNA, 510 bp, Oryza sativa
ttcctgcagcccccgaacataagtgtcggatgattataagatccagtactaatgtcttcttatcattgccgggtgaagcatatgtataactcaaacttttttttttcaaaaaaccaccatcggtgttgggttttatcaaccgacactgatgaggaggcactgatgtgttgtcctgtgatagtgaaattatctgtggattggcctgcatccatccatccacatgtgcgtacttgtactagtataatttttattacacataagatgcgcacactactactatacacatactccctccttttcaaaatataaacatttttagaatagtgacaagttaaaccttttaacttcgactattaataatagcaaaaagataaaaaagatcaatcatgtaaaattgatgttactaagtttatcattaaataaattatcctaatatgtaactcttttttattttaaatatattactttcatagatattattggtcaaagacctgacctccccacctctgc

SEQ ID NO: 33028 - DNA, 650 bp, Oryza sativa
acctctgattcagatcagttacagacttgcagtgagttgattctacagaaagaggacaagcaacttttaaactagaaatggacggacggacgcctctttgccagggtccttagactgaagaattgaaatgaaggaaggtgcatagcatagcagctacacaaggagacgaatagcatcgggacgtgaaaaagaaacaaacacatgtaacatgtaacactgcaaaatcaaacaaattagcgccatgtgtccaaatggcagagctctgcagccatgcaaaatatgcaattcctcattcagaggaaagcatcctactagccccgcaaccacaacacctgtccccaacattcagagcaacctactgtgtctgtgtgcagtcagtcaattactgtacacaacaagcatctacagtagctaccaatgcagcaaccccctttcgatgaagaatcatcaaacaaacagttcatccttcaaccaggaaaaatattcagcagtcactaatgctgtagtactacgtacagatcatgtgaaacatatgtgttgtgttgcactgtggatgatggtttgatggctgaccgtgatgacctcaatatttgagtaaattagtcatcccaattaagctcccaaacctgactgcccaattatttgttttg

SEQ ID NO: 33029 - DNA, 704 bp, Oryza sativa
tatgatgatatttgtatggataaattccttctgtgctactggaaggaaatcaattcctttgcacatttcgttgagagaatagttaccgctccctctattggtcagaccgtgctcatcatgactggtcagactgcgccctacctcggccagatcatgcctcttgtggccggtctaaccatctcactaactgtcggtcagaccaagtaccaggctggttagatcgggctacctatagccgtcggtcagaccaagtacctggctggttagatcgggctacctatagccggtcagaccaacaccctggagccttttcctgattttgtatgccacaactaatggtaccgatgttaattgttatttgattttgtatgccacaactaatggtaccgatgttaattgttatttgccacctataatactgttggtcatgttattccatatacacatggtatttgcaccgataattgctataagctaaaccaaaatcatcaagaagatggattggctcaagacgcgtagattactttcaaaactctgttgcgcctttacattttaggccataaatataagaggatgatcaattaagccctaaaggctagtaataattcaatgtcatataataaatgttgatacttgtttgtgatcgttgcgaaacttgtaaagcttgactgcatgcacgcattagtcaattttataaagatgtg

SEQ ID NO: 33030 - DNA, 744 bp, Oryza sativa
cctgcagcccagaaggtccttacctggagaattataagttattgtaggggtttccttttttttatgttaaataaaatgatattttgctgctcgatgtttataaacttgggaagttcacagggctggccctgaggcaggtcagtaaggacgaccgatctggacccccattagttaggggctccaagcccatagatggtacctctatatgcatgataataaaggtccaatcgggccaacagtatggctaccgaaggaaatcaggatcaagggagaggacacgtcactccagtctccagacgtgctctcgtcctcgcctgttcctcttctatttcccccagacctcctcgttccttcaatcctttcctgagacaagcgttggtgttgccacccctgtctcttctgatttctttctgtgatttgtttaccactcggaccagttttgctgacttgcctgtaattcgttttccctcttctatagatctggttcagagctaggagacatataaaggctcagattggtgattcttactaacagtaggctgctggtatgattttcttggctataatgtaggagtatacagaactaagatacagttttggaaaggttctaaagactagtatattttgaggtgttttttcagatataaaaatctgaggtattcatgttttgttagtactatttcagattctaactaatttgcacatcaaggtactaatgtactccatattttgttagtacttgtg

SEQ ID NO: 33031 - DNA, 585 bp, Oryza sativa
cgatttgcgggagattttgattgcggcggatcatttttgaggaggagaaggcggtggctttgggcggatttcgcttaggtagggttttggtggattgggcggttttggggggaagttttaagcgatcgtgggcttgattagggttgtgcattcctgtagtcgaattgtttgattgttgtggagttggctttgccgttccttgtcgaaggcgatgcttgcgtgatggcacactcagttcatgttgtgacaattcttccttctttcaaaattttggcccttggattaatagttaatctttcatttgtgattttctttgaatagggtgctgcattttgatcaatacacttagcctaggaatgcattagtgtttacttccttaaatagttttatgtatcagtttattgcacatcactgtgcctggtttaggcaaatattgttcttgatgtaaaaaagtgttttttttaaaaaaatatttttaggtgttatttgcaacccttgtatgcaccaagttgaaattgtatttcctatctgggctattgcagtgccccttgaagaattaaaccacagttactgctgcaaattggg

SEQ ID NO: 33032 - DNA, 684 bp, Oryza sativa
aggggaaaaaagggcaaaagagaaataaaagtaagagaattattggaccaacaccatggaccctcaccacataacctgcaccatccaattctctgaagacccactgtagcattattctgaacttgtacacttcatttatcatcttgtcccagactccagttaattaccttcaatcaattactacctttttactagatgtgtcggcagagtagtgcatctcctatcactaacagcagacaagtttaggtgtgatatgatagcaactattgtttgtacctgagttagttagatcgatgcagagctgacttactggaataaactgcagaaacgagacttgccataatctgaatttctaactttactgtagtatgttttctgctgttcatatatacaacactgactaactgaacagtgagctgcactgactgcaaaagagattaaaatgttcagaaacatgcagtcaccgatggtgatcatttcactttaataatatgatgattaggtcgtgatactaacgaacctctctatatctccatctctctctctccttcacgtgaagcctcgcacgagtgcaaagccgacagccagcaccaccgccaaaaacgcgaggcgagttggagttggagctggatccctctcgccattgctctctctctccagcctcattctcttcccctctcgtgc

SEQ ID NO: 33033 - DNA, 618 bp, Oryza sativa
ccagtaaggaacacgccctagatatttcactaccaaagaatttctacacctcaactgttaggggcacaaaagagagttatgctcgccgggcatggaggtggagctcatactttagtaaactgcagctgggaaacagaggcaggctaaactgatggcgaagagtttgaagacggcgatggaactggaaaccagtgttttgatgcttgaaatgccaatggagataccctccctttctccaaaaaaaaaaaaaaaaaaaaaaaaaaaacctgcagctgcgacaagccactacgtacacttctccatgtcgccaactataaatccgaatctgcctaaacctagaacgaatgcaaagagcaaaaattagtactgataaatgataaatctaatcaatgagtgagtgagaaatgctggaacatttaaacacaacaagaaaatcagattctaatccaggctgggggtttattgatttattttgctactagctatgtagaattacaagaaagaacagtctcatttgactttatccatttcttttgcctccagagacactactggttgttcctcatgagtaacaaaagaacaaacggcacctttagcaccaatcaacatcattttaaa

SEQ ID NO: 33034 - DNA, 757 bp, Oryza sativa
tatcaaatatcgtgcctcggtgtcgtcatcatgtttggatctcctatgacgtttcttccgcatttggtttctgatgtgatttcggggccggttttctaacaagtggtatcagagcctgcgggagatccatggtagaggtacgagggaggtgctccatgccgcgacgactacacagggtgtccagggacggacatggacgcaaggtggagcacggcggcgatcaacggaatttgatcggtggatcgaacacttcaggcggcggtctgaaccgttcgatggctgctttcaacagggagatgactagacgtggtgctcgggtcgatggcggcggaagcgattggcgatccaatcggtgggtcggacacttcgggtgggtggcctggactttccggtgagctactctcaacaaggagacgtggggccccatgctcgggttgattgaagctggaggcgatcggcgttcttggtcggtggatcgaacactctgggcggggtggcctgagcctttcaatgagctgcgttcgacagggagatggctagacgtagcgctcgggtcgttcggtggctgggaagacggcatgcgacttgtcggcttcggctcgcgactagattgatggcgttcaatcggaagtcggagcgggtggatccaacaggctgttttggaggtgttaacgacaagtactgcatggaggattgctacttagcagcgtacatgcaatggattgctctggaaccaggacgttgctaggggtatgtg

SEQ ID NO: 33035 - DNA, 788 bp, Oryza sativa
gggggccatgagcctgtgactagcactcttgcagattcaaacaaggaaatgtcagttcgtctcatggaaaaacgaagggagatacaatcttcataccggggattgactaggctaaagatcatacaaacgatagctagatatcctccaaaaagtactcgagaccaatacagttgctactaatcagttgctaatgcacagttagatgcacgtccaagagagaagcagctcaaaataacagacgacgtggaaataatttaattcctcacagtatcataaaagttgacagagctttagtttcacctcagttgaagcaaatgcatactgatgcgacaaaactgcagctcacgacaacttatcaaagggtcatctgttaatgctgtgaataacacttatgcacacagaacaacttgtgcacaacgaataaccttttttttttaatcctgaaatcgccttcgcatccataaaactcttcacaacttgaaactacatcaaagatcattgctggaaggtctggccgcatagccgcatatccagaggacgttcccgatatccgacggatattcattctcgtttaaaaaaaatcatccatatttgcttccgtatcccatactatccgtccttcactatccgctttaaaaaatgcatccaaaaatcagaaacaatccaaacagtttacatgttggctgagaagcacaacagcaattgctagcaaacaatgcgcacatgcaaataataaacgtgggcagagaccaaataataggcgctgcaagcaccacaataattaaatt

SEQ ID NO: 33036 - DNA, 709 bp, Oryza sativa
acaccataatatcatacggagtactatgaaacaaacaagaaacgttcatcgtcgaccatccctcattttgctgctatgtatactctatgtgtgaataatcaatccaaatgcacgcaacatgtacaagagataagacataaatattgagcgcaccttcaatctagtctagctataaacagaagagtctagttgctgctggcggcggtgttggagataacctgcacagtgcccagtttactcccccattcggctgacggcggtgtcctgtcaccgtacccaaacatgttaatttaccacgtactcacattggtccaaaccacacattccaaacatgaccacctatctcaacaacacccttactatcctcgcatcattcatcatgcgagggatgtcccctcgtatactttttctttcaaatttaatgcaaatagccgtgaaaaattcttaaaataattgataacgcatagtgatatctaccagtccaccgaaaatcaagttcaaattcgacctacacattgagaaaaaaaaagacaaatttagatatgaacagtacactactattcatacgcttaatttatatttttttttatatatctcaatgtgtgagttgagtttggacttaagatttggtggagttgtataaatatgttgtatgagtgttgttaattttttccagaatttttcataaccatttagatggtttttaagc

SEQ ID NO: 33037 - DNA, 670 bp, Oryza sativa
ctgccttccttgtttatctttctcacactctgctagtgctctgctctccacgtagtagtagcactagtacaatatacaatcaaatgaacacaagacaatactcccccctgccagccagtgcccccgtgtctgtatattttctttttaaaagtctatcaagtgtactctgtgcgatctgaacactgatgctcgcacatggcccataggtgatatatactgtaggtccatccaaatctcgatccatgttttacccattattattattattattattattattattattattattattattattattattattattattattattattattattattattattattattattatatagtatattatagttgctgctacgctatactatctctttctcatatcaactaatcgctttattatcagctttgcttgctaggaatataaataaaaatctgcccctcacatttcaacagtctgtattagtccccacgctctctccgtattactctaatctcctctgccactgcacgctgccgcctccaccatctcgcccaaccatagaaaaaaaaaacataccaagccggcccccaacttgaatgtccattcctgtaatgtaacaaacccgtttgtgcacacaaaaggcctttgccatccaaagtctcagggatacctc

SEQ ID NO: 33038 - DNA, 1250 bp, Oryza sativa
ttagcgggcctttgcatgacccctgacagaattggtgtagtgccttttttttgtggagaacctctcaatttgtggaaaatgatgaaagatgagctgcagaattgagctcggttgagactttttttttcttttccgattggaatatggcctggttggttctctgttgtctacatcgtaaaatgttggtttactggcattcactgcttattttgctttgcggtgaatgaacaccgttcacttgcactgaactgaggtctgagggatcaagcaaattttccggaaaaccataaaataatttgaaaagcgtgagcaatagcttttataccgtgaaatatagagagtatttatatttcctggaagccatgaattatgtttcttctgttgcctcttcagtcttcactgcacaaatcatgaaaaatggcactaaaccatgagcttcattgcatagttgtatatcagtatatgaaagaaaaggagccttacaaactgatgaagggaaaagcgtttttcttttcaatccaacacatggctgatttgaagcatatgagattatgagacaggcttgagtctgggactgaatggatgaaagaagaaacatgcatatgtcgtggttggaggagattaataaacaaaagggtgtactagtgtaaattaagtaaggtataatgcacccgtacgtggtggaggcaatcaccagttgagttgtaaaactgcaacaagtatatataagctgctatgctatgcacactaataatttttgattgatgagatttagggcggctaagggtaataataataaaattgagttcagtagtagtagagtccaagtgaggtcctcggcaaggtggaggaacgaggaggcctgcttccagctccagctccagaattgttggcaatggagttggagtaatcatccttgtgaaactgatacctgcaggaggaagacgaagagtacctggcgctgaaattcctctcaagcaaaacttcatctgccctcctcatccccaacctgccgccattgaatgagcttccaattccactgaatgagcttcttgcgctgacgctgctgttgcaccggagcatctggccgtcgtaaccccttgcccggagctccggtggcgccgcccgtgcctcgccggcgaacgcactggcagtggcacccacactgttggtggtgctgctcttcttgtgcaggaggccccagatgctccaccccttgatccccttgttcttaggcttgctctttgcct

SEQ ID NO: 33039 - DNA, 4013 bp, Oryza sativa
tcagcgaccccgaagacaaagtgaaagtgtgcggctaacaacctggacaaggcgcctcgcaatagacgcgaagacctcggtggtagcgagcaagccctaggtgaacggagcggcggagacctcacacgacaaactcggctatagtgcaaatcggtttggatctgcggcgactccaacaacggtgctcccaaatctggtcgtcggtagactcctcttctaccccgcctccttcttgtcgctgccgctttctcctcttctccttttctccttgttcccctttccatatatatgaaagttgctttaaaaaatcatattaatccattttcaagtttgaaataattaatactcaattaatcgtacactaatggttcagctcgttttaagtttcttctccaatcctctcctctaaaacactccctttggaagtgtggaaaatttatgttgcatcaccttggctagcagttggtgtttcatggaccatccacaaaactgtatgttcttctaggattgagatcgtttgcaggtacaaacttacaattgtaattgcaacttaaggactgcatataatttcagccatccatttccatgattaacggttcatatctagcgctacagtaacagtatgatcaatgttccatgctacagtgtttttgctatggaacaaagaacaatgcaactcgtttgtctggacaatccgatttgcatcccttgatgagaactgctactgcctaagttgcaagtcacaatagcgcctgcaacttattcagattcgttcctctattgtgtgtttgagtcttagttgctaccaaacaattagacctagcgggccctatttggggccgttctaaaaaaattgaagccaaaaaagaaatcttttataagtatgcaaaatcctttacacatgtatgtatgtatgtatgcatgaacaatgtcgcctacacatgtcccaaacaagtcgtaccaagcggtactgccactatagtttacctaacaaggtcatctatctatgttatgcactatgaaaacaatgtaagatgttgacagttaaatttggtattggacccaatttaggctaaatttagatagggataagagccttcacgcaaaaagctgattggaggtgttagaatagtcggtctgatcaaatattgacctatatgtcaatagtcttatcaacagactatgagtccaactgtctatgtataatttgttctttttcatattccttttcttaaggtctaggattttctcgagttctaatacatctctaaacctaatataatatgaaaaggttttgtttacacaagattaacccctttataaagatcatgggtaattcaattgagccaaaatgaatatatcaagaatcattctagttttaccttttcttttatcctatattgtattttacctttccaacccactattctttgtcatcactagtccctgcaatattggatgatgtcctaactagcctgtcgagcctaggataaatcggcatgcgtgcatcctgatggggtctctccgaagtgtgcatgctacgaattagttgcgtgcaaacccacatgccaatgctgaagaagcacacaatgtgatgtccatgtgttagcgcggaccgccgccatctgaagtagtacattttctaaggagtatattggatgtcatttcggcctctacattatagtggttatagattttgttgaagcaaattaaggacaggtttaatatctattattaagaaaacacattgaacactgattagcgaatgtgtaataaaaggcaaatggatatagagatgggtggtgttggcttaatttcttggtgcatattgtagaagccattttagccaagctaggtggacatgggttagcttagctagcttggctttgaatcaatccgaattgtcttgcaaatatatgcttgtgcgaagctggctgcatcaacatcgatcttattctcctccttagctaccttagacaggcacccctcaactacatgcaaagggaaaggttgcaatggcaatataccatctaatctaatctaatccaatgcatgatgaatctgacggactttgatcagcgcatctaactaatgcttatggtgatatggtccaattgttactctaaatggttcaagaaaaatgaaaaaggtcccatcaatattcaggtggctgaagcgcacgcaccacttacaccatcgtgattgaactccctccagacacccaagtacccaactcattacatcgtccaatagattgaattaactaaagtattgcccatttctacgaggagaaaaactgaaaaggatgagatgattaataatgctgaggaggtcaaagtttagatcgtcgtggatatacaactgaggccctaaatgctgggagcacccacaccatatacaactgaggccctaaatgctgggagcacccacaccggtgatgcctgtgagcaccacacattccttgaggcgatgtcactgacgctcccttcctctcatcgtgtttaggggtagactctttgggtgaaagactctaggtgaaaacctagttcaaattgtacggaatagcaatgatgatatcatagatggcatgaccattttagaggcgtcgcattggaggttctattgctggtgggtgtcctttgtgttggattagcttcaatggctatgacggtggtaagatcttggcgaatgattgattcactgctcaattacccttcgacgttatcttctattttggtttgacgttagtcaccggtgatgatgtgtgagaaattcaatggacaaaatgatctacagttgatttcagtgattccgttttcgatttgcggaagacaatataacttgcaaggtattgggaaaaaacaatggttatgcatattctcaccactctatatggaaataatctttattttaagatggtactctaagtagttttttatttttacttaagttgtaattttataattcgcaatcgtttgccatgcaacttctataataattagttacaacttttttcttaagcaaaggtcaaaattaattatattatctaaagtcccattccaattaagtccccactattaatcgtgtgcacaagctcttccaaacgccaacatctaataacaaaactgtacaggtgagcactctaagaaatagctagatctatgtttactatattaattagaatgatctgaccgttaattagatagatcacactatgtagatcctattgaggatttgtgttaaataaaagggtaaataaaacatgcaactgaaaataccatcgagtctttaattttactctctcaagtcataaatatctagcatttgggataagattcgaccaaactttttaattttttgagcatcaattttatagtagtagaataagtttataaaatctaatattcagctgaatgttgagctaccactgtttcttatatttcaaaactaagcatttgagaaattattaggttgaaattttaaatgtttgagcgaatgttgtcataaaatccaaatatttatgataaaccgacggatatttatactgtgggctatgagcaagcaattttaaatgtttgagcgaatgttgtcataaaagccaaatatttatgataaaccgacgcatatttatactgtgggctatgagcaagccaacgcatagacatgcactggtataagattttgcaattgccactaaccatttaggatcggttagctcatttgtcatattcgttatatgtaaatatttgactaggatactatctttaagggaaaatgtaatttagatgctattttgtggacccttgtacagttgtactaggaacttgtcatcattatagttcctattgtgtaggccaagcgttttataggtgtggttgctgcaattgtacatatgactgacagacagggacacgatggagaatgtctacatgactagtagacggaacatggagtactcttcagtctgatgggaggaacatgccggattattgatagataaactgatataaggc

SEQ ID NO: 33040 - DNA, 508 bp, Oryza sativa
ggttcccactccccgtcgtcttccccatctccaactcaccactagaatcgtcatcacaggttgtcacctcctaaccactcatatcgttagcccccgccaacaacaccgacgcgctgtccactgccgaccttgtggctctaacaccaccgccaatgcctcgtcggtcgtccatgtccaccgtccattgttggtcctccgtcgcccacaatcatccctctatgtccttgggagacccctcttttccctcttccccaacctcccctgctacccaaccttaaccctaaatcctaatccatatgtcctttattggagttagggcattatagacgttagggtaggagaaaaggataagctcgttggagttgaagaatatagtgcacgaattttggcacggatctaacgatctaaaatctgtaaaatttaatgtctaaatttccgttgaatgatatttagcaaatctgtactccctccgtcccataatataagggattttgagtttttgtttaga

SEQ ID NO: 33041 - DNA, 556 bp, Oryza sativa
tctacttggactcttcttttctttttttttctttttatcctattaatgtgggaatttctagctctcacaacgaacgtggtgcctcctttcaaagctgttttaataatataatagattaaatcttagcaacaagatctcatatggttatattttgataaaaaatcgagcgttgtttcaccccttatagaaaaattgtttcatcatgtaattaaatgtgtttcaaagagatgcaacatttcgataatactgactgcaacatcgacaattactgcatgaaacatttagtcctaactaatgaaacattaaaaaagtcatgtgaaacataatatattcacaagaataattaatttgctaaaacattttttagactgtgggaaaaatatgtgtaacatttataaatggaatagtgaaacactaagaaatacttattgaaacaactgagtaaaactatgcgcaacattaaaaaataagttttaaaaaataatcagaatataatcgagtgaggtcttgttgtaaagatttaattgtaacgaatcaaatagtacgatcaaattat

SEQ ID NO: 33042 - DNA, 685 bp, Oryza sativa
tcctgcagccccctagctatatctaattaattaatgatcaacaagctagaatgtatatagccaccatgcaatataatggttgtgaaggagacgcagcaagcaaggcgaaggcaaaggcgggcggcatgatcgatgatgatatatcgatatatatggagacgatcgacgcacacaagatggagtgagccgtgagcgagcgtacgtacgtgcgtgcgtgaggaattatacaaggcatgcatgcgtccgtgcgtgcatacgttgccttaaaattaaaaccggccgcaagagctagctagctagatccaatccagatcgacgtgcacatgcacatgcacgcctcacctgttcatgcatgcaaatgttatatgcccaaactcgtacctaataattatctagcggagtttttttttgtttttaacaattaatactagaaaaaaatacccgcgcactgcaatggttgaagggagagtggattttaatccctcaagagatgttccctcgttatttacatgtcaatcaaatagttatgaattttttttaaaaaaatgtgaagatgtattaacatgtgatatatcactcaacaaacatgcaacttcaaattcaactttcacatctcgcagcaattttttttcgttgcgagatgtggaagttgaatttgaacttgcatgtttctggagtgatatat

SEQ ID NO: 33043 - DNA, 536 bp, Oryza sativa
actggtgtagttttgcctgcttccttgtatcaatgcaataaagtcctctgttctccatcaaattatatttaatgatcattgcttctttagataggacaagggaagaagtggctccaaaaccaagatttgcagattgttaaggatcaaagaaacattgaggaatggaagggccaagccatcagtaccacaaggtaccagtgctcctagcctatcagattaaaattctatactattattgtgctaatacaacaggattccagggtatacaattcctcagcggtactgataaaccagcacaattgttagtaaagacatggtttccaagttcatagtagaaagtcaattaccagttatcacaacaatcctcctggtagaaattctgaacatctgatcaccttctcaacatggcatgagtcgatactattgtaaacaaattaatcaatttgaatgtcggtctcgctgtttggccatccgcgtgacacaaagcggtcttgctccatcacctcatgacaccgtgcgagaccgtccacgtcgtc

SEQ ID NO: 33044 - DNA, 1470 bp, Oryza sativa
tgatgtctggtgtggcctcatctatttagtttcttgaatttttgatctccctaaagttaagtcgtaatatgttgtatatatagaattccttttccttttttgaacaatgtgataagttcttgctcgtttgtatgcctaaatgatattatgtttgaggttggtaagcttgttactggttacagattggtatcatgcatgcatatttagtatagaattattgatatgctggtcatgagtccgatgtcagtttgttgtacgtgtgtaatagactaatagtaacatttcacattgtgtgttgacaggacacctccggcacctgatggtgagcgatcctctgtgctgggcaggtcaccccggccatcccctccaggtgagctgtcaccagttaggactaacggatttcctatctttgaatattgataagttgctatgtttcctgcaggacggtctcattgtcattcacactcacgttcccgctctcctgaactccgtggccatgctagatcacggtatactagtggatcttcatgatgtgctgcagaatgaacatttttccttaacaatcttattcacattgtaggtcatgctctcctgccacaggaaggcaagataaccagtctacttccccacagagaagggagaagcaccaaacaaaatcatcaggacaggctaaagaacatgatgagaagcgcagatcctatactcctgaatataatgatcgccgggatgctgacaatggttatgatcagtaagttctgttcctgtactgctacatgtgtctggtgtaatatcgttacatataatttgaagttgagtcatagtatgttgcatatagagtcccttttattttccgaatgatgtgatgcgtccttgctcatttgtatgcctaaatgatattctgtttgaggttggttattaacttgttagttgttactggtaacagacggtgccatattcatctgtgtttgaattaagagcgattttacggtccttgaggaggtaccatgaagtaccattttttctattgtaaatttgatacctcatggtacctaggtactgtgaggtaccatgaggtaccaaaatttacactaaaattttggtatctcatggtacctcctcaagtactgtagaattgctcttgaattaatgatatgctggtcatgtctcagatgtccgtttgttgttgatgtgtaatagtaacattgcatgttgtgttgacaggacgccgccggcacctgatggtgagcgatcctgggcactgggcaggtcaccccagccatcccctccaggtgcgcagtcaggacctgtggatgggtttcctcatctttcaatattgacaagttgctatgtttcctgtaggacggtctcattttcattcacactcgcgttcccgctctcctgaactccgtggccgtgctagatctcggtatgccagtggatcttcatgatgtgctgcgtagtgcacatttt

SEQ ID NO: 33045 - DNA, 2657 bp, Oryza sativa
tgcatcatgatcaatctctacctgcaatatatctctcccaatatatgtaatgtaatgtaatgtaataatattcgaataaaatgaggtcacaaattatattataaatatggatcagccctcagatgattttttttttcgaacgactcgcacgagacggtgcaaagttttattgatagagtaggaataaaattacaagattacaatcctggagggtcataactaggaaaaaagaaaaaatataccacctcctatacatcgacagcgccaacacacacgaccaggagaaggctagcaccggaccggccaccgctaaacgtggccggccgacgctagaccaataaaggaacatagacgagatcgccctacagctaggggtgccaaaacgacgtcttcaagaagagaagcgacggaaaaccgccgctgccgtccgtcggggctcaaaggagccaggactaggctttcgcccggcaaccgcccttgttgagaggtgagacagcacgacaatgccattaggaaggggaattaaccatcgttgtcgacccggccaaattagccgggctaggttttcacccgccgatcaccacctacaaatccacggctgatgcaccgatgctccaccaccactcaacctctgccgacatgtgggacccctgacctcagatgattattaaattaataacttgctactgattgcgatatgtgaaagctttaaatttgagacggaatctagtaagcataaaagtgctttactatagtatacaagtgctttacgagaagaattaagcatatcaaactcttgcaactggcagactggctatagcaatgatgttcacaacctaaacacaaaagtcatattttggccggttgcttctaggacaataaaaatgaacacgctttgggtgaaaatattcttaagaccaaattataactatcgtaacgtgcacacattacgacaaaagaaaatttgtagaacaccctttttttttctgacatgtcctattgcgcaagacatcttaattaaattacttaccattcaagaaaactgaactttcatgtcgattgggctattgatcgaagagttgaaaaaacagctcataatgtcatctttacagggaaatcgaatttcaatcccatgcgcaaataacctgtagaagtcgaatttcaacgtgtatgtttcataagtgatatatcttatatctattatatactaaaagtccattaaacttcctacaaatgttcctaaactgtcatgtggcgctcctataaacgcttctagattgccacgtggcgctttaataaatcctagaaattctaagaaaaaacaaaacatctagccatcgattttcatttaatctggtggacccactattttaaaccattggatctttattaagaaaaaacccaaatcaatctataaaaaaaatcccacgttacccccgtggtgtccccgtggacctgtacgtatgtacgttatgtacgtacgtatcccgtgcaagtctttttctttttttttcttcttatattcttagattagatgaaaaactaaaaagtccatgttaaattaaagttgtaaaaatatatgctatttcaagtattattctaaatagcgcatctcatcaaaacatccactaaaaatattaataaattaaaattgtagattatattattgtatatctcttaagaacatagttaaattggacttatattttcaaaaaacaaaaagaatttaaattatgagcagcgttctaaaaatttactcactcccataaagggagtagccaatccgataagatttcactcccataaagggagtagccaatccgataagattttagaactcaaccttaaatttactataaaatatatagtatcaatcatatatcaatcacatatcaattaggaatagagccaaatatatcaatcatatatccctactaattcctatgtgtataagtttcatatacaaatcactatccaccaattatcaagtcatattaattacttatgaggcatccgtgcttaatgcacctaataattagatgacatctaatatgcagtgtgttatcgagtactgataatggacaatattaagtgagaaaccatcaacaaatgataggtaagtattgataccaccaagccacaacaaataatagttgactacaaatatattggaactattgggtaatagcgttctcacacacctacatacattcctaggatgccacgtgacgctctaataaattagggtaaatctaacaaaagttataagaaaaagtaaaacatctagccattgatttacacttaaactggtggataaattatttttaaccattagattagatctcttcaagtaatcaattacgactatgactaatagcattcttgcacttccaagatgccgcctaacgctctaataaattagagaacatataagaaaaaatatattaagaaaagcaaaatatgactgtttatttacacataaaccagtggatatattattttcaatcattatattatatctattcaagtaatccctcactatgtatatacccaagagatgtcataaaggaaaaaaagaagtgtgtatacgatcagccccatcaagtagttttctctttctttctttgcagctctgagattttccacaaattgtgcat

SEQ ID NO: 33046 - DNA, 633 bp, Oryza sativa
agaaggggacatgttgcagaacaaaaagagagaaataaaccctctatacaaaaaataagactgttctgacattctgtgcaaggaatttcttcatttattgtttgttaggtagcatgtaaaaattatatattatagctacacattcaatacatctacaatctctgaaaaaacttgcatatcatttttacagaaaccagttaacctttttcctttaatgtgtatgtgaggtcatttattttagatacagttgtaattattccaattgcatgcagaaaactctgctctttagaatcaggaaacatcttactcagagcatggataacaccaaaacatgattacttatgttgtctactaatacgaacatcaatcattgttaatattatgtcaatcacttcatgccatcttgcaggtcatgattcgtgtcattttgaagtggttccctgatacaccaatgagtaaagcacagaagaagaaaacttccttgttagcgcggtttctttccctggtcattcagtaaatgaaaatgaaaaatatgcttgacagatagtttgtctttatggggactacattacttggaacacgagagatgaaatgttcctccaatacttcaagatatttttgttgtgcaagtta

SEQ ID NO: 33047 - DNA, 1815 bp, Oryza sativa
cctcgtcgtccatcatatcgaacgccgacgcggccgcgatcatcgccttggcgctccccgacggcgacgacggtcctccttcaccaccaccaccaccgcctcctcctcctccgcttcggctcttgcgacgccgctgccgccgccgccgccgcctcatcacccgccgcatgacgcccgcggggagcctgacggtgacgagcagcaggatctccagcagcgccagcgggcagcagcagcacaccgccgcgcagttcgccgccgcctgccccgccgcctcccctcccccgcaccccggccgcggccgcgcctcatcctcctccacctcctcctcgccgcgctcccgcatgtgctccgatcctctccgcctcctcgccgatcggacgagagagtccacgggaacctacccgtgggtgcagtggtatttagcgagacgcgacgcgacgcgagggaggagagagagagagaggacgacggtcttacggcggttggtggcttgtggaggagagagaaagagggaggagatagatggttagaggcggcgagatggcgtggcgttggttgcttttgcagcctgcgccacggaacggaggaaaagatcaaaccgcaattttctgttactactagtacatttaatttatttaatttaagggaatttgattaaattgacaatattaatatttcctgagctggtaagttgtacttccttcgtcccaaaataaattgatctagcacgatatatgacatacgaatctaaatagaaaagtaaatgcttgtgtggatgacaaaatcatagtactataatgtatcacgtctaatattaaattgtgttattttgatatagagaggactaatgcttatgctaattaatcaaatcgtggtaataaagtcgtgtttgaatgaataaataattctcaaattgttttttcgaaacgtgagaaacaaatatttaccatctcacccaataaaaaaattgtcgtccacgtttcaaaaattatcgtccgaaaaaatctcaagcagaacaaaaggataaatatttgtttcagaataaccgcttgccaaatacccattagataaaaatacagtaaaaaatcatatggaaacggatgaaatactaactgccagctagcatctggttgccaaaaaaacgcaaccccaaaaattctctatctttctctctcttttttcctgaggcacacgccagaatgccaggttagtttacgaacgacggccgccgcgccacgccaggaagcagccaatgtgtgacgcaatagagatagagacggcggagcgcgtcgcttccgcggatgcgtcgtggagtccgactcagcactcggcagcccgagctcgacggagcgagagcgagacccagcgccgcacgcggtcttggtgggtttcccgatccgacggcacagcgcttcgctgctaagcatccacggtttctctccgtagttccctctctctctctctctctctttcttggggaacttttcttgctcctctatagtggcccagcccagtgatgtcggcgttatcgtgcgtgattgtttttttcttttgaactatcgtgcgtgattgagcttagtgtttgacatatatgacgtaattgaagcttgtctattcatttttttaattaaagttgcgtaattgatatggtcaagtgatggcgatgggttggtgacaataagcagtattaagcgtgtgtcatttggttagtgttgttaagaaatgccaactggacattattatttgaatctttgatcagatagcagtggagcaagcaacaaatacaagagacaagagcagaataagcttctg

SEQ ID NO: 33048 - DNA, 1603 bp, Oryza sativa
atttttccatacgggtcacttaagcagccgtatgggaaaatgaccctcgatttttgcagacgccactagttacggtccgcatggaaaaatgatggggcctcgtacagaaaaatcacttttgtaggagtgcatattataaaacacttttcatctctagtatagattcactaacgtacttataaattgaacatatatatgaatcacatacataaatacattcataaaactattcaaaacccaaagcgtcttagcgtggaacagagagtagcaattaaggagcgggcatgatccaacaagggtagtcctcgttggtaataaaaaaaaaacaagtactcctagtacttaatccaatatagtagagttaaattaactaaattttactttatatttaaaaaaacttactttgttttattaattaaactaaagtaggacaaatattacacagagagtcatgggtcggtccatacccatctctgatctctatgtaccacaaattagctgatatctccgcctaaatagtattatagtagtactaaaatcacacttttaggcttcctaattggctcaaatctagaagcaagctacgaagtgattataggctgtagctctcctccgtcccaaagaaaagacaaaccctggtttccgtgtccaacgtttgaccgtccatcttatttaaaaaaattatgaaaaaaaattaaaaagataagtcacgcataaagtattaatcatgttttatcatctaacaacaatgaaaatactaattataaaaaaaatttatataagacggatagttaaatgttggcacgaaaacccaaggtttgcttttttttaaagacggatggagtagtttggttcctggtgatggaacctttccattctgattctaaatcctatacttggcacggtgcttatatttgtagctaattattctttctatgacagacgatgtgcacgtcaaccagtaagacacactctttagaattggactggttgttgaagaaaaataataatacctgatacgcttatagtgattttgtgaaatctcaaaatatattgatccagctttaaaggtgttcaaaagaatagagcgtgtatgtttgcactgtgtttgggaaaaaatatctagaagcaagattacaaaaacaaaactggactagttgttgaaaaaaaaaaacctgacaaaaaaattcctccccctgttcatcccgaaacttgagcagcgaacacaatatttgaccccacgtttgccagcagtacggaggttgacggacggacaattcgtcaattgctatccctgcagaagccgttctagaacaacaagtgcagaaatcgtagtcaacaactgtactgaattgcctgtatattgtttggccaatatgttgaatccaaagcattgccacgagtttcagcgtttgctgctagtacagaaaaagacagaggcgaaacctggggggcaatctggacgaaggctcagaagtggtccaccccccaaatcgcacgcacgcacgcgcgcaatggtcaatcgaccaagcaatcgagcggagcactgcacaaaatttctcccgcttccgcttgcaaatccaatcctaagctaaagtttgat

SEQ ID NO: 33049 - DNA, 677 bp, Oryza sativa
atggattccacatacctacctaatacctattaggcgaagattaactctgggccggacccaccgtatactatgacttatactgacactgacctctgatgtggatgaacttacggatatggaaagacaaccatagttctatatggaaacgacacgagctactcggatcgtcttcatatcggatggcgtaggaatacttggacaaagggacacttatgggtataaatacaagaccctataccaggagaggggacactgaacaatttatcatgacataagatccatatacaagccatcatacgcctagacaagacgctctgtatcgagttcctagataggcatgactagtcccctacgatgcctatggctaccgtccggagagatgtagagtcgtgtctgatctatgccgatacaacgaggaaggacaccatgttgtggactgcgactaaatactacagaccgccacgtcgacaacagtgggatatgctaccccagatgatatactggtatgatcatggtgaataagagcagtaccggcttcggtcaacatgatgtagggttattacctgacaattcacgggcccgaacgtgcataaaaatactaagcgggatgtgtcttacctgactctcgtatacatctttacaacaacgatccccatactatgtaaataccggaaccg

SEQ ID NO: 33050 - DNA, 675 bp, Oryza sativa
agctcgtgcctcgtggtgtcgtgggtttgtggtctcgcacatgaaagcagcatgccgggctcagggctaacggggacatatatttatgccttttgcatattacaattttgctttgccaaaagggagaaaggcatattcgatgaaaaagaaaaggttttgaaagtatacatgtgtgtctctgttgctttatcatttacaaccctatcgattaatgaaacaatgtatacgtgcgtaccttgctaggcacgttcgaccatgaaacaatgtactggctctagctattcacatcattaagatagtgctcaaattttccctgtacactaagggcataggcaagaagaacgatagggagccatcgtttaggttcatggtcatatgatgtaaatgacagattgataaatgtgaagtggtctgtgaatgaaactcttaaatacgtgttctaagcgatctataagtgcaggctgtatccatgaactttggtgaataacctcataatcaggtactcgttcaaggttgttaattccgatcctggctgatagatattagcagtaagagaaaaaagacgaccgatatatcatgtgataccattcatgctcagacctcgttttttgtagtatatctcgtggtcgagacatctcgcatttgtctctcttctccctgttggtacatccgcat

SEQ ID NO: 33051 - DNA, 575 bp, Oryza sativa
tataattagaggaccctcctcaaaaatgtgatgttcatggagtgggtgtgcaggtggaagatctatcaccaccacattgccttcttttagcttgacaagctaaagaatatgttcatcgacaaacctgatgatgcaatcgagctgctcttgccatctatcattatctccatctacctcatcaagcaggcttatcaagaagtgactatgatcacataaagccttccaaaagaattttcaaaatttcacttccggacagaactgtgccttccccaacctaatctcacactgtctagattcatgtactctacagcatgcacatgatggacgatcgatataagacatgaacacatcctatgcatgctctcccaaccaactgcgtataacaagctgtataaacatgctatccacatcaatactgatcctcacaaactgaaccacatgatgacaatgatgattaactcgctagcatctaaatatgcgtagtgcatgcctgcctatctaaacagacgttggtatctccatacttgcctccgtatctggagaagatatgtgaggctccaattttctacatattg

SEQ ID NO: 33052 - DNA, 663 bp, Oryza sativa
tatgtgtgagggcaacgggggaccactgttttgtttggtacgtacacacactacagagctgctaatgcaatccagatgaggaatcagggtatatgaagacacatacatcaagctctgagcttctttaagaaacggacaccatgaccaccacatgcccatccaatctacatcctggggggctcctccaatatcgaacatcaggacaacccatgtgaatggacactcgtggtagaaccatagctaggacacgatcacaaacaagccatgtcaatccgagtcaactgactacatcagcatgctcatgtatggctagtgtgacaagtcagatagagggcacccacaaagccaccactgaccactcgctaagccaagcaaagagactgtgaccactgataccaacgatgaattcacaattcggaaagaaattaatggcgctgattacattaaccggctgcatagcatgtgcccacacccgccgcgcgcgtgcgggggtcaagccgacgcgtgcccacacgggtgcccaggtcgaactctcctccaacgaccgatcccacccacggaacgccacaattgccctacgtgaaatgtaccgactgatgcagccactacaaccccagcttataactataactacgaagtgtgaaaaaaaatggagacgcgaat

SEQ ID NO: 33053 - DNA, 702 bp, Oryza sativa
cgaggcaatttcattgaattcatgcagtgctttatggagctacacaaagtgcttttacctgcaggatcattaaaaagcaagcaaaataaatcaacggttcgtatgctagagctgtggtaaaggtacaacattatatagcaccaagcaagaaatcaactaaatttaggtcgacagaagggtaggtttcatttgaatgccatccagactccagcagaacaaattgaaatagtttaaactttaaacagcaaattgacaagttaaaacaaagaagagctgaacacgacaaaactatagatatagttgccttatttctatctatagattacaaagagtagtgaacagtggacaacgccaagggtacctgataattcttgaccacagagaaaaacttggcaacaagtaggtgcacttagtggcaaatcgagcaaatcatttggtacaaccgaactcccattctgaccaagtttctcataaatttctctggtcttaccagcaacatgcagaggcgtttcatgcaggtcaatttcttcaatccaaggattgacctgcaacatgcccataatggtctgcaagactagttccccctcgactcccctgcaacctttcaatgataggtttcggagagtagtattcctttctaagcttgtaaagattctgacaacatcatttggcctcaagcttacatcatcgcatatggccaac

SEQ ID NO: 33054 - DNA, 1632 bp, Oryza sativa
gaatgcagaaacccaaccaaatcgctgccgccacaaaagcaattccatccttatgaacaatgcagccctagcaattcagtccacgggaaagggaaaatgcaagctgcaaggactgtgctttccagatggccgggtatcaacaggaggaggaggaggaggaggaggaggaggaggaaacataccacgggtggtggagggaaagggagagggacgccatggacgcctcgccgtcgcaggaggagccgcccccgctcgatcgctggctcgcttgtgcctgtgccgttttcttatcttgcgttatcctgtccaccgaggaagctagacgaagcccaataaggaacgggctggatccgtcaaggcgtcgacgatggccgggcctacaaaaaaagcccgcgtacaaactgtgcatttctctgggccctgacaaaattttgtatttttaaacagaaattttggaaccacctatacatttgttgacaaattttcttctaaaaatttgacagatataattatagtacaattatagtgtaattacactgtaacttgtatgtaattacactgtaacttgtatgtaattacactgtaacttgcatgtaactacagtgtaatttgtatataagtttcacgtaattttgaatcgttagatctattaaaaaatttgttctagtgaggaagaaaaaaatcacatcacacacatatgtgaaagaatttgttatggagagatttttgaaagttacatacatgttacattataattacagtgtaattacactacgattgtactgtaattacatctgtcaaatttttggtgaaaaatttgttgacaaatatatagcaaatttgagaaattttatattttaccactaataacaatcaacgtcgttctatgaattgttgcagagagtgcgagttctaagcaagcatttttcttccgtttttactattgtcgttagtctcacctctaacaccttaaaaacactattttgttgacacccctatttcatattacaggtgggtcactaaaccatctgtaaaaaatgattgttcacaaacgatatcctaagggaaatcatttgcgaaaattagtattaaaagaggtggttactacttgtgaaaaatatcatcgtgtgatcaattagctaagtaacaaaataaatttgcatctccccctcctctcactccatcaaccgcccgaactgcggatccaacagaggcaggttatggaagcagcggaacatggaggcagcatgcctcatgagctatggatccagcatcggtgggccttgagacagtagcggacctgatcacctgacaccggcagtcctaaggaagaactacatgcgcttgaactcgccgaggaggtcgttcgaggatgagaacagggggtggatacagcgtaggggcggcggggtctcgagccctcactactaacggtgaagactatgagagccctcgtgaagactctactaaaattttttaccatatgtagatgggaagagtactataactctatttagtttgcttagaccccactgctatttctttctggatccgtcactagatgagaccactgcttggcgacggcaacggctacatccgtcgatgtcgatggggtgactgtatatgccacct

SEQ ID NO: 33055 - DNA, 682 bp, Oryza sativa
tacgatatcaatgttcaatggtatgtacactcctgattctagtcgcagcttcatttatcatgttgattctgaccattgcaacgaattcctttgttgatcttcttcatctttgcagcagcgactaatcaatatcgagagcttgggagagatcctggcatggcagcggaggatcgagcgatttcaatcgtcgttgatccaggagcagatggaaggggtggttttctatcttcgatcgtgccaaaggtaaaaggcactctcgttccgccacacctttcctgtctctttccccatcgattcctacatttgttcagcaatgaaaatccaacgaaaaaggggctcaaccgctcaattgcgtggatgacgttattgagatttttcagttgcaattgacccccttatactgtttgctgtccatgtctagggtgtgtttagttctaaaaaaaaattggaagtttgaagaaagttaggagtttggaaaaaaaagttgaaaatttatgtgtgtaggaaattttttgatgtgatatgatgtaatggaaagttgggaattgggggaaactaaacacggccggttagctttgcacgttgctgcacggtgcagtctttaatttcttgaaaatgaagggcccacatctcaaaaaaaaaatgcccatgctcagggtgtgtttagcaaatgtgacattgg

SEQ ID NO: 33056 - DNA, 627 bp, Oryza sativa
acctcgtagttatagttattagtggtcgttttagtggttggataactcggtacatctcgcgtaggggacttgtggccgtccatcagtgggatcatacggtgcaggacagtgccaattgagcaccaggcgggcacgagtcggcttaaccaccgcacgcgccaggcgtgtgtgggcacatgtttcgcagccagcttaatctaatcagcgcttttaatttctttccacattgagaattcatccttggtctcagtggaaaaagatgcttcgcttggcaaagcgagtggtcattggcgtctctgtgggtgccctctatgtcaccacccacaatagtagtacatgagcatgcgcattagtcagcagacttaaattaacattggttatttgtgatcttgtcctgagtatgctactaccataagtgtccaaacacatggcttgtccagaataataatacttgtagaaaaaaccgtgcatggagcttcgatagcaatttggtggtcatggtgtccgtctaattaaaaaagatcacagcgtgatggatgtgttttcacatagggtcattcatcatccgcactgcattggcatatttgtaggttggatcggccagaaaaagcagtgctcccccgttgc

SEQ ID NO: 33057 - DNA, 682 bp, Oryza sativa
ttcgttatcactgtgagagatattgcatgcacactactgcgtaaatgacgtgttcaaacattggactctcttcaaccgcaagctgatcccattattctcatgggccgcatggatcggcagctgcagctgggacccatgcacaggtgcaagccacattatggctgtgtttacattcatagacaggatccaaacttcagtccttacacatgacattgacctgtcatacacagataactctacagtcatatcatctctaatatcaatcaaaattaaaactttacgctgaaacacatcctataactaggatatatacgtactgcacgagagaacgtgctggtgcacgagacttgcggattgtgggctcacggtgtgcatggaccaagtttccaaccgcactctgcctgcttcgcccatccgtgcgacgaccccccaactctgaaaggctgctccgacatctatgaactatgattcgcacattaggttcgacattataatcacctcattaattactgtcacgcgtatactgtcattctccctacttgacccattatttgtccccggatcgacgtcacaaaacaaggctgagcatgactacgcaccgatagaatgactatcatcggatgcgtgagtgactcatgcagccgtgtctgtgcacaaagcgagatgagaagaccaaactcac

SEQ ID NO: 33058 - DNA, 1429 bp, Oryza sativa
agtttcggccactctcaaaaaatagtgcacgccgtcaataaactctttggaccgccggtcagcgtacatccattgccgatccatctacatgagtcgaaaaaaaatcgtacgcaaataattattcttacaataatgacagtcatacaataattataagataattacaaactgtttcaacagtcatacaataatgacatatctttattcatacaaaaatcataaaatattacaccaaataattcttatttactatttctaaagttttaaactaattttaatgtgttttacttcttttaattttcattttagtttgttttctagtattcaagattaactttcactataattttccttctcaactattttataaaaccttctttagcaaatcaactaaatttctatatattctttcttccccacacaaattttttttctcatcaacttacaattaaattttggagacaaaaaagtgtgcaaaacatagctgcaaatgtaatatgacaaaaaaaaacattggaggatgaagttgcaaaccttttaggcacctccgatttgtatgtaatcaccaaaataaattcactagaaattttggcatgacctcacctcttttttgaagaaattttgaagcttgctcgggcagctggaggaggaagaagacatatatataggggtgggactttagtcccgattggtgttaccaaccggggctaaagatccgggatcttaccaactgggactaaaagttacgatctttagtcctggttggtgttactaaccgggactaaagatcccgaggggcctgataggccctgacagcatttgaaccgggactaaagatgttaccaaccgggactaaagatcaaatatgcccgttacctttttgaaccgggactaaagatcatctttagccccggtttttattgcatccgggactattgtggaattcggcctaccgatgaaagatgatttctccaccagtgattgtcccagttgttagtagccactgcttgctctgtaagcaagactgtaaatcacagtggcctccacgatcacgttcgttacatgcaagccactcgtttgggcgtattaatttagcaacgcgaaagtggagtagagtagcgatagctttcgatggataacggtggttgtcgcacactaaccacgcctcgcaatggcccggctccccggtgcggggaggcacgtggggatcgcgaggcgcgcccgccgccgccacatgcccgcgcacgctgccgcacgggccccgcgcgcgccacctcgtcaccgccgtggccgcgtccacgcgggctgcacggcgagcgagcgcgattagtggggaaatcatgaggctaattttttagcgcgcatatgctgcacttttgcttcatcgagtgctcctctgtggacagtggacacatcacacatcaactgt

SEQ ID NO: 33059 - DNA, 3132 bp, Oryza sativa
ttttttattgtgtgcaacgatgcaaagtatggcctcataagatccttcgatacatcgcgagcaacgatgcagcgtggcttagttgttttgtgtcttttggcttcaaaccatctttttgaagagaaaaagggtctcaaccttggatctgcatatgaatttagctgatatgattttttggggcaagttttgttttctgtgttgtttcatcattgatgcagcagtaccattcatttgatatattgcccttaatggttccgatgttgaccacttataaaaggtatcatgcatctatctatctatacttctaaagctggctggtcatccagccagctgattggaccacgtggcacagctatatttgcagataaatagatggattagcactgtaaaaaaaaagtaaaaaaaaatagcgttcaattcagtccctctggatcaatctaggtggctaccgaaacaacagccgctcctccgtccctccgtagctgctgggctgcacagcccagtgatgcacgattaggcttggtagtttggacgaatggttcccctccgtccctcacagcctcacgtgtaggatttgtggcacaagtttgtgctgctcctctgctaatcgcatgagtaggagctagcataaatagaagaaaataaaaaaaaagagaaaattagaaagtgagaaagaaataaataaagaagtaaaaaatactactctccgtgtttttatagataacgctattcacttttaaatatcacatttgatcatttatctatctactactacttaaaaaaataaataagaggtgcttccatcgtccgtcaaaaaaaccgggtgaaaaaaaaccgggcagaaaaaaccaagtttgtccgataaaaaaaccggacgaaaaaaaaagtccgatccaaaaaaaagtgaaaaaaaaaccgggcgaaaaaaacacccgtccctggcaaaaaaacacccgatcccttaaaaagggaaaaaaaagtccgagagacaaaccgtttaatgaataaaaaaagcgaaaaaaaaagagtccgattccctggagaaaaaaaatctgatttccctggaagagatccgatctgtattggattggagaaaagaaaaaaaacacttctctaggtgcttctgtcgtccgtcaaaaaacgggagaaaaaaaccgagcgaaaaaaaaagaaaagtccgataaaaaaacctggcgaaaaaaaaccgggcggaaaaaaaacaaatatgtccgacaaaaaaaaaggaaaaaaaaggaaaaaataccgaaacgaatccgactacatcgacgcggtaaaaagagtttaaaaaaataaaaagaaaactgtcctattccaaagaaaaatgaattatatgtatcgtggagaaaaaaaaaaaagaagaaaagtccgataaaaaaacctgggcggaaaaaaaccgggtggaaaaaaaacaaatctgtccgacaaaaaagaaagcaaaaaaaggaaaaaaatcgaaacgaatccgactacatcgacgcggtaaaaagagtttaaaaaaataaaaagaaaactgtcctattccaaagaaaaaggaattatatatatcgtggtaaaaaaatcgaccgggcgaaaaaagaaaaaaatagtccgatccgaaaaaaacaggagaaaaaaaatgggcaaaaaaaaaatttgtccgataaaagaaaaggaaaaagctgaaaagaatctgactccatcgacgcggtaaaaaaaggcgaaaaaaaactttccgataaagaaaaaggaattatatgtgacgcggtaaaaaaaaataaaaaaaccaggcgaaaaaaaagataaaagtccgataaaaaaacggggcgaaaaaaaaaacaaatctgtcctatccaaaaaaagccaaaaaggggaaaaatcaaaacgaatccgactccgtcgacgtggtgaaaacagggcgaaaaaattccaaagtaaagggagaaaaaaaatcaaaacgaatccgactccgtcgacgcggtaaaaaaagggtgaaaaaaatccaaagtaaaaggaattatatgtgacgcggtaaaaaaaatcgatcgggcgaaataaaccgggcaaaaaaaatctgtccgatccaaaaaaaaggggaaaaaatcaaaacgattccgactccattgacgcgataaaaaagggcgaaaaaattgtctgtttctaaagaaaaaggaattatacgtgatgcggtaaaaaaaatcgaatcctattatatctagaaaggtttgacactatgtgaaagtggtgaaaaaaacccttcgtaaaagaaatgcacgagaaaaaaaattaaaaggacggaaaaaagcgcggaggaaaaaagtcaaatttatattcgtcgttttttagtccatttatatatcttctttatctctaatctaatctaatctaactataaaaagagaagtttctacagtatattaaaaaaggaaaaaatgcgcgagaaaataaaaacggtttaaaaaaacacgtgagggaaaaatgcagaaaaaagcacaaaagaaaacgcgctagaaaataaagtttcgtagttctaattttctgattgttatcgacatggttatgcatgaaaaacgtatattatcattacgttttttcacccgttgcaacgcacgggcatatttgctagtcttattaaaaatatccaataggtataagtgatatttgaagtatctttaataataataaatgatacttgcatagctttcttaataagacaaacgtccaaacgttatattcaaaagtcaacactatcatcgtaaaaaaatacatgaagggtctcatctttttgcatatgcttatgtatatcagctaaaattttaatttttcaactttaagtttggagttgattttgggtgtttttcatggtagtttatttttgagtaaatttcacaaaactacatgtactttgctcaaattatcacaaaactacctatttaacgtgatgtatcacagaactacagatttaacaataaatttatcatagaactacaggtttaaggctaagtatcacaaaattacagatttaataataaaattatcacaaaactacagattttgaggcttaaatccttagcactaatgttatgttgacttataattgatcaattaatgtgattaaattgtcattaaacctgt

SEQ ID NO: 33060 - DNA, 625 bp, Oryza sativa
aaatttcaggtggacccaattaattattttatcttttatacaataatactatgttttttggcacatctttttttttaataaagaaagtgcataatgtgatcttaaaatggtcactgcatttggctttaatttgatgataaaaagatgagcgtatggctggcgttttcctaatccaggctattgtgattagaagcttttttttctactttcaggtccatttatgccgacctttgttttgttcatcaaaaaattaaacatcgccctgccaatccttttccataaagtgatttatcatcgcacatatgtaggatctaagtggagagaagtgctactttataagagcagatgatgatgtataaaatgtatacatttcattatctgaaaaaaaatgtgtatatttgcaaccaaagtcctaagtgggcagtgcacaagttggtgtgctgctaggtgatccctattgttcctgcagctcatggacattgacatgggaaagaaagaattagtgggcaaaaataggtcactatcatatagatttatgaattccaaatccctaagatcctaaaatgatctgctgatttgattttaatgccagagaacagggcattgaatattaagtacttttact

SEQ ID NO: 33061 - DNA, 534 bp, Oryza sativa
gaaaaatcaaaaaaattgttgttaatgctctcaatgccgaccccttacaattgtgtggcgtggttgcagaaaaagacagttataattttggtcctttttcccctaacccgagaaatatgggctggatttcggccctataacaaaaactcatgccatgtttgggccttttttcttggttttagtaccacctcggtaacggaaggcggaggagggcgcttcgctatgtatataagcagggggggttgttcgaaacttctaacggccttttggctaaaatccagggtttgtttggtaaagcttaaactttttaatttaggcacaggagtttagtctggggtacaactgtttaaatccagccccccttttttaggttattttgtgagataactttggtgccatttttggaaacgcttcaaatttgtttagtttttgcagcgtttatcttggtgattcggctcatgagggaattcatagttgcatgtatttcgccactcccacaaatagaaaataaagcgcacatttccccgaaaagtg

SEQ ID NO: 33062 - DNA, 535 bp, Oryza sativa
accaacagtttcctgagcagcatgccagtatcttaacctcgccgccgatgggttaaaaaactaaaaaagagtttggcaattttctctgtctagtccgtcaatatgcgttaatatgtcagttggattcgttattgtctctagtatttacctataatattctttttctctctctctcttttgtttagagttttggttttggccttcatgatatgcgactagagttcttggtgtgcttagatgtacatagtctttctggacataatggatattatattagcctattggatgagttcattaacgatgtcttaaggtgttacttctatttgttaattctttttaacaatggcatcacaaaggtttcagtatgttcattgttggtcagttgaccaaagcaaatactatcaaggtgcagatggatggatggattcctttgttgcgtatcttgttgctattcaagttgatctttgtgaatcagtgattcagtgtattgaaaggtgatctttgtgatcaggggaggaattgtcattacttaata

SEQ ID NO: 33063 - DNA, 961 bp, Oryza sativa
gaagcacatgtgcgaaaccgtttcctcagccaaattgcagaggtcacagttgggggcagacacgatgtttttcttatgaaggctctttttcgttggaagccgatctttagcaagaagccaggcaaagactgaaccttgagaggtgctttgttgtcccagataaacttctaattcgggcagagaggtgaaccactgcattgggcaagatagagctgacttgtcttcggaatgtcactggtattcttcgcccaactactgcagctgtggcacaaccacctcgcagcacagtagtttgtgtcatcgcagcagctatgctggctgcgttgcagcagctgcaatatgcagcggaacactgcctatgatagagagcacaacgtccccccctttacccccagaccctagtagtaaaggtttcccgagaactctgcaaggataatcttctagttcgtaaaagaaaattgactctttttaacgtgctccaacataataaaatcctagccgatgattgttttgtgatttattttccaattaaaaatattttttctccttccacaaatgcatttatctaacaaggaaagtaataattacccttagtaaaatatgcatgtatatatatgcgtgcatgcatggatataaccaatggttgagaccatttaattttaaaaaaaatctgttttttgtttttttaaataatgaaaatggattacatcttcgtcccgtgccagtctcataaatctttttttttgtttttttaatatcccaaataaacataatgtatgccgtatgatttgcactagaaaattttaagttttaaatgactgcaattctgagtcgtgaattgttgctatgtaaaataatattgaaagaacatataatacaaaaggcataaatttcttttgataaatttgtcaaccggggatacccatagaccggacaaatggagtattggagtacgttggta

SEQ ID NO: 33064 - DNA, 604 bp, Oryza sativa
agtactcagcaagctatgggaaataagtgtttaatacaggcttcaaagaaaggctgttgtttttgcaattgattttatttgaactcttttctaaaaacaactaagtgagtgcttctcaaacgacacgggtgagacagtgcgtctcgtccggtcggagtatgtgcaatgtatcagtctttagaattgaaacaaggttggcacccggccaacagcttttcaaacggccacccgggccaacaactttcaaacggccacccgggcctagctgatcccatcagctgcagatttttcaaacatcgaacccctttccacaacagcaatttcacaagcagtagtcaaacaaaactacgctaggaatcacttcacatccgcccatgaccgtgggcacgactgttagaacagtttgttaccctctgcagagggggtacactttacccacacgacattactaacctggatcacccagcccgtggggatcggccacgtcgggagacctcaaagctttcatgacaaggcatttccaaagccgacacaggtttaccatatgccgacgagaggggtctcagcccaacaacaggttaggtcccagaccatactgtgccag

SEQ ID NO: 33065 - DNA, 783 bp, Oryza sativa
catttctctaactagaatggtttttttatttttgaataatatgtccacaacgaataaaagattacgtgagaatatatgtactcctttaaaagactctaatggtgatggcagtaaatttgctacccaactgttcatattggttttgcagtttttacaaattgtcccctgatatttattaatattgtgaaatgatccactatttagttcaaacaaatggataacatataatcaaatgagcaaacaagtgatattaagatatttgataaaaaaaatattttgatatggcatattatgattcttctgttaatagcaaaatatgggtattttgctagtaagcatgaaatgaggaaagagaagaaaaggacatatttatacacactatataagcgagaaatgcgtagttttaaaaaagcatatcaaaatagtaatgtttgtattagcgcagtattaatgtgacgtggatgattaaaaaatatttgactaatagtatgcaactatttagcatataaataacgatagagcgttctcttgaaagtttaacaacagctctcgtcattagatgaaagatctttcttatcttgacttcacatgaagagagcggacagttcacaaacgccctaccacatgcgtattgggacatcccataaaaaatcaacctagtactgaatatgacatatcctactactataaatctgaatatatctcgatctagatttattatattagaatgtgtcacatccagtcctatatgccattttatggaatggaggttgttcgcattgg

SEQ ID NO: 33066 - DNA, 1016 bp, Oryza sativa
aagataaagccaaacaatttttgtttcaccaaaaagggagtggagtagagctgtatcacaaaatgaactagaggagctgtatcacaaaataaactagaaataaactaaacaattttaagctctaccaaaaatgggagcagagttatctcacaaaataaactaaaaaagtggagctggatttaaacagctctaccccagactcaactcctgtacctaaatttagaagttttagctctaccaaacaaacccttgattttagccaaaaggccgagagttgttttgaacaagcccacctgcttatatacatagcgaagcgccctcctccgccttccgttaccgaggtggtactaaaaccaagaaaaaaggcgcaaacatggcatgagtttttgttttagggccgaaatccaagccatatttctcgtgttagtggaaaaaggaccaaaattataactgtctctatctgtcaccacggcacacgatggtaatgggtcggcattgtgagcattaacaacaattcttttgatttttcttttgcctatccaaggtgtttgttagttgcacaaccttaagctctgtgtttggtggatttgatgaaccattcaatactcatagttgcatatcattgttctctatagcctatgcagtttcctgcttttcattactgcccacatggacagtcatcttcctggcaacttcacgaccgaatggtcgacgcgtctcctcctcctcctctcgccctatcgccgggtgccactctggcccaggcgcccaccccctcctccaccgaccagtccggccctagtgtcctcccccgctagcacaggtttcatcctcggctatcctccctttctagagagagtcagcctcggctccctctctggcagctactcggatggggatctgccagatctgcttcgccctcaattcctcctggcaaaactggtcagtgaggcagcggatgcgcgtccccctggtgccagccaagatccagcaggttcccccctgggtaccgagct

SEQ ID NO: 33067 - DNA, 621 bp, Oryza sativa
atagttgacagagttcctacccttttgccacaggaacctgcaagcagccaaggtagcacacattccagtcagttatgacagtacatacacatgaattcaagatgtaaaacagcattgagaaaaaaaaggctccaggtgattaatgacagaaatgtgggcacaaaggatgtagcagctggaaagtggaatcttattatgtgatgcacacgcaacttctagaagcaaaactgaagattctgaaggaactgttaaaacaaaagcaaagaaatgttccactagctaagtccgagctctaacttgtaaactcccatcataatcatgaattgcttgtaatacgggtactaaaagtacaaccttacctccattgtggggcttccctgtgcaagtaacaccttgagagaatttcttcagctttccttctgtctgcaacagaatacatgaagcatgaggttgacaattgaataagaacaaacaaggtacttataagttccaagaaaaagttgtagaaatgtcagtcatttatatccctcagtttagtcaccttcagacgacaagtgaagtaggcagcagtctggaaggcgataatcctcaagatcagatgtgaagaccccaagccaccga

SEQ ID NO: 33068 - DNA, 558 bp, Oryza sativa
tcgaataattatatataactgttgtatgcttgtttaatttgatagaaaactaagttaatttaaaatcaaaaataattacaatacattaaatatttgttaattaaaacatgaataatatgtggtattaatttataatcaaattagtttatttagaatttgaaaaaaatcttgtgataaaagagatgaggaagtaaaatatagaagattaatctaaaagaatagaaaactaagtcaatttaaattaaattaagtacaacacattttgtccaggggagatacccgtagatgtcacaccctaaaaattcaaaatatataaattgttgtttaaatggaatttttagaaataatttttaaaaagcctagaagagaagatctaattttaattaataaattccaatataaaatggggccagataaaatttcattaaatactttgcttaattctataattcctagatttttctgggatttatttgagctaaggaagtatttttaataaatggaattgcatttaagaaataatttaaattgaaaaaggttttaaaaagtcctcttttg

SEQ ID NO: 33069 - DNA, 759 bp, Oryza sativa
tttattatctaaagtactttaagtatacttttcattttacatttgcacaaatttataaaatatactccctccatcccataatataagggattttgaagggatgtgacatcctagtacattatatctggacaggctctccatatagatgtattttactggttgtgtcacatccctctaaatattcttatattatgggacataggaagtaagatattttagttgaaagaaatatatcttagtattatgaatcttacgcaaacactaggatatatcttatcgaaccaaaatctcttatattttgaagtaatatacttaggctgtgttcaccattgcttgttcccaaggaacagtgcgcaacgggaaacggagtggtccattagcgcgtgattaattaagtattagtttttttttcaaaaatggattaatttgatttttttaaacaactttcggtcgcaaggaaaagagttcggaagatcaaagtgaagaagcaaggcaagtcgcacattcccccttgagcatgttgatcctaatttataaatgttttaccgtttgcaaataaatatgcatgttttgctaattacatgggatcaggttttacctatctgctcgcttgtgccatgtttacttgatatctatcctttgtcaaccttgggtgataaatcgactagctcatgttacttatgtgacctagctagaactatatgcttagccatgcttaattaccactagctcagtcgatgggataattgcagtattaga

SEQ ID NO: 33070 - DNA, 581 bp, Oryza sativa
atcatctcggcctccaggaggccggtctgaccgggaaagtgccgccggtcagtccgccactatgtagccggtctaaccggccagggcacgccggtcagaccgccactatatggccggtctgaccgcccctggtcaggccgaacccagtgaatttgtgtagtgaattttcacaaatgaaaatgcaatgacctaatgtggcaattaaaatcatctttttgctaggtcattacccctcttaatagtacggcgaaactaaaattaaactagcaaatttgatcgccctacacctcgatcaattctaaattaaaacgctagttttaccgtcttctttccctttgctttgcgccgtcaattttaatccattgataatcatccatgcgcacatatgacgtggacctaacttaaaatgtatagctcaaagacaacggttagtccacaattagtgcttgtcattaattaccaaaattaacaccgggggcctagatgcttcaaatgatatttttttcgaaactagtaaaattacaatggattccattaacccttaaaataaataaatttggccaaaggtaatgttgcatttg

SEQ ID NO: 33071 - DNA, 743 bp, Oryza sativa
taccgtatagccctgatttgatgaatttaggcatacctgaggacgagatatgtcaatgggcgaaccgtacctcacaacggtttggtaaagcaatctctgttgtaaaacctccctaggtggtgttggtagtcctgtgcatatacgacttattaccacctagataagtgtttgttcagattcagtactgaaattgctgacacaggggtttctgttttgtttccatgagtaaattgttttttattttattgtttgacaataaaaggcttggacttgtttcttaattttgtgacaactttcatatgtcagttttatttacgagtgaagtacacaattgattcttagactgcgagtgtcatctagctctctaacctctcaagatatactttttgtcgtataggtttaaaaggggttcaaccgacttctgtgtattgatctacaatgtcaatcacataaaaaaacaaaattagaaaaaaaaagcatcatcttctcttattatgttaaggtgagaaaatattaaataattgcatatttaacacaagtttgaaccggtattatggatctgccactataaaaagtgtaattggatatttaccataaaaaatggttggaatccaatatattgccatgggactgacagtttagatgaacactgttacaagattgacttctatgaaaatcaggacaagaataccccttcccaagaaattgaaagattaacacatcatatgccaaaactcacgcat

SEQ ID NO: 33072 - DNA, 661 bp, Oryza sativa
aaataccctcgatcggctaccatctgctagctctagctctcctcgatcaattcagattctcccctgatcgaggtgaagctagggcaacgcgagagctagcgccgccgacatggccgacgacgacgagatcgctcttgagccaggctacgtcttccacccttccgacgcggcctcatcaccctcttcctccgccccagcatcgccaagatccccttcgaggaccgcctcatcaaccacgccgacgtctactccgccaatccggccgagctcgtcggcgagcacagaccggcgccgggcacccatgggagcagcagcgtctggtacttcttctgctccccgcgcttcaccagcaagcgcaagacctccgggaggcggcagcgcgcggtcggcggcggcggcggcggcgagagcgtgtggaagtcggagggcggcaagaaggccgtgatcggcgccgatggccgccgcgtcgggtacctccagaagttctcctatggcgtctacgagtcgtcgtcgtcggggtcggcgcgcacgttcacgaggctagggtggtgcatgacggagtacggcctcgacgacgacgccatcgacggagcagacaagcaggtgctctgcaaggtctaccgctcgccgcgcgcggtctgcgcggaggcgcgcacggcgg

SEQ ID NO: 33073 - DNA, 644 bp, Oryza sativa
gaaatacctcgattccaacacaaataggcagttgcgggtgcttgtcacctttcccttcagaactcttcttgtcatccagatacatggaatagccgatacatccatatctgaagtcggaaaggttgcaccttcctggatagcttccatctcaatttctccaaccatgtgatcagggactgatgcagaaacatagaacagtcagccaatgccaaccattgcgaccgaagaaaacaattcagattgagcatttaaacaatccataaaaattaggccaacagttaagtactccattaaatgacagcaaattcagagtaaatgacaacaaaacatttcaaaccaagcaaggagttacggcgcagtgcgatggcatgtaacactgtccagatctgcagttctgctgctattaggcattagcagtggcagtggcatgctaactagcaacaagtcaggatgaatacaaatatcgatcgtgcgttgtggtgtgtggtaaggatcatggttacttccaaaagttacagttgctactatgaccgcgccaatccagcagttgcgattgaacatctacgttccccattgttcctgcgtgcgtgcgtgcgtgtttgcagggtcactggaataaggtgccagaaaaagctccggcgctc

SEQ ID NO: 33074 - DNA, 504 bp, Oryza sativa
gacacttgacaattagctgccctgcggaaatcccattatttatcatgttaaactgctgctaggttgagttgaagactgattataagaaacttgcgctgcatagagtaaacttaatttctaaactctaaggaaaccatttgtgtgttaaatatcatgtcggtttgatctttgacccaagaaagggtctcctgagatggttactaattgataagtgataacaagattaaccgtatgagcctcccactagggctactggacgtgctaccgaatcttccagttagtttaaaaatggtttgtcattatctcaaggtcccagatttttggcatttaatgcagtctgccagcaaatatttagcttgtgatatatttaactgtttagacaacaaacatccagaatgtattaaaaatatttctaaaaactatgaaacagttttcttcaaataattaaatgatttttctgaaaggctaaaagtaagcagatgcctattgatgttcagattccat

SEQ ID NO: 33075 - DNA, 736 bp, Oryza sativa
gatctctccgatctcgatctctctccgtcgccttcgacgccgccgccttcgacgccgcgcaacgccgccgccgcatgccaacgccacgccgccgccgccgtcgccacgccgccgccgccttcgccgccgcgcgcgcaatgccgccgccgccacgccacgccgccgccgccacgccacgccacgccacgccaccgccgccacgccacgccgccgccgccacggccccacaacgccacgccgccgccgccgtcgccacgccgccgcgccaaccgccgccccgatgccgccacaccgccgttaacgaacgagaacgagaacgatcgaacgaacgagagcgagaacgaacacgtcaacgtacgttgccgcgacaacgtgaacgagaacgagaacgatcgaacgaacgtgaacgagctagggaacgtgaacgagcgaacgaacgaggacgaacgttaacgtgaaatgcaatatatatatatatatacatgtatatatatatacatgtatatatatatatatatatacatgtatatatatatatatatatacatgtatatatatatatatatatacatgtatatatatatatatatacatgtatatatatgttacttcgcatttatcctaatacattttttttatcttgcagaaaagacgtgttgtcggagtcgtccgtcaagcctgagtggaagagctagccctagaaggaattggagaaggcaagtgacgtaataatata

SEQ ID NO: 33076 - DNA, 812 bp, Oryza sativa
ggtattaccaacggggactaaagttaagatctttagtcccggttggtagcactaaccggggctaaagatcaccgggatctttagttccggttggtattaccaaccgggactaaagttaagatctttagtcccggttggtgctaccaaccgagactaaaggtcccgggggggcctgacaggtcctgacagcattcgaaccgggactaaagatgatctttagtcccggttggtaacacaaaccgggactaaagatcaaatatgcccgttacccttttgaaccgggactaaaggtcatctttagccccggtttttattgcatccgggactattgtggaaatcggccgaccgacgaaagatggtttctctaccagtgttagatgggtgtaatttaatacataaacttataaaatgctcgtttagttacacgaacttgtctagttcgtgcgaacgagaaccaaaatagcttcgcaatgttaattttacaaaagttgatgttgattagaatgtgacgtgcatacgtgtaatgagtatgcataagacatataatatttataaatttgatctgtactttatccttcatcatggaagtgatgaatttcatatatttctagcccttatattattactcggtttttttttatcattttctacgatcactatatctcattctatttttattgaagatgtgtttttctaatagcaaccttctcagatatatatttacctagtatcccgatgagcccctaaatcagtaagattggccatgttgtttgtttttcgccttcctccgcacgcaccagacaaattcatgt

SEQ ID NO: 33077 - DNA, 1377 bp, Oryza sativa
tcttcctggttgcctccgcacgcccgcaagtcgctcgatgaaatggcgacctcggctttgacgtttctactactggtacggtaccaccagacttgttatcactaccctccctactgctgatgagtcacttgcaggattcagacaatgtttgcatctgtaaatatcgttacaggtgttcttagacttctttataggattgaccgtgaattcgtccaaatctgacaaatgctagtttttgctgtaagtatgcatgatttccgtaaaactgggcatgtgcggtcgaaatttacttacagtaggtgccttgctgctggaattaaaatttcatgtgggcgaagaatatgtccacactgatggttggagacttggagtgtatgataatatctctcattccatgaaacattgaacaatcatgttgcttctcaagtccctacagggctacacctgttgaatacacaattgaacatatctcttctcaaagcatgaccaattctagatttttttttttcctgcacatagcatttccttatcattgttgcatgcttcgatttaccctgtccaactggctactgtatctgggcatgaatcggtaattctgttttatccagcttcgatccatcaagcatatttggttgatactatctaaataacaatgttacttgtctatttattacgttctcttagtatgatttgggaaagtactattaccttttttttcttttgctgaaactttttttcgcaatttgtcacaatctctgattgagcccagacagagttcattttagaaagaacacatggccacatggtactgtagttcaccaaagtacatgttcaggtgatcgttttggtgtaacaatatcaaaattagctcacctaacgccttctcagtcttatattggcaacatggcactgtcaatgacctcaattttctttataccatatcatcactgactccgtactatacagtacggacaaccttaataaatcatggaagaatagtcaaagacaaattaaacatgcgtatcataaattgtcaaagactgattatttttttttaaaaaaatgtctattgtgagattttggagccgcctatgccttgttcagagagtgtaagattttgaggaaacggttgattgatagtcaatctctgagaatctaaaaatggctggattcccaattaattttttgaattttatagctgcatattctcaaaatttgaagggagaatctgcattattttgaaaaattgaagattctgcgaaacgttataatggctagaatctgactgtactgtttctggaacatagtgggggtatttttcattcaaatcttgtgtgtaacaagtaacaacaagatccagaggaccatagatcacaa

SEQ ID NO: 33078 - DNA, 548 bp, Oryza sativa
cataaaccgtagatccgattccagtgaaacttagacctaaattcatctaaattcaaaatctacattttgatatcaaatttgctattttaagattttatttgaatttattcaaataccgtttgaatttatatttgacttttcaaatattttcttttatcccaattaccctttagcaactaaaaaactgccggttggaatttttacgccttccatggggacgatcgtggttttctatccccgatgtcgaaccgttggttgtaaagcccggcataaaccaaacccaaggtcgaagtgctgctcctagcaccccacgcttcgatgcgtatagcggtcggagcttcactattccatcgacccccacagcacgccgcacagttgttagctctcgggctctgtgtgatcctagctgctccgccgccacccacggttgttggagtaacacttccaccctattaaacctgcacccacctcctattccctcttgccgatatgctgtctgctgacacaggctagagaagacactaaatctagtcgttatgctgccaact

SEQ ID NO: 33079 - DNA, 947 bp, Oryza sativa
gttaacggcgtctaatatttagggacggagggagtaaaaattagaggagaaagccagccgaaaatatcatcaggatcagcttaattccatagcacgataacctgataagcatggatcgaagttggaatcggataaccccgatgaacagagcttagcttcgcccttgctaaaacaaccattttatggggaggttacttacactgatcatatcaattagctgaattctcctgaaaggttaccatcccctaaaggttaaattttttggtggagaatgggggtagcactggttttaaaagttattgattgggtacttcttttgacaaatgaaaaggagtttggttttttaaattaagaaaaaaatttacatttccggtctttgaattatggcaaccggccttaaataacataaataggattgtggggaagggacacatgtggcatgtcgggaatccactaaggtgaaggttattagccccaaatcccaagccgctacagtctcatgatatcaaattgacaaatatgtaagttcattgactagattgggggtacttaccataccatgtccttatgacatatcactaaaacctgcaatttcacactaaattggaacttttctaatgagtaaagattactagggagactatgggtatcaggtgtgtatatgacccgtatatccgattactataggaggagaccataactatggtatttgtaattgtatatgtcttagttgctagagttttcctatcggttatgccctgcccatgacggcgttggaagtggagcaggggatgagagagtagagaagatagatgggagtagatcggatcaattgcttgtgttattcataaattaatagcccttaaataggcttacaatgaactgaattaccgctaatgaggaaacaactaattaacttaatcctatccatgcaagcgtgatcactg

SEQ ID NO: 33080 - DNA, 710 bp, Oryza sativa
ggcggcgagcttggcgcgcgtcgcggcggtgctacgaggcacgagagaggacggaagagggggcaaacggaagaggagaacaaggggaagctttatatggcattggatcgaagagatcgaactccaaacgagaggaatcgattcgggaagaaatcaaactcggttttagggataaaatcaaaacgaattcgattcggagagaatactcaacgattcgttttgattcttgggggaaaagaaagaggagaacgagaggaacaaaacccctaaatcaatcggactcgaggagaccggattggagcggatttggagggggaaaacggcggctcgggcggcttgcgcgacggcggccggaggttgaagacggccctgacatgtgggccccacatgtcagcggctggaggaggagggggcgggcggctcggcttgggccggcatgggccggttcggccgcgcggagagagagagagtattgggccgaattcggcccaatgaccaaagaaggggttttttgaacttttttaaataaaacaatttgtgaaatgttgtttcaattattaaaaatacttcccttgctcaaataattcccagaaaattctagaaaatagaggagcaagcatagtatttaataaaattttatctagctcatttttatgatgaaaattttcctagaaaattagggtttagcttgtaggcttttaaaatagttt

SEQ ID NO: 33081 - DNA, 662 bp, Oryza sativa
agagagagaaaagtaggtagagactgcagcgtggagtgatgattccgacggagatgggcgccgcatgacaaaacatggcaggttccagttccacgtgttgtttcaccacgcctcaatttctttttgattcgatctacgcctgccattttcgacctcatctcgatcggtactcgatcacttttattctaccactgtcaggggatgtttggttgattcactttaccgtaccacattttaattacgaactagtttcacaattttactagatggttaaataaaatattgtatttatggattatttttacactgcattatagatgttcttatactataatccttctataaaaaaaaagataaaccatgggtttccgtgtccaacgtttgaccgtccgtcttatttgaaaaaattatgaaaaaaattaaaaagacaagtcatgcataaagtattaatcatgttttatcatctaacaataatgaaaatactaattataaaaaaatttcatataagacagacagtcaaacgttggacacagaaacttagggtttatttttttagacggagggaatactttattaatcactagtttttattatcccaactatgttgtgccacgctttgttagccacggaatccttatgtcatactcacatatttagagtta

SEQ ID NO: 33082 - DNA, 577 bp, Oryza sativa
tcagaaattaattaatttatatttttaagaaacacggtataaacacaaacgttctcgcgtgtgacactcacctatatgagcatttttagaagactgggcatattgacgtttcgttgcgacgggtacgtcgtccactactgaacgaataattaaccgtaaatgtgaacacccatatcaaatttaagatttgaacctaaacctgctccgctcatttcgtgaaattaattaatttcgttaagaaggaaaaaaaggaaaaaggaagaagaaaagtacatacttgatgcgtacgtagctgcgtagtacgcttggatggatcggtgcaatatatgcaatgcaatcgagcggctttgtagtttctctctctagctagctaatatagcagctagtctctctctaccgaatccatcgtccgtccatccgtcggaggaggtaggtgggccagggcagccatgtgcgctcatgtggtggtttgcaacgcttggccccaccaccactttctctctctctctctctagactttctctctctttctcctcctctccaacccaccactcactaacctgtagtacccccaaca

SEQ ID NO: 33083 - DNA, 592 bp, Oryza sativa
attttagtgtgatccaccataatagcaatgtagttcatatacattgagcatgccctaagacgtgtaagctagcatagtaaataagtaatccctcctattctaaatattaaatatttataaaaaattgattaaatttaaaattctgtccatcagtatatagtacaaaatctaataagtttatgaattatgataatatttgtgagataaatctacatgtatcatttcttttattttgagactaagtatttaagaaattatcgatcgatagtaagttggtcttggaggagacgaaataccgtttatttgagttgcttcgtatgtgagactagggttcaatttgttggtccaccacaaagtgtgtttccaccctcttgccaacttgtatataagatctgaggttgataacgctggagtcacataatagcagagttggtatgacaattcaatttgtagggaccagattaaactttaaagcatgcaattcgaaccacgtatacgcttggattcggacgtggcaggttcctgtctttccgatccggatacggattaatggtctctccatccaggcatccatttcggcaaatatcaagct

SEQ ID NO: 33084 - DNA, 672 bp, Oryza sativa
  unsure (1)..(672): unsure at all n locations
cgagctcggtaccctgttattgcactcgatatcttcgactaatttgctatacatatgacgtggatattttttgatctgactaccggtgctactagtattgctctaaacccgcttcacgcagcctttgaattaaaagagtgtacagaacttgggttatgccaataacatgtttttttaacacgcaggagatctgcgctattcatttttcccccaccttgagagggaaccccaattttaggggggtaaaaaaaaaaaagccaaaaaatgtatatggtgttagagaaagactcgacactcgcccactaaggatacaacagaacaccacacaaccaatggaaaaaaaataaactattgcattagcatcacagncatagtaaagataccacggagcctagcacctcttactagacaccgaagagcgtcctcgttagcgatggtggctcaatgtacattggccaagcatgaggtacgtcgataacatattttaaaaaactactgtaataagtattggactctatnnctatgaacatggttaatgatggaaaaatttcctatactatttttactagtaatatgcccgtgctaaatgctacggtgcaattcgatttgtctttaataattgttaaaatttcatgttagcggaaatttttttgtatgatatgtgcatttgaa

SEQ ID NO: 33085 - DNA, 519 bp, Oryza sativa
ttatcaaatggttgtactctggaaactagccacaaaaaatgactgttttttcatcattgcttgtttgataaattactgctgtcaatgagagaccgtagtctacataaagcttaggggcaactgagaagtgagaactaaccaccaaattttatttgtttctcggagcattcttttggccacaatcaacacttaacaatgatactcttacaatatttccaagaagggaaccctttattgctggttggtttacagcataaattataccatgaaaagcctgttcttgtacatttattccatactcgtattactttagaacacaatgccatttttacctgtgatggtaaagaggactgctgatgttctgtggtattactggattactggaccattgtcagcgttggagcgttgtttgagtatgctgtttctcttataatctcttttgaaagaaaactgttattttatatttattttagtggcttaactcacaagaacagaacccttacaacagtagcatggtaa

SEQ ID NO: 33086 - DNA, 560 bp, Oryza sativa
gggggagagagccagagaggtgttcgtccgttggttggctcggctcggctagctgctgttgggtgagttaatggcgtgtgtgggggtgtgagttggtgaaatggaggagctggcttttcgagtgggcggggcgggacgttttataggacgggacagacgaactgggaaaatgtttttgggtcgtccagttggctcgcaaagttttttaatactacggcgagatgtgactttattctcctattttatactcctttcgtccctaaaataaattaatttaatagtgatgtaacacatgatatattactataaagtgaaaactgtatttaatctttttttatcttgggatttttgaatcatcgtttggtatgtataggaaacaaacattggaaaattcatttggattagtagtttgcccatgcatgcatatgttgtctatctatggtagggaagcccatttgtaaggaaaataatttcaattgagttctacggtatgctccattcctccataagtgaaaaaaatgtaagctttcttggtcatttttatcatttcctttttttcg

SEQ ID NO: 33087 - DNA, 626 bp, Oryza sativa
tgccttcttttaaggctgttttaataatataatagatatgaccgcccatatactttatattttttagactaccatcttataggcagaatttacgtattcaacatatctaaaaagtacaattgtatgtatatataatactagcttctatttctattatcagtatacaattatactttgtatatatacaactattatcaatcaatctccactgtcacaatctgacccatcatgatctaaccatgtaaatctttctctctttttctctggttaatatgaaatttctacacctcagtaccatgttttcaagcttaataatagataatagacaaggaatggatcgataaaaaaaatattgcaggaatttttgacgcaattatccattttatgcatgtccatgttcttagttactactcaattcgtttcatattatgatttgctttgattttttgagtcaaattttaagaagtttgatcaaatttataaaaaaacattttcaataaaattattggaatatatttaatgttagatttagtgaaactaatttagtccaataaatattactataggtttctataaactgggccaacctaaaaaaatcaaagtttcttatcatgtggattggaggg

SEQ ID NO: 33088 - DNA, 534 bp, Oryza sativa
cccgacccctcggggagacagagggaggggtggccacgtcaccttcgggcccgacccccccgagggggtcaggccacgtgggtgaccgcggctacccaagcctctagtcacgatacccccggccccatgtcaccgacatatactgtctcgatttgatccgatctatcaagattgtggttaataatcataggttgttaatgattatactttaacttgttatagctgatgttgtttttttctttactttgcgaatgatgataagcttcaattaatattttagtgcattggcctacatctaggaatatatataattgttaagttgatatctttactactttcaatcttatattgtctcagtttgatttgatctatcaagattggttataataaagttagaagattttgcaaatatatattatgtagattttggtcgatgtcactttgatcctaaatatttatatccatcggttacagccaatcgatccaaaatttcatcggcatcggatgggcacccgatccaatatcggccctatg

SEQ ID NO: 33089 - DNA, 569 bp, Oryza sativa
tttcaattacagattagaatagttaacaagtttgaatgcagctcgtaataaaaaaagtgtcataaaagccaatcaaaaagcaggggcaaaagctaaatatgcatattttgtatagtatttatgtgtcaaacctaagtgaccttagaacaacagaaaagacacaaaagagattgcagaagtacaagatggataatacagatttgctgctcatgtatttgaatttgaccactacatagatcccgcagattaagtgtataggtgatatttgcaaattcgtgggagtgcagatgaattatacgtgataatgtcagatgcaaacaaaacaattatttccaatgaggattatcaccacatcatttacgactatgctttacgcttttcctgtcaaagtacaaatcacaatcgcactgtacatggcatttacgaatagggatttgtaaaccatagtccatatatgaagtatataccgtcaagacaaacaattatcatggaatatcagtagggcctatttcaagcatatgcaagagtgttgacaaaaccacattttgagtacccgtcagctcagtggc

SEQ ID NO: 33090 - DNA, 885 bp, Oryza sativa
ttatacatacatccagttgggttagcgtggaagcaaagcaaaacacacgacactgattacctaatttcttgttataaatacaacccgtatgtatacgcagaaaacaaaatttgatgcaaagagcaacggaaggaatatttgcaggtttcggaatatcaactattcctgattacctgtaaagaaaagtggaggcagaatgccctgattgcggattttacaccagtactgattcgattattagcacagtagtcaaataagcagctaaggtatgggttagattgctccctaggagcagtacagatccaagatctttcagttgttgttcagaggtggtagctcctctagattctagaaaggcaggggccagcgggagcagttgttcttcaggcctaccaccactcaacaatctccatgcatgattcagtatagtcctcggcttttcagactaataatcagagcgtggtcacagcaagaaagcaagcatgttgcttgtcttgttcctggacctacgtttacctacgccctgttcgatcgaacgaacgatcgatcgatgccatggtggtgaaaaatcatcatgtgccagccacagtgacagagacgcgatatgcagcaagctaggcgagccatccatggacggatggaccacgtaggcgtgcaatgcagtactccgatgcaggtccagtcccttcactagttagtcccatggccttttcttctcaagcatgttcatggctggggtcatgtatatagggtctgtttgggatagctactagctgctgtagcttctcataaaatctccagcttcccccaaacagtccatattgtcatccatattctaagaatatatagttgtggaatccagaaaatgaactagaactcagaagc

SEQ ID NO: 33091 - DNA, 533 bp, Oryza sativa
ccatttaaatcagttgcgcctagtgaagattccaatgatagcttctcatggaaaactaatgtaggatctttattaagaaccacgttatctttcataagttccacatcattcgaactactactcccagtagtttttaacattccatcatgaaactcatcaggtatatcttgcctggcagattcagaaaccaaatcttttcttccatcctcctaaagcaatgttaataaaaaagttcacattatgatagcgtaataatcttgtgagtccacaattttggactaatttcaaaatatgagtagaatatggcatgccaagaaccctgaaaggcatatatacctgttcaaggccagaagcagtaggtgtttgtgtatctcgtggtgggccagaaaatccagagtgattgtcaccacttgatccttcatcgtcctcatcaatatccctgacagtactaacaaaccaggaacttagcaatggcttatcaaggtcactttcgaaagacggttcaaaataattttggtgccagctatttgaga

SEQ ID NO: 33092 - DNA, 700 bp, Oryza sativa
catacggtattgatatgggtctgtagaaggtaaggaaaaccaaccgtgtaaaaaatatacaataacaatagggctcctgctgttagccatttaagctaggactttgtattaactactccgtatgaaagggacacatttattcattttgtttattttttcttggtggacactgtcatccatataaaatttttacatttaagagccaaggaattaaggaagaataaagatttatgaatgagaaacaatgaaaagagtgaagtacagaaggtaatcacgttaagaaaaatgatgtgagaaacgcctaggagtcttccggctagctccacaaggtggtgggctagacgacctggattcgaagtttcaccccttctaattatttgatattaggtccttccctaatattcacgtcttttttgttaagaaaaatgatgtaaccatctataaggagcaaatccagaccagaagtgctcaattatataccttgtggttatatacatggtcatgtaatttgtttttatggtatgagattttaacatcacccaatcatgtaggccaattggttctatggtattgagaagcagatcaagctaaagtttatcttggcatgttgaaatcctaagcatcatcatcatcatcatcatcatcatcatcatcatcatcaatacaagccatatcttggctgccaggtgtccatttccag

SEQ ID NO: 33093 - DNA, 708 bp, Oryza sativa
cccagatttgaagagtccacaggttgatcatacataccccatgtactcgctgttctgacgacctggcggagtttgccttcgcaacccctaacaatagatgtacaagtaaaatgcatacctgctaatctagcttgcaaaatggtgggtggtagcgacattggcaacgaaaatgcttcgtctgctgaagcttgtaaagaccaaatgtggagcttcatgtacaaaaattagagtacttgtgaacatttggtcatggaacaatccgttgtagtgcgttgccattgctgtacagatggcctccatttcttacatcttgatgtccttgttcttgtgtttctaagtacttcctccgtttcacaatgtaagtcattttagcatttttcacattcatattgatgttaccaatatgaatgtgaaaaatgctagaatgtcttacactagagtgcatagagcatgcttatctggttttcgatgcgtctctagaaattggacgaaaaggctaaccatcagtgaatgtgagaaattgcaacaccgagatgcaaaaatttaatttgtaaacacagacttacatgtaaatgctccttgatggtctagtgcttatctaagcgaaaaaatagtgcttaagcttaacaagcacttcgagcgccccattacactttgatcccatcaatacaacattttggccataagaatacagcatattgcctttgt

SEQ ID NO: 33094 - DNA, 518 bp, Oryza sativa
ttctgccgcaaaggatgccgtggcagcatcagctttcaacggcaagtttttcccatcccgcggcagacagtcaaaacagcggggggtcgacaagtcaatgtttttgacacgacgaacaccataaaactttaaaacgtgtttgagagttgacgaaagaaaaaaaaaacatacccagaaaataacacaactattagctatgattaattaaatattacaacaattcttttaaatttaaaatttaaaaatacaactttttaaaatttcttttgtaaaagaaaatatcgtttagtattttggtaagcgtgaggttgaaaaaagtaatttttttctctgtgttgttgctgaacgcaacctaagatagcattaaagaagtactcatgggacaaaactttaacgaagtaaaactgaataaaaggatgcaaagtgcaaaaactaaaaagagtatcagagactaggatctaatttttcaagctgttttcttgaatttagatatatatataaaaaataacttatcttta

SEQ ID NO: 33095 - DNA, 993 bp, Oryza sativa
acataaagggttatttcctttggaagatttaagagtagatttcagagggcaatgcattgattagtccaccatgaattgattatttcacaatgcatttcatccaagtgtgcaactatatggatgtcagtgttactactacttatgcatttcctcacctctgagcatcttattgtgcaggtttcttcaccgtttctactagcttcagggtggatcaatcatttgtacatgctccttcaccctttccaccagtgtcttcatcatcccgcagtttctcttcagctcaaatttcaaatggaccgatagacgctaagaaagccaagaaatcagatataaaagtaagactcttctagagcatgttgatatattctgggttcacatgagcagtcctgacatgagatttctacaggatcaaccaattgttttaagaagaagtgatacggagagtgaaaaaaatgatgaactagatcaaactccggctagtgagccttcaagcatgagtcataacagtgcaaattcgactattgtaagtaacatgatgccttggtgatgatggcatccatatatcctgaatactactattctctatttggtacataaataaatgcattttgtaacttgataacttaattgttccattgatagattaaaagttgcaggaacaatttcattattatttttaattaggataatggcaactattccgcaattttccaactaactgcaatcattagtaccatagtttagtagtcagatctgaaccacctatacaatcattgttgactgcagtttacattgacttcaatcaatttgttctgcatgtatcttgttaattagactgctcttgtgagagccttgctctgtatatgtaaattttgcttctatcataatagaacagaggacttctcccacacccactttggaagggacattaacttcaaactgaactaactctgcattttctagcagagattcaactgtagagaataccgtgtt

SEQ ID NO: 33096 - DNA, 664 bp, Oryza sativa
cctgcacccctgacgtggcttgtgagtcagcgtaggacccacgtgggccctacatgtcaaactatccatgttagcctcctctcccttcctcctctcttcctctctcctacacacacccagatgagtcgtcggctctgtcgacggcggtggcggaagcgcgtctgcccaggagcgttccgtcggcggcgacgactgtagcgcatcggcagcagcggcagtagcgcgtccgcgcgtcggcggcggcggcggtagcacgtctgcccaggagcggcttcgtcagcggcgacagcggatgtagcgcgttggtgcgtcttcgtcgtcgttgccgccaccgccgtcggcgacaacctcctagggccggtaccgtcatcgcgggcaccatcaaaggagcagcgggagcggatgaggacagcggcggcgaaaaatcccgcatgcaaagtaattaagatcgatcgacaaccacatatttacaacagccaccacgcacatcatctcttcatcatgcatatatatacgcccgcatgcggagtaattaagatcgatcgataacaaggacaatggagaccaccggcggaggaggatctcctaaggaggcggtggtgccgtccgctgcctccggcgacaccacactcggccgccacttggcacaccgcctcgtgcaggt

SEQ ID NO: 33097 - DNA, 546 bp, Oryza sativa
  unsure (1)..(546): unsure at all n locations
gtggtcgaccggtcgccgtctcgtgcaccgnatgcggtgtttggtaaggtggggggcggtgctttacgagcggtaggtgggtggtgctggtaagccacgaccacgaaggtgtgggtggccaggtcggctgcagggagctgcgcgtcacggtgaccgttggatcgagaacctacggatcggatcaacctatgggagagtcatcacgaaccaagaaaattggggcgtgtgtttcgttgcggtcgggttactcaaacgtgcggtaacagggtcagtgggagggtcgggctttcgttgaaatttgacattttttgtggttgcccgtggctgcaagctatatccatccccgcatttcaacgagagaataaaaatgattctcctagtagaaaagataataaaaatgataggtgggtatattcttccgtttatctctgcttttataccggataatttttttggaattgaatctctttaagagatacttcctccgtccttaaaaaaagataaaccctgagtttccgtgtccaacgtttgaccgtccgtcttatt

SEQ ID NO: 33098 - DNA, 552 bp, Oryza sativa
atttagtaaaattgataattatgtgcctatgtttagtttgtcaccaaatattggtaatgcatatagaattttggcaacattattaagccaatcctacaaaaaatttggcaatgttgccaattcgccaaaatttggtaaggttcattttagcatcaatccgaatagccacttcatatctaccccattagcagtttaaaagccaatagccaatgctaaaagtgccctatgataaaaagaaccaaaatcaaatcaaaaattaacttttgaaatctaaattttggctaatgagacatggaagcaccaatagatattgaaagaaaaactattgatcggtattattgctgtagttatttgttcctttcgtcgatgaaagtacaaccacccattttccacactttttcatattgacttaagtcagcgaattactcgcggcgaggaggagtttagctttgagagttggaaaggaaatagggcggtgggtaaggcctatttcaaaattttattggtgggtggtactatatgtgtgactgaggtccatcaaaactgtaggtg

SEQ ID NO: 33099 - DNA, 533 bp, Oryza sativa
tgcacgcctgcaggtcgactctagaggatcccctttggttttttggttgaaggataaaaattggattcgtcaaaaagtaagggacctcatatctatcctacatgggccgacaaaaactacgaccaatcttagcaacttttgggcctctcggcagtaggccattggctgtctctgttcacgtctttctagccttctggccgaacgcttggaaaccaactctttgatggtccatcatatggagacacaggccgcggcccacggctcatcccagcttgcaggaataagttcacttggtgcccctcaaaagtgattgaaatctaatctgtgaccctaaaccacaaaaccggatattttgaccccccaaactatggaaaccggtgcaatttgactccctcagcggttttggagggcggtttcgctaacgcggcgggattgaccgggtctcccttacacgtggagttgacgtggccttaaggtggcctttaaattaaaaaatatatgggggacccatttgtcaatgacacagaaaatag

SEQ ID NO: 33100 - DNA, 1304 bp, Oryza sativa
aatatataggcttgcaaaatgccaggacaaattaagaatttgagatgggaggaacgggacagaaagcgatgtcatatcctatttgctctcccgtaggacccataatcgctacacgtggaatcgcgggggggggggggggggggacatccgacatgggattcgttcaattccaactcatgcggggtaaatgaatgcattttggtttagtacgcttcacttcattgcacaaataaattgcgtgattcagtacgtactataaaatccaaaaaaaaaagagttaccagtattaccattagcatatcattgcataccagatacgactctatgtttatactaatacgtgaagctgcaaataggcaaatgaaaatcaactcatctactgcctggactagagtacgagaagtaaaaatcttcacgtcaggatgcatgctgtgtgtcacgttgctcatcgcgcggttcacgcttgacggccatgtcatcactgtagagtgggcccaacaggacacctccccccttgcttcttctttttttttttttttttaaaaaaacaacgcaaactgttctcctcaagcgcacctcccccccgaaaaatcaaaatcgaagcgagagcgagtagtaattccctcgctggcgctgctgcgtgatttctttaatcctccgcctccgcctcctcgtcctcgccaccactactcctccctctcgtgagcccctcgcctctccctgtctccctcccacctctctctctctctctctcctctctctctctctctctctctctctctctctctctctctctcctcctcctcctgcaccgccccgcgccgccccttggcttggatctcgtcctgccggccgcgggcggacgcggcggcgacccggtcctctccccacaccccgacacgccgtgcgagtagctgtctgtctatactttcgaggcctgcattggcgggatctgcgtccattcgtcgagctgcacggagcggggaggggcgcggagctctgagctggtgcttctgcttgcgttttttgggtgtcgctggatctgagggccgcgctgctcgcctgctccacgccggctaacgggggcggggttcagggggttcagggggttctggtggtggttggtagcgattgctgcgtggtggatgggagttgaggcttgaggttgaggggttgcgtctctgaggagcggggtggataagggagatggcggccggcggcgtcggtggaagcaacggcgcggctactgccgccacgccgctgcatggctcggcgacctccagcatgaacggtggcggcgccag

SEQ ID NO: 33101 - DNA, 2215 bp, Oryza sativa
tcttttaattctgtgcaaaattttcaacactatcaacgtttaaagaggaaggtcaatagtgcagcctactactagcttcaaatcatctatagacaatgtaataaccaatttatacaatagttgcttattatactattaatacctgatcccaccctgctattgtacctgctttaaccatgcgtgatgtggcaaaatcggggctggaacatgtacattcaaccggggtcttttttgtacatcccgagaccaaaccgtcctgtcagcagggcgttccttcctcgtggtaatggtacgagttcattagcaataatcggctttcgtgattacacatcagtgtgttagaatttttttttttaaaaaaaacttgttactagagattaaaacgattgtatttagccaaaaaggagaaaaggctgtccaaacattaagaggggtacacttattttagtctttacacgatggtgggatctcctcgttgattcaactgtattatactctctccgtccatgataagacaattcatactacaataaaatctgtacagattcattgtactataaaatatcccatccacttttaaattgctatattataagacgaagtgaatagtttatattctctgacttttattcacctcatacatggttcgtagaaatgcacatcattcggttgccaaaaagaagaagaagaagttttgagaattgagatagctttagtacaaacccttgttaaaccaattagatttaaaaaatcgaactaaaatttaatttttgataaattttgtccgaatttcacgagttttccaaataaatttggacctttttcttcaataaaaactgagagatgttttcaatcccgcaatggcttcgtgacccctgtgaagaacagatccgtttggagcataggaattgtttaatggaccctctttggttagttacctgtacattccttcataaaacatcagtacagtagctgcttaattggatatgtatagatacagtcagataatcagtagcattattctagactcgtagtgcgattgtcgctggctatctgttggcttgtccagctaacaaccggtcagtaaatatacatgcatgatgcagtgtcctagctatctagccgtagccactaaataccctttggcaaaacttgaagggaattcctgagctttcttgactttgatatccagactacgaccaacaaaaaagctagacacactacaaacaatagctgtcgacggcgacgtagatgatgccgaactaatcccagcttacgctttcaggggatcagcattcagcaagtgtcatgctatgtactacacatcgagcgtttgctgcacgatttctttcgttatcagcgtacgtgcgtactcatgatacatcattggtgttctcacttctctccctggcatctcacatggtaggcctacgctgcgtccaaccggggcccgaacaaaggcggatcgaagtaaaactagcataaaaatggggacgagatctccctctcctttctgtgttgcaattaatctctcgcctcagataccgtgtacagtacgtactcgtgagaaatcgacaaaaggtacacgtcaagctcgctcgccgtctcgccggctcgccatggtccgtggccgccgcggaaaccccacgcaccaccgtgtataaccacaccgccgcctgctcggttgattggaattttttgctgcttctgctgcgggcgcgcgtgtgcacggtgcggctagctagctagctcgtcgtctctccccttattgccgccgcgcgtgttgggccgcgagatgccgtcgttaggtggcggtgcacggccacgcgaacagtagtctggccagttgcttcgcgctctacggggatgttagattgacattatttttaatcctgtactccatccatcgttaagagttagacacaattgttaagaaagtatgtagaaatgaatggtggaggttatgattagatgattagtgagataggtggaaaaagtgaatgatgaaaggttgtgattggttgagaagagaatgttgatggagaagttgttatattttcaaacaaattctgagagataaaagttgttatttttgagacggagggagcattatttttaagttgttaaaaaatacttacatttagttaatgctaaaatttaataaaatttattttcactaccatctatacacccactatatcagcacaactgcaca

SEQ ID NO: 33102 - DNA, 571 bp, Oryza sativa
tgacctaagtctctccataaaaaattcttaagcatatggtattgtctagctttttaaaagagaatgatatatttgtagtcttcatatatccaagacttaaatgaagatgttgttttttggttttgtaattctaggttaaattgataatcagaaccgaaacaaccattttaatattcatttttttacatgtatacgtataattgccttttttacgtagtacttacatatatctacctataatagatcttgttatgactatacaatggattttggctatatatttatatatttagtataataaaattaaatagacttatattcagatttattgtattaagatatattatactctattcgtccaaaaaaattaacctaggactgggacgtgacataattttagtatagttttttatttttttaatggaaggagtagtgttcataagaccatcagtgacgagcacccaccaccagtccgatctgatcatttgtgaaccgtctgatatgtggagaaacagtacaacctgaggtgggctttaaataacgcctccgcttcccaaaacgccaaaaagcg

SEQ ID NO: 33103 - DNA, 1175 bp, Oryza sativa
aaaaagtttccacccaagcacgagaaatataaaacattgtcaaataatatattggatgaatggaagatctacaagatattcaagtccaacaacttcaaatggacctagcgccttcatgtcaactccggtttggatgatcttgtacttgttggaaagcggtgcgtcgtcaccttttaaatgcttctggtctcatatcaaaattcatctcgagtcaacaggaatttcaaaacaagacagtttgaaactgaatttgggctttgggccttgtaatagattaggcccatctcggaagtgcctctctccacctccacgaaccagcactaatcctagctttattttcctttataaatagctttgtacgccctaaaaagaacaattgggttttgtttagttgaattttgccaagagtcattcaccttgtctctagttctcgttcgattagttgacgactatagattcagagcccccaactgttatgtgttgatttgtcggatcgattagatctatcacttcaatcgcaactatatatttgtgcttaattacctattcgcaatatttagattgcatcttatcttgttcttgtagtgttctctgatttgcattgcagggaacgtcaaccacgcgtcatggttggtacgatatcgtttgtggcatagtgattgcacgatgtcatgaacttgttctggttggtagccatgtcgcaaacatcatattcaatcaaagtgagagttatcccattaccaaaaaatgggccacgggagagagtgagtgtcatcactactgtagcaaactgttaccatggcttaaaaaaaagtaaaattaaggggttgttcagttcattgccagaaaaaagaaaaccttaccatttgttggtaatccaaaatttagtaatgccaaatttttgggaagatcacaatgtggaggtggtgttttgtttgataccttaccaaattttggtatagttttgtgagtagaagtttctagaattataaagtttgtagggattgacaagattgtaacaataaagtctcatttagtttgttgttttggaaacaaagtaaaaaagccctgaattatactcataacattccaaatcggtaaggaataagttcaccgggggtccctcaacttaacagtcagattttttaaggtcccttaaccacaaaatcagaaat

SEQ ID NO: 33104 - DNA, 739 bp, Oryza sativa
attcctgcagcccaggccctttgcactgcgggaatatcaaaattaggacccgtgtatttagcctatgtggtatcttgtggtttcttgtttgagtgacttgcactgtaagtgccctaagcgcaggcgtggaggaaacccagcacacagctcgccggcgcatggacgcgctcgtggatagggccaggagggcgcgtagcgcgggcagagggaggcgcgtgactcccccaacgaccacgccaggccatagggttttttgaaaaaaacccaagcataggccttactcagcgccgatgtgctagcggagggagcctgagccctgctggattctgtttttttttcgataacaaagtttattgatcattataagcacagtcaatgaactacactagatatacattctccataactggagatgattccaaagctaccttatgtttgatagcacaaatgagatattctttgactggctattggaacaacattagttgaagtattctctctagccttttttgcaagaaagtctgttgttttgtttatttgtcttcaaacccacttggcaggaatacaaggctgggttgctacactctcacggctttgatgctcatgtccacagaagagtacaacatgtaatcaatggaacacctagctatgtcatttatatcctttgtttcaaactacaacattctatattcgtgttgcttgtcatatgaactaccttatttgtagtcatggacattat

SEQ ID NO: 33105 - DNA, 538 bp, Oryza sativa
agaaccccagagtccgcacatcctcaaatacaaagcacttccctagttagatgtaggttagacttcccgttcgagaaactctaccttctacctgccctcaatttatgcacgattaatgaatgccacctgggtggaagcgagaggtggaaatggaaggtcttagttcggaggtgggatctctacctgatagttgcattgccattcatgatgatcccctggcattcgtccattcagccattcaccattcacccattcaactggaattttggttgaatgccggaattgtgtccacaaattgtggatggatagttggttggctggctggatggctggctggatggctggctggatggatggtgaatggctggcggcggttcggttgcttttaaacatttgttgctatctaaattccatttaaggtcgtaccttatcgcccagcatcatcttattctctatttgtattccctccatctttcagatacggatgtagacttggatgtgcccgtgcccaatgaagaggaagagcgcaacatgaaac

SEQ ID NO: 33106 - DNA, 1276 bp, Oryza sativa
tcataaatcaattatgaaaagatgaacaaaagtgtaaattctaaatgatttaaatttgtcaaaatttgcctgaaatgcatgggaaaagagatccatttcagctagtggcaagaagattcttctcttctttgctctgtcatcagcaaacttcaaagaactcatctacaaggattaattagtcattaccaaccacatggattttagtacggaagaatttgtagattatttatgcagagagagtgtcaaacctgtttaattctcaaatttttttcctaaaaatatcacattaaatctttagatatatgtatggagcattaaatatagataaaaagaaaaactaattgtacagttaggggggaaatcgcgagactaatcttttaagcctaattagtctataattagctataagtgctacagtaactcatatatactaatgacggattaattaggctcaaaagattcgtctcgcggtttccatgcgagttatgaatttttttttattcgtgttcgaaaacctttttcgacatccagtcaaacgtccaaaattttttatttcaccagctaaacatgccgtaacaaatgtgaatgcctttaggggaaaaaagaaatgaaatttcagtgttttggactgggtatacatccaaaagtgcaggaagaaagctcctgtatttcagcataggcaagccactgcttcttgccttcttccatctcggaaatttcgtccctgcgcctgcgcgagaaagcttggtactttttccagggaggaggaggagctgcaggagaggatcccaagagaaacattggaagagaaaaaagaagcgcttcttttgcggttctggcagaagaagcagggaaggggatggtgaagaggcggctgttcttgctgctgttcttgtgcttgttggctgggtcaagaatcgcttccgctgacaccaatccgcaagatggtaaagcttgtttttcctggttcttgcagttcttgcatgcagattagtttgatgagggtttttgcttgtattcgatgtcccattccgacgattcaccgtgaaaaataaaggttcaattccggaggtcaagttgtttttagggggaatttttagcgtcttataagcatatttggattgggaattcagttttagtagcttttggtgttcagaaatcttgggttgtattccctcaaaagaaaaaaaaaatcttgggttgtgatctactgttcaatttgtctggattctttggattgggtttggtggagatggccccaagaaaagatggtaga

SEQ ID NO: 33107 - DNA, 598 bp, Oryza sativa
taaatgaatttactatagttaaatgacttaccattgactttggctctctttaatatgccactaactttactatttttttctacaatatatcattaggatggagtacttttaaaaatacctaaaatacaattcgagttacacaaggggttaacaaattgattgaccccactacaagtttcgaaaaaatataattttttcatgtagcctccttccaaaatatagaagtgtatgtatatttcaagattttgaatttacatgtattaactgttttgagaatataaatatattttatatgctaatagaatactctttttattgatgttcttttatgtaaattatctttcatatgatataaaatattttttatccggataccttttgtgtatgtgattccgctttcataggctatataaaagtagttttccaaacaaaaaaaaggaaatcacaaaatatacacaaaaacttctatattatataaaagacaacacaaaaacttttatattttttcgaaacttctagtggatcaatcagttataacctcttaggacttgaagggtattttagacttttttgaaaaatatccattcaatcacacagt

SEQ ID NO: 33108 - DNA, 609 bp, Oryza sativa
atgcattatccttacattccgaatcttttgctttcttcgagggttgggttgtaatcatatcagcatgaatggcgtcttgattgacctgagtaccacataaaattaacaaggatctatattgtacagggaaattatataacactgaaaagatatagttaatgcacttagtgattaaatttggggaaattcaagaatttattacaataaattgtgtctcaaatctgctaactgttatagaattattacgcaaaatccaactatggtgtttcaaaactatgaagcacgtaaatcagttcggtgttactacttctgtttaaggcaaacctttgttttcaaaaaccaatagatacttatgttgggtcaatcatgagcaaaagattgcaagtccaagcagttgacaaagacacacacaagagcctcttgcatcgcatgcatgctttgaaaagaagattgatcaaatagctagtttaatctacaataccatgtattaatctacagtaccaaacattaatctacagtaccatgcattaaccttagctagctaatgtactgcctgcaataagtagtacaaattgcaagatagcatagagccttagatgtcatggactc

SEQ ID NO: 33109 - DNA, 697 bp, Oryza sativa
tgaataatgtacctgtattaaatgcactggtctcttatttagtaatgtatctagatacatatgctgaatttttatatatagaagcatatgttgcttttacacatgaaggtgtatatgctatcaggtttctataatatggttcataagtgaacagcatcaaatgtctacgttactttagtttgaatgtacacgctgatataaaatttagagagcattcttggaatgtacatactggtaagaaaatttagatgaattaaatccttatgccttatatgttttttctcacacagttgtaagtttgtttggagaaggggacattcacaaactgcttgaaagaggtgttttggtatctcaatatatgggggaatatttactactgcttttagtaactcctagataatctttttttacatacatgcataactaaatttgcatatatcttcatgtgcaattgcgctctctgatattacaatggtaggatttgtctttgaattggtatagtgacgtatttctgattcattaagggcaaactggggagtagaactgttatgtgcgagatattcagtttatatttctaaccttgggtgcactttgaataaggcgaataggctcagttgaatctgttgagttacataaagaagaggtggatgtattgaactcactaatgtttttaggatgatgcttactggattgccaa

SEQ ID NO: 33110 - DNA, 600 bp, Oryza sativa
caattaaagaattttttattatttgtgagtaccctatagttcaacaaatccttttacttactcatcattcatcatatcacatatccaatggtctaaaatcattcaatccaacgcctcagattaccccacctttcccctcctctccttcccgcacctgaaatggtgaaatcacgccgcattcaccgacctgtgtctcgctcttccctcctctttctcccgcatctgccacgcatttcctactcgcgctctctcgccccctcaccgtcgtgcactcgtgcgccggatttttcacagaatcgacgcgctcctcctccgcagtccgcaccaccatcgtgccgcgcgcctctccctaccgcgaaaaaacgccgcgccagcgcccaccatcgtcactggccgcccatcgctctccaccgcgcccttattgcgcctgacgcgaaggaggagcccgaggaggaagaagaagaacaaggaggctgacgccgatgcctgcaggcaaagaagatgaccgagaccttcttgtatgagggaacaccgaagaagtcgttcacgcgcgggcgaccgggggcgaaccctaggccccgggccgcggcacccacccct

SEQ ID NO: 33111 - DNA, 1287 bp, Oryza sativa
gtctgctccagaactacaaaaagagaggatatgggggaggttgacaatagtatccttgtggttttttctgttttcgtgatgtataactgataattgtttattgagtaaattgcgcttgtggtacaaaaatttgtatggtgggtgcaaataggtataataacttgcaaattgctcatctcggtgtagtaacttgactagtccgtgcgaattgggccaaaattgtcaatgcaaaccaaattgttgtaaaacatcacaaacagatgtggcatgatagcttacatgtatgaccatgttttggatatcttatttaaaatccaaagaaaaagagaaattagatgtgtaaaattacatttttgatgcatagaaaagaatttatttcatgtcttggaaaaaaattgtcctgtatataagtcgtataatgtcgggccaggaaaatttcgtccatgagccttctggaaaattcattttatttctcattctcagacactatttcaccgaaaacttattttaaaagtttatttccatggttggacattgataattgtttcacttttgtcaatctaaacattgaaaatatcaagtgaataatagttacacattttatcaatccaaaaattgatgcgtaataaaaattactcattaatatgtaccatattagatcaattttgcttgcagagattgttttggcctaggttcgcacggacttggcaagttgttgtatcgaaatgagcaatttgcaagttgttgttcttatttacacccaccacgcaagtaccataagtgcaatttactcttatttatttttctttagaatggttgcatcataattacaagattaaaaattaatagacaaaataatttacataattagtgaaagcacatagtgttttcttggtttagatctgaaatttgtatagtctaccattttgttctcacttcaaagtgtataaacacatgataatttttcacaactaaatagttcatataaaaaaggaatcacccacaacatacatgcaaaatcacgctgttgttcctttggtccagatttgaatttggaaaaaaaaatgaaaaaaagggtcgatgaggggattagctcctcgcagtcgcagccctagctgccagccgtgcgccgccgtcggcctgctagccgcgtgcgccgagccgccgcctgttcgcccgccgccgccgcctggctcgatggatgttgataggtgggagggttacgggagggaggtgaggaggtggcagtttcgcgtaaatacatcaaataattaaaggacagtgggt

SEQ ID NO: 33112 - DNA, 536 bp, Oryza sativa
attttgaacatcttgaaccattttgcatattccatgtatctccaggcattgaagggctattggcagtatatacaagtgacagctgaccaataatttgaacgataaaataaaaatcctttctaattggcatgctagtcttgagaacaaagtttcaattattattcacttgcttagttgctccacttgtgcaccttgaggccctgtttttgcacgaggtactttttcctgattcacagtaaaaaaaaatgttaattccataatggagtttcttcagtgtttgtagacgctgcgaccaaatgacatttttgtttatttgatagacctgttaatataagctcatgtaggatagtttatcatctgatattgatacatcacagatatacctggtaattgcttggtgcaatgtatactctgtagtaactagctgatgaaatttcaatttttgatactatgatgctgtgctacttgtagttaactagttatttcctttttatatatacatttcaacataattgtagacatttatctctttgata

SEQ ID NO: 33113 - DNA, 504 bp, Oryza sativa
cgcgccggtgagtcgcgctttcttgatccccgccgtcgtcgtcgtcgtgggagtccagacactgcggctccctcttgcgcttcttgccgtggccgctgaacctgacgcggtacagccggagctgcgacgaggcgaggtcagccggcgacgtcacggcgtactcgtgcataacccagcccgagctgccccgttcaccctcggcgaagaagctcagcacatacttgcgccacgtgatctccaggccttcgtcgccgctgccgtcgacgccgcctccaccgtcgcctgggacgaccagccgctcgccatccacggccatccgctgcccctgccagaaccctccgccctccacggttcgcttctgtcgctttcccttgccattcttggcgcgtgcccccgcgaagaagaaggcctcgtcgcctcgggtgtgatccgcaagaggcgtccatggcggcacgctcaggggatcggcatccacgatgacgccgtcgagcgggaggggcttct

SEQ ID NO: 33114 - DNA, 592 bp, Oryza sativa
cttcacattttagtgggattattttaatatattttaatggatttacatataaagatgcagaatcataagggcgtttgtggaaaagttgtggggtcagcagaccatacagccttatgggtggctccacaccactgcttccgtgatatatatgtaatgccaggttagctgaattaatttgctctagtcatcaagaaataaagtagtacaactggtagcatgcaaatacgacattttcttcatttatgttgttgacgtgtttttcggccaacatgggatacacctagtgacttgcgggtatagtcaagagagtctctaaaacctgctttgatctccttggtttaggttgccttcatcatacctccaatgggtattgggacatcattgaaccctactttgatgatgatcacctccattgtcttggtctccacctttgagcgtttttcgcccttcttctctccttccaactcgtcaaccgattcttttgtttgaaactggcttttggttgtagcggagaagcaatcatgaactgaattcgttggtttccactccatgatgaaattgtattggcagggatggtagataaggggatcct

SEQ ID NO: 33115 - DNA, 1164 bp, Oryza sativa
gagtatatacatattttgatcattgggctgggtatgcgtagattttgaaacatagctagctatcggctatcccaaacacatatcgatccatccttacccaggtaaaattaacatgttacatgtgcgctttagcctgtttcccaggagtttttggttctcgggaacttagcacagatcctgctagtgaactgccaaactaatcgttccatgcatatgattccatcatccatgagagaacttctactagctagttcaccgtttatgtttgagtcgtgtgcctccagtaatacagtatatgtacagtcagatccagtaaccaaattaacctgctgccgacactagttaattaagagttgtgttcagctgttttgcgactctgttacctgtcgatgtgctgacgcatgctgtttcttctgttaaaaaagctacatcgatggacgtaatacgcacgtacgtcagcttaatctgcacgagctatagttaaggtgaaatttattgtgggaatttgcttggatatatacttttttttacaaaatcatgagttacagttaggagtctgatcgtctcaagttagcatgcgatgttttttaaaaagatctcttatagaactccttttgtatttccaaaagtgaacgaatttaaaaactgactcaaatacatatacgtattttcaaaagcgaacgaacttaaaaatcgactcatacacagatgacgtaccaaattaccggcaaaaacatcttcaatttttataatagtagagatattccgaccaacaatcatttttctcaaatgcttaatagtagggtagaaaaatgtcactagagatagcgagaaaatgtaaaagataaagatggaggaaagaagagaaacaaatatactataacgtctttatatgtttcatctctttcattattaatataactagaaaggtagcccgcgcattcgcgcgggcatataagatacgcttttgtaaggtgtaatatcgaccgggtgacacaccactcttgaaaaagtacaatttcttataaattttcttcatctacattgctcagatatttttttacaagatatctgtaaggtttaaactatataatatttaattcactactataagctgcaattatcagtaattcttcattttctagaaaaaaagcatcaataaat

SEQ ID NO: 33116 - DNA, 579 bp, Oryza sativa
tgcctgcaggtcgactctagaggatcccctattgttacatgtacttgtttgtacttgcatttaatatattgcagttcgcattatttggtcgtcagctaatttgcagtgaaagagatcgatggcaataatgcgtgaatcaacatttcaatattagctttgataggatgatcgggacgcgtgcttctacgtgctatccgtgacaaaaacacacattgttttggaaagtcaaattttaaagctctgaattactaataccttataatatattgacgcgcaattcttttgcgtattcgtgaaaaaaataccaatacttttttaaggatatttagattggattcatgtatgcatgaagcttgtatatcaatttgtatacatcttatcatatattgattagttctttcatagatatatcactataatttgttgagactatcactggtggagaaaccctttgtagtcccggttcgtaacccccctttagtcccggtttccaaaccgggagtaccaatccgggactaaagatcgctatctttagtcccgggtgaaataaccgggagtaaagatcgatctttagtcccg

SEQ ID NO: 33117 - DNA, 1568 bp, Oryza sativa
aatatgatttgtttgtgtcatttgtgagagggaggaggccacacatgagtctgccacaccaaatctggttggaaaggagccaaatgattggaaaagtatatttattgtcaatctaacccttccatccaaacatctctagggctagagttagttcagggttagttgagagctggaaactaactctaacctctaactctaacccttagatccaaacagggccaatattaccatgccagtcaaattggtgtgacatcgttgttttgtcacatcagttgtgctggtgtggctaaaatgttcaattcttcaaaataagatttgaaaggtttatttttaatattaaaatttttaaaaagttaaaaaaaatcgatggcataggagtatatgtaaaagcagctactcaagtctgatctgatgagagtttttaatactgtagtggatatgttgagtactccagatgagattaaggccgagtttagttctaaactttttcttcaaatttttaactttttcatcacattaaaactttcctacacatcagggtatcccaaaccgttggggccggggttaccgcgccccggtggtaaagcacggttaccgcgcggtaaccgtgaaaaaccgtacaaaatttatcaaaaattcaaattattttttaaatttatttgaatttaaggatgttaccacgatatttatattaccgtacccctcacggtaagcccggtaaccgcgcggttaccggcggtaagagaaaccctgcacgcataaactttcaattttcccgtcacatcgttccaatttcaaccaaacttttaactttagcgtgaactaaacacaccgtaatacaggtgagagaggggggggggggggagggtgaatgacgtggcatgtcgacgatagacaagggaaggaggggtgtgggaccaggttagcatagggtggtctggctggaacgcctctctgtgctgtgctccactcccctcgtcttcttccttcctcggcccggcctcgctcgctgcctgccagctgcagctgcaactctccatccatcgatcgatctcctcctactcccccgccgccgccccgtccaagacaagccaaggtatgccaatccattcctacctactactacctcctcctcagcttcactcactagtctatctaatctcccctagtgagactgagactcgcttgccatttctgttcctgtgctaaattgctaagctacgggtagtgtcttgtgcagccagccaccactccctgcatgccatggcctcacggaggccaacgcaccgccaccataccgaggctccagatcctggtggaagagggagagggagaggccgtgccgcccgatatgctcagcctcagcctcagcctcagcagcagcagcagcagcaaggacgaggatgccgtgctagaggtgcctcgccgccgccgccgccgcagcagcagcagcagcaacagccaaggtctactcctactcgtgctaccactgtcaccgtggcttcctcttcatctaccacggccaccgcatcatcaagccctctagctcccgagctgcgccaagcaat

SEQ ID NO: 33118 - DNA, 695 bp, Oryza sativa
tcaattttcattctaggtggcaacttatttaatgttatggacaccatcctaatcattgggttaggaatggccttagagcaagtataatagtgagctataagcctactataaacttagggaggagagaggtagtgaaaaatcaagggtgttggctcttatgcaagagctagcttatcacaagatccaagacaaatacattaaatgcataattaagagatagagagaggagaagaaaatattgtagccaaccttatagctaatctattatatatattggctttaagatgggctaataataggaagtgagctctaccattatccttactcttagagcaagtgcaacaagaataaatgaatcagcttctacttaagggcatgttcactttatgccattttcaactttaccaaattttagcattaccaaaattttggtaacttcttatatagttactaaaatttgacagcaaactaaatgtagtcacttttttttaacaattttaccaaatttgataagtttgaaaatgacaacaaagtgaacagcccctaagtatgccaaaggaatgtagctcaactgtttcgacaacggggtttaagcgttagacttcgcatttatgctcaggtttacagctattttttaagtgatgatggacataccagccaacgtttctagagtgggtacttgtgcgtttgaatag

SEQ ID NO: 33119 - DNA, 507 bp, Oryza sativa
caaacaggatgctctgttataatttgaaaaggcagcagcatgtgtttcaagttacttaaatcagcaatgtatgtgttttccatgtaatgttggttgaaaaggctgatgcagttgaaccactttcatccattttcagatttacttcccaatagaaactgtaactgcagaccataagaacatatggccgggttaaaggtaatagtgataaatttaattctcttgcatattactgcatcacagcattgattgatgttcacaattgaaactatataggatttgatcagtataggagtatacaagcactttcatccattttcagatttacttcacaatggaaactgtaactaaagaggatgagcatatgaggcttcaggaaatggttatcaatttagttatcttgcatgttagtgcatcacagggcaccgcattgattgatactcagcatccgaaatcttataaatgagaagagaaaaggagtagcagacacttgccttacccatgaacgca

SEQ ID NO: 33120 - DNA, 513 bp, Oryza sativa
gacgcaagtcactggttgtttattcgttggatggttatgaaagggtaaaatatgtcatgcacctccgaaatgtaaagattatagtaaatgtagacagcaaatgcaaagggcgcaagcatgtgggtaggcaagtaaataaaagtaggaaactggaaattacatgggaggctccgttggcgttgcattagcaaaagagatggcgccatcatcttcagcaacagcatggggagcattggtggcaagaggggtgatgtgtcgccggtttatgagcaactttggcaggtttgatggggaggagactctggttggtctgctacccaacagggctgaggaggaggaggaagagataggccttggacagcgcgcagggcgtgccgcgtgatggtggtgcatcatcactgccttcatctcgatctcgaaatctggatggaggaatcaattaaattgaagggggaggcagagcaagaagagagatggagctggaccagccggcaggagaggacagcaagttgc

SEQ ID NO: 33121 - DNA, 697 bp, Oryza sativa
cttctttctcctcctctgggtcgtagtcgacggtgaagaagtcgtcgtcggcggcggcggcgcatggggagtgggagagactaggagagggttgtggtcggaagaagaaggagcaggtgtggtggagtggggtcatcgccatcggcgggggaggggtgcaggtgcgagtgcggcggaggaccaagggcaaggctcctgcgacgcccccaatgccaaacccaatcatcatcatcttctccaccccccaagcttcttcttcctcctcttggtgccatcggccatcccatcctctcccgcgtgttgtagggcccatgggctgaatcatttagtaaggcccaagggatgcgccgtggtgcgcggaagtaacagcccatcgctgctcatggaaatgccagtttctccaaaagacgctatgtttataacaagtaaaaaaacaccagtaacaaaaaaaaaagcatgtactagtatctatctatctatctatctatctatctattatattattaaaatagctttgaataaagacaccacgttcgctgtcgaggctagttaatcgaagaaaagagaaaaaagctacaccgttagattacaatgaatataaattaaagggtgtaggtttatcagaaaaaaaaattttatcagtacgaaacaaagtctatccaatacataataggaaagttactctattatattatta

SEQ ID NO: 33122 - DNA, 725 bp, Oryza sativa
  unsure (1)..(725): unsure at all n locations
tgaagattattttgcacaaacaaagggcttacaaccaagccccattttactgtacagaaacagataaagcattcagcactgttccaggcatggagattatacttcacatgatagaacttgctgaacataaattgcaccaaactgaagatcctttgtaacagtatttgccatccaatttgccgccctttaagaaattaccatttgatctataagcctttcaattttaccatcaggactgcgaatttcttcattccgtgccacttcctttcggttcgagcgcatcgtctgtctaagtttgtccgtacgtccgtctgcctgctgacacgtgcatctgttcaccccatcgatggtgttgacgatcagcccgttggccccttgcctagggcatcccaacagtagcaccgnacgaggaccgtgaagcagcttttgggggtcgtcgttcctctgcagctttagagctcagcgacagctcctcctgccagtggacaggacccactgccgtcagatggacagttactattgtgaaatgcacttactcagccgttatgctgtgggctccgcacgaccggtttcaatgtggcaagtgggtgttncccggaaatccaaaagttgggaatggcagcgcttggtttctaggggacttaagaagatcggacaattggtgccccattgaaccatgctcacatgccctcaagcattaggtggaatcggttagcccccacggt

SEQ ID NO: 33123 - DNA, 583 bp, Oryza sativa
  unsure (1)..(583): unsure at all n locations
gatggccactaggactactgatataggccgacnncgagctcggtacccttagtgctttgctaggaagccgcttacaaaatcacttggtggtgttgtgtagccatttgaatcatcgctcagctcatgtacagatgccaaagattcagcgctccctccatatccaatgctcccggtatgttccagatgatcattgctgcattttagaatgatctcatccatgaacttgttgctagatttgatccaatattgctgcaggtgttgattatagattttggagaatatctcaaactatacctagtacacatgtgttttccattgataaccacccaaacctgacagcatttgcgcagcatcgcttcctttgacatgctcctgcataataccctggtttagcatgcgcatggagtaatatatgccaatagagaaatggatctcttttgaaagaaggaatggaaattcaaaatgtagaatttgggatcttaccttgaaccaatgataattctcttaattttgagcttctttatcagattcacaacaccagcaagaacatcatcgtgtgaaaggtaatgtgccctaacctgta

SEQ ID NO: 33124 - DNA, 528 bp, Oryza sativa
tacatgcggtattgttcttaattaccagctgaccactgcgacgcaattttggaattttaagaatgtaagatcatgagaggtctctgtaaaacgaatatgaaaaagtcggtgacaaaaccacatgactttgcatatgtattcaactcacgatcagatcgatggatcggttgcaaaagacaatatagtcacggtgcatcgcaggcatgaaaccttttaattgctacctagctactagtactattcgtagcagcgaacgattatttgacttaatttgcatccatgcagataatacagattccaatcgagtcgtacagggcagtgatctatccagtatccatgcgtgtgtacctgcagtacatatagtttttttttgccgtaaattttaagcatcttaatttacactgtgctcactatcatataggtatagctcaattaatcaagtacgggccacggctgtctttgcattcatcggtcaattaatcaagcactgtggatcgatcgatactttgatagatcaaggcgtggatg

SEQ ID NO: 33125 - DNA, 691 bp, Oryza sativa
  unsure (1)..(691): unsure at all n locations
tatatattctagtgtaaattggtaactcgtttttagacactttctattaaaaaataaatacaaagcagagaacggtatgaaatgtatacaatggtgccatagctttgatatacacgcactaattaaactcagctctacctagctacatctaatcggaaaaaaaagcctcccttatctacataatagcttcccttcatccacaataagttcaaatgcgctacaaaacaatctgcaataaaaatatcatttaaatgatctccaataaataacttctgtcgtatcaccagtaatgaaaaccacaagccctttagtgttgtactgttgttgtatactccatccgtttcgaaatgtttgatgccgttgactntntannacatgtnttgttctttgttttatttaaaatatttaantaattattaattctttttctatcatttgatttaatactcaaaatatttttatgtaagcatataacatcacatatttcacaacagactttgaataaaacaaacgttaaacatttgctcaaaaggaaaccgcgtaaatctttgtgaacggattgagtattctaactgggtcgcactagagcggcttgtgttaaaatatctggctttttgtcgaagttttttagagaggtcttccaataaaatttgtgtaagtttggtaaacagcgccttgaactgaagaggcg

SEQ ID NO: 33126 - DNA, 679 bp, Oryza sativa
  unsure (1)..(679): unsure at all n locations
atttcgagacacacaaaagaaaaagaaattcgacgctagccagatgctatatatcctgataccctgcaacctggagccccacgcatgcagatggtaaagatgcaaatctttattccatttccatgattccatccacacaaaaaagaaacgaacaatacagagaagaacaccaagaaacacgcatcggcgcagaggagggtggaaaacgaacccaatctcaatggtgattgggttcttgtttcttgacttctccaccttttcctgccagcgcctaactttattcgaagatacctttccctctcacgaactcgacgccttcattggaggcacacgcacattactgcgacaagaacgtatgatagaaaataataaatgccggacaggaacacggaggaggaatcaatcaatcactcactcactcacttttgatttgggcttgagagagagagagagagatctccagagtcaagccgcacgttggctcctgctctcttcggaaccacgtgaatgaatcccctnctnttncttctntntntnctncacctnactcactcttaaccacaaggaacgaacaaaccgaaaaagagccaaccaaccaaccacgtacgtgcttgtctgctgcaacgccgcttggtcgggcgaacacngncgggtagtcttcgcgagcgcccggcaccca

SEQ ID NO: 33127 - DNA, 531 bp, Oryza sativa
  unsure (1)..(531): unsure at all n locations
cattgagtgacaatcgactctcaaagggngcatncgagctcggtacccaatttcctcatgaaaggcttcttatgctgaaaaacattcgactgactagggcaacattttggttcatccagtaaccagtatggaatcaatcatttttcaaaactgcattggaaggacctcggtcattcatatacatattgcatatgaagtaacatttttgcaacaatagaagaagttctgccttttctggttataatcttattactactgaaacatgaatggtcctgggaatctggctcactttataagcaaaaaaatcactttgatagcttaatttggttcaagtttatatcatctgatatcgtccacatcaaggagatttattagcaccagctgaaggataaaatacattaatagtgaaggaggaaaccaatgctcttaccttcttagaaataacattactcattaacttctccgaaaggtgtacctgtaattacaaagatagggaataagtttgtgtatgtctggaaatatatgatacag

SEQ ID NO: 33128 - DNA, 687 bp, Oryza sativa
ggtgatcatcccattctacttctactctacatttggtttctttctgtacaccatttgtctgatgatgcatatcttgcctgcctgtggtttgtgtatcaaatgttcaattgacatgaagttcctgcggtgcccttttttcatgtgtaaagtagcagcataacaaaccttttgtttcgcaaacaattgtggtacaaaaccgtcttattgtttgcaaccatcatactggtagggataagtggtatcccactgctcgagccaactgttgttaagcgaacaatggtatgcgtgatagataatggctctattggtctatggctatggcatttcaactaaaattatttttgctaatcatggcaaatgatttcaatttttcattttctggtgtcttttcatatatattacaaaaaacaataccggttagattatttactctgtagcctcatgtcccagtatcagggtgtttaccagtttacttgccagcaccttgccatttattttcttctataataaatggaaattgttattgtaatgcttgttgacatgtagagagtgtgtattactattattgaccatgcttattgccccggtattgttgttgatgaatatgttgacgttaaaacctcatctttatttgtcaatgctaccaccttgggaacaggacatgctatatatagtactttataaaca

SEQ ID NO: 33129 - DNA, 529 bp, Oryza sativa
tttaaagaaaaggtaaatttttagtttgatcaaactatcaaaaaaacaataaatttagtatggaacatatcataaaactatagatctaagatgaaatattacaaaactatatatttaaaaataaaattatcacaaactacaggtttagcactaatttttaatcaaaaaactatattgtgtatagttccaatataacagtagtgtgggatttctttaaaatgtagttttgtgatacttgaccttaaatttgtactagtttcattcatagtaatttttgtgctatgtatgtagttttgtgatataacactttacatttatagtttcgtgatagtttgtttgaaatatattaagtcttatgaaatttactaagtttcttttttaccgaaaagatcaccatcagtagtatgtagtctcattctgttacaacctactccgtacaaaacaagaacagagatgcatcgtgtatactccctttttctctaaataagtataattttaactagtcaaatgtatatatacatgtacgtag

SEQ ID NO: 33130 - DNA, 564 bp, Oryza sativa
ctggcaaacagacacctctagctaattagtactacacctctagttaattagctctatcttaaatcaaacatttatatctttattattaatttatacaaatttatatagtttgacattgtaagattatgttaaactacactgagttttgaaaattaatagtcaagattgaaatatttgacttaaaataaagctaaaacaaagcaatttaaaatggaaggagtcctacactccaatgcacggtttttactcccaagctggcccaggctaagtaaataaatttgatgaaccgacacggtttcgcgatgcagcttaactgcgtctcaactaaaagttctcttctatactttccaggctgtgtgaaattgaaaagacatgcaagcatggctaatccaattaattgttcataaaagaacaaataagcatactggtggtgcgcacacatcgtcttcaattcttcgtctacaattctttcaacagaatctaatttaatacacgcgagatctatccgaatctacagattaattaaaaacctaatgcaaagaataataaacaaactgtatttgg

SEQ ID NO: 33131 - DNA, 691 bp, Oryza sativa
cagcaatggaggcctggtaaacgaagtagtcggcgagggatacagtaaacctgttacctctgccgaggatgaggcggatgaggaggaggtcatcgtgtgcggcgatgatctggggctccatggcgtagtcatcggatgcaggattgagggtgggagagtggacgcacacgtaggagacgagctgcggctgggcggcggtgcacagggtcacctggatttcatggccctcccttgttttggaagtagcagtggtggcgttgcggacgtcggcgccggcgaagtaggcgagcttgtcgaggagtacccatcttggcctgcgccgcgtccccttgtcgacggaccggccgtggaaaggaggacacagggaagcgtccatgacgcccatttgcgccatgatctgatcctctcctggttttcaacgcagcagccgactggatctatatatactataataaatagaagaacagaccttcaatcgcaatcggaatcgactccgacggcgtatcggtatcggaggccgcccgccgaggccgaggaggaaggggaaagaagagcaatgtggcggctgggggctcgccgctactcatcactaactagggtttccttctcttctcactctaccgtggccttggtgcatgggcctgaattccggcccatgcaccctggtggatccaaaccagcgaggcccagt

SEQ ID NO: 33132 - DNA, 541 bp, Oryza sativa
atagtcaattcatacaatagttatctataagcatatactacataactaatatctggtcttacctgtcatacatacatgcaccttagagtccgtgctgcagctggctataaatatagttataaatgcgtagctcgctgtctttctctctcctcttttatcttctcgaaatgtgtttatagctggcttatagcctgctattgtacctactcttagagcaagtttaatagtatagtccactactagctccaattcatctatagccgatttaatagcgaattcatacaatagttgcttactatactattgatatatgatcccacctatcatacacacattgtgtcttggagtccggctgcagctggctacagatttgtagcctgctgctcttctctctcatcttttatttcattgaaatatatttatagttggctaatacctgctcttaggagccttgctccctcccgcagttttcctgccttgcccttcttgtttgcaaaatggcccaatcataaataaaactagctgattccccgtgctttgt

SEQ ID NO: 33133 - DNA, 550 bp, Oryza sativa
tagtccatgattagccataagtgctacagtaacctacatgtgctaaagacggattaattaggcttaaaagattcgtctcgcggtttccatgcgagttatgaaattagtttttttcattcgtatccgaaaaacccttccgacatccggtcaaacgtccgatgtgacaatcaaaaattttcttttcgcgaactaaacatgcccttatctctctcatgttggagagtacaaagagaggagtatcatatgatgtcagtcaatgttacaccaaccaaccaattgaggctgcttcactcatcaatactagtataatggagacattggccctatgtggtattggagatgtaggatttgtgagatccagttagtagatgcaaggtcagttgagacatcactcgcgcaacatagccggcacaatttaatacatacggtcccaatgtctggtcgtctgcattgcaaaacacacagctctgcctctggtggagccgtggaggagagctctcaacttcgatttgcttgcttctgacatgttgcatacagttatacgttgtgt

SEQ ID NO: 33134 - DNA, 904 bp, Oryza sativa
aggaaagcaaagggtcaatggttgggtgtacacgaaatattttgatatctcaaaagcttggcatgctggactcagcagttgggtgttttgcagttcaatcgtgcatgcaaaatgccaacgttcaatcctagcatcaagtcaagcaagcatggctcactatatactacacacatgcaagtgcaggacacgcccatactccatgaggtgatggacaaattatgcatttatctatgcctctactagtcctagaatgcgtagcacgtaacaaatgcataaacaggtgtgagtgagtgtctgtattgcattgcacttgagaaaagaagctaggcaaatatgaggtgcatttgtgggtttaatcaaatgacctgtctggggtctgcaaaccagaataatggctgttgtgctttcttgtgctgctaatgtgtatgtgacacccagaaaaagagaaggcatcgctacgcaaaatgtctttagtttcagtcataattatttgggtcaagtccgatttaccccctcaactatcacagaagtacgacttaccccccttaactacgaaaccagatattggacacccctaaactattcaatccggatacttaacccccctggggctcttttttaggtggtttcgatctaaagctatcacacatgacagtccaatatgagggaggaggtgcatcatcagcaacatgcttctccctctccatgggacccagcaatcagtggcatgcacttcttcctctatcctttctgttccaatctctacccaagcctgtgtaagcactagctcacctgcagccctcaagatccacaagacggttgttgtcatacgtacatgtaatcaagctagatagttctgaaaaatcactctttgaaaaaaaaaaactccaagaaatcaaagctg

SEQ ID NO: 33135 - DNA, 580 bp, Oryza sativa
cctgcagccctataatgttttttttttgaaagagacgtgctatctcttctagcaattttccctagtaccgtatacgggagcagtagggacatggctatgtgcatccggcttgatgtaaaagccaagtttatattccatttaatttcttaattaaatgaaacatcagtatcaggagttcaggaccagagaatcggaccagcaagaaatatatataatatatccatgcatgcatgcaaaacctttctcatcactataaataggtacgcaaatctcgatcgagctcgccacatcgatcacaggctaacagctgcaagaaagcaagcttaatcaatcaattaagccaagtggtacattaattaattacctcaagcaagagtaacaatgcaagctacttggtccaaggcgtctctgatcgtcgccgccatcttcctcgtcgccggcctcctcctcagctcggcgaccgtcgtccatggcggcggcggcggcaggaggttcgtcaggagctacgacgagccgtgcaaggagatgaggctctacttccacgacatcctctacgacttcagcaacagcacgggcaact

SEQ ID NO: 33136 - DNA, 528 bp, Oryza sativa
tttatctactcccaatataattattctctatttttataaaatctgacgcaatgattacttaaaagaacttatttaagctaaatgggaggtgataaaaataaacttaatatgaaacggaggtagcagccaactactggcacataggagtacatattgtcaagtgtctcgtccgttttctcccaggcaaggtcattctttcttttctacaactgtggtgcgtacagtgcagcagcagttgtatgcacttgtgttgatctgctgctaacgagttgttctcgtttggaggtggagaagaagtgagttgtaaatgaaccgacagaacgatggccacaaataaaagcttccatagttgtaaatgaactgccggccggcctgcaaaatgccgggtctcccgcgccgcgcgcgacgatcgagtggataagacgatacgcgcgcggccaatgcatgcaatggatggaaatcggcaatcgagtcgagcgattgaccgaatagtgtgggcgggcgagggaggaagaaatttactgtact

SEQ ID NO: 33137 - DNA, 719 bp, Oryza sativa
ggggttcatatttataccccaagtacatattagtccgttgtggacacgactcaaacctttctaaagttaagataaaaataagaccatatacggcggtctcttaccaaatctaataaaaaccgactcaatatcctaattaatagatataattgccttaattgagctccatctctaattggcaatgacggttatcccaatctaagcccatgctgagcctaagtcatgccatatcagctgtatcggccatcaatcttctcaacttgttcagtcttcaacctctgtttccagccgatgcggtatccagccgatccgtagtctgattctgaatccaactcgattcaacaccaaatccgcttcgattttcttccttctccgaatctgatgcaaattttcgttgttaacaaatataccactatttttatcaattgtctatacaatatgccattgggccatatactttgtaaagaattcccaaaatgcctaaggaaatataaggctgacaattgatttatcttgtcagaagattaagagaggggatcctctatgaaaaattttgtctatcctcctagcacatcatagtagattgtgtaagtttctatatttctgcattattaactaacttttgaaaataaaacttacatattatatggtacataaattgtgttattgtttttatttatgtaagtaatctttcatatgatacaccaaatatttttgtg

SEQ ID NO: 33138 - DNA, 693 bp, Oryza sativa
gatgactcatctttgatgtcaccgtcgctagggcaccatctcccacggttccttccccgttgtcatccacctctgcctctccacggatcccgttgccctccatcggtcctcatcactcgaatcccaggctacctcgaagaccgaatatcgggtcccaaaactaatgacttggatccgactgagattaatgtatcaatccctggatcagtaaatattgatacatacaatatagctggttcttcattgcatacgttaaagtttacaatactaagggttttacaataataggtactcacataattaaacataagtaagactattacacagcggaagtttttatacattctaactagggaggtataacctctcgggattttctaagttatcagggtcatcatagtaataatcataggggtcctcctcttgacccaaatctgaaaaaggggttataagagaagggggagtattcacaatacccaacaagttaccatggaaacatgttatgcattggtatagagtaaagttctttgcaaaaagcaataataaacaatctggaagtattaaaccaaaagtttgtaaatatgtagactttaaggttctaaccagggtaccatatgagtcccgggactcaattccgggagtacagctattcgaataggttcataaatattctactggagcagatgtacgctt

SEQ ID NO: 33139 - DNA, 631 bp, Oryza sativa
gggcgaattcgagctcggtacccttaattacaaaagatttgtaaaaatgatgattttagcttaaaaattcaaattgaatagaaacattgatgagattacagtctctcctatgcaacttgtaaaatcatttgcagttgatgatctaaatgaacctgccgtttcgcaaaccaagtatgcagcaggagttagtggctactgaatactgagagggcaaaacaatactgccaagttggaagtggtataatttcctgattggattgcattttgggacccacagcctgatactgctgctggataccatcaagctgttgaaacctcagaccatggtaaacaagctttaaaacccccggctgtctctccccacctttggcccttctttcaactgatactttctagttttaagaataccatgaagttgatggtattgatacagataccaccatgaagtgaagttgatgaaaagtggtgcaccacaataaggtactttagcttccctttcttctggatcaagttcagatatactcttaccttcttcctttcaagccttgcttgcttctgctgctgaaccagatatattgacaagatcagaaccacaatttgattttagttcctgatgtagaagagggcaaga

SEQ ID NO: 33140 - DNA, 612 bp, Oryza sativa
attttacatttatatagtactggatcctcatgatcctctttgctttggtggtatgctgcggaatgggatggttagtttggcaccctaacataatcatgtccgagagaacacaagacattttaaagaagtccaccaaatcagctgggattactggaatagtactattcggattggtgaattttctcccattttttgatctggtatggttgcttgtctgaaacacatacgcattctactgttgtgtccattaattgttagtttagtctaaaaccttttggttagttagagaacaaatcatgttcagtatcagtttcacactgaaattaactttggaaatgtatcattgcttaataagaggaacatgtatttattttggtaacatagtttttttcagtagtaaatagtaggtatatacctatgcaggcacaaaataagttcaggacaaccaagctaggtttcataggatatttgtgtccttgaggctaagtagcgatccaattttgaattgctgcacccaccccttgtagtatcatatttcatcatgtgcatcattatccacttcactgttcgttcctaccaagggaaatcactcagtaatgtaattagtgtggc

SEQ ID NO: 33141 - DNA, 685 bp, Oryza sativa
aacttttggacctgtaagtatgcattttctaatttgcacccgtataaaaaactagggtatatatatttgctctcgagatgtacgcactggtgaagaacacctggcttctgtagcagtggttgatcgttaaaaagaagaatattgtgctgcttgcaactctagctaggacggacggggggcaaaaatgctgtggtgcaccgtggtacgcaacgtaccggaagactacctaggtaggttcaagtgagtcgcaccaatgcaatgcagtaccatagataggattcaaaacctctctctctctctgtagagcaaaaaagaaaaagctagcacagagctgctcacttctcagtatagaggcagaggcagagacgacagaggcagcgcgattctttctttttggcctcctctcctcttgtctcgctcttcttcttctccctcttcttcttctatgagacctcgctctactctctctggcggcgcggccacactgctcttcttcctctgatcgagacctctctcggcggcgcgcacactggtagcgtggtgagcggagcggtacactccctactccccagtgcttcttgttctgtatacgcatcatgttcttgcatctcacatcttgcaatgtttttcatgttctatccgcctccctcttctttacaatctgtttctcgatctattgtgtgct

SEQ ID NO: 33142 - DNA, 679 bp, Oryza sativa
tgttatgttgtttagagaacatcgacattagcttgcaggcaagttgttttatagaagtggaagatgcagactgattcgagatatatgtcattgtttggctgcgaagtctgcccatcctttcatcaagttgcagcgaccgtctggtgacgtggaaaatcatgttggttgaaatacctcctgctacttgaactttaatgttgatgggatagctatacttcagtgttggaggtgtctggtacccctgcatttaatagttgattagtaatatatatatttcattatcacatccacccaaaatcccttatatttatctagttgtattgacaatgataaaaaaaaataataattactaccgcatagtaatcaaatatggaaggtaaaatgaaacagattagtaaagaaaagaaaagttatcaaagctcttactgataattagcaaaacaagagttatatgctagccaaatatttcagttgactgcagacactaacctgaaagcataggtcatttaggtataattaactaaagagattgcagctaggatcagggcatctgcagtcacacagcttgggcatcattatctacatcaagcaaatctccaagcaaattcaggtaaggccgtgtttagttcacccccaactaccccaaactttcaactttccatcacatcacatcacatca

SEQ ID NO: 33143 - DNA, 545 bp, Oryza sativa
gcctgcaggtcgactctagaggatccccctgaatcttccattgagaagagtgaacatgggagtacatcattacaagggccgatcacagccagcgttgtgccactaagaatggtgagaagaaagggggcgggagagagtagctttccaagcttggattacaattcaatcgccgcgcttaagtcttttagcccacaaatatgaaatttaatttttattagtattattacatgtagaagtatatttggatttcatatataactcttagcttctatttctataaggtatggatttcatatacaactcttggattctatgtctacatgcttagatttcatataaaaatattaacttttatttctactagcaaaatacccgtgcattgcaacgggttaagaaagaaaaaagagaaaatttaccattgtcaagcactttgccatgcattttttctaatgaaaaaaaaatctagattacccctaaactatcatggtcagccccctgaacacgaataccagacatttttcaccctcaactatttaaaacggaca

SEQ ID NO: 33144 - DNA, 518 bp, Oryza sativa
gcatagctaatggggaacagctacatctaatgccaacgccaccacagatacctagcaaatttcatccttaggcatctttaatttgttttcttagactcaacaatggaaataaccaacctgaacaaactaaaacccatttggtttttagtataatcaagcaataagaccacaccttaaccaaaaattgggataatgaaatccaggtgtcattaatttccatggcctaacaaaaaacaagtgtagaagcttttcattgatgacaaattgacaactgaatggagcagcgcagccataataattctatcatggattattaatcagagtattgatcaggtttcacaaacattgttacgtcttggaaaaggacacagcccctgcttaattccaaactcatgtcagggtattaatgatgttttcactaaatgtacaacagacacatcatttagactccaatctcttcctttagacacatcatttaaacagctgcaatacgacttgcagattatctccttttctat

SEQ ID NO: 33145 - DNA, 1547 bp, Oryza sativa
aagtttttttaaaaagaactttcaaatataattacactatatttatactacaaatatatacatttgaaattaagctttaaaaaaaacttgtgacaattttttaaatgtttcacctctctaatagaacgtagggagacatatacagtagcaaaagcaagaatctcaaagagaaatcaagtaatactaggcatgccacaagcatccatgatgactgagaaacctaacaccgtcggttaacctacccaatttaggaactgctacgaagagtaaacatacgtgttacctattccaaggaggcaaaaaaataatcagaaaaaggagagaatccctacggtttcagctgttatcaactaatgatacgttacttcttcaaccatgaaggtgggatactgggattcatatttgcgatgatttacatacattttttaaaactctttttaaaagcttgctaaaattcaacaattaaaggagagatggagtggagcagtcaagttgagtcaggtcgtcataaattaaggtaaaaacgttgtctgtcatcactctcatgcatgctaataaacatgatggaaaaaagtacctcatttagttataaatatgagctactccctccattccaaattgatctacatatttcatagatacaccaaaactaagaaaagctaataactctctcatactatatttactctagcaacaaactcgatgcatgcaccatcacactatttccgagccaatagcaaatcaagatattgcatgtgggttataaatacttatatgcatgatgcatgcatcaatgtctatttactccaatgcacaaataacgaatagacttaataaatgaacacaaatatgtagatcatttaggaataacttaaaaaaactatatgtagattaatttgaaattgagggagtatgtacgttactaggagcgcgaaggtaaaaggatgactaatcagtgattgaattagatggataataagtatcttaattcttatctaatggttgctatctaattggtagtcctaattaatgtgatctaatgacaaaaattgttaatgatgtgtctttttctatatgtctttctttaaatgtcctttagtgaatactacttgtataaaaaatatatactccctacgtccctaaatatttgacgccgttgactttttttaaacatgtttgaccgttcgtgttattgaaaaacttttgtgaaatatataaaactatatgtatacataaaaatatatttaacaatgaattaaatgataggaacaaaattaataattactttttttaataagatgaacggtcaaacatgttaaaaaagtcaacgccatcaaatatttagggacggagggagtatatattagacctaatattttttagttttttaactatacagaggtacgcaggcgcgggattctaactagctagctagctagtattaacgtcatcgttgattcgcccccaaggttgaattaaactagtcgacgatggagctctataaatggcagtcccgcttccacgagctattcatgcactgctcgatc

SEQ ID NO: 33146 - DNA, 758 bp, Oryza sativa
ctaaggcgaggcggaggaggacgaggtcagcctcggtggcgatgatggtgggctcggctggggatccaaaagattatagcactgcatatgattttcgcttacatatgtatagttagcatatatatgaatgatattattatattggtaaaaactctaattaagatatgtatgtacatactgcatgatttaaaattaataaaaattgtaatcatcatatatacttagcgtaggaattatattaaaaattctccagtcaattataattagcatatgaatgatagtaaattaaatgttaaaaactctaattaacatatgaaattgccacttgcgtgatttaaaacttttaaaaatcctctagtcaattataattagcatatgaatgctagtaaattaaatgttaaaaactctaattaacatacatatgaaattgccacctgtgtgatttaaaacttttaaaaattgtaagtatcacatataactagcatatacatgatttaaacttgttgaaacctctaataatcgtgcgtaattaacatatgccatacatcaattgatttatatggataatcaatacatccaaaatagtttacatcgtgtacacaataattacggcattacatcggcggtgacggttgaccgcacgtactttctcctcactattgttccctccttgtgatcgctgcgtgagtaaggggtgtcttcatttgataggaggatgctagggtcaatcgtcaccgtgaaagggggttgcccatcca

SEQ ID NO: 33147 - DNA, 527 bp, Oryza sativa
cttcccagttcataaacaatatgtgggccattgatttacgcacagtccaattcagtatccagacaagctcagcttgaacttcaattccttatggacaccttagctgatcaccaacttcaacatgagagaccagatgagagggccttcatccttacctccgcaggaaccacaacagccgcggcttataatctgcacacatatcagtatcacggcacactatagaaactggcagtctttatctttctttttttttatcaagggctgcatggcccccatttccattaccagaaatgacaatcagagttcttacaaataaaaggaagaagaggttaaaaaaaaaaagagacagcaagagagagggctaggcatagagggtctgggacagacagagtgaacaggcaattactgaaacagaccacaccctcaaaatctattctatgaaccctgagccagccataacaaaactacccaagttgacagattacatttttgtgcccagattgaaacaaaagcaaccagcgtctggt

SEQ ID NO: 33148 - DNA, 3962 bp, Oryza sativa
attagctgacgaccaaataatgcgaactgcaatatattaaatgcaagtacaaacaagtacatgtgacaatagtttagagatctacatgaccatatcgatcgtaatacgtccatcgattttgaaacctacagtatatatatatctgcaactaacacaaatcgatagatctgatccttaattacccagttaaattaacctgcagttacgtgtgcacgttttaggctgttcccggccaagagtttttatttcatgcatgatgctggtagtgaactgccaaaactgatcgtcaattccgtgcatgattccatcatccatgctagtagtagatgactatgtataaataggcatggattcacacgtacgaatgcggagaaacgcatctatatatccatctctggaatgcttgcttacgtggaaaattaattttaattattaattcccggaactcgatcggccattagatttcgggtgaaacatgaggaacatgatcatcatgcatgcatgtacttatctacagcgtatttatcagagatctgaggtgtgcaccggtgacaaggaatatctctctagtcaagcataaaattaagatggtaagaaaatttcaaaggggagggggccgggtagatcgttgccggtttttcttttccattatgcgcccgcacatgctgctacccgttaattatgatcaatgatttgtgctttgttcatttcccttaatgttactcctatttaatttagttttttgtcggctggcacgtcctatacatacgtctatgatgcatgatataacgaattaaagattggttagttaactagcacggtgatctctacagattgtgccgctagcattgttacaaaattttatcagataatagcatatatactttcacgcttggttctgaaaggaaaattatgattttgaattagggttaaacttgatcaaaagtatatcgtatgatattccaactaattaatataataatttctatgtctagcatagccaatatgataaatcctttagcatctatctatctattatctactaaaagtccattaaactccctagaaacgctcctaagctgtcacgtggcgttcctacaaacgctcctaaatcgccacattattttcagttaaactggtaggcccattattttagaccgttagattggatctattttaaaatccctggttcatcttaatgtccgggtaggcccattatctaatcacagctgcttcttaatgtccgatatatagaagagaaattttcacgagaaaagttaacgtacactataattggatattacccatatgtattgttcacttcaaaaaaccaaacaaacatacgtatctacagctataaagccagaaaaaaaacatactatgctgtatgctaatagaacagcggttttaaagtagaattttctatattataaaataaaatttattactccgcatatatccatgtatatgcacagtttaaacaagattaatataaagtatcaaatcaactgtctttaaatgttcatcttttaaattatttatgaaatatatatatatatatatatatatatatatatatatatatatatatatatatatatatatatatatgtaacttataatctattatattccttcaattaaataaaatattgatcacatataatagttatattgtagtgctaaatacatggtgccgtcatataatacttaatgtcataattatttttaaataatttagccaacatataataattaatgtcataatgccatgataattttttaaataatttcacatgataaaatggatcaacttggtgtcaaatatcgctcgataaatatatcgcagtggagaaataaagcctcggcgactacggtcggctttattacctgttaaagggggcattcatatttgattttaacagtgttatcttattaaccattaggaacaataattatagaatatttattcatagatttagaaacaagggttgacataaacatttatgtttgtagtagatataaatgttttatgtattaataatatattgggcttattttagtggtatagatgcagatccatttatttaaaatgcatcccgctttaaggataataaaaacaagtaagaatgataatagctgagttgacatgtaacgtggacaaaataaaaccctacctatggactaactattagtttctcaagacatatttatgaccattagatccatcgttttcttttaaaaaatagaacccatataccaacctccaccatggccccgtacatgggcgcttactcattcatccaccccactgcccacaccctcaaacacaccatacctctcttttcctcctattctcatgctacattacttagaaatcataatttattattaaaaaaatagagaacagtatcatccaaagcatatagtgaatttttgatcgacttatttttgttatattatttataactaaagttaaagacacatattcacaatattcaaacttttgaaataaatatgtttgattttggtttatattcttacacttttgcgtacattcaaacaattataaaaaaattatgaaaaacatttaaatgttcatattttaaattatttatgaaatatatatctaacttataatctattgtattcctttatttaaataaaatattaatcacatataaaagttatattgtagtgctaaatacatggtgccgacatatgacacttaatgccatcatataataattgatgacatgaaatttttttaaataatttcacatgataaaaaggatcaacttggtgtcaaatatcgcttgacaaatatattacactaattcaaatctagatgcagggagaatcatatgatcatcggttttacttaaattatttaggaaaaagcaggaaaataaagtctccaattcctcaccgtccccataacatgcacacaacaccaaacgcccccttcccctttagcttaggctcttcgcactccactcctccctattcctactttttagctatcaaatttaaagacaaactatgaataatattgaaaaacccatattttaagctatacatctaatttctaatctaattgtttctctattaaataattaaacaacaattcatgatccattatgcattttgaacataaaataagagttgtataaagtaaattagaaaaatagaaaaattccaatagggattgaattaaattaattgggcagaatataataaatttgtaaaaaatagttattacttttcacaaattggaacaaccattatatgttccatcgccataaccatgtttaagtacttagatgttaatgaccatccatctatcttatatcatgtcattatgagtttttcaacgaattattacatatataaaacatatagttggttaaaaagttatctatatgctactattaactttaagtttaggactcatgttgactaggtatgtttttagaaaaaacactaaagatcacatatattatagggaagcgtgctgtacaatatgtatatctcctatgtatttattgatgctttttttctagaaaatgaagaattactgataattgcagcttatagtagtgaattaaatattatatagtttaaaccttacagatatcttgtaaaaaaatatctgagcaatgtagatgaagaaaatttataagaaattgtactttttcaagagtggtgtgtcacccggtcgatattacaccttacaaaagcgtatcttatatgcccgcgcgaatgcgcgggctacctttctagttatattaataatgaaagagatgaaacatataaagacgttatagtatatttgtttctcttctttcctccatctttatcttttacattttctcgctatctctagtgacatttttctaccctactattaagcatttgagaaaaatgattgttggtcggaatatctctactattataaaaat

SEQ ID NO: 33149 - DNA, 1037 bp, Oryza sativa
ttaaggtgggatctaaacaaggccttatacagtacatacgagggttgcaagatgacttgtgttttggactctactagtagctcttgttctctactactccctccgtcccataatataagggattttgactttttgcttgtactgtttgaccactcgtcttattcaaaaaattttgaaattattatttattttatttgtgacttactttattatccaaagtagtttaaacacaactttcggattattatttattcaaagtactttaataattctaaattttttttgaataagatgagtggtcaaacagtgcaagaaaaagtcaaaatcggagtacttgcaagagagtgggtaagaaaaccctcaaaagcactaatctagaattatgtgatacgcactggagtacacgtctgtacaaatgtgttggttttgcagcatgtgagcactctgcaactcatgtggtttcgatggctgggaatgggatcacgtgatgtgactcagtgttgcctcctcttcctctctctgattgatggtcgatccttgttgaaatgtcacactactgtatttaaaatgacaggcagatcaccaccggtatcactgtgctcagagagaacgattgttgggttcaaaaatttttaaatatcctcctacagatcaccatcagtatcactatgcccaaagagaacgattgctgggtttaaacatcctcctacatttggcatccatcagtatcactcactcaattgttcgttcggtctgccccaattacaagcctaacacaggcaatgtacctaggagaactgtacaacacgagttccctacgattcctttttaacaggaaatgggatcggcagatcaccaattgatgatacagagagatacatgatgctgtcgacatcagaaaaatgacagcataaagctcatcggtagatcttccggcatgcacgtccaagcacattactatagtctctctgccagctacgtactaccgtctaaccatatctaccatttgggcaaaatgcaggcacaaaagccacaga

SEQ ID NO: 33150 - DNA, 1404 bp, Oryza sativa
catttacatcatttacacgtgatccaaacacccttagaaatttctaaaaatcttcgtatatattatgaaatcaaatatacaactttccaaatattcaaaactaaattaatccacatatgtgcaaacaacccaaacaaaccgaacaaatccatctataaatggcggcactcttcatacatatactctctcatagcattagttaattgtgtttaataagatgaatagtctaaaaaatcaatggtgttatatattaaaaaacagagaaaatactatatatacaaaaaaaacaaatagtatttaaagtttagaaactccattattccactacaataaattctcataaattcaggactgtacgatttcaagtatttctactttacaatttatatgttagaagggtaattagaagaaaatcataaccactatgaaaacaatcccaaataaattattgacagaaacaggtttagagtagaatcaaagaatatttcaagaaaaaaaatcacccgcatgcaaacattcataataatggttcaatcaaaattatattaaaagtcagacaatgtttcaccctaaatatgttttgtaaaaaacatttttttaactattaattgcaactaggaagatagcccgtgcattcgtgcggacatgtatattattgattgtgtttgaaaaatttatataggcggaatatcaacccattgtaagatgccatatttcaaaagtattatttctctatgaattttcttcattggtattgcttagataatttttccaaactatttgttagcatttaaaatatataacatttgataaacgtgtctaacaaactaagtgtaaatgcacttaaaactaaggtgttttatcttgtttaattaaattcataggggctttttttaaaaccctaaagaactattattgttaataatgtgtattatttgtaagctagtcctacttagttggttcagattgacacaagttgttacatacatgcatataaattaacaaagagatgtcgtatacctccttccttgtgatatttgcggtatatactttctctttttcaaagaaaataccttgttaacatgaatccaaaaaattaaatttaatagtaagaaatataacttttcaacaaactatatacaacaaccttagcgtggcttatatatgcaatagtatatcgagaaactaagcatttacaaattgttataaaaatgggacatgcaatggttggtccaattttagtaaaaattaagcacaaatgcttttacgaacttattaaattttctccaaatagttcaatttagtccttattgacattttttgtttcctattttattttataccagttcaaaatttaggcgttatggatcttcatatcgttggtttaattgtgaatacaacaat

SEQ ID NO: 33151 - DNA, 600 bp, Oryza sativa
tctccctactccgacctctttctccttcctgctgatttcttctctccaactatgttctttgatttcccgttctctacttctcttcctaatctacttgcttgttccccttaattgtattcaatacttgagcagtactctctggatcggttattggtgcttctccttctggtgttgattttttgaggatgaattgagaacataacactaggcagctgacgtgttagatccacgtgggtttcatgctgactcaatcgattcaacctcatcacattagttgaaaccgggcatagtagtgcactagtgcttagatcttcgtgcatcttttggtattgtaagttgatggacgcgttatatctggtaatacgttttaagaaactcaacgttcaaatggcggacctaaagtgaacttattcctgtgtaatactctgtagcaagaattgggcccgatttgattgtgcaagtagaagggaaggcccaaagatagttggctttgtgatatatgaagtgacgacgctaagattgggatggttgttgttgtgatgtgcatgggatggaatctgctagcgtggctgtggatgcgtgcgatatgatgcagcaggg

SEQ ID NO: 33152 - DNA, 1799 bp, Oryza sativa
  unsure (1)..(1799): unsure at all n locations
gaggtcccaagctcaggggccagatcaggcccccacgccttcttgtccgcctcacgggacaggactagggttcatgaaatacggttagattccaaaaaaaaaaaaaccaatgttcggacgttgctcaaatgttgttgctgtctagaaattcgataagtttcatcctaattaaaatttcaatagataaataataaaaaatcctataaatagtatgatattggtaggacctattgggatataacttttttttaaaaaaaatatgaattccacgcattttcataggacatgagaggagagggaggggcgagtaggacggaggaggaagacacggccgtctccgccgtcacgctggggaggcacagcccccagtcccccatcgtgccagtgaccgctgctgcgccggtgagacacggccccgctgtgccgttggccgccgccgccatgtcaaggtctcgaggagctgctgacccgctgctgcgctggggagatatgcctaaggctggcagtggcgtgcgtgggctgatgcagctgctgggcaggcccgcaccacttacccacttaggcctaaccacttaggagtaagtgggctgatgcggcaagcccaccacgtccggcggcgccaccacaacccacatcgagggagcatcagaaagaggaggggaacgaacaagttcgtcgctgttgcggcttgaaccctagccgctgccgccatggatttgatgacgccttcaccgncttnctcttcgncgnctttgctgccatctccaccttcgccgncatttctagtgatcttgcagactttcttcagcaccgncgcttccaatgcgtcctccaagggaccttcgtggtcatcgccggtcatgggctcatggcggcgcactcatcgtagctcatcgcacccactccacctgttttgtcaatttctgtgggtggtgctagaccagcttctgcttcaatcctgtcgacctctatgcatgtgagttcttgaattttttttccctgatgtggatcaagtgaaagggagatgcagatgcagtgaatctgagtaggatgaatccagaaagcaaggatgtaattttcagattcaaaccatatttaattttgtaaggatgtacgcatcacttcactaaaaaaagaagattatttagctcctgcttgtttgtgattagttgctttcgtgcataacaatgtgcagttttgatggcttgcctttacataacatgcttgatggtcacctgggatgtaaatatgtgatatgcctgtttgagaaacatcattgaatcttgtacattaatcttatatctttctgactttgttttgagttatatgaatagactgttctatttgctgttcgattcctgttcagcattattatgtataaactcgttacttacacactgcttttttttcacacatgaaaacaagttaaaaaaataatttacatgtaactgcttcttctttttttttttgactgtgtaactactttcggcgctcactttgaacacacaagattagccttggataactaagtttcagcactaaaataattatctgttttgttcatgagttttagagccccctagattttaagctatgtcaattatataatgcagtcgcttggctgtcaaattcctttttatgacaaaagacagtttggagatgtgcatatgactgtgtgcttacattttgcttagacgggagcgcacctttactgacagacagatggtgatgtattcacacctttactgacagacagatggtggtgtatttctttctttgcgttaagtggattatatttt

SEQ ID NO: 33153 - DNA, 520 bp, Oryza sativa
tcatctattcttaggcgagcttctcgaagatgtcgttgatcagtagataatgtgcttattttgtatgtttagacgctcttctttgcagatgaacttggaaactataaggactaaggtgagctcggggcccaggacaaggccgggcctaaggcagacctgagtctacttcttaagatgtagatcttgtatgtctctacgctcctcttattgagtagcataggacttacaaagactaaggtgagttcgggacccaggacaagaccaggtctgaggcaaaccttaggttacattcctcttcatagagcagtgtgtaacctagacgtgctaaggtgaacctgggacccgagacaggactgggtttgaggcaaaccttaggctacattcttatccccgaagacaaacaaaggactcaccaaggtggggcccctagccctatcaccctaggagtagctttttatttttaagaatgatttaagcatgtcatttattttacttctaactattttgctagagaaatggg

SEQ ID NO: 33154 - DNA, 725 bp, Oryza sativa
ccaactgacctagcacattcaatatatacttatgccctttaccaacatcgtatcgccataaaaacgaatctccacattatcctcggtccattcaagagcttctttcactcgtgaccttagttcatctagagttgggcgggcgggaaacaaaatggtcttgaatgacatatctcaaactcaacatgtgcaccaacgtaaggttccaccactctaccactgtactaaacacgaacaagtctatccatctacaccaaaaaaaattgtgactttataactaaaatcacatcttccttcctaaacgtagtccaaactgacatattataaccaatgcataacttaaattgtcccaaagctactacttcacgaaaagtatttaatccacatccaaaagtaccaacaagttaactagtgcattaaacatcaaaatattacaaatactccgtcatacaacccaaccaacttctaattaacaataataaatttctataatgctaccgaattcggctcccattcatataattcatacctacaaatttaacctaaagcctctggtccatcaaattaataattcaacgttgcctcaagtttattttttcatccatctgtccaaccaaaccatctaaaaattcacattaccacatatataattcaaaaaatcatggcactaccgaatacattgcacacatgtatcactataataagcaaatcccaagaaaaaatattga

SEQ ID NO: 33155 - DNA, 512 bp, Oryza sativa
tgagcaaagaagatggcgattgatggcacatttttttttctaatacataggtggggaggatttgatgagatcttacttttttgctccgagaaattgagatttcgccaacacgaggggcaaagtggggagagaaatggagtttctctgcacgactcctgatcatattcccaacgcctagataaagagaggaattattttgggattgcattcaaaagcgacggttaattatacagaacaccatatattgtttgttagagaaaactcttatttaatacctaaagcacttatcagtctacataacgtatgaaatcggttattgtgcccctaaagtacgaaaagcgttccacataaagtattctatagtttctgggaggtacttttaagctagttaaagagatatgatattaggtgtgtgtgtatgtgtgtgtgtgtgtgtgtgtatatatatatatatatatatatatatatatatatatatatatatatatatatatatatatatactatatata

SEQ ID NO: 33156 - DNA, 694 bp, Oryza sativa
acgcgagtatttgtaagcggcttgtgacgagacgtggaaggttgtgggggtggcaatggttttggtttggtttggtccagtgggcgagaggtgcagccgtggaaggaagtctatcctgattggtggtcacggcgtgcacaggtcgcactcgctctggaatggaatgggcaaccttaaactgaataaatgtttctgcatccagagtttcacagaaaatgaaggtcaacatgccagcacagaaccaagtgagcgtaatagattctctgtgagcgcctgtatttatactatgtttctaaagaaaaaacatatcagcataatattttcatgtggatcaagaaagtggatgtaaaatgttatggttgctttagaagaaaattaataaattaaataaaaaatagttatgattagtttattaagaagaaaaaaaataattgaataaattaaataaaaaaagttatgcttggtcgaaaggtgtaaaaatagttttattcttttttagtattgagggagtaagcaattctcgttggtcggcccatcatcaactcgtagagtagcactccactatgacaatctcgatcggcgattaatcaaacaataagccttaaaacggaaacaaatattcttctactactagtaggctaactacctcatccggataaacatagcattcgtcagagcccaataggggctgcag

SEQ ID NO: 33157 - DNA, 632 bp, Oryza sativa
ccctaaagcggtgatcaagaagccacaccttaacctttttaccatatattattatgtctatgatccaaatgtgggatcaagttcaaggaaagtttgatatgactaactcgtagttagaaccaaacactgcactaaactcagtaaaacatccttatcatacttgggtaaattgaggcaaactttggaagcaaccaaacaccctcttcatgctggattttccacaatttgaactttttgaaaaacttattgcgcatatagacccttgaaaaaacttatcccgaaaatggtcattttggggcgtcaaaatagctggcgcagtcctcctaccaccgaggcaggccagaatctgtgatgcaggatgaccaaactttggtatactgtatcccgcaacatattgatcaagtacttcgatggattttacttcttaataaaaacatattatacagcaaatgaaatctcatatatgagttgccggataacacattttggacgcatcaaattcgaactcaatttagcaaaatctatatagttcagacttgggatgggaggagtgcttatgtgcattacaatacataatctggagtatactattttgaaacaattgtgcatgcctcccatcatcatctatagtc

SEQ ID NO: 33158 - DNA, 703 bp, Oryza sativa
aaaatagctgaaattcggaattaaaaataaggaatattgaaaaaagttttcatataagaacccaatacgagattaatcaaaattcgaaataaaaataaaataaaatccaaaattagaaaaaaaaaaggatagtccaagtaggaatacaattttaaaatagttgaaattcagaattaaaaataaggaatattaaaagaagagtccgtataagaacctaatacgagattaactaaaattgggaataaaaataaaaataaaatccgaaattagcaaaaaaaataataaaagaagagctcaagtaggaatacaatttaaaattagctgaaattcagaattaaaaataagcaatattgaaagaagaatccatataagaacccgatacgagattaattaaaattcagaataaaaataaaataatatccaaaattagataaagtaaaagagatttcaagtaggaatacaattttgaaacaactgaaattgaaaataaaaaataaaaatattaaaagaacacaattcgatattaattaattttttttaaaaaaatctgaaattagaaaaaagaaaaataaggttccaattaggaatacaatttataaataactaaaatttgtgataaaaataaagactattgatagaaaagaccatctaaaacacatgacgagataaattaagtaacaggcatataaaggagtagtggtgg

SEQ ID NO: 33159 - DNA, 699 bp, Oryza sativa
ttggtgattaaagttgcaaatatataatgcactcttacactctctcagtacaaaatactaatttgttcatacattttgtagatgcatattaatgtaactggaaattaaaatggagcaaacaatgtgttttctgttgatcttatgcatatttggtttcatcaaaaatatttctcgagttgacatatctctaatttgctctagcaccccctcaatttatattctagattcgccactgtacacgggtattagctgtgatcgaagtccatcgatttctcacgaaatgacgttttggtttgatattgttaggaactaatcaacccaagcggaagagtattttgggtgcgtgtgtggtgaagtgcacgcacacttaggaccctgcaacagatggatccagggtttacaaaatcgttttatagtttttaaaaccacgatatgtctcgtggttatcgtgataactatattactatggagtttcggtaaccgtgccgaaaatgataagggaaatcctagacagatccaagacgatcttgaccgttcatgctgcttatcgatacatccggttactgttcatgctggcatcccgtcaaaataattctagttttaaatttcaaataaaaaaaataaaaattatgttcttaccttttatgtcgttggaaccatctaaggatataaataaaaaacatttcgaggggatcgggt

SEQ ID NO: 33160 - DNA, 506 bp, Oryza sativa
agagagtcgacgtcatgacaaagaggaccgctaatttagatcaccaaaaaaaaaaaaaactggaaaagaaagctaacctgaatggaagatttgcgttactttctcctgcactgctcagcatctatgaatcttcacaggaacgaaaggaagggctgacacaaaccgatgccttcatttcccggcccagatgtacgccaccaacaacaccaacaccaacctgaacaattccgagttttgtgactgcatttggcagttggcgcgtcttggtttgtactatgaggttttagcatatggttcgtgatcatatacttgatacaaaatcaccatggccagtaatttttttttgccgtgtagtagagactacatagccacttaatactagttaatactgttatttgtcgtgactagcattatgtggatgttaatgcatcaacctacctgaatgtcctcgcaaaaaggtaaaagagaaccactactacctgaatgtaactgccatggccccatgc

SEQ ID NO: 33161 - DNA, 1036 bp, Oryza sativa
acatatatgtcatcgaaacaccaatgagaagcaagaattaattagagtatatattatgtaatagttaaattagacttgcatttgttaaaataaaagcaattctaattgtgactagcaattctcaaaagttacctactccttataaaaaataatgatatgtcaaactgatatcactaaatttatcatgaatgtgttttctctattcgtataatatttaaatatcaaagattgtatatattcttttcacactgtactgatctcctttatcttctacttatgcttcatttgatctagctggatggctgagcttattcaggatacatgaaacgacacatatcattagtgcaagattaattaaatattgaatataataaagccaaaatagatgtatttaatttttaaacttttatataaaatatattttaattatacacaagttgcttttaaatatatacgatgtaggttatggttgtcaatttaattatagtgcataaaatggttcagatggatttagatattattatatattccaaggtaaaaaagtacgtacatatgtacataagcaggccgggctaacgacatctttttattttcttttttttcactcggatagaaaaccaaactgcccatattaactatgctctacttacgttgtaaaaatataggcacatgtcatcgaaacaccaatgagaagaaaaaattaattaaagtatatattatgtaatagttaaattagacttgcattttttaaaataaaaacaattctaattgtgactagcaattctcaaaagttacctactccttataaaaaataatgatatgtcaaactgatatcactaaatttatcatgaatgtgttttctctattcgtataatatttaaatatcaaagattgtatatattcttttcacaccatactgatctactttatcttctacttatgcttcatttgatctagctggatggctgtagctggatggctgagcttattcaggatacatgaaacgacacatatcattagtgcaagaataattaaa

SEQ ID NO: 33162 - DNA, 746 bp, Oryza sativa
tttttcagagtacagacatttctttatgtagaaacttcgctgcgttaaattcatgatctcctaaagttcctcccacgactgtctgaaatgccattttgctgcttgactaaagaaatgaatattatgacgatcaaagacatggcctacaacccctggcatgtgttatgtcacagattgtttagatactttgcctaaatcctgccattattcacctggacagtacaactaagttcttcaattctcatttgcaagaatgtgaacatacaaaaacatattatacagagttatgagtttgaaacttttgaatatgacaacatgcactaatgcaaagatgaagaccagttttcactctaaacaacagttggaatcatattgattctggcaatttacaggacgcaataaatttttttgaagtggtgcgcagatgaagccccccatccccacccctcaaaaaataaataacggcagcaggcaaataatttaaagacattcaggtccttaattgctattcatcaatcagccaatacacatgtaattgcgtaatacttaatcagggttgacaacatggggacacaactctcacctttgaaccaaatcacttccagtgccattttgaaatatgtatccacaaaaggctgtcttttcacaaatttcagatgcgtcgcttgcaatttctaaattgaagaaatcctcaataagcttgtacttttcagtgttacaagaaactgtattggcactggcacata

SEQ ID NO: 33163 - DNA, 917 bp, Oryza sativa
tttatggactcttctttcaatatttcttttttaattccaaattttagttatttttaaattgtattcctacttggactctttttttttctaatttcggattttattttatttttattgctaattttgattaatctcgtattactttcctatttagactttttattcaatattgcttacttttaatttcgaatctcagctacttttagattatatttctacttggactcttcttttctttttctcgaattaatgttggaatttctagcctccacagcgaacgttgtgcctcctttcaaggtttgctaatttcagattttattttatttttattccgaattttgattaatctcgtattactttcctatttggactcttttttcaatattgcttacttttaattccgaatttcagctatttttagattatatttttacttggacttttcttttctttttctccaattaacatgggaatttctagcccgcacagcgaacttagtgcctcctttcaaggctgatttaataatataatagatagataaaaatagagagcagaccaaatgagcctaaatcgaattgcgtgaaaaaaacgaagaggaagtccaactcagcagataaggcctggcttagtttcctaaaaatatcacaacgaatctttgacacatgcatagagcattaaatatagattaaaaaactaattgtatagttagaggggaaatcatgagacgaatttttttaacctaatagttcataatagccataagtgctacagtaacccacatatgctaaatgacggattaataggctaaaaagatcgtctcgcggtttccagactagtatgaaaatagtttttaatcgtgtgcaaaaacccttttaataatccgtcaacatgtgtgtacacaaaagtatcttttcgtg

SEQ ID NO: 33164 - DNA, 676 bp, Oryza sativa
ctatcaaaaccagtgcagatgaggtccctcggtggtttggacggcggttttggctgatgtggcgcctatgtgactaatttgactagatcttcgtcccatgtggcattgacgtggcgctcacatgacaattcgatttgaaaaataatagtcatggacccacacgttagttacaaaaagatagtaatttaaaatggtggggccacatgtcattcttactcccctcctcatcttcctcagctcttccaatctcccctctcttcatcttgtcttgttcctgctcttcttgatgatggttgttatgcaggaattcagagacgaagaattagtgccctgcagctgctgattatgatgatgatgatgagcagttgtggatttagggctggatatttgtagcaggagatatgcataggccgagagtgttcttaggataattgtatcatctcgatgtaattgactgagttaaataaaaacttccattatctaaaaaggatactctgctgctgctactaccgttgacggtaaaagagtaggcggctcgcagatgctgccgattggtggttgaatcgggtcgatgtcgtcgtcgcactgccggaggggagcacggtcatagcaatgcacgttcatgtgcctaccaagcgcctgctaaccggaactcccaccggcagaagctgcacat

SEQ ID NO: 33165 - DNA, 1305 bp, Oryza sativa
gactataaagaatacccatgcgttgcaacgggtgaaggttatttaaattttattattgttatacggtttagttaatgtgaaatttactgtgagaattcgcttggatatgtatttttctagaaaatcatgaactacaattaggagtccaatcatctcaagttagtatacgagttttttttaaagagatttcttatacgactccttatgtatttcccaaagcgaacaatctagaaacctgactcaaatagatatccgtatttccaaaagcgaacgaacttaaaaaccgactcttacacggataacgtaccaaagtgccggcaaaaacatctttaatttttataatagtagagatatagatttggctttcttttattctaacttatcgtccaactactaattactaactacgtgcgtacgtgtcttgaaatctttgattgctctgttatatgactgtgggctacaattgttaggccccactcattctatggctctttgtaccattgctacaaaatatcaaatagatgttagcacaatagataccggaagtgttaaaaccggtacctataagcattttcccacctctacggtccgaaaatataaaaaaccgacacctttattataggtgtcgattctgtaaaaaaaaccacctatactaaaggtgtcgattttttaaagtaaaacgacaccattaattaattatagatgtcggttttttaatgaaatgacacctatattaattaaaggggctggttttcagaaaaaccggcacctttagaatcgagccgagccgagccggaggagatatttcttctcccgatggggcccacacatttctcctaatgacacatttgagtggattaataggaaagattaaaattgatttcacccgttatagcgcgaattcgagctcggtacccaaatagtcattattagcctttctttattaattatctcgatccatcggcttacctttttcttctgtgtatccttacgctgccgtggtcgattgattggttatacttcgatgcatgctacaaattatatttacccgtgcgttgtaagaaaaactcttaatcatctttttttgggccatatacaagaaatgatgtttttagggcccatttagttcacgaaaagaatacttttgtgttacacacatgtttgaccggatattagaaggggtttttggacacgattaaaaaaactaatttcataactcgtctggaaaccgcgagacgaatctttttagcctaattaatccgtcattagcatatgtgggttactgtagcacttatggctaattat

SEQ ID NO: 33166 - DNA, 675 bp, Oryza sativa
tacccatgaattcagaaccccagagtccgcacatcctcaaatacaaagcacttccctagttagatgtaggttagacttcccgttcgagaaactctaccttctacctgccctcaatttatgcacgattaatgaatgccacctgggtggaagcgagaggtggaaatggaaggtcttagttcggaggtgggatctctacctgatagttgcattgccattcatgatgatcccctggcattcgtccattcagccattcaccattcacccattcaactggaattttggttgaatgccggaattgtgtccacaaattgtggatgcgcagttggttggctggctggatggctggctggatggctggctggatggatggtgaatggctggcggcggttcggttgctttgaagcatttgttgctatctaaattccatttaaggtcgtaccttatcgcccagcatcatcttattctctatttgtattccctccatctttcaaatacggatgtagccttggatgtgcccgtgcccaatgaagaggaagagcgcaacatgaaacgtaagtacaaaagtaccggacacccacccagatcccaatagaatccgccaaatcctgcgggaaattgtaatcccattcaccagctcctacatttaattaacaagagaactattgtatttatcta

SEQ ID NO: 33167 - DNA, 665 bp, Oryza sativa
tatatagccttttcccccttctcatgcctaagtgcagatttcaacagggatgttctttgcggaaacaactgtgtattgaacaaataaaacatgtcagtaaactataacatacataaccaccccatgccatttgctcttcacaattagcccataatactaaagatgcagatgtagtccctcaaccttggggaaattaggccaataacctctaagtcatctgtatttacagacataacacaattcacactgaacttcctggtgacatgaccaacaaatgaaatcatgtaaaccaaatcatagctgctgtattgctgggggggagggtgattatatttttcagttgggaaggggaaggaaaacgcatggtaactaacaaacatgcaaatgtttactcttctggtgttgcttgagtatggaaaattcaacattctaactactcggagagttaggaaccagaacaaggagaagcaagaacgagtccactaatacaacatggtcccagttgcagtggaatgcctctggaaagatgatacaatatccttttacttttcttccgaggtgcttgtcacatatgaagctgggacactttaagggtctttgtgaaaagtttgcagtgatgttcgctacataatgacaatggggcaccacccggagggggttactgc

SEQ ID NO: 33168 - DNA, 710 bp, Oryza sativa
attatttctaaattgtatttctatatgaactctatttttctttttctccgattaatatgagaatttctagatcgtgagagcgaacgtggaggctcctttttctattcctttaataagttaatagatgtattgattgcaaataaagttgcatgctacttcatctgtttcatattataagactttctaggatttcccacatcatatatatgctaatgaatctagacatatatgtgtgtctagattcattagcatatatatgaatataggcaatgctagaaagtcttataacatgcaacggagggagtagttataaagttcgtacctaaacttgattctgagccaccttaaaattattattcatattccttgctgtcttagtctatttattattacatggtcaattattaacataacttagtattgcttgtttagacaattttacactccatgtttggtatatggatgtgaatgtgttggtcagtcgatgtgagtgattgttgaaagacgggtggagacatgagcatcacccgcaacataagacttttgcaaataccaaaaacttaataaaacaaaataatttcgtctgggacgacatggatacaatatgtgtggttctatgaaacaacaagccatcgattgtagtaagtaaaggaccgagtcaagaagctacgcaggaaacaatcagagtatgattccattgcttgagtggg

SEQ ID NO: 33169 - DNA, 602 bp, Oryza sativa
atgagttgtatctggtttttcgaataaggacaaaaaccaggcgacgatttaagagatctaaagtgaacttcctgtcgctggaggctgccctcttcctatttttccaatcctcttcacatcggggaaagttccgtgtggttagacctaactgctcaatgcttcaaatgagatctgggagcggccggtagccctggcgtcgggctgggaccgggaggttcaatgcctcgtcaaggcttgaaaaattagaaaacaaaattgcgaaaaatcaaaagaaaaatcaatgcttaattagtaagtacctagaaaaaatgtccatttgttgcaacgggtaaaaacattttttacattatactttttattctgaggaaaaactcatttccttttcagtcccagtctaacctgttacctccgtctgtttggcttgcctctctttggctagcctacaagtaaagccgtaagcctagctcgcctaatcgactgatgtcttcaatctctggaagacaatctcgtgtccaaaccatcctagaaccgatcctccccatcaatatgtgactgtcgtcttcaatctctgaaagacagatcctccccatcaatatgcgact

SEQ ID NO: 33170 - DNA, 1292 bp, Oryza sativa
ccaaccaagattaatttctattggtcaactacatgcaatatttaaaacttgatgtaatccatgggatacgaaacaacgtagtacaacatctccaacagcctctcccattgactctccaagttaaattttggctattctacccaaaaaacatgctccaacagcctctccaactcactggccgccaaaccctcctcctcactggctaaatttggctggccaatggtgggccccacactgacagtctcctccataccccccctctctctctctcgcatccgtctctttcccacccctcgagcacaggcaaccaggcgaggagcacggggaggagcactgctatggcaggtgaagacggtgcccgccccgccgctcgccgcagcctgccatagcatcatcctctggccgccctgccgccgcagccgccggcctccgctcgctacagcccgccgcctccgctcaccgcagccgttaccccgcctccgcccgccccgccactcgctgcaacctgtcacctcgcagcctgacgacggtgtcgaggtgggagaagggagacaaggcggcgtgaagggagtggtggcgctagcgagataggaaatgaggcggcagtggggcccgcttcccctttcggcgtcgccgtagtcttcgtcatccctcgccgtcgccgtcgactcgcatgtgcacggatttgccggccgctgcttctcccctttcatcgtcgtcgtctacttgctgcacgagcccacctcgcgcacacggatttctcccacccctttcccccttgcccgctccgatgctttgcctcgcgtgcgcacagttccaccttcggcgtcgccgaaaaggcgctcggtgatacctgcggaagaaaaagaaagtagggagagaataaagaaaagcaagcgactgacatgtggggacccactgtgatagacttaaaatagagtgggtagatggagaggctgttggagcgagtaagtagtttgactagccaaataagatggagagttggctatatgggtgtttggagagtccgatttggagaggctattggagatgctcttataactgatgagaattaattacagaatgataaaggtttagttgtccatgatctttgtgttctttgcttatgtgatgtttaaaatgggatggatggagtatttatggttaagacttactcactcttgcccaaattgatcatcatatattgaaaaccaaattttctcaatttgatcatcatataactgcatggacaaggatttcatcggagtacaattaaattaatacagcatggg

SEQ ID NO: 33171 - DNA, 518 bp, Oryza sativa
cactgagctagtttgatgaacattcgcgttctcgcaacgagtacgcacggcttatagcacaaactgatgaagatgaacaaactagctaaaaactagacaaaaagtagatgcgaaatcaaaagagcgattcaattggttaattgtgttgaagtctattgttgcctcaattgaaccagtcatgaatcttataaagaggttgatcttgtcttctataaaaccctttcatggattactcggatagaaatcaattagaattcgaaaaacttaacccaaataagaaaacctgagactggttaaaattagatttagagttggagtcagtcggtttgaccagccacatgctgctgattagaccagccctatggcgacggtcagatcggtctcgtgttggcaattcagatcttttttaaaatcgatcatagttttctatttcgtgtgtagatgttaaatttagggagaactttactccaccagtagattggttgggttggggttgggtttgcaactttgcatagcgt

SEQ ID NO: 33172 - DNA, 511 bp, Oryza sativa
aatgtcagtgaggtgggagagaagagatgtagaatgggtattttgggcaatttgaaatacaatagcttgcatttggatacaatggtgtccagggtgtagaaaatgatatatgtatgtaagagagaattgtaatggtatgatccaaataagtgaatagtaatgttccaaataggtgaatagtaatggtagatctttaaattgtggaattcgtagtggcaccgattaaattaaccatagataatacttgggagaagtttagtggcaaggaataatctccttagagaagatgccaaattagaatccttccttagagaagcatgtaaaattggaatccggatccagaggttacccatcaactcatcaccgatcatacagaacttgatcgaattaatgtttgatggcgacaattcaatctccttggtggtggaaagagaaaagtacatatacttaaaattattcacttctcaactatcaggtttgtctaaaaaatacccctcaactataaattcgg

SEQ ID NO: 33173 - DNA, 798 bp, Oryza sativa
gccaccactctactcctttgtaggcctgctacttaatttatctcgtcaaatgttttagatggtcttgtacatgcatagatcatactggcgaagatattgtaccttaaattttatttgccatgtcttataaaatacaaatatgcttaggccagggcgaccgacgggggtggagcaggatcgagcgctccccccctccccgtgcgcacgttcccctggccccaccacgtgtctcaaaaaatatttcacttaatgtactcataatatttcacagatctaatgttgcagtgaattaaaatattattttacaataaatcacctacatattttaaaaaccctctattaaggaaagtcgttttatttttttgttccactaaaaatgtttcacctagtgtactcacaatgtttcactacgtatagatctaatgttgcagtaaacgaaacttcttttgcaacaaatcacccacatattttgaaaattctctattaagggaattcgtttttatgttccacaaaaaatgttccaccaagtgtactcacaatgttttactatgtatagatctaatgttgcagtgaactgaaacattcttccgctatttgctaaagtattatttttatataaggtgaaataacgcccgatttaataataagctaaaaaaatttcgccggaatatatccatgtgtggtcttggtttgaatatttaattgcaacgaatttaatgatgtaatcggatcatgatttggataaaaaatttaagagaaaaaatagcttaaagtggttttgcacgcatgcattgctct

SEQ ID NO: 33174 - DNA, 1107 bp, Oryza sativa
aataacttgccttgctccaatgcaaataaatccgtgataggcaacctgattatccgatcctcgaaataatacaggttgccatccaaaataaaatagactctactaagaaagacgaagaaccaaattcaataaaaatcatgaaatagcaagaaaacaataaagagcgagaaaggctgggtttgggggtgtaaatatctcctttttattgggtatagggattattgggctaatattttgtgtggaggttctcgagggttggaggctaaggtagagaagggatcaagcaactaatgtcgctatatttcatgtgtgggttttggtgccttggagaataaaggatataactggttaagtgagtatgtggctagtattggctggtggtagggttaggtagtataatatctagggttgggtatagttaagttgattatggaataggatagcgtatcaactaggctctatagtttatgtataggtctctgtaggcagagagtatgctcgatgggtgggtatggaatttggatgatgactggaatttaattaggaaggcatcggctagggtttggttgtttgctagtcattgctagagtcgggcagtataacagctagatttggtatcttttctagccggtgtcaacaaaaaggataacgactagaggaataggagatttgtgtaggtttagtggggtggaagtgttactccgacaaccgtgagtggcggcggagcggctaggatcacacagagccagagagctaactgtgcggcgtgctgtggaggtcgaggggatagtgaagctccgatcattatacgcatcaaggcgtagggtgctaggagcagcacttcgaccttgggtttgagttttgccgggctttacagccaatggttcgacgtcggggcctaggtgaccgcaaacgtctccatgaaaggcgtaaagtttcaaccagcggctttttagtggctaaagggtattttggattaaaaggaaatatttgaaaaggcaattataaattcaaacggtatttgaataaattcaaataaaattataaaatagcaaatttggtatcaaaatatagggtttgaatttagatgaatttaggtccaagttt

SEQ ID NO: 33175 - DNA, 572 bp, Oryza sativa
gtgttttgttagatttctttccaaattttggttgtgtcattatgagtgggaatgggaaactttcagaactaccaattttggtagaatagcaatggtagaacgtggcaacaaaatgaacagaatgaataggcccatagatatgataccagtgtcttcgaagttcaaaacaactggagcagagatgtctatgtaatcagtctaagagttcaagcgactttttcattctactgtctagataaatttgttcactccttcccaaaagtaaatgtttttacactattttcccatttctttctagaaagcatgccaaaagcatacattaaatctttccactttttcatggtttagacctaggcattgatccatactctcaaagagtgtagtttttacggtcaatgaacaagagaacgacgcaaagatttagaggttaacagatagaactgcagataatgacaaggcataatcgtgtagaataatatggatcacctatgttctggctgaacgtttagatcaaaatacccgaatatggataatcccctttgatgccctaattcatttttaggggattgatg

SEQ ID NO: 33176 - DNA, 507 bp, Oryza sativa
tcttcttgaaattaaaatatgaattccaacaatagttatgttcgatttttataatcccaatgataataaagagtatgcggcgaacgggtcgtagaagagtatagtggtagcgtttgataggattttttaaaggttcgggcttctaaatattgtaaaaaaaaagaaacccaacgagacaaaaaactgtaaaaactataaggtccatttttaaaggtttgggcttctaaaaagtaaaaaaaaaccaatgataatcatgtttaattttaaaatctcaatgacattaaagaagggcggcaacgtgtgaatcgtaggggaggacaataacaaagtcgctgacgttttggcggaacttatagaaagtaaaaaaatgaacgtaaacgataattatgttagactattaaaatagtaatgacaataaagagaagatgcagtggacggtcgtagaggattataatggtagcgtttgacgaaacttctagaaattataaaaaagaagcccaacatgac

SEQ ID NO: 33177 - DNA, 712 bp, Oryza sativa
agttctaagtttaacggtggagtcatacatctgtcttacataagctaaaaaaagtttctccaaccaagcttttgatttaatagtataagtttggcttatggctttaaaaaaaccaaaataattgcttgtttgtttgggtttaaactttttggctcataataaattggcttataaatctaaacaataggcccttagctaggaccaagcatccattgagtttatagattttgattgcacatgtgatctctgttcacaccaagtcgatgagatgcacggatgcatgcaagcgcctcaaacatttatgccataatttttatggaaggatatgtttaacctataactcatcaatagagataatctatgctctaattggttcacacgatgctaccatttgcacatataccgagcaagacatctaccccttccagtccacattttggacaatgatatgatatctaaaatatataatatatacaataaattattttttctctttttattatagttcgctgtaagataaatctatatatatattgttctaataactctaaattaaatattatttgagttattgatagtaaaagatatgaaagttacctaacctttttcaaaatttcagagggagtaaaatgctaaattaaattatttactataaatttgtcatagtagcttgtgattataaatgcctcacacagtcacatgattgcaatga

SEQ ID NO: 33178 - DNA, 716 bp, Oryza sativa
tgcagccctatttaaaacattttacttttataaatattgctggtcaaagtagcatcttgaatactgtatcaggatttaaaaatacttatatttttggacgagtagattgccgggtgacttgtcatgacatccaaagaatgaaaattagaaccacaaatccacggtaggcagcaatgaacgacggcgtccgcggccattggctcggcggtgccgtccccagcacagtcgccggccgccggcagctacgtcgtcggccggcccaacgctttcttacaatcgcccagcttgaccctttcctggctaagaactaggtgctgatggttcgccccctgtacgtccagcaaccaacaagcaacaatgaggtcagatgaacaaccaacaaccatgacttggtgctgttacacttgtagcatctgagatgcccctcctaaaatctatagaatcttatatgtctatagatatccactacaacatgatcagcagtatctgaactttaagaggatggggctgactattggtcaggtgaaagaatcagaatttgctgagtatcactttcatatttgtcattgacctcattttgctgaatagaatcatcaccacgaatccacgatctgttccaactctagccgaactggaaattaaacaaaattagtggtgctccatcagaaactattttcctaattgcacatacccaacaaaattgacaagcaaacaat

SEQ ID NO: 33179 - DNA, 646 bp, Oryza sativa
acagattccgttgagtttggtattaagcagttacatgataggtacaagagcaatgggcatttaggagaaggttcagatcatttggtcagacaacagagtaaccagaagtttaagatgaggatacctcctctttttaagaatcataatggcactaaacttgtatttccgaaggtcaatggagatgaaatggataatggggtttcagttgcagggaacggccatctgggatgcaacctgaacaactgtactctttgcagggaacacagcttagaaaaccataattcaagtatcttgcacaaggataacttatgtgccagtgccaatacagtttcttgtaacactgaaaagtacaagcttattgaggatttcttcaatttagaaattgcaagcgacgcatctgaaatttgtgaaaagacagccttttgtggatacatatttcaaaatggcactggaagtgatttggttcaaaggtgagagttgtgttccccatgttgtcaaccctgattaagtattacgcaattacatgtgtattggctgattgatgaatagcaattaaggacctgaatgtctttaaattatttgcctgctgccgttatttatttcctgaggggtgggcatggggggcctcatctgcgcaccacttcaa

SEQ ID NO: 33180 - DNA, 1125 bp, Oryza sativa
ttacaatagaataacagtaagaactcacgtaaaacaaccatctaggtaaattccagttgcaacagtctaacaaagatattaggacaataagctttttagatgattcaatggtttgtagaaagcaaaccttgtccatcttgagccatatcaactagcacaacatgtagtttattttgagaacatcgcagcaaggctacctctctacacaaagagataaaacagtacacttaaaaaaaggagataaaacagttgtctggtgtacgacataaaatgacatggaacatgcagacagattttaaatagctaaagcttgatctgtatataacctcacatctatgcaaatttcggtttcagatcaagagaacctaaaagtgatagttactgaatatcgtatagaattaaatgctcaaggaaacaagtggaattgtaaaacggagccatttaacacatttaaggatatattattgataactgcacataacacattgaagacatggaagtaacttgaatcatggaaaatgttactggaaacagatgcatgtgaatttctaggtaaatatgcaagacgatgagccaaaagatttttttgttcatgaataatgcctgatttttctgttcacttttttttaagaagaaatactttggtcaccagacatcccctgctgttcatttttcagagtacagacaatttctttatgtagaaacttcgctgcgttaaattcatgatctcctaaagttcctcccacgactgtctgaaatgccattttgctgcttgactaaagaaatgaatattatgacgatcaaagacatggcctacaacccctggcatgtgttatgtcacagattgtttagatactttgcctaaatcctgccattattcacctggacagtacaactaagttcttcaattctcatttgcaagaatgtgaacatacaaaaacatattatacagagttatgagtttgaaacttttgaatatgacaacatgcactaatgcaaagatgaagaccagttttcactctaaacaacagttggaatcatattgattctggcaatttacaggacgcaataaatttttttgaagtggtgcgcagatgaagccccccatccccacccctcaaaaaa

SEQ ID NO: 33181 - DNA, 501 bp, Oryza sativa
tgtatgcaaaaccaaaaggtgcacaaacttgtgacgagtgaggttgtctgttcagcagagctacgcatttgtttcttttaggttatgtggagtgacaaaagttggaagtttgaggaaagttagaagtttggaaaaaaagttagaagtttatgtgtgtagaaaagttttggatgtgatgtgatgtgatagaaagttggaagtttaggttagttcggggtgaactaaacacggcctctgtcttatatatgctaggagtagatggttgctgcggtagaattgtgtgataatatagaagatatgagttctaaaattttctttcttatctactataatatttttttcatgcatacctttataaattatctaaatgttataaatgattggattgtatatatggtgtcttttagagggaagagatgcaatttacacccttgataaatcatccaaaggctaaaaatagttaaggtgatgtgaacagattgtctttacacccttgattaa

SEQ ID NO: 33182 - DNA, 561 bp, Oryza sativa
ctttgatggaagcaaacatattattgttgttgttgttgttgttgtttaagattaaatcgttcatattttttctgaagatgaaatcattcattttttttttcatgaagagggatcttctttcctgggaacaaacatttctttttatttccgaggatgaaatcgttcatacttttttctttcaggacaaatcttcttagcacatgtttatcgaaagcatgaacgaaaatatttcatcgtcttatgatatactctatctcagtttgtaattataagcatttctaaattgcttagcaaatattacagataaagagaaatatttgttaaagaaataaggattacaggaaatatttccttttactaagttatcacattggttaatttttaaattggttgtattctcttctcagcacctaattgtctggttgaatcccattcattggaataagtgttccccaaaaatatatattgtatacaaaatttgaatattataaatgtttgtatttggtagcaggattatccaactaaaagatactcctaacaccttttctattaaaggctacg

SEQ ID NO: 33183 - DNA, 572 bp, Oryza sativa
ctttctctgcatggcacggcatctcttcatgatggtgacgagaatcataaacattcccttctttttggttggggaacgttgccacaaggcttcctacattccagccccaatcattccaaagggtttctcctgcagattcccacggcaatgtttccatgtcccagcctacagcttcatgatggcatggcctgtgaaggtgagactaggctgacatagtcctcgttttgcttatgttaattacttccaccctcccagaatgtaacaatctagggcccgtctcatgtctagatacattttcatcctattttggttgctatattctgggacacaggtaatataaaccgcaacaacttattgttgaagatgagactgacatagttatcgttttgattaggtttattataaaccataacagattatcaataacttgaaaagtaaataataaacgatacttatgtatgtttatagcaatttaaaagtaaaatgctgaaaaagattgtaaaattactttaaaatttagagttttaaaatttaaattttgcgatttgcttataagctgaggggttccccat

SEQ ID NO: 33184 - DNA, 542 bp, Oryza sativa
ggcgtccagatttggacgctgttctaagaagtgtccagaggtggacgctgtaccgaagcacgtccaggctcggtttggggtgcccatgccgccatgcggagaggcgccatcgtcaactctcctctcctcgggcccaatgttggtgcagggctcgggcaaggtgctgccatgcccgccgttcacttcgactctgggagactgcagcagccgccttccggcttctgtctccacaacgtcagtaatctgccgtttacctcaactcacctcgaaggctctcgaatccggagaggacgccgccgctttctgccttcacgccgggaggttgcagccgctatccacgttctggttgagtcatgctggaacaataacccactcgtgccggcttgtgttgcgtcgtctgtccgcccctcttggttcctaacagcaagtccaggcatcgcctcactccagatggctggccgagcaagtatgctcagttcatagatcttggtattcaagtgtatatgttctgcaatagaaagtttacaaagaatgcaaaatta

SEQ ID NO: 33185 - DNA, 599 bp, Oryza sativa
  unsure (1)..(599): unsure at all n locations
agaactctgttctggatgaatttggacatagcagaatgctaaatggcgacaggctgttattagagggcgatgtgcttttcatgttgtttcgggggaactgaagacactagtactgtagcacatacatctgacttgttgcttctgcctctcgaactgatccagcaatnnnnnnnnnnnnnnnnnnnnagtatcagtaattagtaagcgtataaggatggtattagtgttgatcgggatattgtagaaggatggatgtattatagtgttgatcgggatacttagaactacgagtgatagcttcgtgctacgctgttctatagtcaatgtggcacaggagaaacgctagtatggcctatcagagcactatcagctgccgccatcaagcaaagctgaggccgggctgtccaggttgcttcagggctttgggagctttcgattgctttccactcccctccatctccatggcgcacaacagcgacgccccgtgaatgcacgacgatgcatcgtgcaacgcaatcgcgtcgccataactccccgctccctttcacgccagcctaacaaccagaccccatcgtcccggtgtggcatggcaaggcatc

SEQ ID NO: 33186 - DNA, 520 bp, Oryza sativa
cacgatcttagaactacacaatattattaatcaaggccgtgaacccacacgaacctgccttaacccaaggcctacgatgattcgaccgaactggcaacccgacctgggtcccagctcgtcccaagccaacccaggccaaccattccatattttagttgttaagcaggttttaagaattaaaacactaacttgggtacattgctcggcttgcccatatccgagggctcggctattcgaatagattatactctgatcagaggtgtacatctttacccacaagacacatcttcctcacgtgttgccacgtgccacataccaccacggtatacggacggaagacgtgacatagtttccaacccatcctagccttagacaagagtaccgacccaatcccacctacggccgggatacccgggacaggcaggcagaactgagcccctagcagcagggcaccaaccctctgccgtatgacatctcgactaccgggccgcagctcgtgtagccttcatttgccctggag

SEQ ID NO: 33187 - DNA, 607 bp, Oryza sativa
  unsure (1)..(607): unsure at all n locations
atagcatagacacggtgttaggctagaggctaggactccatgagtcgtagagataggcggcatgtgatgacaaccctgtgatgctaacattgcctatgctaaaactgagctaatgctcaaatttaggctccttaatatgagatatttatttatagtacatatcaaatattgctaattggatcttggtccttcatgagttgttgaaaaattaaaatgctaatcgcttgtagcctgactggatgattgtaactttctgctttctgcttcctttgcagttcatatttttttgcccgactttcattcacttttaacactaaaatttgcannnnnnnnnnnnnnnnnnnnnctgcaatgtgttgaatagtctcacattggttgtggaagggcaaaggacctaagatataagtggggggagcccctcacctcaatggctagcttttggggtgggaaatgctctttacgatcctacaattagtatcagagcctggctaggttaacatctctggcccgatggacacagtgtgtgaaggcctgatggaccgtgggtgcctgcggagtccgtatacctgatggaccgtgggtgtggggcccgtatacggtgaagggg

SEQ ID NO: 33188 - DNA, 703 bp, Oryza sativa
gtggctgacatacttcataattgtgcatagcaatacatcagtcactgtgttccattcaaaatgctatgcacattcaccaatagatttgcaaatcaaacatatttgggaagtatatagggcttgttcactttggtgccaaaaacaaccttaccaaaatttggcagggtaggaagtggcaagttttggtagcgttggatacttggatgtgttttgttagatttctttccaaattttggttgtgtcattatgagtgggaatgggaaactttcagaactaccaattttggtagaatagcaatggtagaacgtggcaacaaaatgaacagaatgaataggcccatagatatgataccagtgtcttcgaagttcaaaacaactggagcagagatgtctatgtaatcagtctaagagttcaagcgactttttcattctactgtctagataaatttgttcactccttcccaaaagtaaatgtttttacactattttcccatttctttctagaaagcatgccaaaagcatacattaaatctttccactttttcatggtttagacctaggcattgatccatactctcaaaaaagttttatttgggaactaaatagggcctaagagcgagtacaatagcagggctacaagtcagctataagcacatgtaaaagagagaggagagaagagagaaagaaaatcgggctataaatta

SEQ ID NO: 33189 - DNA, 607 bp, Oryza sativa
gctggatcagttcgagaggcagaagcaacaagtcagatgtatgtgctacagtactagtgtcttcagttcccccgaaacaacatgaaaagcacatcgccctctaataacagcctgtcgccatttagcattctgctatgtccaaattcatccagaacagagttcttgaatgtattccaacttgatgctaacttcgcgccacaaatcttgcccgacatggcacagtggtgatcatagatcatctgtctactcacacgcataatccatgagcaagagatccgatcccttggcaggggagtcttcggatcagtagcacgaagcatacgtatacaccaatctaattccatggtgatatctctatttatgattaaatatgcaacaataaataaatgacttcatttttatctagcttactccttccgtcccaaatttattatactaggggcctgttcactttgatgccattttcaatcttaccaaattttggtaaagttgccaaaaaagtgactatatttagtttgctgccaaattttgataactatatatgccaaaattttggcaacttttgggcatcaaagtgaacaggccctaggatgtgtcgcattcagtc

SEQ ID NO: 33190 - DNA, 552 bp, Oryza sativa
atactcaattaatcatgtgctaatgactcatctcgttttacgtatctttccaatctcctcaatctccttctcctcgaacacaccctaagtagcactacgaactgccccctaaactgttgcttgtagtaccttaattagctgatgacttctcactttctcttcctcatattgattttcaatataatccatcggaaagaacaggttgattgctattgttttcccttgttatcatcgacctttgcatcttgaacttgcacagctggttattagtagttggatgggcatgctctagaaaagttaaaaaaaaatgttaatgatcactatcatgggtcacctaatgatattgcaaggatgaaactcaccaaagtaactgagtgtatctttattgcttcctttttgatgagtgaaggataaaaggagagcaaaagtagaacttttttttcataaatcaatggaaaaattcatgaagtgagtcagaagcaattccatgttctctcccgcaccaacgaatgtcaactattgtgaggtaagtgatgaggatgagcacaaagg

SEQ ID NO: 33191 - DNA, 547 bp, Oryza sativa
cacaccggtttcttaccatttctaccgttggaaaataaagcgttgaaaaagtctgattaatcctataaagtatggaccacccgggtaaatatctcccaaaagtatgaaatgggttcaaataacctgtagagtgggtttgggccccgggaccacgacgaacacacagtgacatgaggatgtaattgattaaatgcattttactcctaactatagcggcttaggaaagaagtaacgtgatcggagaaagttagtgattgaactattcggctgaaattgggtaacgtgtctgtcatgcaaacaataccactcggtcgcatcaccgcctaaaagaacacttacaaaccatcctcacatgtttctttagaaaataaaaaaaacttccaaacaactttgatatgttgtttttttggaacacggtataaacgtaaatattcatacacatgcgtgcacttatctctataaactatatatatatatatatatatatatatacacacacacacacacacacatacacacacacctaatatcatatctctttaactag

SEQ ID NO: 33192 - DNA, 678 bp, Oryza sativa
aattcctgcagcccaacctggcccggcgacgtactaaacggcaaatgcatggctggaatccattctttggtgggttcttctctcatttgccaactttgttcttttgtttttcatgtgtatattttttaactgctaaacagaatattttttaaatatatatatatatatatataggaaagttattttaaagaatcgtactaatctagtttttaagtttttactaatatttaattaatcatatgttaataaggtaacttgtttttcatgcgggaagaaaaagttcttttaactctccttctcccgaacgcacgaggtgttgtttggcgtagtcctcttatcctctcctagctaaggggggctcccatcggatggcctaataagctaaagaaaaagctaaattttaaatttttaaacttaattctaagattgattttgagatattttcaacgtagttttttttcagtattggtttttaagtcaccaagaacatatatataaaagttttacctacaaatttatttttattctctaataagtcgttttgacttattaggaaaaaaaaccaaacgatggggcctggggtgtttgggtgtcaaaaataagtttttaggccccctttgattcaaaggtaattcataggaattttaaaggattccattcctatagtaatttttccta

SEQ ID NO: 33193 - DNA, 943 bp, Oryza sativa
caatgttggaggggtggaagacgttggccagcgacgttggcctgcggtctgcggaggagcagctggggagttggggcttcgagaggatgggagttgaggagcagcttgcggacttggggctttgagaggatgggagttaaggagcagctggggagttgccacgagtgataaagctgacactgcgacctctcaagccgatttattttggattcaacaagcacatatacatagaacaccagatataaaggtgagttgaaaaaagtttgagttagggagtacagaaatgacatatacatatgaacacaagagataaaagtgagttgaaatattttgaaatagggagtacagaaattagactgggaaaatggaagcagggaaagttagagagggggattacatttgggaggaaggaggagaagcagggaaaaaggaattctcgaggaagacgatgactggttcgtttcggtctcccgtgtagtggcagcagcctctgtcacgcggaccaccctccaggtccactgaagaattggaaatcaggcccagtctaaagcatcgacatgattacatgaaggcccatattcttggtagcatctacggcctgctgcacagattgggcccatcctatctctttcttttttacgaccaaaacaaactcgttggctcatgcaatgcatctacgggaaacagtacagctcggaaatggtcacacacaaacacaaagggtataagggcatcaacaatcaaagatacccatagggtgtcctcactagcagaaaacactcttagagacacccatctcacaatgaaggctacacctaggtaggttcttcaaaatctgaaacaattggatgaaggtactcaagctcacagtgggtgtcccaatctaaaaatccacaccggatgttttcctatactacccctcttctccccctcccctctcttt

SEQ ID NO: 33194 - DNA, 967 bp, Oryza sativa
tagaatcgaaggcgccaattccttggttcctttacgcttagttcatttgttccaaatggatgaacaataaactttcacaggtatttacaattttccatgagaaatctatatgagctctattctattctttgagccaaccactggtcacgttttttccccttcttgcattataaataaacaagagttgtggtcacaatcatatatatttctcataacgaattccttatcgctgaattttctatgcctacgtatgttcacttctatagcaagcattcatcatagttatattgctatgaatgttagagagagagagaagtaggagtcattgagtatacacctaaccattcaatccaaaatcaaacaaccgaagactacacactccctcacaccgataagtttttctcataataacaaaataactcatcgaatataactgtactttatacaacatgtcgtggtcgttaacatggaatacctcataacctacaagctcacatattggagactttaacttttatcaaatattttgttccaaagcttacataagcatatgaagaattgggggattaagattctgaaaagccgctggttagtagccaacttttaagaacataaaaaaatctatatctttcagtttttagttttttaactacgtaattttagaatctagatgattaaagatcttagataaattttgctagaagctccttagaagttattatgacttgggacggagagactccgagagcgctgcaaccgcaaacccgcaacgcggccgtgctcctcgaatttgacgagatttggcgaagccgcccgcgcgcggcgcgccctcggtccctcgccaacaacaggcgcgacgaatccggttcaaatccattaaagaaaggggccccacacgcgggggccacttcaccgacatgtcgtccccaccgccgcagcgcccgccagctacgttcccgcccgcgcc

SEQ ID NO: 33195 - DNA, 555 bp, Oryza sativa
ttagtacttgcccactatcagcagcagcaacccccacaaaattttggccattcaccctttgcagttttgcactacgccattcccctaccgatcatccccatcgtggccctacccggcctgcctcctactatatcgattcagcagttcaccctttcctttcagcacaatgctagctttgtcatgatatacacattttcacccccttttgttttacatactgcaatttagcgagagtgcttctccggccgtggcactgcagttgcacaattggctgcatttactttgcaataggtaccctcaagaaaactttttgttgcatcatttttaggtaggtaggtatgctagatgcgccagcccccaataggcaataacacagaagtacatcctctgtgcaagaagaaaattctagtagtaattctcttagtcaatcgataggagcagagtatagaatataccatgtcatactatctttttttcatctaaactatactaccttcgtctcaaaaggaatctaccaatctaaataacactatatccagctttgtaaccaggagt

SEQ ID NO: 33196 - DNA, 720 bp, Oryza sativa
attcctgcaccccgttcgaagctgaagcaaagcgtgtaaaaatttgcccgcttcgattttgcagatccgatacacggtaaaatgtacagaaggatttaacaaaaccgtacggttatcacgtggttatcacaattaccatacacggtaatcttttcagttttttaaccacgatatgtctcacggttaccacgtagtttatcgcggaggttttgtaaccgtaccaaaagcaataagagaaacctgatgtgttaaatcccatatgggattggtttattttggaacgtggcgttgagattggcgttcgatctgcgcgtaggtagagaagaatagaacctagttttgccggcaggcgcgccgcgtttcacgcgatgggacgcgcgccacgtcgccggcgtaatggcgccgcggacgctggctgcacgcgcccctactggcccctgctccgaggctcgcctcgccgcgaatccggtactgcgtggtacgagtcgggaccgggtcaccggtccaaggcccccaaacaaattcaccgatccgatccgtcgtcgtttctgccgagttttaccgccgccgctgctgctgtaatttggcgaaggccacacgagttcacgccgcgatcacccagacacgggacaccaccctggttgcgacagaaacaggggagcctttcacatcttacgtggtcagtcctagagaaacagagtagcgtacagtacaaccact

SEQ ID NO: 33197 - DNA, 942 bp, Oryza sativa
accatgatttgagcacatgtaggtaccaattataatatacacttatatggcaatatttgtatatgtgttcaaaacactttacccttttatgtttcctacattttaaaatcatctatctcggatatgcattcctatgtttttttcccctaatttcccatatattacatttatgcattccacataaacctaacaattggtggattttaagatataaatcgaacaaaaaccctaaggaagattattagtttctcatgtccatgatcaaatcaataccaatcgttgctccacgcctaaataagaactaaaaaagatggtagatcaaagctagcaccgctataaaaaaagggggaaaggggatgatgcacttgaatgccatgcatatgcctagagtctattattttgtttaagaaaagtataacatatgagattccaagtattctatctggtcggagattgctgcagttgacgcttttggtcatcttgcttggtgcctatttggtacccattcatcatcactatcagacccactttccgtcatttgaatcggatatccttctcttttggatatctggtcgcgtcgcttgccccttcctaactctttaacaataatatatgttcctttactacttgttttcatcgtatcccgggctcgactttggccccgtagatgggagcctccacgcctaggcatgtttgctaccattcccttcccccttactataggttgccttcgccgtaacctggtggggatagagaagagaataaaacatgagcgattagaataataaggagagatgtttaatatattgagaaccaccgaagttgttgaatgtgataaccattgtattaatgaagagataaatatgtagaccaattatgcaccttttcttgatataaatgctacctccaagactttaaaaaaaattgtcgaataccaactct

SEQ ID NO: 33198 - DNA, 1698 bp, Oryza sativa
  unsure (1)..(1698): unsure at all n locations
tagtgcagacgaatataagaaatcaagaacagatcaaaagcagaggaggtttgccaaccagatgtactcggcgatgatcttgtcgctgcagtcgctgaggttgaggttaacgaggtcggtgaggttggccattgctcaaagcagaagagatctgaatgagcaagatgcaagcggaaaatgaggtgtagaagaggaagcagggatgaggagaaacagggagaggagagggatatttatacccagaaggagagaagttagctacggtgtgcttgcaagtcgcaaatcgcaactgtggatagcgaagtaggggcaagtatcattcagagacatttttttttcagttatttgattaataatgatattggccgtttaaaaagatagcgtctatattatctttatcttttaacaaaaatcaagggaatggattacctctggtgtggcaagaaactgaagtaatcatctcaaatcgagaggatgctgcagtattttcagggagaaagaagaggtgtaatcataaattcatacgtaatatgataatttgacactattgtctaaaaaaacatggttaacatagtaaaacaatttgttcgtagtcaataggaattaaccgtggaccgtggtaacttaagttggatggaagtttactccacttattattttcttggggttttttttcatctggtgtccaactcatgaattatgtgagcactgtgcttgtgcacatatgtatttccagaaggatgtttacaactaaaaggaggagcaaaatatagtgggtcagttttccaaataatgaggaaaagagtttgtaagtgaacatgatcgtgcaactaaaatacaaaatagtttgttttgtatgcttgcacattcacgtttattaacttttgagttacattgatttaaataattcaaagtcaacatggtgattagttttcggtgttgacctaagaatatgcgagctctatttttaaatgaaaaaagggaaagaaagacacaaaatgctgccttgatacttagacatatttttattcgaaataacgtttgatgatgatgtatagtatagcaaagaatttggccgtatgctccccttgttctgttggatggtcacttatccagaacctaaattgctaatgactgttgcttacttaattttgtgtccttaagattttagagtagaatagctcttatagagcagtacaaattgtaactgctttccattaataagtttcggctatcacaagtaatcaaaaaccatgcttctggttaactacatctccatgacaaaaaaacaaagaattggacgtcatcattccaagccaaaaaggagcgaccccttttctctttgtttttcttatctgttctgagaaatacaggaggtagaggtttgatgtatctatcaggcctccaatagtagacatcagccaacaaatttataaaaaggatcaccaattgatccacggaatctttttttttttaactgttgacctcaacgtgacaatgatcattgattggttcgtcacggtcngctctgtatttgcatagacaataactttccaaatgttaaatccgacaacggccgtggcatacactccacagatgtcaatgatttgtcaatttattacaagtttttagaaagaaatgacacaaggttttttaacctaagaactgaggataaaacactgattattaatcggattg

SEQ ID NO: 33199 - DNA, 707 bp, Oryza sativa
ctccaataatattacatgctaagactaaaatagtcatctatgctaagtgtttcgtgcgtatatgctaagtctaattaagactacaatagtcaattgctacttgtcgccccaattccgtagtcaataattatacatactaataagtctaattacaaataaagtaatcttatattaaaactcaaataatattagaacactacacaatcttatatgataagtccaattacaggtctaataatcttaattaattgcattacaaatataacaatcatttatattattacgtcacttgcctgctccaattccttctagggctagctcttccactcaggcttgacggacgactccgacaacacgtcttttctgcaagatacaaaaagatgtattaggataaatgcgaagtaacatatatatatatatatatatatatatatatatatatatatattgcatttcacgttaacgttcgtcctcgttcgttcgctcgttcatgttccctagctcgttcacgttcgttcgctcgttctcattcacgttcgttcgcttgttctcattcacgttcgttccctcgttctcgcttgtcttcgatcgatcgttctcgttctcgctctcgttcgttcgatcgttctcgttctcgttcacgttctcgcggcaacgtacgttgacgtgttcgttctcgctctcgttcgttcgatcgttctcattct

SEQ ID NO: 33200 - DNA, 871 bp, Oryza sativa
tttaatataagattactttatttgtaattagacttagtatgtaattattgactacggaattggtgcgacaagtaacaattgactattgtagtcttaattagacttagcatatacgcacgaaacacttagcatatacatgactattgtagtcttagcatgtaatattatttgagttttaatataagattattttatttgtaattagacttagtatataattatttactagctaggtttgtacaatatacgtcacctagacttagcttatatcacgatttgtaattagacttagcacgtaaggttgtgtagggttctaatgtacgacatttacacttagcatacatgacttagattgttaaaacataaatgtctcgtgacttagcagatgttttgtcacgtcctgataaatccatcccgaattaaaaatcattttctaaaaggaataatagaattaattaaaattcgaaaagaaattggcaaacactaaaatacgtacaagaaaaattcgaatgtggccctcaaattttagtggaattttcagagcacaaataataattaagaagaaataaacaaagttaaagtggttttataaaaataaaagccctaaaaagtcttcttttcccccccttcccttcttgggccggctcggcccaactccctccctctctctcctctcccccgcggcccatcgactcttccccgcgtgcgcgccgctgacgggcgggcccgcccgccaccctcgctgacgggtggggcccacccgtcatcgcctacctcgcgccgcgcccggcgatcgcccgtgccctagtgccccccccacccacgaatccggcggatcccgccgtccccccccgccataaagagggggaaa

SEQ ID NO: 33201 - DNA, 515 bp, Oryza sativa
tttctctttatactttagtttagtattctattgctaagtggagtagaatagaacagctctcggagtcttcgaaggaattcgggtatggctctagtagctcttctttattcttttggaagactttcggaattaatggaatattattctttatatactctcggtactttagtttatctgagtatcggctttactttatatctgtatcgttatagttgtgtagctagcctaccagagaggtgcaatgtgtgggtttaatgtccgattattcggttgctctatgtcattcatagggatatagagtagtatttaataatgtagacgtggtgtctagattattaagtatcattatctgggaatatatgctgcgggatagtagaggtgggtcactgatggtgacagctcagtacgggtattcctccacgttagtaattattcctaagacaaattcctggggagggtactcctccgttagtggtacatagaagtcatgggtgactgttgggtcgatgcttcgg

SEQ ID NO: 33202 - DNA, 1504 bp, Oryza sativa
acaccaactattacgtcgacttctgcccgccgacgagcggcatgacggctggcgacgacaacggtgtgcgtgacgggcggcgactcctgtggctaagctgccggatttgtgcaaccgcacggcggtggtcctcctcccgcctctcgcctgcttcggcgcccacctgcccgtccgctcaccgggaagaagagagagagaggagagggaagaagagaggagtgaggatgaggaagaatagagaagggagagggaagaaaggagtgaggctgacatgtgaggctcccgtgggccccaccatttttaaattattattttttggtgtaactgatatttggccccacggtttttattattttttggatagaattgtcacaagcgccacgtcaaatgacacgtgggatgaagaactagtcaaaccagccacgtaagcaccacgtcagcaaaaaccacctttcaaaccgccgagggacctcgtatgtatcggttttgacagtttaggaccggttgtttctggttttggagttcacggatgaaaatcggattcggtgtaaagttaagggacctcggatgaacttattcctttggtccgtaggttcaaaagtttggcccaagtatggtacgtaaataaattcggcccaaagcggaaatggtgggcgtagatttcacaacagatcacgcaggcgcaacccgccgcacaacgccggcgagcgcgcgaggcggactcactcggtcactcctcgcttcgatctgtgtaagtatctgcttcgatcatgctacagtttctttcccgctgcggattttgatttttgacacgcggttgcagggaggcgggtgggtggtggccgggtttggtgcggagcaggccgcggcggtggctggcggaggcagagcgcgcggtacgtgctcgatgaaatgctcagcgggaatccgtgcccattattgctagaagaaaaatcgcccccttcggaggtgctcgacgagtgttcgacgaaaggtgtacaaggacgcggcagccttgtaacggcagtgttgtgatttttctgcagcccagtttgctcggcaggactgcgctgctgatgcgggcgctgctcagtttgtgccaggtgcgtctcctctcctacttcgattttcttgcttgttgaattgctgatgcccatgatgatttcatttgttcaatagaattgatgctcacatagcttgaaggaaatatgtgaatatatatatagtacaaatatttgaaatgtgcctactcgtgaaagcaaaaataggatttttttttggaaataatacgattttaaaggaaaatcgcaaaaatataggtcggttagacgaaatcgcaagtttggcaccctatcgaatatccgtggttcgacagggtacctatcgaacaaccgcagttcgacagggtgccggcagttcgacaggtgataaaataatttttaaaaagaggaaaaacactgtagcacactgtagctgagaccctatcgaactgggctgcaggaat

SEQ ID NO: 33203 - DNA, 889 bp, Oryza sativa
gaccgtgcgtcgtcgcgcttttccgcccgcctgaccgcgatggtggccatgctcgccctcctctccaccggccttttcctctcccttttcccgcgcggacctcgtcgccgtcgtcgtcgcggagccgcagctgctctgcgcgaaagccaacaccatcgcagccagcgctcggttgggtcatcccgtccgtcgtcgtcgcgctcctccgcccgctcatctgcgatgccgacaccatcatctccgcggtgcgcgcgacccatgtccccgaccagaccaagctcatcaacgccatcatggaggccggcggcgaccacgtccggaggtgagcagaggcggcgtcgaccatggttgttgcaaacggcgttgtcggtggttgcaaacggcgctcatcccatccctcccttgctccttcaaccaaataaaaaactggaatcgtcctattctacaaaccaaacacccgaatggaatcatcccaatcctaaaatcagggatggtttcatcccatcccacctagtcccagaaccaaacacacgctaaaagtaatttacatatattatagaagtaacttagaacaaaacgaaagtaactttagcatgtcatttgaagtaaatccgttgtagagataaaaacatggctctatctagaaattaaattaatcagcataaattatggaattaactaaaaaaataataaaagtaatcaccttagagcattatgaatgtataggaagtattttaatcaaatctaaaaataacttatatatatatatacacgtatatatatatatacgtatatatatacgtatatacgtatatatacgtatatatatatatacgtatacgtatatatacgtatatatatatacgtatatatatatatatatatatat

SEQ ID NO: 33204 - DNA, 1381 bp, Oryza sativa
gaacggctaaatggtgcattgcatggtgcatgttattcaaatactttctatatataagtttcttttaaaaaaatttcatttttttaatatttaatactcaattaatcttgtggtaataatctatatcatttcgtgtgcatggataagctcacttaatgagctagatcgaacgaagcctaagtaggacattaaaaacatggacatgatatcaaaataatatagttgacctttaatttctaataatatataaataaataaaacttatactatatgaaaatacgttcatgataaattttgtaatattattttgatgtaacattattttttttatagtagggagtgagtaattttaggaattaatgttactcacaactggagtttttttttttgaaaatacaaatctaattcaacaaaacatgttattaagtgatatacaattatataactatataatgtatattattcatttatttagattatggatatttcgatgacatgagtatagtacaatacaactgaaaaaaacttatatttgtacaactataagctggaactattaattggtttttatctcatgtgagtgaaaaaaggaaaaaagaggatggacgtggggcactttgtgagaagtacatactcctatgcactcctaagaactatatgggctggaaattatgtattttgttttttatgttaattagtgagaaagaaaaaaaaagaaaatgaggggcatggggcccacgtacaaaatatgtacgtgcatgcacgtacgcgtatcgatgtacgggagctgctatggctttttgaagatatatatagttggtttcttcagctacatctaacggttaaaaataatggatccaccagattaaatgaaaatcaatggttggatgttttgtcttttttttcttataatttctctaaatttctctaatttataagagcgacacatggcggtgtaggagtgtttgtagggtgccacatggcggtttgggagcgtttataggaagtttaatttacttttagtagtatataatagatagatagatgtgttgtggggttaatatttggtcttgctagtgtagataacatctttatcaaaatcaagataggaaggtatatctaattaaaaatctcattaatgaaaaaggacagctcatatttgtatcttatttttttaaggacaaagctttaacctggtatgacctaagaagaaaatgggatgccatccatgtcgtaatggtcatccatgcatcttttcccctgactctaattctaagttatacccatagatattattatatatcggatgttttttatctagggatattactatatgcccgacatccgactaaaacgtatagatggttaaaatatttcaata

SEQ ID NO: 33205 - DNA, 649 bp, Oryza sativa
agctcggtacccgtacaacgtatgtattgtcgttccttggatgttgacacttatcttctcttctgttcttatgggctttgcagctgtgtgaatgtgctaaacaatctaatcagggaattgcacttaagtcaaactgtacgcatctgtctcaattgtttgcaagccaaaagatggtgagaaaccagttatatttgataacaaactgcagagcacaatatcctgattaacattgctgccgctaccacccctaacctgagcacctgatccacacagcttatgcaagaggcagcagaagtagcaccctgtgactatgaggctatgagccaaggcctccgactaaagggagagggggaaaagtgagtggactgacaaagggcgcattagtcatgaggtagctgcaaattcatggtggagtggaggaagaacctgactatgtcaaaaaaatgtagccaccacagcaatactaactggccatggacaggaaaaagaactgttgaattattcataaaagtttttcccgttttgttggggatgcaaataggtgctgcctctacacttccatccactgtattctggctaagtggctaacgttttaagtagaactggtataagcaaaaaccttacatttaactcattgaatcagaaacct

SEQ ID NO: 33206 - DNA, 510 bp, Oryza sativa
caccaaaacaaaagaacatcacacaacatgacacggagtgacttaagctctagcaatacaccaaacagaaccctttctagccacagcatgcaaaatagcagaaatgcttggggaggcactgttgaaatcattacggtgcttccataatgcacatgccactaggataaccaatttagtccaaagcgtaagaaaacatagtccaaaatgaaaagtcgtgctaatgcatgaccgaatatgcaccttgataaaaaaaaaaacgcttcaagttacattccctcgtcacttaaagaatcgctgaaggtaagtaatttttttacacatatagagaagggaagggatgagcaaaacttaagacaagcttatgtttttcattactctgtatatagaagacacacaaacggacaccactacacaccagcaaacctgcgggtgtgcttcatgctctcttaatacacataccccactaaagagacgaaaattagtagaaaaaaggagaggtctgaagtgcta

SEQ ID NO: 33207 - DNA, 561 bp, Oryza sativa
agggccccgcgtttgcacgatataaatatgtgtgtacaagtaaatggcgcagcactgtgaagagcgacttggaacggttcctcgccgagttgctaaccaacaaaaactggcggaatgcaaattaaagcatgggagattctataatgcacaggaagtaataatttcgcggcgtgattaggcaccaaggaagctgctgtagatcgttaatgtgacagtgaaattaattagattaaacgtgctgctctccggtgtttggccggaacggcgcatgacgcggaccaccgaaacttggggatgcagtcggcactcgcactggtgcactgtcacacaacacgtgatggaataaacagggccaacaacttacctccctagtacagatctacacattattcctgatgaactatccatgtcggattaatgactacagcagatgacccatcactgatagaatgtcaactttgttggatcctagtctaacacgtctcggataacatttgatgggtcacaaccatgctccgtcatgtataacaagtcatccgtaacgggtgtagtgagatgatt

SEQ ID NO: 33208 - DNA, 666 bp, Oryza sativa
ggagaggagaggagaggagaggagaagagaagagaagagaagagaagagaagagagaggagatgagaagaggagaggagaagagagaactgacgggtgggtcccacatgtaatagggccaaatgagtaagggcagaagagacattttgtgcttcagttaacaccgttagatgcccttaacagaacagggtcatacgggagcttcgtttttgaaaaggagggtcaaataagcaaactctaaaaagtagggtcaaattggtagttagggtacaaaacggggtcaaataagcaattgtccctaattattaatgccaattaaattttctctcctatcatggtaattcctttaatgagcatgtcatatatatacaccaccaataaaaagcaagtggtgggggtgagtggtgaatttgtctcgccaccaattccctactttttgtgaaggtaaaaaaagaagagcattggccaaaggaccccacctattagctgaaaggtatgcataaactaaaaatgagatctggagaaaatgatggcaaaaatgggttgatgacaatgtttgtcccctctcccccggccaaaaaaaaagtgccctttggtaccttctttttctcttcaactcatttaatgtctacaatacattgtacatgatcacaacattgggagtgct

SEQ ID NO: 33209 - DNA, 1216 bp, Oryza sativa
ttcctgcagcccgtaccagggccggcgctggctcgccgtctccgccgccccatcagagcaccggcgccgccgtaaggagagagagagaaatgtggatagggttgggggtggatggatagggtttcctaagggtattgtgggtattatgaataatagttgcattttttttttattttaaatcaaaacttaacggactagtggaaacagggtcagacgggagcttcatttttgaaaaggagggtcaaataagcaaactctaaaaagtagggtcaaattggtagttagggttcaaaacggggtcaaataagcaatagcccctaataattatggaagataggtgaaagaatctatgttcagtcgaggagccaatatgatcgtagctatgtaaagagataggagcgaaattaggtggtctataatctggggaaacaactggtcagccagaattaatataggatcactggagacaagtaaattctcagaaggcgaggtgaaccaacctctgtatccaatggcatccaaaatcaatctacatctgtggctcgacacagcagtagtatgagatgaaagcaaatactaactgttactaaaatgcaatgcgcatctggtttgctgcctgtgcatactcactttggaaaataagaaaccgcagatttttcgacaagcaacaagccagactttcagacacaatccagcaaattatcgactgtcttgaactttggaaactccgggccaacgcagccattaaagagaaattttcattctggtgtgactcaatcacacagagctaatgtaaatacaaacttgaatgttttttgtttctaaatttcttgtatattctactttctactcctacttctcatgtttccccactcagtaactctattcttctccattttatcaatgaaatggctataaggtagaaccagctctaccttcttacgtcaaaaaaatgcaatgcacatagatcagaaatgaagaacgcaaaggtcatgaacttgaacaggttcacaggtaggttagttggaggtgggtaatagcagtgagaatacgtaccttggaaagttgtcgtgattttttatcccaaactgatgatgtgaccatggctactacggatacatccgttgctcacatcatggatgaacaacaagatatcaagttcgagtcctccaagtgccaaaatccaattcggccacctgctacactgctgacttca

SEQ ID NO: 33210 - DNA, 773 bp, Oryza sativa
acttcaaatggccataacttggccatttgaactcggaattggaccgttcaagtctctaatttttccttaagaagtcaagaacccatttttgtgctttgtttctgctgttatgtggagtttattagagtaaaagccttttcttttccgttggtcgtgtagacgctgcagcttcggaagatccgctcttcgtggaagttgaagccggcgtttgggaaagcaagcaaggcaagtcacatcatccttgaacatattgaatcccagtctataaaagtattttgatttaaattattgcattatcgctttatttaaattcccgcgttatcactgttttatttagccatgcctatttacctttgttatgaccttattattattgctattgttattattaccttgttcaccctagaataaacaaaaccctaactagtggacattatattcatggttccactagtatgaatttaggtagatgcttcgctgtttaataggacaacattaggtggtttttataactttagactttgggaattctcatatcttttggacactatggaattgttggtttatgttggaattggacacacacctccccctctattcaaaacccccaaaatggttttaggctgggctcgaggtgcgtggttgggttttgttagtcgtacctcgggtactataaggattaagctcgggcctctgttgcaaaacactaccgtacttccacatgtctagtgggtaaggcttagtttgtggctcagtctagtcataaacaaaag

SEQ ID NO: 33211 - DNA, 795 bp, Oryza sativa
cgagggtaagggagaataggagagaaggcgttagcgttagatagctcgccgatcagccaagctgtaacaaacccaaattgtgaaaacaaaaaccttagaaagtcaatataatgagatttttcatttatatttattgtggtgaaaatttattttggttgttttttttggattttctacgcatcattgcatttttgcatatttaaattaaaattgagaaaaacaaaacatgtgtatatgtgtttgtgtgtgtatatatatatatatatatactagcaaaggtgcccgtgcgttgcaacgggaagtgtacagaacaaaaaaattgagaaaaagttaaaaaaaatttacattatgtaattcattaaaatatttggtatttttaagtaggtaggtgtataattaaatcaatttacaagtaaagcaagtgtgaaaaataaaatgacatggttaaatttaatttgattaaattctcatgattagttatgctctttggaatttattggaattatcagagcttaattgctaatttttaataatacaaaaatcatttaacaaattatttaattggaaaaaaaaatcaaaatcctcctttctatgtttgggccgaatatagaaaagtttatattccctcccttttgtctattctatgtgtctggcctgttttctttctccattgaagtctattttgcgtcctccattcggtggcccaataggccggcggcccgacgtgggagcagctggagccgtccgatcgaatggacagtccagattaatcctaagctaaataaaaatacccaa

SEQ ID NO: 33212 - DNA, 541 bp, Oryza sativa
actatagggcgaattcgagctcggtacccatgcacataccaagaacccaccgccgctgtagcttgtttttcgcgagctacagaccaccgctgtagctgtagcttgttcatcagcgcggacacctacgtgttcgcatggtcctcctctacagtttctctgttgaactcgaccccatccgagcctccgttcgccgtcggcaagctctagactgagcccagccatggctgcctccccgtgagctcgagccagggacctcatcggtgaattagataaacttgagggttttttcccaaaaaacagaccaagacacataacactgtagccttgaccactctgtaatattcaggaagttcgaggactcttaatggaaaactgttttcaacatgtgctgaaattgtactaacttcaaaaatgtgtagaaaattcatctgaactccgtttgagctgaaccaaatttctatggattaataaaaacgtgatctacaatgttgtaaaataaaaatggctaacttatgtactggtttttcctctaaaattgtga

SEQ ID NO: 33213 - DNA, 1230 bp, Oryza sativa
gctagtcctatttatccctaatttagcctatttcctatataaatttcattctataaatcctaatttttgcacaaatggagtttactcaatatttgtgctattttaaccaaaagattcaccctagattaattttacccatattttatttttatataatttatttgaatttttaattagggccaattcttattccatcgcacttaaatttaattgttaccaatatggttgcgataatattttatttatttctatcctcacctaatctttatttaaaattatatttcaattatttattttgacaatttatttttagggtttattcctaattaattattccttactcacgattaatgaactccgaaatcaaatccaaataaaataggcgaataaaaccggcatgatgcaatttatttaaaaagtttttgaaggtccgtatttttagggttttgattttgttagtcgaattttcagcgtgttaaaataccggggatatataaagaagaatatttcattaattcagaaagtactacagaagagattacaaaagctgctagagccataccgaaactcttccgaagactccgagggactccaaatactattctatttctactccacttagcactaaactattaatactaaagtatgaagaggaaattgcttgcttgagtgtgtgttgaagtgaaatgagctcctctatttatagggccggtatgacggttattgaaaggtgagttgtcggttttgcccctgtaaccgtcattggggatgcatcctggacgtccttgtggagggccgagctgcgacgctgcagccaaagttcggttcggccgaaccttggccggcccagcaggcctccaaccttggccagggcactgacaggtgggacattatgacggttaagcagttaaaaccgtttcccgacggttacccctgacaagtgggccaccatattatccatggctcgcttgggagtgagttttcctcaattcttttattgtatttggcaattcgtgcaaaatgttattttccaagtacaagtggaaatacatattatttagaaataaaatgcattgtaagcatagctaattctccattattttagttaaattgatggtcgaactttgtcggtaacgaccatcaacagagaggattaggtgctaacatttccttggatcaaggcaagttctctcctcccaacctttgaacacattgaatcccatgatttga

SEQ ID NO: 33214 - DNA, 683 bp, Oryza sativa
ccctagtgtaatcttttgaatttggatagcttaggtggatggttgggcctgttgcaacatgggatagcgttggacagtggatagttaatattaattaattattacaactgtttaatctttcaacttctgtttataaatgctcactttatgcaaataaaccactttagctcttctttgatgattccctgcatcatgcctctattccagtatgacttgctgagtacagtgggtagtactcagtcttgctctaatttttcccaaccccagagcacgagtatgtgtcagatgaaggtttctccgaggagtaggcttcgtccgtgccgtcgaggatgcctgtggagtggtgttcccgctgcagttctagtcaaggcttagctcctgttgtctttctttctttccgctgcatttatgtaagactttcatgatgtttgtaagacgtggatctgaatgtcaacattgtcgtttgtgtaccccggccggtcctggacggggattttaatgcacattctgcttggaattctattcgcgaatttctgggcgtgacactaaaagaccaactttatctgaagccgatttcccatctatcaatgagccaactgtagttggcgagggtaatgagatcacaagccgtcgatgcatgtcttttggagaagcaacatctacctacaatggatcagagctgt

SEQ ID NO: 33215 - DNA, 614 bp, Oryza sativa
atttaaaaattttataaaaaattcaaaaatatttagttacacgtaaagtactattcatattttatcatctaataacaataaaaatactaatcataaaaaaatttcaaataagacgagcggttgaacgttgaacgtgaatagtgcagaactacacttattttgggacggagggagtacgagctaggcagccgcgtgcaattttggctgtgtttagttacacactaaaaatgaaagtttaattaagttttttaaaaaaattggaagtttatgtatgcagaaatgttttaatgtgatgaaaaagttagaagtttgaagaaaaaattgggaactgaactcagcctttacattctctttcaatgaacgaacgctcgatcgcaggttgttgacggacgcatgcatttccacgtgctgaataaaaatcatactccagcaatgagcctgctgcctacttcgatgcgtcgcatatggatatgggccatatgcaatgcagtgcaccccacatcgttccatatacgcacggcgcacaccctgctaattaatttggtcaagcctgacctttactgctcgtgctaatactaatattcaggcccacttctattcttcagcttcaagca

SEQ ID NO: 33216 - DNA, 561 bp, Oryza sativa
  unsure (1)..(561): unsure at all n locations
tcacttatatattaggtcattttgctcttcacaaccaatgtgagactattcaacatttgtttcccgaatntttatcattgtagttaggactgagaatcatcaggaaatgagccctcccagagatataccagttgcagttgggttgccgcctatatcctggagatgctataccatgtcatccgtttatgacggatggagataatacaaagatttatgtaccctcggacttcaggtctcaaggtggcattcttcctcatcgtagcgtaagccaacggtcatagtgccttgcttcatctcaccaattagattgaggtcatgattagcgtgccaagaacaccaaattatgggatcttgtattctccaagactgctatattatcagctacttgctgatggagtggcggatgcacatcgtcattcattcatggatgttcatgcatgtcaataccaaaaaatattttccatgttgtgcaacaagctaagattatattgttggttagtaaatggatcactcaatctacacgtcatgggttcaatattgccatttgcctcctttgtctca

SEQ ID NO: 33217 - DNA, 594 bp, Oryza sativa
ttgggaatcatcagaaaattagccctcgtaacattgggggagaagctgcgaaaaaatttctatgcaacacggactaatccctcatctctggaggcctcttctggtattgtgacaggtagctgacgaggatcttaaagcaatctccttcccaccactcatcctccggcctgcgcgcttgatggacgttggtgtggcaactgccggcaccaccggcctcctgccctggttctggtttgtcgcttcatggatgctgcccatacttctacattggtgaaatggggctttctcccccactggaaatatagtcatatataattcggcatattttaatccagataaataacatagtaagcatgacatgttaataatggagtgatccaatgattagtactaaacatgaacatgctaataacagtaatagcatcatctagtaacatatttaacactaatatgagtagagtaatatacccagtgaacactcgagagaatgatgaggcattggtgttgcctccgttgatgttgacgttctcggttttgcctcctacagtgctaccattccctcctcctccagtagcactggcaccgggtagacat

SEQ ID NO: 33218 - DNA, 972 bp, Oryza sativa
agcacaagcacctcacctcctctctgtctcctccctttttttcctttcaacagcacaagcacctccgtcgcacagctcttctctgtctcctctcacagcacaagtaccaaatccaagcagcagcaacagcgccaagcacactaccaacgcacagctcttctctgtctcctctcacagaacaagtaccaaatccaacagcagcaacagcacaagtacactaccaaatccaagcagcagcaacagcacaagcacacttactcactccttccttcacaagcacaagcacacctagcactgcagccctgctccctccttcacaccggccgcgctgcagcagccgtcgccgtctccggcgtcgacgtggcctctccgcctcaaccgtcgacgctgccgctccacctcagcagtcgacgggtgcagcactcctccgctcacagcgccgccgctacacgtcctccccaacaccagcgtctccctcctcgacgagctccggcgaggctagggtttagccgtcgccagccactagccggttggctctgataccatgaagtcttgtgattttttctctggaagcttcactttctctattgccattctcacttacatatacatgggatgggccctcttcaatagatgggccagcacacaagacacacacagataactagtctatttacagcccaacaaggaattctatacctaccttccatctttagttgagggggctgaacacactacctacccagggctgaatgagataggcataggtctgcacaccccacacctccagctagcaggctttgttcgtgcgctagatatgctttatcgctccacctttgctgagctgcaacgcgtccgcacaagggtagcaactttagaaaggagtatcttgcctaggttttgccagggataccatactccggagttcatgtatggagaagatgctatgcttgctccagcgaggacatacct

SEQ ID NO: 33219 - DNA, 1527 bp, Oryza sativa
atgtgcttgaccaggcaccaaaccaagcggatcgggtaatatccatgagaaatcaaaccaaaaccaaacaagtggattggattgttgccacgagagaatcacacctaaaagttggagatacaaatctcaactatacaaatcacacctaaaatgaagaggcaagaactcacctgagccgagagaggggatagacgaggcgtgccggcgccgcggcggcggaggacgacgagcaaggcagcggcggaggacggcgagcgagcgagcgaggcggcggcagagatggcgagccgctcgatctcgtgtgtggaaacggcgacctagggttggggacatgcagacgagaaatttcagaatattccatccgattcgtagcacgttcaggattaaccatccaattcgcatgtctttcagaatccaccatcacaagagctaatttcttcatttcacgccactccgtccatccgaagcagcaccgtctatccatcagttgccgcgtcctccgtccctcgccattcctcgtcgtcacctccagctccggtcagccaacctcgtcgcacacccgtggtcctgccacataagaggggacggttcctggtgcacatgtcggaggagctcagctatcgccgcgcaggatcgccgccaccgtgtggaccacgcgactagtgcgctatgtcggacgagctctcagtgaggctgagcttgtggatgaccaatagaattgcttcactaatagagcttgtggcagttggggatgacggccgagcatggggatgggcggacggcaccaatggcgatggcggtggacgaactcgggtacgatctagcgacgacggcggacgagctgtcagatcccggggtcaaatgtcaccaaaaatctgcagattcgagcaaatttgggctaagtagctacctaataggattcctaagacagaaattaagctaagaaaattaaaggatgccgcaagataagcaagtaggaactagagtttatatttcttgatccccttttcatccacccagatcgccttttatggagtacggcatctgagtgaggaggctggacaactcagtaggctgtgattacattaagttttggagttttaggacaaagcagtacagacacagtaattactgaaatgaaacagctccctcagatttacatcattgaactggtatcttagcatctgggctgcccattcccgcaactcctatttctctttctgataaacaacttcttcagataagcagggcctgacaatgcctcccccattaagacccaggtcctcatgggttaaaccagggaaaagtcttggatataaaggatgcatcctcccaggtagcagcttcattggtagattctcccaaagtatcttccactgcacaactggagcattgtgtcgagggatcagtcgccgctccaaaacagcaagaggggctgttaatatgttgccatcagaatcaatcagaggaagcccaggttctggaactgccttaggaccaatatggtgtttaagttgactgacatga

SEQ ID NO: 33220 - DNA, 698 bp, Oryza sativa
atgatttttctaagttgaatatgatttttgcctaatacagaaaagactttactaatttattaatgtattaaataaaaggaaaaagaggatgaaggacggtggctcgggaaacgaagttcgccagcgatctagggcataagggcgcgaacggagggcactaatgcgaaaagtacaacgcggcgaactcaccggtggctagaacggccgagattgacgacgaacggcgacggcggcgaggttttggcggcggcggccttcgggtagtcggcggcgatggtgctccggcgggttgcggcacaaacggagggcgggacgatgtcggcgacggtcacgcgaacccgtggacgtgaaccccgtgcgactgcggcgaccgaggctacggcggcgctcagctgaagcagctccggcggcggcggcgcaaaagacgacgcgggaacggcgctagagggggcggcgggcgaaggtggaggtgatgaggggtagaggagtcccagggggtccttttatatgggtcaagaggcaccggggagggctatggcaagccggcggcgacatggaaggattagcgtttgattaggaaagagaaattcgaatccgatttgatttgattaatccatgcaaaattggactccaaatcttggggaatggaaggaggaggatatgggaaatatttcccctcaaccaatttttgaaacaaa

SEQ ID NO: 33221 - DNA, 1343 bp, Oryza sativa
ctatcttaaaatataaacacttttaaagttagacacatgtattaagaaaacagatttaattaaatagataaatagggtgtgtggttataatttgttaagaagataatatagaaaataatttatatgaattgaatgtaatttaactggttaggtttcttatggtggaatcagtgtacttgggtttaatttctagatttaacacggtgtttatatttacgactaatttttctttcagtggtaggtttcaaattctatatttggtacgggtgctcgcatttacggctaattattcttttagtgatgagcgacgtatccatcgacagcgaaatacccgtgatgattttatcaatctcaaaaaaaatatcggctcggtcttcgaccctttttaccgaaggtgtttataggccctgtttagatcctccaaaacgttttgccattttgtagcactttttgccattttggatctaaacactagtagcaaaagttggcaatttggcatttgacatttgctagtccatagtagcaaattgtgccaaaaaatgttttgggaccactacctctctctttctctctgtcactttagtgctagaatggcaaaactttaacatacatctaaataccaactagtacttttgcaatgccaaaacttttaccaccaaaacttttgccatttgctatttgccatttcaaatagatctaaacagacccatagttgtaaggcgtgcgtgtgtacgtttctacagtttatcatattgtaaacacggaaaactagtgacatatgccgtcaccttttttttttttgggctgagctagagagagctctgtcgagtaggcgtgttgacaccatgttgccatcctctcctgcaccatgatgtggtcatcattgccgctcgtggctcgctgacgccccgggcccacgtctgggttcgcctttctgcctgcctgttggctgttgcgaccggccacctggggctcttccctcttcagtttgggcagccagtgacgcgtgtaactgcctgctggttttagtgagagttaggtacaccaacgtggtggttgttggctactgctgctgccagaggcaagggagcatgcatgtcatgtttggcctaagctctttagcttccaatggtcaatgatgtgtttgtatttatatatagtgaatatttggtctggctatagggccctgtttttgagtcatttctgttcttttttctgaattaatttaattagaggcttcttttcaatttgttacaggtcttgacttttaggctgctaacagcaaaattgtagaagtcttattcaaaaaatcgccacctccttctctaaatgttgacactagt

SEQ ID NO: 33222 - DNA, 543 bp, Oryza sativa
tttaaactgaaatttattcggttattatgatacataagttacatgcacgagctaattcgcttgaagatattgagttacggagaaaaataaaatctattactcttactagctctgccaaacaggcttttagtaggaagtacagtggcatcgtgtttgatgcagagcagcagaggtcgagcttccaaaagacagaaaaaaattcaagtgaataaaattgaaatttctgatttgatctataaaatgtggagtagtagatacgacctttcaattcgggaaacatcaaattaaaattgctaagtttggagcattcgcatctacaatctttttacctttcatcattgagacacgaatcaactatagcaattccgatgtagacggccaagccacaacaaacaagaacacgctctaattcattgggggcgatagtgattagtcaaggttgtttcaacgattacgatgtgaaactttgaaagagaaaccccatttgttatcgcacacaccatactcaaaatagtactctctccatattttaatgtatgacgc

SEQ ID NO: 33223 - DNA, 700 bp, Oryza sativa
gtggaacgattatatataaatcgtccaggtagcagcctctctttatcttagataatgattagcagaactgcaacatgggaactatgcagaactggtgcatggtaaataaacaaaagtttatgaaagaggtaacttcattagaccatgtctcttctagaagatactttttgcagttagtcaataactcaatatatctgatataaatttagataaccatcaaggaggatagagagagctcagatcaaataatgtatgatgatcagtagcattattatttatgaaaatttggtataaattctccttatcttgtacaatgtctaaaagaactggaccgtgtaactatgtggaactggtgcatggtaactacaaaaagttcatgatgaaccataagaaaaggtttggtgggaaattacaaaaatagtcagaaaggcaacaattatgaatcggaagcaaataaggaggatatagaaatgctcaaataatgtgtaatgattcttagaatgactatacaaaatctttgataatgtctagcaaaactgcagcatggtgcatggtaactaagaaaacttatgacaaaatacaagactgaaatttcatattgtactgggtcaagtaggaaattaaaaaagaggttgtaaaagtaacaattagggattgaaagcaagattgacatgtactgaatacgaaaaccattggaagg

SEQ ID NO: 33224 - DNA, 894 bp, Oryza sativa
gattaaccccctcatcttgggatcacctagacactgctattggaaagacattcttcttaaagacggtcagaggtaccaccgagctgattgagaagatggtctcaaatatgggttggagcgaggaacgactccgaatccgtcaatacggtatgcacaccgtcaagaggacggaaatgctggccactcagttggatcttcttattaagagactggacaacaatgagaaggacgccaagcagggtgctgttaaggccctggactcacatgacatgtgaggtccgtggcaatgccagtcacactgggatggatcatccgaaaacccgtaaggactcatgctcacgagagcaacaacgggtatcgtccataaggagatcaaggatggagcattgctccatggggaagatcaagtacggaccaaacccacaaggaggtcaaggtctaccccgaaagacggacagtttcagcaatttcatgatgaatttcctaaagatcaagaagaaatgaggatccgtcgataccttaggctggcacccaagaagccaggaacacaggtcggtcaacctgcgttcccagtttcgaagaagccattgaccgcaccaaaaacaaaggaggtatggcaggttaaagagaagacacctgttcctgtacctttgaaactgggctgtcacgccctaaaaatcgcctaaattaaaaatgcattgtttaaatgatttttagaaaatattttaaaagcctacaagctaaaacctaattatctaggaaaattttcaacataaaagtgagctagataaaattttattaaatactatgcttgctcttctattttctagaattttctgggaattatttgagcaagggaagtatttttttaataattgaaacaacatttcacaa

SEQ ID NO: 33225 - DNA, 589 bp, Oryza sativa
ataaacgtatatgaaattaatagccatcgtagtaaggattaatagccatcgcattaatgacctttaggcactgctgctaataatcctagtacaagaaaatgccatgtcatggatcatccaagaaactagagtaatgatgcctagagtagaaacaaggcaaaagatggcacagatattccagcaactatgctgtcctctcacaatccagaaataaaatgagagcaacaaatgtcagtacaattccaggcaccaagaacagctggaattcgcatatctcaattaaggagtttacacaattgagttcacaattcataattatttcacggctaacacattaggagctgtttaaaaacaacaatttcatcacaactcagattcacatatctcaattactcgacatcactatactcaccatcatcattagggatcataattgtacattcattttcactatcatactgccctaaggtatcatcatcgtcatcatcattgtacaggtcatcttcttcaacttccagatcccgttgcctgcgaatctgatcaactagggactttggtacacttataccatcttcgttgactggttgtt

SEQ ID NO: 33226 - DNA, 662 bp, Oryza sativa
ttgagtgtagaaaagtgaatagtggccacgggagaatttggccgagtcgtgcagccaaacgtggcaaaacctgtgcgtgtgtgtttattatttaaacgatgtaatcagaggtgggattaaggagtgtggtgaagaggtgggattaaagagtgtggtgaatagaagtgcagcagtgtgcgtgtgtacatttgctgctggtgtgcagtgccgagacaaatacttccattgtgtgtgtgtgatcttgtgttcgagctaacataggagactgcattgtatcctcaaacccgtgggatgccgtaggtttggtgttagatctcgtttttgccccagagtctcacgttgaactgtggatcatcaatagggcgacgtcgagaggtacaggcagggtttgatctatcggaaagaggaaattttaagggtcagcgaaattacgaaatttctaaaattttggattttttttccggaaatttcatacgaaatttcaaacaaaatttgaatttgcacataaaaaaaattggggaaaattgacctacacctcaatggagtagcagagcgataaagggaacataggagaatgaaacagcgagatgcatgatgcgaggtcccgcccagcttggactgccgttatcatcgatgcaatgcgccggagagtgcatccgccg

SEQ ID NO: 33227 - DNA, 773 bp, Oryza sativa
gctgacatgccaccatgacataccggaaagaggtcgtgacaggaccattagcataaccccctctaaccaagcacaccacacctcaggtttcacccccactcctcgcaaggcagcgggcagtcccctctcgtgcctaggtgaatccggaagccgcataggccgtcgcagggcccatccaaactccatcacgcccacccttgcctgatgcgtcggctagaggaaagctacgctacaagcccaccgttgcccacgctggcttgtagtaagtacgataagttcttccagggcatcccgcgaaccggtccttagctgccatgggtgcgaccagcaaaaccatgcacccacagcccaccatgtgatttattttaattaaccaacaccaaagcggtggcactaatccaacaataccattagaaccgacagtctaaacattaataggatcttccccatttgtgaactagttgaactaagcatggctaagcaatccctagtccatctctagtcatgttataaccccaagctgacaaagggacatggtacaacaatagcatggctatgacaataggtaaacatcccatagtaacattataaaacaatgcaatatttgaaagaaacaatagagcatttgcaatataggatcaacatgttcaagtgacaagcatgacttgccttgctctgctgctggaggaacctcggcgactatttcgaagtacaccgaagcgtcgggggaaccggaatctagcgacatacaaggcaaacattgcaaacagact

SEQ ID NO: 33228 - DNA, 896 bp, Oryza sativa
acatgaatatatttatgtattacatgattgctgcgaactttcgattacacaatgataggtagcgaactgaaacccccaaatatggctgctcattttgattctggagagatatagctggcattgttctagtgactgcatccttgattagttctgtgatgatgtgataggactgcatattgctatcattcacaggagaagcttccttctgattgtgggttgaagcggatgacggtcttctgcttggtatcgccctccggaggttgattgccctttgctcggcctggagtaggtcggggagagacacaacttcttccatcgacgacaattctttgctgaggctgtcggtgcagagaatggttggtgctaaaggtattattgctatgatttattgcagagctaggtggagcattggtgctgtggatgatatcgtcgatgttgctgttggagctgactagctgatgagacaatcgtagggttgttcgttggatttctgcggtcttggtcaacaacacactgagttggcaatccttgggcacatggtttgttccttcgcacagaaaacatgtcaccttgcgagtgggacactcccctggtggatggtcttcttcctagtgagtgcagagtgtgagacacatgctagcaacgtgtccaatttctccacaacgggtgcatgcctttgatccgaagaagacatatctgaaactcttagtccaaacaaatgtctctttggttgatcacttgattttcttcgccatcaatcgctaggttatttgattcataatagattatgagcttacggaaatgagaccctaggtccccctaatcaacaacaaaatgtacacaactcacagctcttgcaatcttaacatggatccttcataaacttatcaaactca

SEQ ID NO: 33229 - DNA, 902 bp, Oryza sativa
atagaaattgagaaggagttaaaaattgagttggcaatgagatgaactccttctaccggccatccccttcttatagtgcacctccaacggctataattgtgacacggacccactaaccattggtgtgcaaaagaagggaggtgactattgcctgttgacggtcgtcatcgatcagttacatccgtcaatattaccggaataaatgaagaactagttatgcttgcaatgcatttagtgtcataataaaataaaaaccactagcacttggttcactaaccctttgcagagaatgagccataaatggagaagaatcggcatcaaaacaagcgaataatcaatcggacgatgtcgagaaacagaattgtgtgtagatgggccagaaactcagaattgacacgatcaatttgggccaaaattcacaagtctacaaagagcagaagcaaaggagcccgccagccgaaaatgggctggtttggcctagcccagggttcggccgaacctccctcacggccgttcgatccaagtggacggcttggatcactccccaatgacggttagagggcaatcctgacaattccaactgccataaccgtcattggcagcctatttaaggcattcactccctccatttcttcacacactccaagcatcgaagctctcactctctctcaagtttagtttagtgttcttaagctagtggagtaggaatagaatagtagtcggagtctggaagtctttggaagagttcgggtatggcctctagtagctttcctttcttcttttgcaagactagtatttaatttagaatattcctctatatacgactctagtattgtaatattttccgaatatatgaataccagctttacaatatgtccgagatattatgattatactgctag

SEQ ID NO: 33230 - DNA, 3082 bp, Oryza sativa
ttccgtaaagagtatacgctttcatggaaaggattaagtacacttcttggttttcacgataactgtaaaaccgatcttcagaaaggaattcccgggttcaagaaaaacagattttgggaagacatttctggtgctccaacttgcagacgtcctaggacaaatgacatccataatcctacacttagacttatgcacaaatggattgctatgactttgtgtagacccccatttttataacaggaatcaatcgtgtaaatagtaccatttccctggatcaagtagtctggtacacacgaattcatagctaaaataccaagtgcacatacacgagtgtctaatacgaattattacatcataagcccgcaggcatagtcttaaatcatcggaccgagcggtccggaatacatccaaaagcagaaatagataaggcagcggaattcaggcagcggcatgccattgccacaggcaacaaccgtactaagacctactgagcgccatcgtcttcatctccctcctggtagtaggcatagggatcctccgaggcttcatctcccgcttctgattaattttatatttgcaagggtgagtaccaaccgtactcagcaagccatcatagcaatgatgcacatgacagaggaattcaaaggatggctatggttctttttgcacaaagcaagttttgtaattcttttcacaagcctaagacctagcatagactgttcaagttttaataccagtgttcatattaaataatgacggttctgtccaccatccattgtgatcccaaggatagcttcccgccattgagtcgttatggttttctgaggacgtccacattcccgcctcttaggaagtggctccatcagcataaaaattcatcatgcaatatcccatcccacacaagttaagaatttagagtctagccaagtgtaatacatgtcccggtgctcaataaccgcgagcacggctattcgaatagatttggtttactcacactgcagtggatgtacactttacccgcactccgcgactacccaacacatgagcctcgtcccaacacatgagacacgtcacggcaaagcttttcgataacctcgcattggcagtacccgctccatgaacttaaatcctcatgcactctaggcgtccatgtttctagcagtgagaggagttctggcgctcccggggaaagagaagtctcacacgcatattaaattatggttcaagttaagttctctctctcacacactcatggcagtcctaccaatggcaacaccgatatagggcacgcctctcggccctacctcaacggctgtcccatcgtagcgcacctgcctcaatcaggggtgaaccatctatgcagggatactgcctccacttggctatctaatctgctaggtctatacccattcgagaagtacggttgtacggggggtcgtttcatgcttaacttcatggctcggtccttaattgactagggacggtactagccttttccagataccacccaaatcctccgtccgccccagtcgaaaacagttgttttaattttatttctcctttcacaaatcatgtcatcaacatcatggcaatgtggcgctcatgtctccacatgccgcatctcaattaccttcccgaaggtaattgcccaagcatatagcatttgataaatatgagtatgcatgattctacaatagcatttctaagcaattgtcatagttgactagggactcatacgtaagcatggttacaaagatttaagggtaaacaataatcaaggcatggcataatcacaagtaggatgttcattatttcatgcaatttttatttgtaaacaaaacaatttcgtaattaggatcaacatgttcgaggaatagtgatgacttgccttgctcagagtcttgcaggtctcggccttcgcttggatccgcaactccctcgggctctatagttacgtgcaaaaattgatttgaattcggttagaattcaaataaaaatccaaataaatccaaatgaaagtcgaatgtgaaagtcgattcctttttattaactttactatctgcgaactacggcaaacccaattcgacttaaactattttgcgggcataaatattttgttgtcataagtttttaatttactcttcccgagcattatatccatataatagggtagaaatttctattaagagctaaatatcggaggaaatcctagaaatattatacaatttaatttattctatgactaaacgattaaatataatatgcggctaagattcttagtaattaaattcgaatttctaccgtgaaccgatgacttatagagattaccaaaaataatctataataatctataagaattcatctaattgtttagttattaattatatctaaattactaccaattttaatctaatctgatcaagaaacatattttataattaactcggaatttcgatcgaaatactattacgctcgaggaatttccaaaaataatctatgattaaccccgaccatttttatttcctaaatcctcctaatttctcccccaatttcccttctattttctccttttcttcttttctattttcccaatttttctctcctctttttctttttctctcttttctctccctctctttctttttctctcttttctctccctctctttctttttctctgccggcctctcttttctttttcttttctttttttttccttctcttctctcctcccggctcctttctttcttcccttctcttcctctatcctctttcggctccttctcctcctctctctcgtcctgcctaccgcgaccggctgaggaaaggaaaaaggcggcggcggcatggcttaccggcggcaacggcaatggcggcggcgcacggtggctgcgacggcggcggcgcacggcgactgcgacggcggcggggaacgcgcacggccaaagcgcggcgcggcagctctatgcgacgacgcggcggcgtgaggcggcgtggtggggtgggtagaggagaggaggtgaggatggagggaaagagtgggagtagggggggattatataagggaaggggaaagagataat

SEQ ID NO: 33231 - DNA, 555 bp, Oryza sativa
acaatctagtagtccctaggggcagcaaccttttggaaattatattcaccagtggttttatttattcagcctcatgagtcctggcactataggaagtcattgtagtagagatattgattccaaacagtacctatgttcatttgattccagtatctaactatatcatacaatactactaatagtataaaaaaatgagaggtccaagaacaagaaacagaaactgcattatgtaagaagaggcatatcataagatgaagatgtgtacctaagcgcaaccaagtcaaggaggagtggtctgatgagtgacctgagtctgtccaaatgctatcatctgtcgaatgaggttctgagtatctgctgctgacttctgagtatctgttattgccttctttaggttctcaatctcctcagcttgtttctgagcttttgcctcagattcttctgcctgggcttccaacctctggaccttttggcgaagtcctgcagattcttccttctcagcctccaattgtgcttgtagctcctgcatctgcggtgaaatagattttggagcgg

SEQ ID NO: 33232 - DNA, 536 bp, Oryza sativa
acatgttggtttgtttaagacttgggagttaaatatgataactgagcgatgtcaaagatattaacagagattttccatgatttaataattgtgaaatttgtaatcaacaaacattaagttatacctggtttggagtctcaatcaccacaacatgcacaatagatgagtttttaatgtggaacatgaaaaatacagatctgcagtcatgtaatacaattatctaagcaacagctaaatcattctagttaatatgagagctcctacatttacaattagtataccatagtacaacggctaaaacaagaattgcgaagtaactatatgtattgcagcaattcatactcttattcgtgtttataaatactactcgctaacttctgcgttgcaatgctttttattttttatgtttaaaaatggttaaagagatttggcatgactaaataattgtaaaatttgtaattaacaaatattgagttgtacttgatttggagttttagtcaatgtatttattttggagtctcagttctctcaacata

SEQ ID NO: 33233 - DNA, 720 bp, Oryza sativa
gtacagtagctcatcaaccaccctatgacattcgaaaataaatgcatatttgaaataaaaagagaatttaattatatgttcaacatgctcaaaggattgtgtttagtatctgtgtgacttgccttgcaataatttcaattagtcttctggatcacttccgatgcactcatgatccttccaaacgacgaaaacgacaaactaatacgcaaaacgaggaaaaaactaaggaactccaaataaacagtacgtaaaaagtaaataaacatgtagaccatgattttagatgaattatgagacttgaacggcctcattctgacttccaatggattaattatgaattttacaagatttaatacaattaaaacctatttaaaaggattaaacagattaacaacacaatttataagtaattttaatatagatctctattttatacaaatttagcaacttgaaacacattaatccgagttataatgaattagatatgatttttctaagtttaatatgatttttgcctaatacagaaaagactttactaatttattaatgtattaaataaaaggaaaaagaggatgaaggacggtggctcgggaaacgaagttcgccagcgatctagggcataagggcgcgaacggagggcactaatgcgaaaagtacaacgcggcgaactcaccggtggctagaacggccgagattgacgacgaacggcgacggcggcga

SEQ ID NO: 33234 - DNA, 600 bp, Oryza sativa
aaagcattgcaccttcccgaatcatagtcgcccactttaaaccaatgtatagactcccagcgaccccgtgggcttatctccgtcacttctcagtctagcagtccacaatgaaccatgctatacaatgcatccggttgttgtccacgctagctcatagttattatggttaacgtttcagaacagtagctcgtgaaccggttcttaattgtcatgagcacgactatcaaaaccatgtgctcataacccaccataatcaagttttagttggcaaatttattatttaagcaaacatgactgaccatcgtgagctcctattaattagatgacaataagtgatagtgaagcataagttatccccttaatgagctaatgtttctaagcatgactaagcatcatgatagctttagctaaaatcatataatgttctagctaatcatattattaacctatttacaaaggacaagtaatcaatgtcaaaggggcataacaaagcatataggtcaaccctccggtgacactcgaaaataattcaacagttgaatagaaacaatagctttaaacaagttcaacatgttgaaaagggtgttttagaatctgtga

SEQ ID NO: 33235 - DNA, 648 bp, Oryza sativa
taagcttatcagattataataagctgggctccagattataataagctacttcaataagttgtctgtttctttcagcttactcccaataatctggattataataattccaagctgcaagaaacagggcttaaccctgttggcatatactagatgatttacgtgtcctcccaagtgaaagcggaacctattaatgcatttggaggttaaccctatcagtctcgtcttttcgtttatgcttatgcttatcagccaaaatttaaattttcaaccttaaatttgaagttgattttgaggttttttcatcaaagtttatttttcagcctttgcttttagatcgctaagaacacatatataaaaattttattcataaattattttttttaaaatatgctgtttcgcttatgcttaaaataagctaaacgacggcttcctatataacggctgaaagcgtaaacgaacattttaattcctttcagacaaaaataaaaagacatttgtttaagacctctaaagacatcctctataaaaaaaaagacctctatagacacgtggaggggcagcggtttgaggtcgccagcgttgagcggagcaaaggatatttgccccggtgaaatgcagagcacactgactaattttagattgcagacg

SEQ ID NO: 33236 - DNA, 910 bp, Oryza sativa
tgttcacttgttcagtgaagaatcaaataatccccagcgttgtctcctttttctctagtctttcagaaatgcaaaactgtagcttcttattcctgatgaaatctgcaatttgtttcagaaatatataccgcttgtgtggctcacctgaaacctgaattttattccagaaacctctgaaacctgacactgatagtttaaactgttgccactgaatgtatggtttgatttgattctctgttttaaacagaacaatgctgaagtaacagaaacattcttttgatttgccgcgttgttcttccctgcagaattgtttaactggcagagaatatatgcaaaagggattaaactggaccatgctgagatcaaaaggcaaagatgcagagaacgaaagcatgaggagaacgcaaccatggcatgaggcccctgcggccctgcaccgtccaatgggttgcaggacagaacaggatgcttctctgttttcttttcctctcttgtacaggaggatgcggaaacgaacacacactaccacacacgcataggtatcctcggcggtgcatgaacatgatctactgaaagatacaaggaaaaatcgttcacgcggttttttcacagtgtactcctacaattggtgaacacggatactaacttatggacatttaggaggtttttggcagggctccaaatctaaaactgatataattttgttgggactaaacaattttgctatatatttgtcgacaaattttcttctaaaaatttaacaaatgtaattatagtacaatcgtagtgtaattacactgtaacttgaatgtaactacaatgtaacttgcccataattttgaaccattaaattgttcaatatttgtgcaagtgaaggaaaaaagtcatttcgcgcacatatatgagatga

SEQ ID NO: 33237 - DNA, 695 bp, Oryza sativa
aatggccggcaaggagcgggagaggacggcagcgccgacgccgacgccgacgagatcgagcgggggaacggcggtcgacggcacgacacctaagcgccctaaccacagtcctcacctccacaggcaccgcgccctcaccggggaacgagctccctgctccctccgccgcctccctccatccgtgataacaagatccggcgctctggcctctccgccgattgcaacaataagattcgggcatccggtgtatgcgacaggctcacgacacggccgacatcgagcctgtcaagctggttaggtgtcacaccctgaaaatcgcaaaattataaatcgttgttaaaatggaatttttagaaattatttaatgattaaagtaagtgtgtgaataaaatctatgaaaaatttgaacattaacttgagctagataaaatttcattaagtactttgtgtgtccaagtattttcagtatttttcttggatttatttgagcattgaaagtatttttaataaatgagagatcatttcagtatttatttaaattaaaaagtaatttaaatcctctccttagtctggaccgaattcaacccattccctctcctctctcctttccttagcccgcagcagcccactctccctctttctcttggctgaagtccgatttggatccctcctcttaccagcccatgaaagaaagg

SEQ ID NO: 33238 - DNA, 562 bp, Oryza sativa
actatagggcgaattcgagctcggtacccaatttgtttcttcagatggcgtatttcgcctaatcaatgtctagctgcataaatcgctgtggtggataaatgtcaagaggactttcaggatgagttcacgaatctgcgtagagactagaatttggatctacacaataactcaactgtagaagtccctaacactgtcatgacggctttactgatacttctcaatcctaagatccaatatttggtacctatgactgaagcaccaatgcttctatgcaggctggacattctatattgcttctgttcagatgatgattttcaccaacaatattactgaacgactactgaggaataaagatgactcgttatatagatggtccctgcttaattccatagtgtaatactaggattgtttttttagcaaatacaacagttgaagggcatgtttcaggtgagctcagcactattcttttatagaactttctatatattaatttcatagagtattttttttaaatccatttttcaattttactatgtgtatttaatttggttcaatggcaaat

SEQ ID NO: 33239 - DNA, 601 bp, Oryza sativa
tttaaaaatatggttgttttaatatccaacattactacgaagtaaacgttggttgtgatggaattttcccactcgtgttcatgtcctagaattacaaattctttcagtagtaggtgacgtacccgtcgaaagcgagacgtacgtagtgacttcgtccatctcaaaatatgtcatcctagtctatcagaagtactcatgggggtatgtgcatgtgtgtgttcacataggtgagtgcgcgcacgttgtaagcgctcgtgtttgtactttgtttctaaaataatatcaaacatattttttgtttctcttttaatttaataaataaaacaatagggagggggtgacagggttgtgtagatgtgagagtgaggaggaggtggagattttatttttctaatttttctaaatgatttaagtgagagccgatgacagggtgtttcattttttctaagaatttccaaggtcatttatccgttttttataggacgtgagacatgataacttaagattttatttttaaaaaatagatctaatagataaaatattggatacgtcaatttaattgatcaaatttaatctagcacctcgtatgtccagccacgtg

SEQ ID NO: 33240 - DNA, 1003 bp, Oryza sativa
tctcgttttacatatcttcccaatttacttcttttctcttctctcgaactcccagctagctcaaaagcaaaccccagaaaaatccaccggctgccacaagcagccaccgtcagaccatcacatatacacatcgccattagcagtcgagctgtcgaggtcagggagccggctaatttagcccatgcatgatagctccaattcctccatcctataaaataatttcgtatcttttacctctaccattcttttcaaaatgacatcacttctttcactttatttatatctaatccataaattaattagttttattttgttgatatttcttatccacttagaacaagttttatagtaaagatgatgatcacctctaatttatcttcatattacttgccttagatatacacccgtgctaatataccataataatatattttactatattactatattagtttctttctctcctccccgtagaagtttgtgtagagattgcttctttcatgacatgagaggtggtttctcctctctctcctttgttttacttttccatctcatcatgtgatcctattatcctacaaatacgagcgtttggatgtccgtagtacttgctctcataaatatataatattattttttcttttaaggagagacactttggtagtatatttttacttcatatcaatttgtgttatgatgataaaagatgaagttatttttggaacgcatgtagtactatagctggtgcataaggctgcggtgcagtgccaccagcagctagagatgaattgatcggctgcacaagaggagggcggctaaggcctctcagagcgcaagcaccggttgccggatcctagcccaaaaattgtcccaaagacactcctccccacagtacaagaatcctattctgtgtagcttaattgaatgaaggtactatggaaggacactgagcccacagtgggcggaaccccaagcgcatgacacgggtagtgcggaacaaatttat

SEQ ID NO: 33241 - DNA, 737 bp, Oryza sativa
ttcaaccaaaataacatttcccccaaaccgaaccaacccattttatatttttggctgaaaccatttccaaaaaccaatccaactatcggaggcgctgccgtcggcgctcgctcatcctattgatgttgatcatcagacaaagaaaggaatgaaaattgatgaattgagttacatgtatgagttgtttccggacggcctgaaactcgtcgttccttgatgagcagagcatggttgagcaactcctttgctcgcatatcatccatcatattatctttgtcttgctctagcttcttctccacattgtcttggtcgagctgcttcgacgtcgcgccaagctccggcatcttctaagtggcagcgatggccgagctccggcatcttctcggcggcggtgatggcagccttggcagggatgcggctcctgctcattgggtagtaccagcggcaacgacggcaaactgtgttgagttgtaatccaaattcatttgcacttaataaagaccagcttctgccgtagtggagcggaggcccgtcgccgggaggcttgggccggagcaaaacggatcgtcatcccttttagggttccaccatatatatacctcttgtaagccgccgtgcggcgtggtaacctcaccccagatatagtgaagatattttgctggctggcgtccgtggttttttctctcctactttgggagggttttccacgttaaatctcgtgtcttctgtgattgatc

SEQ ID NO: 33242 - DNA, 690 bp, Oryza sativa
caagtctaaaattaagtggaaatgcgtgtttgtatatataaagtagcatatatacatggcagctaaattagcccctaaattttagcatgcgtacatgcatgcatgatgattaagttagaaaccataatggccaaattagcccctaacttttagcatgcttaactccagtcaacgcaagttaattattagctagcaagttcaaatctttggaacgaagatgggagaataggatctaacattgttttttctttttattactgtagaattaaagagaaaacatctttttaaaaagaatttcctcaatagtagcgattgcactttgatcaacacaataataaaaaaagacactttttttttgcgccaaacaacatggctgcatgataaaaacacaaatccattccttcttcacttaccatcgtatgttgtactttgatctttataagactttgtatctatgttcatgttcattggggggagaatatgtaaatatagcgtattgacgatgaattacattttaacctgcaaaccagtgatttaccgaggttacatgttctttgtgataaaatataaatcttaaaataaccgcgcaaacattcagacatattttatcctatggtatcattaggaacataatatcaaccttaaaaaaactacaatcaagttcttagggagaaaatgtaaatctaaaag

SEQ ID NO: 33243 - DNA, 654 bp, Oryza sativa
tgatgataaattaagtcataataaaataaatgataattacatataatttatgaataaaaaaatggtcaaacgtgtcttaaaaatcaatggcaccatatattaaataaatagagggagtaatacatatgaaccagggctaaaaccagcggccccatcgtttggcacgaggaaaaagcgaaacgatatacttgcaaattaaaaaaaaatatgaataaaatttttatatacgtgttcttatatcgatataaaagtaaaggctgaaaaataaactacaataaaaaaatcctaaaattaacttcaaatttatgtttgaaaattcaaattttggctgataagcccaaacaaaaagacgaggctacaatacattcatatactactagccaggataaatgtcgacttggaggtagcgatgatgttatatagcgcgatcgctagtacgcgcgcactcgacggcggcgtgcgtttcaggcccacaaggcctagcgccggaacgcacgcgccttctttcacgcttttttttcggtttctttaccgattttttttggtttttcccacttttttatgattattttttaatctttagcatgctttgagtttgaaaagtttaaatttttgagttgaaaatttttaaacctgaactttgaaagttccaaa

SEQ ID NO: 33244 - DNA, 563 bp, Oryza sativa
gtcattactaggataccatgcttgtcatcatgagaataccatgcttggcgtttccttccagcttaccaccatatgctttagactatgatatcccgcttactaaggataccatgattgacaacttgccattaactatctcatattagctttcctggtctccggtgctaggtacttctgctattcgatgcaagggtcaaccactttaactataagttatgcttcccaagagaaccaatttatcccccttgacatgctttgacgtcttcccgaatgactttgctgctggacttgttattgtctgatcgtgatcctgccaaatctgaagcttcgttgttagaggtgattttaatctgacctctgtagactatcttcgaacatatcacttggttcataactgggaatagctcccacgaacaagcagctcggattcactttctttacattcagtttacttcccattattatcttcaggttgtcctcagttagcattcaacgtattcctttacacctttaaccttgatgtgttctttcccattggatcatctcccaagacatggcattac

SEQ ID NO: 33245 - DNA, 841 bp, Oryza sativa
agaattgattttgtggtaatttgaggtttgtagaaatcatacaagtaaagcaaaaagttctatctgttgttcctcctggttgaacagagattatggaatacttggtttccctttcaatgatcaacccacttaaccatgaatagttggcagtagtctgattgttcaatctcgaaaaagtgttcttctatctgatttaaaattctgagcaaatggtgaggaaaaaaatgttttttctcaaagggttaatataacaaaaaaaatgaatttctatattcttgtcacaacgtacggataatttgctagcatatactccctctgttttcaaatatttgacgccgttgaattttttaaacatgtctgaccgatcatcttttttcctatcatttgattcattgttaaatatacttttatgtatatatatagttttacatatttcacgaaagattttaaataagacgaacagttcatgtactaaaaaatcaacggtatcaaatatttagaaacggagggagtacataataataacccaagtcactttgcaccaaacctgacttttttggtaactgggagtttagatatggtaagattaagtggcaatttgatttttagtcttgtttggtaagggtatgtacaaccgtctttattagtggctttctctattaacatgcaaataaacttggtgatgtgcaagaaagggaaaaaagagaaaaatagttgttacgcacgataacggctcagagtcgactcttagtatttattagaaaatattttgttgcatggggttgaaagaaaggaaagaattgggaaaaaatatttttttcgtaaaatatatatcgagagg

SEQ ID NO: 33246 - DNA, 1616 bp, Oryza sativa
ccgggccgggccgcccgtttggccacctctaggactgaggggagcacagctgtccactggattgctcgatgcactggtcactgggcagaggataagactatactgttgatgagtatcaataaatacataaatagtaaagaaagttagtactaataaattactcattgctggtttagattggtaccatcttaaagcatattattttgtgccaaaatttataaatatgtggatgcatttagttttgttactaaatattagtgatgcatagggaattttggttacaacacatttagcctatcctactaaaacttaaaattattgccaatttatcaaattattaacattacaaaatttttgacaggttcgtttgggcactaatctaaacatgcctttaacttttaaattacaatgttttaatggatgcaaaatagttataattagcgtaaaaaatattttacaatatttatataacttaagcaaattgcggttaaagtttatacctaaacaacaaaaggtagtatcaaataaaaaagaaacagtggagtagtagggttgattgttacatccaatttggccacatcatctgcttattagtttatacaatgtattgcatctaaaacattatctccaatacattataattatttaattagcttattcatttttatcctatacatattactctccaatttgctaccttgaagtttgtaaagaggtttctccttgtataaaggcctgaagggtgactctttctctttctctttctcctctcctctccctcccacctcacccattttcttaaaacacacacagtacatgtatgcactcacaaagtgcacacaatcatctctatgaacctctatgaatacacacaagcacaccacaatcctatgaatacctctttgttgatggatatatcgctatcactgaaaaataattagctaaacccagtggactggttctaccacaaggaacttgccaagttgagctacgctcacctcgcctccacctcaccaattaatcttacgtggcaccttgcagcttatgcttggatgttttatagtacttgctctaaaaggtttgttacgtactccctctgccgcagaagaacatcaccttttgaccaatcaaactaaggtatacacatttaattggaattttagaaaaaaaaaggaatcgataaggacgtcagtggtatttctcctcactactaatttgtaggagaatcgttataaataaatttgtctggggtggaaggaatagaacaatagggattttgttttagttggtgagaaaagctctgtcattataaggtggcataggcattaagagactatgtgactaagtggacaaattaaataagatatattatgattgtttgagataagagagtaggtactcaattgctatattttgctatattgtaagacaacttttaaatgttagaaattgctatatttgaaatgaagggagaatgtttttttattaacgatcttttttacgtaaaaaacactacggtcgttatttaaaaatatctattttgcaaaacctatttacaaatggaccatggtttatttagctgaagatgaggcttgataattaatgctttaaaaata

SEQ ID NO: 33247 - DNA, 741 bp, Oryza sativa
ctgctcagattattgcgggattatttgctccacacttataatattgcaatttttttgctcaataaaatgattcacaactgtcatgcatgtttggaaaaaaataaaaataaaaatacgattctaaaaaaaaaactatcttctactgcattaattgcttatacttgttataagctaagtataaagattattttatgaaaatattgatttaccaagttaatcaaatagatgattcggccgtttcatttcatctatataattttagagagatcatggataattaaacctacagatatcagaaaaaatatctttgtgtctctttttcttaattatttgattctgccatcatttaaatacatttaagatactcccttcgtcccaaattatatgcaccctctttttcaggaaaaatcaaactcaataacttttaactaataatcatactaaccacacacacatatatactagaaataaatgcccgtgcattgcaacgggtgaagaatattttaatcttattattgtgatacggtttagtgtagcgcccgttccgtcgtggcgcatagcgggaaaattatctcttaaaaaccctaattgcgaaatttgtttcttcgcttgttgtctagtgtccgtgccatctcaagatctcaatccccgatctatcgtcgagttcaattccaaatccaaatccctccaaatcaaattcctccgcaaaagtctaatttgcctcccccggggttgatgggc

SEQ ID NO: 33248 - DNA, 545 bp, Oryza sativa
ataagcaccgatagaccgaacattgcatgcgctgttgcttcattttctttcgataatcatgagctcggtgttactctcagcttctcatggtggtgataatataggtcaagggaagaggcgcagcggtttagatcgccaaagcggactcattgccattgcgcttgcgttgctatggtcaccggtgaggaggacttgtttgtttctggtaccagtatcgaagggaaaaagaagctgcagctgttggatgatgatggacggataggattggagctaattccaccctctgcattagcttctccaatgcagaggatctggatccctacgagaacacctctgatcgatacggattggtacaaagtagtagtgtgcagcctgggcttgatcaccaagccaagtggtaattcggtggacagcactgcatgcacacttacgtctggagccagttcgtccaaatcaccggtcgtgctacccggtatagctcattttggtgccagcaatgcaggctttgacattgagctgaccataagagacttggggctgcagga

SEQ ID NO: 33249 - DNA, 555 bp, Oryza sativa
tgttgctcggtttgatgcgattggattaggttgacctggccaggaaggatcgatatgttttaatttgctgctgctccgcgtggcacagatcccgtgctatggtcgtgcatctttttagatgttcaggattatctgaagcaatcaagcaactgtaattaaaaaccacatgattcacatcgctggaggggccttgatttaaggcggccgatgtgatcaattcccatgttctgatgacagaaatcagtccaaaaaacagcaccgcgtagcaatcaaaagcaaaagtcgtcattccaatcagtgaacccagtcctgatgataagcatatcctccctggcctcatcgtgccagcgaagtgattgtgccctcgatcgcatcaatacaatcattcccagcccttaaaattccggctgatacaaatacagaatactctctccgtcctaaaatataaatatttttagctatatgtatccagattcatagctaaaaatacttacattttaagacggagtgagtagtacatatccaaactcatccgcaatagtagtaactgctact

SEQ ID NO: 33250 - DNA, 1237 bp, Oryza sativa
tatatatctcccttgatttctccacttcactgtcaaccacattgagtttaagctatgtactagtccggatgcctcctaaacctactgtatcattcaccaaaaaagatactctctctgtcccaaaataagccaatctcatacaggacgtgatatatcctggtatgataaatctagacacacctatatatttctctacacacctatatgtttgattgaggttgcctatatgttgtccaccacagctttctctttttgtgtagaagtgccagtatgtcatgcctctcatgcattgccacccatttctccaccccgcagaaagacatgaaaagaaaatatataacaattcagtacttgatcaatttaacaatctgaaatctgaactcccattgcctcctaaacctactagactttatatgcaagcacctagggggtggatagaaaaaacaatctggtaggcttagagcagagcagtgaggtggctgtgtgagcaacgggagaagatgagcaaagtcatgcaggctttttgtaggacaaaatagaaaaaataaataaatggattcaatatttgccatcaatgtagccattttttgagattgcagagaaggcacataagcacatacgttatcacatatccaaacttctgtgagccacccctcttaaagacttaaaataggcataacacataagagatgagagacagatatacttgttccggataaatcaattgtccactagctactctctcttttttttttgtttcatgaatgaactgaaaaaggaagaattcaggttcaaagaaaaatgtacacacacatacaaacgagtcacatgaatataatgctcagtaaagccacattatattccgaaagagaattgttgacgttggattgaatggccatccaaggttttatttaacactccatttttttccaaagtaatggctcgaaaatcaaataattagaatcagaaacaaatgttatggcgtttggctgccagttgaatcaaaatgattattggttccacatccaacctctctgattttttactccaaatctaacaccatcaccaattgaggtgagttttttcaccgctattcgtcacctccatcgcctcatattccccattgaacaatgtaacaaaaaccagctatatatcctaacctgcacaccgtcgtctcttgtgctctccaaccttccaagatctgccactagttctaatgctaaagggctgcaggaat

SEQ ID NO: 33251 - DNA, 800 bp, Oryza sativa
aggacatgctttgcaaaagaaccggtttatgttgtgtactttcttctcactattaatttgtcgatgctctgggcacaaattattctatctctatcgcttgtgttagtcatgcatggttacgcttgcattgcgcggatttattttagagaaacaaatatgaggtcatactccactggatgcatggacattgacttttgcaccacattctctggtaattcaacactcacactgccacatcgatcgcctcctaatggtccattattcgcatgaggataatgcttacttcatcctatcaatggcctatcatatttgcaccataatcatattatgtcgatggagaagataaacttatcgctacattcttgatgcctcctaagcctagctacagtgttgagaacatctaagaaaaatattttgtagtttcagctgccggcagagagtggtgctcagcttgtggacttgtggctgatggcaaggttgaatttcagtgcgagctacagggaaagcttttgattcactcatgatggtttgttggctgatttcgaaggagcgtaaagcccgtatctttgagcagtgatcgcgcacagcaggttagctatttgagacatcagagaggttatcatagtatggaaggaggctagaacttttaggcaatgtgattagctgttagtctttttttttctttggggctgcagccaattgaattgttgcctgactcgacggcctaatgtcgaactcgtaaaccttgtaaccctctcttcttcttaataaaatttggttggccgaccaggggctgcagg

SEQ ID NO: 33252 - DNA, 739 bp, Oryza sativa
cactcgaaggagtactcctaactttggtttgctctagcatgtatccaagaatgctaatatctatatatagtcggcagtagttgaagaaaagaagcgaaatatatacatgcatggttgttgcatagtaaagttttgatatggaaatagtcagcaaatcatgggcatttccaaaattttgataaagttgtgtttggttttgtcgccgaatttaaactgaatttcttgtagggttgctaggcctattgttttgtttgaagcaaaccacagtatcaagcattgtgcagtaccaaagttttagcattagatggggacacgttaattaactttataaagataatacgtacatatccacgtatattgccctcaaacatgtacaaacatgagagaaaatttctattgtgttctttcttttttttttccatttgcttccgccaccatttgaatagtttctttacaataactaattttctcatgatggttgttgcagtctgtatgcagtgaagtttatggaattatggaggctaagagttagaggtttgaatgggttatcaaatggggacgagtcgggaagttcatctgaggggtattcctagcttggggacagcccgggcgtcatccttgtcagagtgtgtctatatgggcctgtgtgtatatggagctggagctcagccaaacagtttcagctccaccaaaactgggagtggagctgggtggagctctctcacaaagggctgcagga

SEQ ID NO: 33253 - DNA, 750 bp, Oryza sativa
acttaaaacaaaacggaagtaactttgtcacggcattaaaagtaaattcgttgtaggaataaaaatatgactttatctagaaattaaatttaatcagcataaatcaacacacgtaagtttaacaatttttaaaagtaacttcaatgttaattggaagtaacttttgtatggttaagaagtaactctctataaatctgtttaatcaccgattgtttttttcctttcatttttgcttttcatgtagaatgagaaaagaagataaaaccttcgatggattgtaaataacattgatggaataactaatgagaattagttaggtataagatgtaatagttacttcctgataacctttctaatatgtaataaattacttttaaattaataaaatatttgaatatattcaatatgaatcttgatttgttacatattttgagtggagtacaatgatgcaaatagatcttaaaaatgatatgtgatttaaaagatataagttattaaagagattaaaaatatatatactattgtatttttcaagttgaaaggagacactagatggatcacaaaccagctacccgtcacgtccaacgaaaaaaaggcatgtattagagttactttcattttattataagttattttataatatatgtaaattacttttaggctttgttgaatttacttttatatgtctaagaagtaatttagtgaaatataaaagtaatttagatatattataaaagtaatttataattt

SEQ ID NO: 33254 - DNA, 786 bp, Oryza sativa
cagggacctaagtgaagggctcaattcctttccaattgcatatttggatttccacattgcatcctataaactaaaaatgacataaaaaaatttgcaaaatagaaaataccaaaaatataggttagagtttattatgctaggtaagacaactagttctcttgttgagatgatgaatagtttctctgttttatatctcttatatatgggttcacggttaagtacgctctgaaagattgaataaatagtagccacatattatccgggaacctgaggtaagtgggctgcacttgccgaactaagtctaggttgtcgcgagatgatatagtgataagagttgctatgatcctgttctaagtttgacttaaattccggatgttttattttccaaaatgataaacttaaaagttcctcatttgataaaaattcctaccagagccaaaaattttcatatttgataaaccatatatattttgggcgcttgtacttccattgaactttgtcaaaatcttgagacttgtgagatacttttgatactctatgatcaagatcatacacccacatatatgcacatgcaaacttctgcactagaagttagcattcattcattccatctatatccatcatgctatcacccaaaatcaagctctccaattatatgctttctccttccaatataatatcctttccaaaaagagataaaaagagggaaaggcatggttaggaaaataaagtcttgctcctcaaaatattgagcatgataaaaaaatgagtagccatgccccctcc

SEQ ID NO: 33255 - DNA, 598 bp, Oryza sativa
cttgctcattcagctagttgaaaataactttgtcggatgtcgtcataatacctttatgcatattctatttcggatggttgccatttggtccaaccaagttgagagaatattaatattatactcctagttaagcacagctagtatagcacggtacgtatggattgaaattaatcgatattaggggaatccaaatccaaacaaattaaaggtcttgaaattatccacccacatatatattttaatttcagtggataggtgaaatcatattagttattttagtactgtaccatcccaacttccaaacaagttggaagatgacatatatatagtagcgccatggcaattattgttgcaaacaagggtcatgttgttccaaaaacaacagctgattaattaggtaaaacctcttcagcgaggacaaaccatgtcagctcgtagagtttaattagttgttgttagtcagccaagcacttacgatgcaagcgaagtcccaacgccatcttgtttatttttcactactttcagtcaatattattggatatataacgcgatcaaaaatatttgcaggaattaatgctcatttttcttacatagacat

SEQ ID NO: 33256 - DNA, 505 bp, Oryza sativa
ttcgattagattgaatattattgtcgaatcctgcaagtgaattagttgagaagttaagtgtttttttaatcaaggttcgagaagttggactagctagcgtcagattagtcacgctgtaatgcgtgttaagctgccagcaggaccattggcaatacggctttatttagtgcttacgcgtgtacatacttctgtcgccaattaggcccgtagatatacagtatatatagaaatactaccataaattgtataattgagttataatgggaattagacgacaatgactttattgtacacaaaataaattatgcaccctaattttaataaagagttggcacatttctctgctgataagattaccactaggaaggttttacaacatattgcccgttgccttagtatcgtatataaataaaaaaaaaaccttgattcctacttctagttattctgcctaactgagttactacttattatcaattgtgcattgccctctaagtaaaatcagttc

SEQ ID NO: 33257 - DNA, 770 bp, Oryza sativa
aaaagtttctatacgaaagttgcttaaaaaaaatcaaattaatccatttttttaaaaaaatagctaatacttaattaatcacgcgctaatggaccactccgttttccatgcgtactactccgattgggaaccgggaatggcgaacacagccttagtagttagtagggcagctggaatgagaacataagcccttgtttagttcccaactttttcttcaaacttctaactttttcatcacatcaaaactttcctacacacataaacttccaacatttttctttaaacttccaattttagtcaaaattccaattttggtgtggaactaaacacaccctaagtgggaaatgttctgacaaactatttgattttgtgtttgaccaatttttcccctagcttgcttggcaaggaagttgcaggggtatcctcaaagatatatatggatatgaggacgtacgtacggtatggctaagatatatctgatcgaatattgatttcggtatcagtcttcggtctggtcatcaaatacttagttatagtataaaatagtcgagatcaatcaattcaatctcaatcgtcataaaccaattgtatgctacgcaaatggtaagtctggtggtcaatgtcctcctaaagtcctgggcctcgacctcagcctcacgttgagatatctaaatcaaccaaatgtattgtcattgtgcgctggatttagatcaaaggactagattagagtataggcataggcgcttgcaatgaatttacagttgtagttg

SEQ ID NO: 33258 - DNA, 686 bp, Oryza sativa
ctacaatattattttttatctgtctagacttgtctacatttatgttccactctaccgtaattaacaatcaccacttctccttcgtcgtttgtttacatgcagcaagtaaataaaattctgattgtctgctactccttcaatgaaaaatctcaaaaattttgtgattctctcagggcgacattttggaaaagacaatccttataaacccatttctttgtaagtacgttgctgtcagattacaatagtgcataaaccacctttcaggatacaggctaagggaaaacttatttgaaccaaaaaaatcgaatggcctcagtagcctagtacaaatatatctatatcacgcacacaacatacacatactcgggctgtgcagcccacagcatctgagaaggaaatccttacaactgcaacattggaaaaattttactacgcatccttcgaatgcttgggcatatgttcttgattcggcaaaggcgctgtcaattcaaaatagtcatcaaacacgctgtatccagacacgctgttggagcatgctgcatgcgctgaatgcttgcagttgagttcccaaattgggaaaaggttgtctatacaagagctttaactgcatcacaaaatatatggtttattaagcaagtcgataagaacccaaactatcagaatggtcacaatctaagctgtaagtt

SEQ ID NO: 33259 - DNA, 1882 bp, Oryza sativa
  unsure (1)..(1882): unsure at all n locations
ggaattcgctgtgcgtttgggttgatttcattagttcaacgatgattccgttggagggcaatttggggttttctgcaggcttgttcggcgcgagggcacgggacctatatgaatattcagtatgagcttctgctagctgcctccacgcgctccaaggaactgatgaatctccattctccaaataatcctccggctgcttgcccatgcaaacggcataggatataggatattgatagtcatagctagggatcacatgcaggggtatccttttttaaaaaaaatttaactttattaactttagaagcatagtaactatgttaccctgatacggagatacggatacggatacgcgttacggggatacgaggatacgtcacttttaaaaaaacaccgatacggggatacgtctatatatacttattaattaaaaaaattactaaatccctgtaaaaaaacaataacactttcttgtagctaaagagattagcctgaaataatgaactttctgattggattatattatctccaccaaagcccagataacagaggaccaagaataatgtataaattagtgtaagactgtaagcagtgccaaaataaaaccaagtgaatgtttttccctggcgggtggccaagcaagctcttaatgaacctccagccgacttaggccctaggaccgatagatgcagtactttgaacttgcaaatccaaaacccatcagacatatgaaccaagatgcattagttcttagaaaaaaataaggggggaagaacgtacacaaacaagatccatcaacggttctttcagtgggaacgaaggacccatattgctcagtgcggtggctctgtgcccggcgatgtcggccatcggcggcgctgcgcccgggcagtgaaggtggtacacgtctggcacggcggtggtccgttcgacttatggccgccgcggctctccttttgccgtcgttggcggcagcggctttgcggaggcggcgcagccgcgcgcccacgcgtagatgcggcgattgacagtactccctccgtttcagattgtaagactttctagcatttctcatattcatttaaaagttaatgaatctagatacatatatatgcctagattcattaacatctatatgaatgtcggtaatgctagaaagtcttacattgtgaaacggaggaagtattgttagggttgggacttgggactatccaggatgcgcagagccgtatccaagaagtatccgaattatctttatttatttgaaaatcagaaaaattgaggatacgtatggatatgtatcggagcgtatccgatggagtatccgatacggatacgctgactgttccccgtatcagtgcttcgtagcatagtacatcaaccaatgatacattctccataagaggagagaattccaaagcttctttaggcttttagggtgctccaccctggaccggtgttatggggcgccatggaggattntgttcgacatggaacgagcgcccgtgccaagttaggctcctcacgtccatccatactgagcgacgtagaaccttgtttgctcgagtctacgcgcggccaaaaaaacgaaaggagcctgcgctgtgggcttcggttcttcgccacaccgtgacctcgcgccgcatccagtgaagaaattcccgattcgcccagaaaaaccccatcccgcccagcgatttcccctcccaccacatccattttcctcccaccatcgagtcaagaaaaggcaagaaaatcgaagaaccgaagataagagcatgacaagcaagtatagataggagtaggatccctctgggtcttaaaacaccacaggaacaaacatcacaagaactgaatataagaacataacaagcaaagataaaaa

SEQ ID NO: 33260 - DNA, 529 bp, Oryza sativa
cacaataacattttacagccatgattaacatgaacatctcacattacattcataccgcggtataagataatcgacaattcgacatagaagggttgaaactatagctgtgcgcttgtttacctacattgttacatggcaaattgataaaatatctacacgtgaaaatcaggtaaaaggcacctgggctcatgacagaaacagaagggcatgctccattagcaaaagcgtgcgaaaaacgacatatagagtatagacagagatatttatagctcaaatgatagaacttatcactagctacacgactatactgtacaaagcaaacttgaagtaggaccatcaataattgattccgttccactatggttcagaaatccttcactaactgacaagctcaaacaagctcccagcttctcaatgccagttttttttttcaggatacacaaacaggaattgctgcgtcattttttgcccttctgttttcccagatgcttttaaaactggacttcagatttagcatatacctaaaaat

SEQ ID NO: 33261 - DNA, 837 bp, Oryza sativa
tgtccagcctcatcgtgagaaacccaagtcccgagaggaactcgagcgccaccagttggaagcaggaggcatcccacttgatccagaggaacgggtgtgcgcgttcccccagtgtacgtcgtgcggtgcttgccagcgattctcattggcactgtgccaggaagaaccaccggtgctgtgccgtggtgcctgggtccaaccgggtgcatctcccgttggctcccagtccgcctcgtacatctgcacaggtatcgatgaggatgactcctcatgctcttgccttggtctgttgcgtgtcttcctgtaagatgtacctgcacaagattcttctatggtctgtaggggaatggttagttcctgacagttgtacaaatgataccccgcattgggtaatgggatttcatttgtacaaccggggaaaaagtatatcaatgagccatcgtctccatgcttaagtatatgcccttgtactaagtatgtttcatcctcatagggacggacagtggatatatactcgatctgatcggtggtaataactccaaggccattcgctatacgggtgatcaaagaagtacactcaacaggggcagtatacttaatactttctaactgtcacgtcctgataaattcatcccgaaataaaaattattttctaaaaggaataatagaattaattaaaattcgaaaagaaattggcaaacactaaaatacgtataagaaaaattcaaatgtggcccggagattttttgttaaattccccttggtctaaaaggagcccccaaattttagtggaattctcagagcccaaataataattattaagaaataaacaaagtt

SEQ ID NO: 33262 - DNA, 501 bp, Oryza sativa
tggtagtagggccacaacttggaccacagaacaagaacttttccaaccacatcattagaaaggctgtgtgttccttaggggttacagaaccagttcccatgttctgggtgatgaagccaatccaacctccgatgctcctagttttgtaagagaatttgcccttggtattcatactaactgggttagccgatgatgtgatgtctaagtccatgatcatgactatatccaggagagttggtgttattggtccttggttgataaaaaagcattcaaagtattggactagaaataagctgcagccgatagcacaggctcatctctattcatatcggctacagtgaggactaggcactgttgacagtcgttatcgaacaatttcgaccgtccatattacccaattaatgaagactagctatgcttgcaatgcataaattccaattaaaatgtctatttccactatgtactatgctactaacatgtatgcaggagaagcacatataa

SEQ ID NO: 33263 - DNA, 739 bp, Oryza sativa
tgtggggttgtgtcttgtgggtacagtggtacacctctgatcagagtttaaactattcgaatagccgtacccgcggttatgggtgagttgagcaatgtttttcgtgattagtctcacactactcataatggtaataatgtggtaattaatttgactcctggtttggaatggataattcctggtttggaggtttaatttgttcaactggggttggttgttcaaatgtggttgggcctatgcaacatgggtgtgttgtatggtgtttatttaatattgattaattattacaactgttttactattctcttaaatattcgttaaatgctgtttctgcaaatgagctatattatgccatcctttgttatcctgtgcacttgcatatttgctgtgtgacttgttgagtatgtcatatgctcattcttgcaatattcattcatcagaagaggagtatctcagtgaaggtgatgatctggaggattaggcttgttctggttaggatgcctgtggagtggagtcgccatagctgttccgtagtttgttatagttttattttccgctgcgtagaatgttattctttgagaggaactatctacctctgtaataatttattatttgcgaatattaaatagttatttatttgtactctattatcaatttgttattgtgtgcctcagttgattctggacgagggtttaacacacatgtaagcgttcggaattttggatagattttccgggcg

SEQ ID NO: 33264 - DNA, 560 bp, Oryza sativa
gaggagaaaaggaaagaaaaaagaaaaatggaaagattcccgtgattttgcatgaaagcccctgaagttttgggaaactaggtgcatcctgctctgcataggaaatcttgccttttaaacccttaacttttcaggaaactcacaaatagccctctgtatttgggatatttgtttgaatggcattcggaatttgcaaatatcaccggaaatcatattctcgcataaaaagagaccacggacattgacctttgacctcgactttgcatgtgccttttattgctgatgtttatgattatgaaatttatttatcgcatttacgattattgattatttgtgatgcttttattacttttagttaatatcgttgaagttgaattttgtgtaccattatattgcaacacatgtgcattttaccggcatttaatttgcgcatattttttaataacgaaagatgacaggcatcacgaattagaaaatttgcaaaaactagaatatctctgacatatttatttaatgtcgaaattacgatagagcgagaaactctatggtaccattaatct

SEQ ID NO: 33265 - DNA, 642 bp, Oryza sativa
cataaaaaaaaccatattttcctacaaatactcataaaccaccacgtgtactcctaaaaacacttttaaaccggcatgtggcactctaattaaccgggggacccactattttagatttttcagctattagatttacaattatatagtggacccgatattatacgtcattagatctatttttcaaaaaaaaagaaaaagaaaatagcatcgatcccctcccattccgcttaagtacatttccatttacgtgaactccatctgtgtacgccctcccctctggtcctttttttttctattttcatgaatttcatgctattttaggtagatgggaaataggatttattataatattttttcttaaaaaataaaactaaatcactgtccttttgtagaaacggacgtatgccttctccttcgtggtccaagggcggtggccacccttctttttttatatattatttaaattcaaactagactggataattttaacccattaaatattaaattattattattatatcaaatagattgtttaaccttttgatttacaaaatgcacctaaattagaaataattaaagaggttaaataagaaatacagcaccccaaggtttttaaaatagatctaatttaaatggatttat

SEQ ID NO: 33266 - DNA, 578 bp, Oryza sativa
aaaactaagactactattgagcagtaacaaggaaacactaaaacttaatagaaacagacattagaaattgatctcctttcacacatctcagtttaagtaaagagctcgaatccagtttgaaacagcctacttgagaagtaaaacctctcatttaggcagtacaggtacgtcgtaaccaaagctcctaacttccaaaaacaagagtgggaagaattgcagcgcaggaggtcgtttgctacacctcatctcaaatcaatcactccggtatgcaaagcaccgcccctaaatataaaataccacgtcatcatcatcataatcatcatccgccatgaacaccaacgatcaatgaaggcaggaaccacgagactccacgcatcccccctagtggatttacacatcacgggcaagagaggaaccgagaacgtaaaaaggcgggaggtgggggggggggacctgcagcttccagcgggatgaggaggagacgccgcctcggcgtacggcgaccgggcgggcgactacgacgaaggcggcggcggcgcgggggcggagggccgccatgccgtggttgaggggggatc

SEQ ID NO: 33267 - DNA, 620 bp, Oryza sativa
gaaaaatttagatgggcgaaatatcaacaggatgataactgccatgtttcaaaagtactatttctacataatttttctaaactatttgttagcttttaaaaaatatatatttaattcattcgtataaatagttatctatcatctgtataaataccaaccatgtttcaaaagtaaatatttagattgtttggaaacttgtcggacaaataattaaacgtaaactaaaaagtaaaatgttttgtcttgtttaattgaatgtttggtagccttttttaacaaatcctaaataactattattattagtaaacatgctttccttatttgtaccatcaagttagttctcttttttgttggttcagattcatacaagctgagaggggaggggacggctagtgttctgttgtgcccatgtgagaggagggcgaagtggagggggtgttttgttcaaaatgatttaagtgaaaatcgatgatcctgtttcttttatcaaaatttctaatatcctttttttctaaattttaagatgtagcacatgacagcttaagattttctctaaaattatatatattggttaaaaataatggatccacctattaagtacaaattgatggtcacatgtc

SEQ ID NO: 33268 - DNA, 2027 bp, Oryza sativa
gggtggagctcgtcggcggcggctcgcgacgacctctacggcggatctagaggggggcagcagcggagctcagggcggagctcggcggtgtcggtgacggttctgaccgcgcgacgacggggcggcggtggccaaccgtggcgacgacggggcggcggggctggccgcggcgacgacggggaggcgggggccggccgcgcgacgacggggcgacggtggccggccgcggcgacgacgaggtgacgacgccctcgtcacatgtgcatgccgcactgctgcatggagagagagagagggggaaacaggcgtgggtcccacatatggctagccggttttggctggccaactttagctagtctggtggggaatttagacagccggatggcttggagaggcatttggctagtctgttggagtagattttttttgtgtaagttagccaaattttaacttagagagccatttggctaggctcttggagatgctctaaggcctataactacaagatcattcagaacgatttgatctccattgtttgcacttaagtttaccagtacgtcgttagaaattgaatttttaagttgctcaaagtatatgtatataaaatttacacattattttttcgctattaagcgttgctgcttatccaaacattagcattgtttagataggtgttgtattcgctcggtcttatctctattctaggtttcggcaataaacctactaaatatactttaattaaacgtatagagaaaacacctctagaactatgtatttacggttaaagacttttgtcctacttgctagcgactcaattacatttataaccttcctagccactttcctcattttcccctttttcaacatttcctcttcctctcccctgagggtgcgccaccctaacccgatcttccctatctccagcgtcacctccatctccctaccctacgatgccactcaagctatcctgttaacatagaaccatctcgaaattgcttcgtagtcatcacgcgacgtgtgattcgttagaatcgctctttgcagatctacctctcagtgtccaaatccgatctgtttattggtgtcaaattttattgtccactgcaacatgcagccttgactggccggtggtgggggcggttgacatcgttcggccacatcgtcgtcataccgagcaatcttcgctgaccataccaccgtttttctcgtgatgtcatatcttcaggttccacttacctattctcatcttctcttttaagactatcctattgtgcttgtctcttggacctcctagtctcttcccgagacaacgttttctctgtaggacatgctgataccgagacacctcatccctttcaccgcggtatcaaacccatgtaaaaataaaaagcctatataggagttatattgccggggaaactttttttcttaaagaactacacgagttgtggaatgtaattattatagggtcacattgctggagatgcgagtttttttttttttacttttagaactttattacgagttgtgaatgtaatttagttcaagtcacatggtcttttcaccattgacacggcacccaagcgaaccggagcgcgtggaagatgggaatcgcccctccgcggcacgagtccacgacggcaagaaaaagcgcccacccggcccacgcaaaaaaaaaaacaaaaaaggtagcactccatctgggcccacctgtcggcaccgggcgcgtagcgcgttcacgcctcatcacagtagtatcagtagagagaaagaaagaaaagaaagaaaaaaaaaaaggaaaaaagccgacgtaatcaatgggggacagcgcgatcggtccaagttaccgtcgttaaacgatcgcgagctccgcctccgcctccgcctccgcgatccgcctccgcctcgagcccaaacccacccaccaacccaacccaatcccatcgagaggaggggacgcggcggcggcggcggatcggcggcgggggaaggaaggggatgggcggcggaggcggggagtatgacgg

SEQ ID NO: 33269 - DNA, 615 bp, Oryza sativa
acaccccgtagaacgcgaaccgctccgggatcttcaacgcggcagatccccctttaatccatgacaaagtcaccaccacacaactcgtacgcatcgatgattctcagatctggcctgccaatctagcgcactacttgcctatgatgaagagcgccgacctacaatcgccggtggagcccgggagggcggggcggccgttgaggtccacgaggcggcggatgttgctggccacatccccgtccgccatgccgtcgtccagtgcgagcagcgggtcgtaggagccggagtcggagccggaaggcatcgtcgccggccggctttgacactatatatatgggcagctcgctctctctctctcacgcacacaactagccgcagctcggccgaaactttcgcagtcaatgcctactcactcacaccttggcttggcggcggctaaaataagcaaagcagcatgagaatcggccgggaatggatctcaacagaaaataagcgccaactggcgcgctcgatttatatcccatttatattatttttgtgttattaattagcacattgttcataaaaaatatagaaatcaatttaatttccttgaaactcataaaaaatcgtagg

SEQ ID NO: 33270 - DNA, 522 bp, Oryza sativa
aattactgtttactatagttaaagttaaagaaaatataaagttcgacatctaacacattaatctagaatctacaccctccgttcaaaaaaccaatttatatggatgaacataatgcttgcgcagattcattcctataagttatttttttatacgaaagtaggtactacagctcacataatcacactgttatcaattattttttgtattctcaacatttacaagtttaaaagttacattccaatcacttaaagtattttcgcaggcatccctctctcactcaatctctcatttcctctctcgccctgcacctcactatagtcgcatgtttcacccttgtcctctaaactgtttaggccgaataggggggacgacatttaacacccccccccctctctgcttcaacaagtttagtaataagttcactctagatccctcagtttgtcgcctagtctaattttcatccttagtccagaaaaccagatacaacgcatccatcaactcacaaaaccgtgcagaatagg

SEQ ID NO: 33271 - DNA, 614 bp, Oryza sativa
caaccagattcaccgtgattagcctcaccctagtctagtgtaatggaattgattagttcaggtggatggtggggcctgttgcaacgtggtgtagcgttggacagtggatggttaatattgagtaattattacaactgatttactgctttcaactaccgtctttaaatgctcgctttatgcaaatgaaccgctcaagctgtccttcaattatatcctgcatcataccctctattccggtatgacttgctgagtacggtggttgtactcagtcttgctctatttttccccaaacccccagagtttgagtgcgtgtcagatggtgggttctccgaggagtaagcttcgtccgtgctgtcgaggatgcatgtggagtggtgttcccgctgcagtccaagtcaaggcttagcttcatttatcttttaattttccgctgcatttatgtaagacttttataatgtttgtaagacgtggatctgtatgtcgactttgtcgtttgtgtaccccggccggtcctcgacgggggttttaatgcacattttgcttggaattttattcgggaatttttgggcgtgacatcctgttttttagacagcacagttaattaattagtgaca

SEQ ID NO: 33272 - DNA, 528 bp, Oryza sativa
cctctcaaagaaacatgtattcacagacagcacaacgccacactgccctgacatgttttccagtacagaatcctcagtagacaaactaccaacaatctaggacaggaattggcaatctgggaagcttgaggttacaaacaaaagaataaaaaataatatttcagtcgatataacactccatctactgcaaactcaaattgttgaagaatcgttgatttgtttcttacccaacaaaatatgaaggcgatggatcgacggcaacctgatgtcagggtgacggagaccccagcaagccagcacccttgaccacataggagagattccctactattgactgcatttacaccagaagggctataagcatctcattaaatcataatatggtcgatagaatgtgcacttggagtgatcactgtttgaagtacccgaatggatttttttcttctaaaaatgagctcatatttgtcttaaaaaaaggtttctttgaacaattatgtacagcaatttttttgtctgaattaaccaaat

SEQ ID NO: 33273 - DNA, 604 bp, Oryza sativa
aaaaatagagaaattccaagaaattctaagaacaaacaaaatatttatcccatgattttaacttaagtcggtggacccactattttcatccgccagatcaatttaaacaaatccttccacctacaccattgtcccgtaagtagccatggcaaccgatactcctataccgccacgtggcatcctacagacgctcataaaccgccacgtggtactataataaattatataaatttataaaatttctaagaaaaaacaaaatatctatccactgattttcattaagttaggtggacccttattttccaacaataggtttatctaaagaaaaatcctacctaaccccaaaccggggtataccatgggcctgtacgttacatacgtttcttttataggatagtacgtacttccacccatacttccctcgatttcttcatattttttacatatttattatcctattattagagtttgaaaaaaaaatttttttattaaataattcagcaattataacacctaaatcaaacaactaatatttatccgcttatatctttaaaattatttatgattaaatcttcagctaaagaccaaatttccacaataattt

SEQ ID NO: 33274 - DNA, 544 bp, Oryza sativa
tcaatgttgcctgcatagtgcatttaatacagtccactactgatcagtactttgccaggaacatcaatgcatctgcatctaccagttcggaatatgcacgtaagtttccggtacacacctcgtacgcaactagcaaatatcatacttcctccgttttataatgtaagttattctagcatttttcatatttatattgatgttaataaatttatctagatatatatgtctagattcattaacatatagaatgacttacattatgaaacggagggagtataaaattttagaaaaaaacacacatatttccactaatatatatatctagatgtgaaatcttatcttcaaattcattatgttttagccttaaaaagacaaaattatgacatttttaccctcaaaattatcagatttttcacaaatataatgaatttgaatagtaggagattttacaaatatgtgtaatactattagacgtaaatgtctatttttttataaattttttatgacatttactagttggtgttaatgaatcgtgaaaaggaag

SEQ ID NO: 33275 - DNA, 590 bp, Oryza sativa
aaaatattcccggccaatgatttttaagggtaaataaatttttttttcctcccattatttcacttgattaaattgcttaactttttattcaatttctaggaaatgcatcattaaatgatttttaatcccgaacgaaaatcggggcgttacaaatctaccccccttacaggaatctcgtcccgagattctgggatggctagaaagaaagccggtgcagatgggcggtctgactgatctgcaccttgaactgccacattctgcttcgaactgattgattgactggttgatcaaacctgcacgattgaactggctggattcgacctttctgttcctttgctttgccaaaactggaccgactggttctgcttgaactgacccagtctaggactgcggatgctcctgaaacttacttagtttggactgaactgttgaggttagcaattttggtaacctgagaattcaccacgctggctataagaggatgaaaatggaatctggcatttataaatcatttaccctatgtccgcttcgactggtcccaattcaaataacaagtaattccaggaaaacctgcttgacctgtctttcgt

SEQ ID NO: 33276 - DNA, 589 bp, Oryza sativa
taattcatacggagtataccccgaacacgacttgaaatgtgacgaccaatcggcattcgagcgaccggctctcacaagtgacaaaaccgggagcaaaaaaaaacaatggaaaaacacaaggcggccacgcgggaggtccatcggccatcgcaattgaagcacggcgatgggggtatctgcaggttgtcccgccccgcagggaggtggggcctacgactacgatgaattgggatctggatcgcggcagaggcggggggagcgcaggaggcggcatgtgagggggcgtgcgtgcgtgcgctgtcgcggtggtggagccgtccgcgagatcgtgccatcggtccttcaccgtggatgctaaccacgctgcatttatatttgctgcgtaaaactcctctctgcttcccggcttcctgctacgcgcacccgaccgtgtgattgatattgatactgataagcagtgacatccgtctgtaaaacatacacactccgtcccataaaaaacccaatcttatttacgaacctggacatatacgtgcccaggttaatagctggggtttgccttttttttttggacatagtagtatttttt

SEQ ID NO: 33277 - DNA, 635 bp, Oryza sativa
aagatcatgcgctcgtgtgtcctcgtgccagtccacggcaccctgctctggtcgatttgtagggggattgcgttctttattcatgttgatctgctgtagatgggggcgatcttgagccggaggagtagctagtttcttattgatgcggtttcggggtttttagagatttaacacggtttcgcggcttctctttagcgatttcttttttcatgttgatataatgatatccacggtggatgttctagttatgtcatttttatcttgagtgctttgtgtgattgtttttcaattgtgggtagagaccatattattgtcgttaagatgcatgctctgaaacgcgaaatttttttgtaatgggttatatctagattatgtgtattgctgtcattcaatagtcttttcttaatacaaggcgcaaccgtcttttcttcaagtaccagtatacaagtcggcaactgctcaactccgtacttggtgcatgcaagcattgaatggatggttgcatgagctcatgatattcggttcattagtttaaaggcaaaggatcctccactagaatgcttgcatgcacgcgcaaaatctgcaggacacgggtgcatgctgctttggcactagatgcgatgaactgatcaaag

SEQ ID NO: 33278 - DNA, 549 bp, Oryza sativa
tttgtggcattaaaggatttgccaaaggtgtgatgcccatttcggcctgtttatcgtgaaatggtgataaacggacgcagctataaggtttttaaggttgccgggtggcttcgggcgcaccctgggcgaaccttagaagactacgatcttgttcattcaagacgtttggaggacatggctcgcttttggcgaaaccatcagaagactgatcggcaggaggcgatctctcaacgtcgttacagtctagtctgtatttcacccccttctcctcttagggttgtgtatgatattagtagtgatgacgaacctagttcgttcgatcactccttagagagagagagatcgtgagggcgaagatgtaatttatctgtaagccgggctgtaacgccattgctcctttctcttcatttgtaccattgtgatgtattcttcgatacatttttatttaaaatccataaaggtgcgtcttatttccttttcgctatttttgcattgtcacttcacgtgctttttgttgggtcggaacgtgtcggcccctttgcatatatt

SEQ ID NO: 33279 - DNA, 641 bp, Oryza sativa
tgatccgcgtatatatataatctgcacacacattttgctctcccttttccacgtggggcgagacgtacgtggcgcgtggccatgtacgtacgtacgactcgccgatggaaacagcaacacgcacggggaaaccgacgcgcatgcgcgcacgccttgatcgaaacgccgtggcgcgtcgaatgatcgcgtggtggtggtgaaaaacccgcacacggcgctcgcgcgcgccgcgcagagaaaaaaaaaatctccggccgcagcagaggcgcgcgcgctgcaggttgcagctgcggttgggcggggcggggcggatgcgaacaaagctcgcgaggtgacaggatagcacatgcgccgatggccgcggaaggaaaggctcggaagcagacggacggcgcggccgcccgatgctggtccgcgcggatgccgggttggtgtgggcagcgacagctgacaaaacgtacggcatgatgatgtgcgtgtgttgctcctcatcctagctagtagtacgtactgtactgtcctagtagcaagcaagcgaaacacggcacgtagctaggagtaagactaaagcgcagctaccaagctgtacataacatatatacgatcgacgatcactaaacctcccagcgctgatcgatcga

SEQ ID NO: 33280 - DNA, 687 bp, Oryza sativa
gcaaacatatatggacaccatatgttgtggctgtaagcctgtgtaaaccctctgaagggcatatccgtttggggacaaaacgagctaagtgttggaaactcatgaaaatcatacctaaaagttttataaatttatgaaaaaaactacatataggtgtagatataaaatacattttcacaattctccagttcaaacttaactttatttaggtgtaacaaaaaagacaaatttcaggtgaatagtgtcctcttactattaacctgaaatttgtcttttttttcctcttaaacgaagttgagtttagagttgagatttggtgagaatgtatttcatatctacacctatctctagtattttttttcatgaatttacgaaactttttgatatgattttcatgagttttcaacacttaactcgttttcatgaaaatatgtcctctttcgttttggaggaaattcaaaggttttggattcctaaggattaattcatatgagtatcattcggttaataagaatgtaggtataggaaacaaagtttttttttacaagttatagagagaaaacatagacactttttcatccactcaaacctttttggaaaattcctatggattgaagttttcatgcattcctattcctccacttttactattcctatatgtttaaattcctccaaaatgaataggcc

SEQ ID NO: 33281 - DNA, 1155 bp, Oryza sativa
atagagcccatgggccgtggtgccccggctaagccccgcaagatattgtgggcttgtggccgcactttcagcccaagggcagtagtgccccggataagccctgcgcgacattgtggccgtttggttggtaaaaattttactcttgtgacaatagtttctagattttcaatgtacatgtgatttgcactatatatttttttacgcagatatgcattatccttgttcacaaaatcttactactaccagtttatcgcaacttaaaaattcgcttctcgttgattcttgtatagtagtatctcctataagtgcaggcgaatattgaaaccttaaaaatttaatagacgtaaaaatatttaaaatatgaaaagttatattggtatatttttatgagaaactctctttcataaagatatattcgccatgctctttaaatatatagtttagtctttagagactagtggccctgcggcggtcgcggcgacggatctagcctcccccgtcgtcgcggcggcagatccggcctccaccatcgtcgcagcggccgaatccggccccgagcttatggcggctagcggtggagaggaggaggccacgccccaccaccgcggagaggcggtagaggcgacggcagccggcggcggtggagaagggaggaagaaggtgaaaccgagagagaaggaagagaggcggcggaggggccgcgcagtgggggaagggagaagggagcggtgggggtgggggacagtagatttatatattcgcccaaaacatttttcgcagtggtcctccttacctactgccggtgaaaatgagatttttcgctggcggacacttaagaggtccgcctcgaaaaactggcagacacttaagaggttcgtctcgaaaaatagagtagtttttttaggcatttgtcttagcgtggttatcagcaaaaattggtttctgctggtggtccgtagccccccacctattgttatgtttttttgggcggtttttgcatatggacgccagcgtacaatatagggtaacatcacgaaaaatcgttttttatagtgtaaaattgttatgatgataaaatgtgtattgcggactatgctgatgatgtcactcatctgaaaacagagatagtaccaaggagtgaacacgttacatatg

SEQ ID NO: 33282 - DNA, 908 bp, Oryza sativa
catgaaatcacaattttaggattctgcaggaggcatataccccaaaaatgatgatctgttttggaaccaagaccagcttttttgggctccaaaaggccaaagccttttagcttcaaatgctagtagagtaaattgccagatgaatgcactttactacacgaacttgtaaaagacttgtttcggtacatgaatttgttcgatgcatgtgaaacaaggtcaaaatgacacatcataatcaattttactaagttatacactgattaggacgagatgtgcatatggaggtggacatgagacatgcatttgtgctttattattctttgttctaccccttgcactatttctcagtatttttgtgtctttctccatacaatctttaggccttattaacccctttttattgaacaaatgtatatgtacttagcatttttctcacacatgtgtttatgtagtatcctaattaacactaaaataagattagctttgttttttcttttggccttgattcacatgcacctaacaagttcgtgtatcaaaatgagcgttttataagtttatgtactagattgcttccacctagcaagttcgtgtaccgccaatgcaatttactcatgctagtatttggagaaagcatataaccaaatgacggtttgtgcttgaatcaaggatagcttttctgggctcaaaaggccagagctgcttaggttccaatgaagatgtttctttcgtgctttttgggaggatcactgcgatggcactcctccgatgttgctacttgcatatacttctatactttatttaacttggctacaacttgaaaatgaacgcaaccaatcaccacggctgtacgatccaacagcattttcagttcaggaaaactacaatacattagatttagggcgcaatct

SEQ ID NO: 33283 - DNA, 667 bp, Oryza sativa
agctcggtacccaaacatatagtaattatatctacaatttacttcattctaaaactaaacatacacatgctagatcattttcataatatttcaatccaagtcatttcatcatttctctattatctaacatatagtagattaggaaactaatgccgtgtccggctaggtttctgtctttgtaaccctgccccacccccaacctatataagacgagcaggggccctctcaagggtagatgaacacataaccacaaccaaattttcaaatcaatacataactcgcggatacaatcctcaaacagaagtacggtattacctctcatcgagagggcctgaacctatctaaaccattatctccgcatctatccatttttaggtctctgcgctaccccgtttattgttgccaaattccagtttcgacaattcctatgatttctatgaataggttctagcattcaaatagaatatttttattattctacaaattattcttgtgttttgttaaaacttggcctcatggtacattgctgaatgggcctatttggcctaactaacatcaattgagtcgggccatgagcccatggcttatgtgttgtgtagagttttctcgatgactatccactcgcatcaatgtgatatatctcatattattatactatagatttata

SEQ ID NO: 33284 - DNA, 674 bp, Oryza sativa
gttgactaccattgagttttgttgtctaaaggagacattgcccatattcattctcattaccaccttctattggtttcatgagactctatgcaagtatccatggatatacgaggagatgcatttttcatatgcttcttcttcttcttgcttaatacttcttgatgtgggcatgtaccagcgttagtgtgcactccaacagctagttttcttccttgatgggaaggtgcggtacgcctattcggaggttccgtaccgtttgccagatctcaactggctccccttctatttggtagggtaccttttgtgactttgagtatgatagtccctttcttaaaaaaaaaatctttgccagatttttttgagcaactttcactatcaaacatgaattctaaatgaaaaggggcacttttccattctcagatatacttatcaccatttctttttacaaaaaaagatacttaccagctaccaccacactatatatttgcatccaaactttatagctaaattttattaatgaggttacgaatattttaaatataattgttgaagtctgttgcacgatatagcggtatagctatatacacaaaccttacttaggccccgttcggtagtgctccaaactccaactccagtgggagctggtgttgacggtccttaaatcataatatatg

SEQ ID NO: 33285 - DNA, 644 bp, Oryza sativa
agccccgcaactccgaagctctgtttcaccaatccattccatcaaccaccctcgtccgtcgatcgaacaccttgtgcgcgatcgactccacacccctccattcatcctccaccttatataccccttagaacacctatatcctaccatgttttagcatactagatcctaaccgaagctctgcgtcgagttttacctcgccgtaccaagccgagcaccgtcgaccccgcgctgttctgttattcgccgccacaaagtttttccggccgcaacccgtcgtttcaaccgatctcggtgagttctttcgttttaaccatctatgtactccctagattctattttagcaattggtttgatctaccatgccaccctctgggctgccgacgtgagcacggacaccgccaatggaggagctcgtcggcaaatatattacacaccttgccgaaggtcggcaagctgcttaaacccttctaggtacctgatagatgctctagaaccccttcccgagccatgtctaactcacataaccctgatcaccttcacggcttaactatgccaccgcgcgcctagccgctagctcaaccacataccaaattgacccctccgacgccggtcaccgtcgccggagtaccctagcttccttccat

SEQ ID NO: 33286 - DNA, 559 bp, Oryza sativa
cgaattcgagctcggtacccttcgtttaggttaaaagatcagtttgaaatatctgattaattacctcgacgaggagcaggatggcgacgagcgagatgcacaagagcgacttggccatactggccatgatgatcaaacgactgaacctgaacgagccgaattcaactgaatttgcaaggtgaaattaaagtactggttctgtttgcgaggtggaggtgatgaacaaaagacgccggccggtagcccaatttatagggcgagaggtcggatggggctgccagatctatcacacggtgtatcccaggaggcacgcatacgcagcagcagcacgcagcacagcaagctctgcgtgcgccccccatccttggtggttccgtgttgggctctccacgtcgccacaccttgcatgcatcaatcgcttctgtgatcagatcagcgtgcaaacaattttaattatgtcttcgatgagaaatcagcggctggatatattagtgattagttctctgacgagcactaagcttgcatgcgtgctgaaatctacacgctccccgctgctgaa

SEQ ID NO: 33287 - DNA, 611 bp, Oryza sativa
  unsure (1)..(611): unsure at all n locations
aagcaaggctcccgtttcccggtgtaataggagaccagaagtcttcacccgttaaatggtgactgacaggggcacccccgtgtcaggcggcaagatttgacaggccccatcatcaagacgacgtgtgcttggcttcccaagtcaagagataagacatgcatttaatgtaaagattataatacttctccaccggagctaggttaggttgttgggcccatgtggtaaccccttgaggtataaaaggaggtccaggcctttaatggtggagagggggggacttctgagcgaactggcgcttgggtctcgcaaccccaagcacttgtattctacattcaatcaatcatgcacaggagtagggtattacgcttctcagtggcccaaacctgtataatcctcttttgtctcatcgtcttggaggggcctaaccccctcaagatcacacagctccgcttgccaagcactcgaatctcatccgctgcccccggccgaactcacaaaggggagtctcacggttccctggtggtggagttcattctccgtcatttacaaaaaaaaaaaaatttntgnaaaaacccttgtggttttagagttcattgtatcgttgggtttta

SEQ ID NO: 33288 - DNA, 544 bp, Oryza sativa
tgagaaaattccttcaatgtagtctggaccttactagaatagtcgagtgccttaacagttcagctagcaacagctatttgctcttcaagtatcagatcacaagtttaagcaacaattcatcagaaaggtccaaacatttccttagggctcacatgggattggaaactcatcagtcaccatcaaagcaaagccataagggagatgtggtctacagtaaatttctcgagagtaagaagaaatacaaaaaaacaactgttcagggaacataaacttcatatttactaatttaatcattcttggttgactgcaagcagaagttctttactggacgtcccaccctctcctcattctcttatttgatatttgtcaattagtgctggtttctctcctaccacttaacaaaaagccctcttgaccctccaaatccccataagacagcacttgacgataggcaacgagtaagaccattatgtgggttctgtcgcaatgagcaacatgatcacaaagccacactaatcaaactgttgtacctaacatataaact

SEQ ID NO: 33289 - DNA, 850 bp, Oryza sativa
aaaaacatgcatatttacagtgctacataaaatttatacattctggtggtgggaggatggaagggaagcccaagggcggaaagccatatatacataaatatatactcctttggtaaaaaatctgacatggagtttttccacggatttaaagtgcgacttgacataatttataattgataatttatgaaatctaataaatctttggagattatgaaattcttttcaagacacaaatctatacttgccactttatgtggtcaataattttgtcaaattgcaagtatatttagtgtaccaatagattcatattgcaaacgactcttagaaattaaatagagatttgctagattttagatgcctaaaaatttgtatattttcggtaacctaaaatttcatattactaagccttattcaatatggaatttaagttcatcttaactacaattttggagttacacatgattaattttactttatttgcgtctttttctgaatttttttgcatgcaattttgtaaattttaatgagttataagttggtttgatgtaatattgtaaagtttttgttagaataatttattaaccaaccatgggagaattataagtaataaatactccctccatcctataccatagtaacctagctagtactgcatgagatattttaggactacaaatttagacatgagttattcagattcgtggtaccggaatatgtcttatcatatggtactatttactatattatgggatggaagtagtgatagataagtgatgagaaccattggattgtttatcttagggatgaaaaagtaacaattttttaaaaaattttaagcgcctgaaatata

SEQ ID NO: 33290 - DNA, 837 bp, Oryza sativa
aaaatataccaaacctcctctgtcctaaaatataagtattttagacttcgatatggtcttaaagatactattttgatcaatatataatatctataaaaataagatgttttaaataaaaagagttacatattatgataattcgtttaatgataaatctagtaacatcgattttacatgattaatcttttttattaattattaaaagttaaaaatgtttgacttaatactatcctacaaatgcttatattttaggacggagagagagtataaattagacatatgttagtaatatgaatttgaatggagtaaattacgagggagaacttgtataataatagtctctgttagggctgtcaaaaaaggtcgaagcttgcaagtagctcgagcttggctaattctaggctcgattcgagctccaaacgagccaaacccgagcttgagcaaaaacttgcgagctttatcgagccgagcttgagcttctactgagtttaccgagcttatacatagcgtatagtttatattgtttgtttaccttattgatttaataaactaatggatatatatatatatatatatatatatatatatatatatatatatatatatatatatatatatatatattaattagtatctatttacacaataaattagcatgtgttagcacaatatatttattttaatcattttttactcttttattaattaatgagaaaataattatacttatcaatggattatcactaaaatatatcttacactacttattactgagctcggtagcttagctcgagctcgaacgagctcgagccgagcttgcctaaaagctcgaaggtg

SEQ ID NO: 33291 - DNA, 3082 bp, Oryza sativa
ccaaccgtgattaaagtggtgagttaccgatcgggactaaagatccttggcccccgacatacatctgacaggggatgaaccgggagtaaagaaccaaccgggactaaagatcataatttttataaccgggactaaaaacaatctttactcccggttctttttggatccgggactattgtggattttgccggatcgattaaagatggtttctccaccagtgaaggggaggatgaacagcaggagaagcaagattcaaaattcatgcatctcagaatattcatggctggagggctagcttggatcaaatcaaagcttcacatgcatgtatctcagaaatggagtttaaattaatgctttcatttggtttgctgttgcagctcaatagctggctgattcttgtcagctctgcgcctctgcacgagcgagtctttttgaatgagaattaatggccctaaatccatgtgtattctaaccaggttttataaaaccgtttgcccaccgaaatccgctccctagcgttttcgtgttggttatcataaacttagaaaaaaattatagaaatttcgcacttaaatttgtttttcttaatttggcaggcttactaagtggtttatcgatgcaaactggctcaagacaggtgatagtcatagtaactaggtgattgtcgattttttaatataataagaataatttcattaaaaatataactacgcccggtctctacatcaacccgaaatgcacacacagctagaaaagaaaaggaaaacaatctaagcaactatgaacgtatcatattgtttacatcaactcatacaaaacacaataatctagacaagaatataaagtgatacacatctactctgaaacaatgatttcaagaaggacctaatgcttgtctatcacagccataaaaaaacaggactagattttttttattgggagcttgagataacaccttcaataaagaaaataataaacaagcatcgacgctgtcgaatctagataaaccatattagggttttcacccagagtactaatgacgactctgggtgagcacgatctgctcacaattgatcgtagctgttgaactgattttagcaaccacgaatcttccttatcaaaatagaagtcgctacctgcgtacgtagtagcaaccaatgcctgatcaccaacaacacagaccaagcagtgatgatttgtagcacgttgggacaaagcgctactaggtaaatggaagaagccatcattgtaatgaactcccgaaaataggaataaaattatcaacgaacatatccaagtgtctcgcctggtatcatcatcgattagactagcaccactttatgggagggcaccatcgtggccttcattaggtaggcatatctcccttattggatcttgttcaaatcaatgcgatgaccttcgcggcgcttgtttgttaaactaaataaagcgatctgctggttgaaatagaggaccaacggtgaaggcctgaactatcggtcgatctccctactagtccacaccatggttttatctttccgatctacatccgccgcccaccactgctgatggctatagtagaggcggagcagatcggatgaggaggcgggctagggttggggagcctccccacgcaaggcaacccaagaggccgtcttttctattttttttttcttaaatgattctaactacttgatcgcccattggatcgtagtgtttggggaatcaaacaatataataatggatatatctttcctgagattatttcatgaattaggcatggtgacttttatacatagcttgtactggacgagattggttgaccaacctgttggtaattaaacgaattgtaagaacaagtgatcaattaactaagactgtagttagcctcgattaatggtcagatctgcatcaactaatggattattttttgaatactaatgtagtctttgtgcatagaacatcgtgatcacgagtactaagcatctaagccgccaaagttaatataagaagtaagctgctaatattctcgcatcccccgccaggtgttaactgccaataccctcatttatacaaatccatctaagcaacgtactacacgtgactagcactaggtgcgacaaacggtagcaacgtttttctagtttaagaaaatccgaggaacgcttaggggttctatagctagctccgcaaggtgatagattagcaggtctagttttgaagtctaaccccttttatttatttgataactagaaaaaatgcctatgcgttgcaacatgtgaagactattttaatcttattattattatatggtttagttaaggtaaaattcactaaaattcgattggatatatatatttttttaaaatcatgagctataattaggaatccgatcttctcaagttagcatgcaattctttttaaatagatttcttatacaactccttctatattttcaaaagcgaacaaacttaaaaactaactcaaatatgaatatgtatttccaaaagcgaacgaatttaaaaaccgactcatatacggatgacgtacctatcatgattacggataatacatacttcctatcctatgacctatgaaatatacggatacaacatacctttgtatgtacgatatacttctatatacaataaggaaattgataagagattatgaaaattatcctccggagcttcgattctcttatccttctggtcacttggaatagctttggaggtagcacaacgcgcgcttatgtctttgacaacatcttttccccagtctaggtgattgacgatattccaagagcggtcgaatattgctctccactggcaaccttcacataggggtgtatacatggatccacactccgtccattctataatatatggtatcctactttttttttatattaaggagaaaggaaaagaaactacgtacggtccttatttgtcacaccagtttgagatttgccatgaaagtgtcttttccacagtctaggtgattgacgatattccaagagcagtcgaatattgctctccactggcaacacataggggtgtatatatggatccacacgctccgt

SEQ ID NO: 33292 - DNA, 1322 bp, Oryza sativa
tgggcactctcgcagtccagcaaaaagctgcaggttaattttctctctgtggcgtgcaggcaaccgttgaaaattaaggctctgattgcttcattagaagataatgaaagctttctgaattcaacttcagggaggttcagattcagattagttgggaagctcacaaccaacgtgagctaacccaatcttgtactgtactcgtactggtatagaatggctgagtttcagactttcagtctgcagtccgagagagatgacttgtctgattggccgattcgtcgtagtacttcaccgttttttgcgccttatgaggaaacgtgcaggtttgcatggaatgattggtgagttagccatgaatgtggcactgaacaggaggggttaccaaagctgacgcaagagaattgctctcgttttattttcttaaatatatttttcagtcggtgtagttcgctggctttggtttgcaagcacatctcttcttcttctagcccatcttgcctagttgcatacttgaatgatttgcgttatagcttcaaaatattccttgaacgcaaattttgctataagacatctaaagtttgtataatttgttgatagatatagtaaaacatgtgccacggctgaagaatattcctaaatttggtagttcgcaacatttttgatccaaatgaagagagattcataaaacagatgagaatgcccccgcagcaacaagcttccatggtgttggaagataatttggaaattatgcaaccataaatcttccatcaaaccgaagtatgttccatcatcactccagcgtcagctgaagtatattccatcattgctccaacgtcaagttagaaacttttggctctaagggctttatcatctttttgaaatttttgtctcttcaattcggttgaaagtatcccctaacaaattaccagcttttcggagtgtcctctaaccttgacatttttttacgatgtccaccaaacaattacacaaattctgagtgtcttgtggcaaaatttgtcttcctaaaaaacaattattctctcttataataaatattttatgtttaggggcaatatttttttatatttctaacaattataatagtctttttcaaggaaaatctaagtataccaattttttttaaaaaagcacaagcatttaaaatttttatggaattttttaactggaaggagtatttcttctaaatgttgtgtaaatgtcagctagttgatatgaaggtgtcagcaaaaacatagcagttattttgaaactataagttctccatgtattaattggacagaaatctgcagtctgaccagaaa

SEQ ID NO: 33293 - DNA, 747 bp, Oryza sativa
ctttgacaatgttttatatttctgatgcttggttacatatacttgatggtcacatcacagtgactcaggaaccactccgcacactaactctctctctctctccattttctttttccctccaacaattggggaaccgctatattcagcaagaaggagcccaaatctagtgtcttcgctcttcatcgggtcgactcctgcctcctccttgactccctgtgtctctgtaagaccgacaccaccgaccttaatggcgaccataatgatagtgtgcatgacgagaggggacgagaaaaaagggtgacccatggaggataacttgagggtgcgattgcacatgcaaaggcggagatgagcaacgatggtggctcatggagaaagagcggtggtggcgatgcgtggagtgatagttgttggtggtacgaggagtttgttgtcgatacgatcgctaatcgagtttgttaatttttgatacgtgggcaactagtcattataaagaaatagctaattttaaagtagtaaaaatattgagataaatgtgagagtactcgtattaactttttgccacttttaagatatggtaattaaaaatttatcactcacagtttatgacacgtagggcctgtttggtacagctccaactcctcaatttaactccaggagttgggtctgggtctgttcattttgtgagagagctccacccagctccactcccagttttggtggagctgaaactgtttggctgagctc

SEQ ID NO: 33294 - DNA, 691 bp, Oryza sativa
aagggtttgtctaagtcaatctctgatgtcgaccgagaaagtacagagcatacgactaagtttcccgtcttgctgtaatcgagaatttggattgaagtcaagaaattttatctcggcgggtacaccatctcttcattccgtattccttgtcgagatccagcaaccgttctcgagcgatcgagaaggcgtagagtctgcgacggaactttgtcaatatttgtcatactcgccttagtcgatcttggtgtagaaccatagagacatgcgatcttcgataatgtcaaatagaattttcctgaaatcaatactcagaaaagaatattagacagaaatagcccccgagcgaacgctctaagggtgacatgttataatatgtatggtaaattgaaaatgaattaaatttaccgaccaatattttgagtatgagcgtcttctctcttaccgacttcgatcagtcagtttgtagagtcatacactctccctagccccagccttgtcgtcggagaatcgttcttggaggataaggctcttggacccttgacctgctgtcacgcccagaaattcccgaatagaattccaagcagaatgtgcattaaaatccccgtccaggaccagccggggtacacaaacgacaatgttgccattcagatccacgttttacaaacatcataaaagtcttacaaaaatgcag

SEQ ID NO: 33295 - DNA, 503 bp, Oryza sativa
ttatacaagtcctccttcgtaatttactccattcaaattagacatattactaacatatgtctaatttatactctctctccgtcctaaaatataagcatttgtaggatagtattaagtcaaacatttttaacttttaataattaataaaaaagattaatcatgtaaaatcgatgttactagatttatcattaaacgaattatcataatatgtaactctttttatttaaaacatcttatttttatagatattatatattgatcaaaatagtatctctaagactatatcgaagtctaaaatacttatattttagtacagaggagtttcgtatattttcagacggagagtaccagatgcgttcaggaagtcttgacattgcattgcatgtcgatagcatcgcatgtcgatagcagcttataaataggcaaccacggacaagacgagcttgcagctatctactgtagcaaccactgtaacgggtaccgagctcgaattcgccctatag

SEQ ID NO: 33296 - DNA, 684 bp, Oryza sativa
tcttttgatcaacaaacatatggaccttttcccttttttattatataaccagcacagccatctattctttatgtgattccttttgtcaaggccggctgaataaagatttctatctacacaagctagattcaacagcgatttctttatctatatataatcactcttggaggacaattgaattaatttaatgctacctgtttgtacaccacttaactaaagaaattgagagagagaatgaaggggtgaggtgttcttttgttgttttgctttgcacactaatgatatggttgatcataagaccaaggatagtgcgatcttctcaggtcgtgtgggcttgtcctggcacggctagaggctttgattagctagggtttgggcagaaaccttaccttttatagggataactcaagactgctgctatacacacccgtgggtatttttcatgtaaatagtagtttgaccctcaagaaggtcattactcttccgttcaggaatataaggtgtattttgactgtccaattttgaagagctttgacgaactattaatccaataatatttaggttttaccataagaaaaggatattattggattcatgtttgaaattactttcttatgactctgattttgacagtgtaaaagtaccttaaaaaacatctttaattttccagctaaatcagatcct

SEQ ID NO: 33297 - DNA, 1942 bp, Oryza sativa
ccaccacctcgaatcagctcatcgtcgctggctccaacgggttatgagggcatcgcatggggcaacacttctcccaacgtacaacgctcgctgttcctctccccctccctgaaaaatccctcatgaatattaataaggaactcgtgtctcatttgggatttccattcttcacttggtaatgggagaagcagatgtgatgtgaaatcttttatgtggcaagttgatgttgaatgacgtgaaatcttttatgtggcaagttgatgttgaatgacatctatatgcattgtaaaagcccttactaccattccttttgttccaaagtaaatgaattttaatttagaatttaaaatttatacaaatattgattttaatgcacgaaaatctatatatttttcagttgtttacggattgatatctaataatcaaaatttcaccattgagacaacgggaaaggaatctctctcttaatcttaatgtttttagtaaacaacctaaaaatgattgtattgtaaaaacagattgagtacgtagttactggttttgtatgatttgcctaaagaacatcatgatcacactcaattgggacgtagcaactcgatcaacatgctaattgggtttttgggtggaatcctatatacttatatagttatccccactaagtatagttaatgctatttctctcttctcttattaagccatatcacctcaattatttctagcctttggatgatagatctatggtccaaattgtctcttttttcttctctcttacaaacatgcaatctcaattatttttaggctcaaaattatataaaattgtttagttttgataatcaaattacatcttatttgtacatattatgcaacctaattttccgcagcaacgcgacgggttatttatctagtaaaaaactatttttctgtacaaggacctctttagattgcagacgaaccgtaactggtcgtgtttataaaaattatcctcctattttcgcgtgcagacccttaaaaggaccacacacaaaaatcgattttcgcatgcggacctcttaatggtccgcactaaaaaaataagtctatttttgtaggcggacctcttaaggggccgtgattttcgcatacgggtctcttaaggatccgcataaagcctaggttcccttatctttccttctcaacacttcaaatattttcatccatatcctctcatctcctctctgtcactttctcacctcttcttcgcacaatctcactatgcgttgctctcctctctcactctcctctcgcggtaggcagtgggcccggacgacggcaggcggagggctcggccggcggcggagggctcggtggcggtcagatccgcctttggcggccatgcgacgggcggcaggtggcgcggtcaacggcgaaggcggcggctcccttggccctcccgcgcggatctggcggcgggcttgagtgggaggccagcggcggctctcccctgccatcccacgcgctcatctggtgacgggctcgagcggaaggccagcggcagctctcccccgcccgtatccggcggcaggcgcgggatccggcctccacatgcgcggatccgctggcagcgacgacgggaggtgcggatccaccggcgacgatggtggcagcgaccggctagggttagggttaggtttttgtgttttggaattttttttttcgattttccattttcgtgagaaaaacttaagcgcccgcactcgaaaattcgattttcgtgtgcggatgcacgtaaaattgcgattttcgtagaccctttagtatgtgcagcagtgcgggtagccagccatgtcgcacgcgaaaaccccttatgggtcatctgaaaaaaaatcatttcttactagtggaagccagaagaccaatacgtatataggacgatactattactagtacgtctaggtgatctgca

SEQ ID NO: 33298 - DNA, 1922 bp, Oryza sativa
cctttaacggacgaggagacatagggcttgttcatattgatgtcattttcaaccataccattttttttataaagttgccaaaataatatacgtttagtttgttgccaaaaatttggtaaatatggaagaaatcctagcaaaattttggtattggctacaatctgaacatgcccatattcttaagaaatcaaaacatttcttttcctatatggatgtaacaccatacactatcactcaactcaatatattctttttcaataatcaactttcagtcctcaaagaaataacaatcaaaattctcaacgtgagatgcgtgtggagagatctgtccaagtctaccatccagtctctcgcccgccaccgcgcgacaccatcttaccatcatatccaaacaacgtgctacccttgtcgatcgatcagtgatcgatgttgagaccgacagatattatcgcaggtacatgcacgacatcgagcacgtacgcacccgcgctcgcaccgcatcggacgtacgtcggcgcacgcgtccgtgatggcgtgtgggggcatgtacgtacgttcagggtaagttttatagtggaggtggatgtcagatctaatttggaccatgtcatcgtcttcttattaattaaaaggcaacgcatacaacatatcacatctaatacacaaaccaaaatattagtttactctcacatcatttttcacttttcttggagattgtgtagagcttgccccttgtataagagcaagtttaatagtatagcatactactagcttcaattcatccgtagccaatctaatagctaattcatacaatagttgcttattatacttttaatatatggtcccacatgtcatatacatattgtgtcttggagtccgtgctgcagctggctacagatctgtagcccgttgttcttctctatcatcttttatcttattaaaatatgtttatagctagctaatagtatactattgtacctgctatgagggatggcttattctctctcttcttcacctcattatctaccggcagcagagccgcgccgcggcggcctatcctcctgccaatttttgcttctccaaaaaaaaaaaaaaaaagcctctctgcaaaccgcgcggtattgtcgccttgttcaggctaccccatgctagcttagctctactaactgcacatatcgccaatctatgggcgcagttttccgtgaaggcgccgtgggcgtgctctcgcgctgattgggtacatgtggttctctcaaggtaactcttttttttagagggaactcttgttcagttttaacttcagtttacaacattttttaaacagtatttcaccactttgtttggagaccacatagttcatcacgtggattatttacctgtggtacagtctggctgcccgctgtgtgtacatgcatgtgaaatttaacatcccccaatttatttcttgaggttaattactccttttattctttttgcgagcattttttttaaataaaaacgaagccagacttgctgctgttatattaaataggaattgagtatatttacatattcactaacggcgcaaagaagaaaggaataaaaacaacaaaaatacatttatatctttgcataggcactagatatgaactaaggtataatattcttgcgatatctttggcgccatacatatatatatatacctcacacctagattaattttatctatgattttaaccattagctgttgcattggagtttctttatttctgaaagcacttttgtttctttcacaccaaatcttccacacaatgcaatcagcataggtagtgacttcattgtcttagtcttgtgtttgcgaggaattaatcttatgaatcactctagctactcctagcttgctagtcttgcatttaatttaccatctctaattgagggattgg

SEQ ID NO: 33299 - DNA, 1678 bp, Oryza sativa
cccgccgggccgcagccgcctccacaccgccgttgttcggggagagggcgccgcgccgttggttgtgggggagggcgccgccgccgccgctcgcgggaagagaggcgccgtcgccgccgctcgggggcgcggaggggagggcggcgatgtgagatgggagggagggaaatgggctagggtttcggcggctgaggagaaggaggggttttgtttccccgatatcgacgctcggccgtccgatcaaaaccctaaagatcggacgatcggtgtcgtccaggccgaaatcagcccaagagggatcgagagtgaggccacttttctggcccaagcccaggttgtggcctggggaggggaagtgcacttgcgcgtgcacaaaaggccgtggaccgaccggcaagggccggaaataagtctattttaggtccctcaggcccaaaaaaagagaataagttcatttttagtgctcattttttcagaagcattacaattataagttattgaatgtgtttatttcgaagcaaacctaaaaggaaggattttctttctttttccaagtaaataattgttaaatgacgtttgtattaataaaattaacaattaagctctgaaaaattcaaatataatttcaaagagcgtaactaatcatggagaatttaaaaaaaattaaatttaaccatgtcattttatttctcacacttgctttacttgtaaatttatttaattatacacatacctacttaaaaataccaaatatttcaacgaatttgtattttaattaattgcatatttttctaatctgtacgcttcacattgtaacacacaggcacttttgctagaccaaacaacacttttggtcaatatacacactccgtaatcacccggtgcaacgcacgggcacttttgctagtggtcttataagtacatctattttctctatctatttaatgcttgaaattatggaaatttacccttttattcatatattaattgaaagcagcaagacattgagatgatggacataagttggaagacgaatatgtgcgtacaaattctaaattccaaccaaccaatgtaatgaaactacttattttccctccacatgttccacatgtgtataagaatcgaggaaatccttttttcaaaaaaaataattttatcttcttattccttaaatataacgttctaagtgcataacattaaaaagttcaagttacacagtaaaggaaactaatgaattgattatttgtttgaaaatttggtactcaaggagcataacgtttgcatcaagcgggagcaaaagatgtcggtagcattcttttcccaaaattttaccttaattttcgttagtacacttttcaaacatcggtgtgtttcatgtaataaaaaatctatgtggaagttgctttaaaatatcaaatatatcaatttttcaagtttgtaataattaaaacttaattaattatatgctaatagttatctcgttttgcatgtccgcatttaatctaaatcttcgtcagattcgaacacagtaatctcatttgctagttcattctatcctgaataaaagattgcaaagaggcctggcttttttttattattgtccttcccagtccgcagtccccactcttgagtctcgactcctccgctgctctccactcatcaatctgctcctcgctcg

SEQ ID NO: 33300 - DNA, 629 bp, Oryza sativa
cgtagagagaaagttatgcaaacctttttcaccctcgctttcatatcaactacttcctccgtttcacaatgtaagtcattctatcattttctatattcatatagttgttaataaatttagacataaatcatatagttgttaataaatctagaattattaacaactatatgaatgtgagaaatgctagcatgacttacatcgtgaaacagagtgagtatattttagagtaagaaccacgtgatttcatgtcctcgaaaaaaaaaagaagaaaatccacatgctaacatgccaagttcaaaagagacgtacacttgcacatacattacatttcttttctttagaaaacaacattactacattcttttcatatgccctatacattgctccaactcctgtgtagcgttgtttgctccgctagccaccacacacacacacacacacacaaattaaaagaagaaaaaaaaacgcctcaaaatgtactccctccataaagtaaatgtagttttataccgtttatgtctaacatttgaccgttcgtctttcttgaaatttttttatgagtaagattttttattattagataataaaatattaatagcactttatgtgtaactattttttaaaaaaaa

SEQ ID NO: 33301 - DNA, 525 bp, Oryza sativa
  unsure (1)..(525): unsure at all n locations
tgatacgggtgtctaagtttatattaggggtgcacacatggttaaaattggtgaggtatagctaaaaaattttcttgactggttcctgtgcaacccggcacccactcctatactctactgtgcacccactcctatactctacctccgtccctgattgtgggtgtctcaagtagcgagcatcaactttatagtaatattggatttgccaagcaaacattgacccggcccattaaatgtgtgctaattattgatttagccgtgcccttaatataggagaatgcccagcatcggttgaccgggggaggtgggaaaatcggtccctccccctcccccacgtgctcatctgttggacccacccacttgtccctctcctttttccaaaaagatgtttcacctagtgtatttacaatgtttcactatttatatatctaatgttgcagtgaattaaaatattttttacaacaaanaaacccacatattttggaaaccctctattaagggaatttggtttattttttgttccac

SEQ ID NO: 33302 - DNA, 671 bp, Oryza sativa
tgtcagcccttaagtgtctttgtaataatgtaaatattaccgatataataaggatgtgcctttgtatcatgtttgagtggtgtcctcggcttttcctgggacggggattaatacactagcgtttgggaaaaggtattttttccgggcgcgacatggccagagtaaacttattcgaatagtcgtgcccgcggttatggcagggtctaataatgtttagtttcatacctctcaccatattaaatgatgatgataatatttgtttagctcctggtttgaaatggtatattcctggtttggaggtagaactgtgtagccgggattggttgttcagaatggttgggcctatgcaacgggtatgttgtatagcgttggattaatactgtttaattaaatactttactattttattaaattctggagtatttattaaatgccatttatgcaaatgagactatattatgccattctttgttattccctgcacttgcatatattgctgcgtgactttgttgagtatggtcataatactcacccttgcaatcatttcatcagacgaagagttctacagtgatgctgaaggtgtggaggattaggtgtagccctggtcaagctgcttgtgggatggagtagtaagaaacgttcatcttatttttccgctgcatggattttta

SEQ ID NO: 33303 - DNA, 651 bp, Oryza sativa
cacatgctttgccctgacttttgcaccaatcatgcctctcggttaccctccagagaatgcagaatatcgatcgagcattccggctcctatgcagtcgtcaaagtattctctacagtatagttttctctcgctatccgaccgtacttgactatactagatctccttgctagtaatatgtcacagctcacaatgtcatgcatgtgagattttttcgatccaagggctagctagctctcctagctactccttccgttccaaagaaaaaaaaaaccccaattttaaatttaaaactggacacaacctaatcttgagtttaaacctgaacccaactcattgtgttcaggtttaaactcatgattgttttttttacggagggagtagctccgacaactattctatgagtgatactcgtgcgtttcattttaaacacaaccgtaagttttcgagttcaattttgatcggccatcttatttaaaattgtctttataaacagtattatttgttggtattagatgataaaacatgaatagtactctataagtgacttatgttgcttttaacttttttaaagattttagattttctcaaataagaccgacgacttgagttagacactgaaatctatagtttcgtttaaaatgggacggaggg

SEQ ID NO: 33304 - DNA, 1129 bp, Oryza sativa
gaatccatctctgactatccacatctcttccatcgtttctccttctctcatctctccttcatgcaggcctcatcggatcgtcctcaaaacgagagcgacgatgtccttggtgaatagcaggtgtgatggcctcggcatggacgaccagtgggagcggcagtgtcattggcaagcagcaggagtggcgtcgtcgtcggcgagcagcgggtgcggcgtcttcgacgtcgacgaggcattggagcagcgggagcggtggcgttttcgacgtcgatgtgcaacgagcagcggagcggcgatggccacggacttaggcccggcggcagcagcgaccccgacgagcagtggcctcgacctccgacaagcaacagcggcatcgccgcaatctcaacattctgttagtattggcgatgattttattgatctcatcgatctttgattttgatctgagtcttttttttggctcatcaattttttttcattgatggaaccgagttggacacaacgaactatgcacacggttcacacaacttgctcgggacatggaaacagacggacgaacggaaatttgttctttgcctcggcagccagattggatgctcgtcctttgaaaatttgtgacttttttttttggaacctttagtgcttacccgattggctctccatggctattatgaagatctttgggctgattcgatcacaaccggatttgccacatcgtgaggtgttgcaaattaaggtgaaagattagttttttttatggatttggtatttatttatgtgttttggcttgcacctttataatttttgtagcatcaaccttgtgtttgcattgtgttattcaacggattcgattatgtttttttttttaaaacaaaacaatggaaaactaattatggtaagtgtttatgtaagattggatgcttgggatttttgtccgtgtataataattataattaatgattgtttgaatggatttagattgatactttaattttgtgtcttgtaattcgtacataacgaaggctatcaccagggtcctgtttggatctcctggtaaaaattttcgccctgtcacatcgaatatttggatacatgcatgaagtattaaatataaacgaaaaaataacta

SEQ ID NO: 33305 - DNA, 993 bp, Oryza sativa
tggctgcggtctgtcacaggatcaccttatctgtgatgggccaaaagacaaagctgtcataggtgaggcagtgacgggttttccctccaacccatcactggtatcacctcacctgtgacgggccgcgtaattataagccgtcacaggtgatgggccgccacctgtgacggatttgttttctggccagtcacaggtaggtcgatacttgtgacgggcaactcaatttaagcccgtttgaggtatgaacaacacctttcacgggctttgtgtacctaacccgtttgaggtgtgttgggcctataaatactccccaaactgccaactgctttccatctcgaccagtttactgtgcacaaatcggttgggagggtagggggggcgaatttttgctaaattgaaggtaaaaaacatattattctcccttcattctcagtcgatcatcatatatttttcttcctatgttgttgatttcagatggaccgtagtacttgaacatcactacaatgaaactcaacgacacgcatactcgttctgctgggagaactttctgcactgggctgcataaaccatgtatgagacccgcatatgggagcgacacaacaaccacgctcctcgccgttctcccccttctctatgccgctgctgtctgtggcatgttggatggagaggtcaagagccatggcggaggcagtgtaacacgcttcagtggacagaggaggaagaagattattgggggaacgattgtgagccgctagatgagattggacggtggatgtgcaggaaccaatgttttaaatagcgggctaagccatttagcggttagcttcttaaacagctatagcgggctaaatggagctatagctgttaaattgtacatgagagcgaatagttagaacccttttcaaacaactatagcgggagatagcggcagctatagcgggagatttaaaaccctgcgaggaactgcacgcctctgacgttgctcttgcacgt

SEQ ID NO: 33306 - DNA, 1516 bp, Oryza sativa
ttgcctaaatggtgaagatatgattattagatatcgatccgtaaacaactgagaaatatatagattatcgagcattagaatcaacatttggataaggcctgctttctaaattaaaattcatttactttggaacaaatggaatggtagtaagggcttttacaatgcatatagatgtcattcaacatcaacttgccacataaaagatttcacgtcattcaacatcaacttgccacataaaagatttcacatcacatctgcttctcccattaccaagtgaagaatggaaatcccaaatgagacacgagttccttattaatattcatgagggatttttcagggagggggagaggaacagcgagcgttgtacgttgggagaagtgttgccccatgcgatgccctcataacccgttggagccagcgacgatgagctgattcgaggtggtggcggtcgtcccgagttgctccactcgtggttgtcactgatcgaggcaagcccaatgcctgatctagcgagctcgacgaggcagcgacgatagcctagtgagagacgtgcgcgggtgaggagaagggaagatggaaatggtggacgaagaggaggcggcggatctagcgtttaggacctcattgttgtccccattccgtactgtcaagctcgttgttgcccctcgaaccaaccgatgttatcgtcgtgatcgacctatgaagaagcagctcgacgacgaccgcctcgacctgtccgtagccgctccgtcggagctgccttgacctcctcgtcgcttcttttcgtcgtcgtgtcaatctcctcgatgttcacccggttcaaggcgatggcactagggagctcgttgttggagatgggggagggacatcaacagcaattttaggaaaggaaaaagcgactatacctcccactctctgccgctgagctcatagtagtccacccttcccacatcaccgagctcgtcgacgcgccgattagagtaggagagccaccgaacagtcgtgggccatgggaggacgagataagagctgagatgcggtcactgccgtgggaggagtcgaggagagaatcgagagagtgacggaagaggggaaagaggggattttattttttttctagattctggtattcattgttaaattgtgtacttccacacaaattgaaataaatatgagagctagaatagatagtagcaaggtctgaaataaaaaaaacaatgccattcctagagccacttacattataaaaagaataattttagacttatgaccctagctagacttcgtggtacagacgtacagtactccaaggctcaaatgaagatcctgcactgtgagtgacggtcactcacgttgccacacacacatgcataatttccgagctactagcactctagcagctgcaaaccctagagttcacgggccacaacggcgagctcgccactctatataaccacaccgccataaaccctagatcgatcgcacaaacacttctagctcctcttcttctcccccc

SEQ ID NO: 33307 - DNA, 578 bp, Oryza sativa
agatatatcttctatctgagttttcaattggtgataacaaagtatgcaaccaatcagttaaatcattactaaaagttcatttcagccctgcagtgcttatctttccaaaactgtgtaactgtactatgaattaagagatcatagtagagtatagcacactaacgctggttgaacttctctcttgtttacaacattactccaaaatcatcttcaagaagaatctaacatgctatacacacaggaactaaacctatctcaaagggaaaaaaaacaatgacaaggtcatccacaatttgtcaattttagttagtgtaactagtaccatgattcaatcaatagtaactgtgttgaaactagaaacgatatcatactctgtaagtcaaaactattcttgtgatgaaagcacatgaacgtataccattattcgcatatggcttgctaatgtgatggttcttggtacatcaaccatatctgtgcaatagtctaggttaattaggcaatgccaaagtgcttagaaagtaataattctatatctaaataatcaacttgtacttccagttccagtttttgctgacatg

SEQ ID NO: 33308 - DNA, 1086 bp, Oryza sativa
tatagggcgaattcgagctcggtaccctggtgctgaaaaatatcattgtatcaaaaaacaaaattatagtatatatgtgtcattgacgtgtaggttcagtcctcacgcgttattcttactagcataacactactaagttacaacggatttcttttaataaaaatagctcattgtatatattttttgaagcccataacaaattatttttattatctaatatattatatatgattatgttaattttgctgttactttttaggtgcctattgagctagagctcttaggatttgtgggggttaggaaataagcaaaatctctcgtttgtgtgtcctacaaagtggcaggttattactagaaaaaaaatgctcgtacgttgcaacggataaagattatttttatcttattattattatatggtttagttaaggtgaaattcactgtgagaattcgtttcgatatatatttttctagaaaatcataagctgcaattagaaatctggtcatctcaaattagcatgcgagctttttaaaaagacttcttatacgactctttctgtatttccaaaagtgaactaacttaaaacccgactcaaatacggatctgtatttttaaaagcgaacgaacttgaaaaccaactcatacacagatgacggaccaaaataccgacaaaaatatctttaattttttgtaatagtagagatagagattacagagtataactatagatggcgatgatatttgctattcgcgtgaaattacgattgtacttttttttgagttatttgtgtgttcatgggagtacttcctccaattgttgtcctgatggattcggtggataacagtggactccatgcaaccttctctctggatcctcaggagcacgtcgagcaagtcctcctcatcttccccggaggctctgttttcttggtgctccgcgataatggcgtccaagaacgcgaacacctcctcgcggggccgcctcatccggcgaggcatcctgctgacgaccatggcaaggcgcgacgacgggtacaggtccggcaagctcggcgtcacgaacagcttgatccctcgctcgagcatcg

SEQ ID NO: 33309 - DNA, 1441 bp, Oryza sativa
ccggtgggctcaagggtgcggcggaggctgccgacgacgatgacgacgacgaggcaacgcggcggccgttgccgccgacgacgacgaggaggcggtggccgggagcagcaccgccgctgcctccacttgaccactcttcccctcctcccaacgctcgcgcaaggcgtccgggagcggcgccgccctccccactcccggatccggtggcggcggctaccccacgccggatccagtggcggtgggagccggcgcggcagtggcggcagggtgccccgatctatggttaggatttcaattttttgaaattttatttttttttcagatttttatttttccgtgcgggtgacataagcacccgcacgagaaaatcacgattttcccagacagcccgctccaaacgggcgaatctaccgcacgcaaaaatcaaaacaaccacacgcaaaaatatctattgtagtagtgtaaaaataatagaaactgatagtaaatagaacctgtataacgcagataaaatttattattttttcttcatgtgtagatcaaatttagacttcatatttatatagagtcttatatcgtcatagtttatcttatcaaattttatgaattttttatataactatttgaactacatgcatacacttaaatgttatggcacctgggtgtagaaaatacttgcccacgtagactagcatcatgtgcaaacacagtagcaacagttctttagctagcttgagaaaattcattgcaatggcaacctctggctacacaactgcctccctaggctcccatcggatggcctaataagaaaaaaaaccaaattttaaattttcaaacttaattttgagaatgactttgagatattttcaacgtagatttttttagcattggcttttaaatcacaaagaacacatatataaaagttttacctacaaattcaatttttattttctaataagccgttttggcttattagaaaaaaagcgaaacgatggcgcccctaaagtccctatggtggagctttagctcgtgcttgtcgcagggtgactgtgaggcagagagaagttggggaaagaaagagagtggtgctaacaggtggcactcatattttggtggtgtttgtatctcctgaagattaagataaagataaagtgtttcaggtaaaataaggtgataataacgtatgattaattgagttttaattattataaacttaaaaaaatagattaatctattattttagaacaactttcgcatagaaagttttcgcacgaaacacatcgtttaacagtttgaaaagcgtgccacgaatattcaaaactttatccactctttgtggtggaaacgagacctttattttattttactgacagatgggcagtgcagatgttttctataattcagcatgaaaccagcaggggcggatcgaaatagtgctaaa

SEQ ID NO: 33310 - DNA, 633 bp, Oryza sativa
cgggtgggttttgtggtgatttggcgggagggtgtgccagtggcacgggttcgcgccatgtgtaattatacttgaaatataatactactagtaataataaggattacaaatggttggctccaccatggtttgaatcttttgggattttcggatttaaggttaccccgagtacatgtaagaaattccactgtagccgaaaatctccacattgttcgaatttaacaggaagttgtaaatttcaagaatttgcacgatgtcggatactcactccgttgaaaattatagaggtgtattttgtgttgttacaatctctccggctatagccatttgtaaatggttctagctatttgctctcatgtacaattaagctgctatatctgtttgagaaaactaaccgctaaatgtcttattccgctatttaaaacattgttacgattaggctttgattaataattactttaaatggacataatttttgttgcataaaaataatgtcattatttagaattatttaagattatgttttttataattggtccacgtctcgtccaaacgaaataaaataaattaaatacgtcttattttcatggccggagggattactattttagacatcagagtaactgattttgg

SEQ ID NO: 33311 - DNA, 500 bp, Oryza sativa
aaaccaatggtaaatctgaacttatttaggctgcgttcgtttctccaacaagagttggatgaaattttggatactcatggcacgttttttaaattgctaaatggtgcgtttcgtgggaaaattatatatatataaaaattgctctaaaatattagattaatatatttttcaagtttgtaataattaaaacttaattaatcacacgttattatcacctcgttttgcgtaaaacacttaatctttatctttatctacagagattcaaacaccaccttaggtgatgttcttttctcctgaagatgaagattaagttttttacgcaaaacgatgtggtattaacgtatgattgattgaattttaattatcacaaactttaaaaatagattaatataatattttagagcaacttttaatataaagctttcgtatgaaacgcaccatttaatagtttttaaaaatatgtcacaaaaatcttaattttcatccaattgaagaaaaga

SEQ ID NO: 33312 - DNA, 544 bp, Oryza sativa
tttaagttcctttggtttaagaaatttaatactaaatccgattaaaaaatcttttaaagaaaaccttaacttacttaccttggaaaataaaagttggactccttgactgcttctattgattggtgccaccccaccggtttttttttttcttagtaaaaaaaaaatacggcgtactccgtattatgggtttgttcggtagcccaaattttacagccgtcttgctgcattggacaaccaattcgttcggctgcacacaaactattgctccctacacttgctagcttcaacatctataggttgtagctactattggctagctgcagccgctggttgtttgcgctgtagtaggtcttccgagttccgaataagagcatctccacggtctctctaaatttgactctctaaatgtctatttagccaactctccatttaatttagcaaatcaaactgtattttactccaacagcctctctattcatcctctctattctgagtctatgataattgggcccacatgtcagcttcgacacctccttctccctca

SEQ ID NO: 33313 - DNA, 579 bp, Oryza sativa
ttttattaaattctgaaatgtttgctaaatgctgtttatgcaaatggaaccctattatgccatcctttggtatccttgtgcacttgcatatttgctgcgtggcttgctgagtatgtcatatactcaccttgcaatcattcatcagaggaagagttctacaatgatgctgatggtgtggaggattaggtgtagccttggtcaagctgcctgtggagtggagccgtctgcgccgtttatcttattttccgttgcttagatctttattgattgagaggaactatctacctctgtaatgacattttattcgcctattaattagagtaataattgtactctattatcaatttgttattgtgtgcctcggctgattcctggacgagggttcacacacatgtaagcgtttggaattttggatagaaattccgggcgtgacaggcgagcccaactccaccgttcaaccacgaagccaccgcacgccccctttgtcaaggggtgggcaaggcgggagccggcccacggagaggactacccaagccttgatcactcggggtagttctttcttcactccgaggtggtgaa

SEQ ID NO: 33314 - DNA, 512 bp, Oryza sativa
agctcggtaccccatttaaagcggtctatgcaaccgcatcatgtcacatttaatgcggcgtgctgcgcatttgaccggtctgtgaccggttgaatgaccgatgggacggcgactgtgtacccccgtcctgtcagtgtgtcaggcggtgagcggcgtgctccgtcccgtcccatcataatgatgaggggctttacagcctcttaccccagtcagagctggtccaaccactctgaactgacccgggttcccgttttctggtgtgaacgagaacctggaagttctcatccattaaatgacgaatgacaagggcgccatgcatgatttgatgggccccgcgtagcaaccgacgtgcagatagcttctaggctaaggcagaagacatgtaattaatatagagaatattttcccttctccctaggtagcactcgcagcacatgtagtatcctcttagagtataaaaggaggaccatgcctagcgaggaggggggatcggactgaggatccctgagcca

SEQ ID NO: 33315 - DNA, 595 bp, Oryza sativa
aaaaaacccgaggtgggccccccaccaccaaaaaaaaaaaaaaaaaaaaaaaaactgaagaaagaagagaggagaggaaagagagggaaatgttttgtaagaagagaacctcgcggggtggcatcagcccacgcaggccctcagcattcagtgtcattgagcatgtaggctgtgcaccacctgtgctacccatgagacgatcccaggtgcctgtggaacgcagagcaagaacaccactccctccctctccacctgcatttccatcttgatcatatggaggagaaagccttagtttaaagctagcctgtctttgacactttcctactccctgtcaatctccattttaaacaatgaaaggcccggtctcaggccataactttggcaggtaacagtgtaaggttagaatttaatgatgccatgtaagtttcatatatatgtatgtttagggttgccatctatgtaagacaactgaagattgttttttacttacactggtcataacaacttttaagaatccagttcaagtgagttgataaaaaggtcaagtccataatagcgcaggtggctcttagacaggaaggtggtgcacatatga

SEQ ID NO: 33316 - DNA, 603 bp, Oryza sativa
tccagacctgtgatgacatcagacagcctctgagctactgcagagactttcctatacctatggaccacttgatcggtgacattctcaaaatatatccaaaatctgactatttctcaccacccccagcactggcatgtgccccaggccaccacctcctctccccacagggctccccgctgctgctgcggcccctaccaggctattctccacatggtagccaaagtgaacttctatgaacttctacaaacagatcatgcaactcctgccccagaaacccccaagccttctcttcccactctgtgaaatggccaaagcctttaccacatggatgaagtcctctaagacctgggcctggccgacttcactgacctcaccttgcaccactcccattgcctggaagcccctcaaagacacagagcacactcccttccgtgggatttgcacttgaagttccctctgcctggaacttgcctgtcttcctcctttgcttacttcagggctctgctcacatgtcatgctattatcaaggacgtgcctgacaccctgtatgacagcactgtcctgcagaaccatctatgatatggaaatgcgttataacctgag

SEQ ID NO: 33317 - DNA, 656 bp, Oryza sativa
  unsure (1)..(656): unsure at all n locations
gatagaatcgcattactatatggcgaattccagctcggtacccatcagctggcaggatgccactttgtttcccatctctttctctgttttctcatctcttcttctgtgccactaccacgggtcnccnatcgggtaagtaagttgccgaaacctgagccaccgattactcactcctaccccattagatcatacaccggagctcgtaacaaccaagctccaagaccatggtgtcagaagatctctccatccacaaacaacccattctcaaacccaccgactcgcccaccaagctccaagaccaaatgtcagaaggttccagggatgtgatcattgttggcttccaagcacgatctagctgatctcagtcggaccgttgcggtggccacatcacgcatcacatccctggaacaactccagggcacgatgtcatcatcgtcgccacagataaaacaatttattagntncagcgggggaactttgtcttcccccccccagatgggtttgatcaattcaatncttttaaccttggctaggagtggagaaataatcttttaaaaacccnaacgggttcgtgttcgccngtggnnnaaatagaagggggggtggaaaaggttcaaccccnnnaaagagggggaggatgaggggaaggggacggg

SEQ ID NO: 33318 - DNA, 513 bp, Oryza sativa
tatagggcgaattcgagctcggtaccccttcgtattaatagagagttaaaatcactatactccctgtctctaagactctaacgtctcttccattccatggttatttcacatagatttagctcgatcgggaaaacacgaaactaggggttcggagtttcattttccgaacccccaccctacaggtttttttttccccaagaatcgccaaaatttaactctgaaatttgatccttctgctacgttcttgcagactagcagtttttcacacctggccctaaaaagcctctgaaaaaaatttctcataatttttcgcattgacttagtgcataaaaacgatgagaaaaggggttcgcgagaataaaactccgaaccccaccaacacttcttttcactctgaaccttctgttccgttcttgcagatccaacgatgcctgacaaaatgttcaggatggctgaaacgatgatgttcttaaacgatgagagagaaaaaaatgaaacataatcccagttaat

SEQ ID NO: 33319 - DNA, 662 bp, Oryza sativa
  unsure (1)..(662): unsure at all n locations
attgtgatcccattactatgggcgaattcnagctcggtacccattaaaaggttggttgaaattgaaacgatgtgatgaaaaaattgaaattttatgtgtaaaaaagttttcacgggataagaaaattggagggttaaaaaaaagtttggaactaaactcggccaaacgaactttcgctagcttaaaacgaaagcttcctgagatttttcatgcacggtatagtgtccctttctagcctgtagaattttggatgctctggttgaacgtgcaccgactgttgctgttacagtgagatggattggatccctcagctacctatgaatccctgatcctctctgatcaatgagagatgcatatgattgagagccttttttccagacatcatcctgttcctggttggtgcatccgtaccaggggtggggtgccactgccatggtgttcatctctcattgtntntcccctgggnganannnaanacatccccccccccagagtttgagaggacgggggggttagntgcccagtcttggggggggggggggaaaaccctttttaagnttttnnnnnnttttttgttcccaaannnaaagaggagaggggggaaaagaatttntnnaatttnnccannnaaaggannnncgggggggtgccatgaaaaaaat

SEQ ID NO: 33320 - DNA, 667 bp, Oryza sativa
  unsure (1)..(667): unsure at all n locations
gttagagtacatatcactatacgccgaattcgagctcggtaccccaatggcttaagaaaaaaaattatgacggacgatgagcctggtgtacgtgtggtgtggatcgtgtgatcctacgtgcgccgtcggcgtcaatcaatggcggctaggctccgtcccataaaaaaacaatctaatacggtatgtgacaaatcttagtactgattagaagatttatggtattaaaatgtgttgcatcttttattggatttgtttttttatgggatggagagaatagttgagcagccttatatatacgtgccgtgcaatatttgttttctgtcaaaaacaaacttgtgcaatgtttcatatagacataagatacgggataaagtagagaagatattactatctttgtcctaaaatattataatctagaatgaaatttgattcatcctanggtttgtgttagannnnnnnnnnaaggggggnnnaanagggcccttgcccctcaggaagtttggatgcagtttcaactagaattcnctganggaagcaggtggccctcccatattcttccatttnnnnnnnncnatggttattnntattgnnnaagcgggtggtgaggtgttgtgtaaaannccttnnanntcccntttcncctttccaatgagagtgtgttatattt

SEQ ID NO: 33321 - DNA, 611 bp, Oryza sativa
  unsure (1)..(611): unsure at all n locations
agatagtaatcgcatctttataggccgaattcgagctcggtacccgttgcggcgtggtgccatgtggtgtcncacagtggcgatctttggcatggaggggtttatagatgaagaggagtaaaaaagagaggggagtgtgttgatnatgatgagatgagagagagtggctgtgtgcgggtgggttttgtggtgatttggcgggagggtgtggcagtggcacgggttcgcgccatgtgtaattatacggaaatataatactactagtaataataaggattacaaatggttggctccaccatggtttgaatcttttgggattttcggatttaaggttaccccgagtacatgtaagaaattccactgtagccgaaaatctccacattgttcgaatttaacaggaagttgtnaatttcaagaatgtgcacgaggggggagtctcacttgggtcaaaatatgnnnagttttagtgnggggggggggttcccccctgnaatgggattggtaatggttttacctattcccccctttcctctctttaaagggtgatatggaggagaaaaatttatngggtcccccccccttttgnnnttgtgggaggggaggggtggaac

SEQ ID NO: 33322 - DNA, 580 bp, Oryza sativa
  unsure (1)..(580): unsure at all n locations
atgtatctccnagagtagaacaactcattactatcngccgaattcnagctcggtacccagttgagggggatcaccttctggtgtgtgctctttgatccatgtactcttctttttattggttgnaactatgctctcttatttggggggtctcttaatttgcacaagtgatcacttgcatacaaatactcaccaataattatggaattggttagtacgtaataaatccataccgctagatttggtggtaaacttttgtaaaatttatgcaggaattgatggtcaaatttcgtagttgaggaccgtcaacagcgacgatggttacgatatataggagtaacatattttggtcgggtcatttctcccagaccccaattcggcgatgtcttcctcatcggaaaattcgtagcatcagtgtctttatgtagattgnnacgatgaccattctcattttaagtgggccaatagttcggnnccntgtggagnncnaannnccccccctgccaggtgtgtgttgggtagagtattnnttcttttcaattatattaggtgataggacttggataccaaaatctcccttcct

SEQ ID NO: 33323 - DNA, 567 bp, Oryza sativa
  unsure (1)..(567): unsure at all n locations
cggtgtatanatagtagagcaccctattactataggccgaattcnagctcggtaccccaatcaacctcaattaaagaaaaaggatccagaaggagaagacgtttggcttattccccagttgagctgcctgtgggagtggagctgaagccatcgctagactgttattccgctgctgttttcttttcttttgtaagtatgtaacgttattattatgatggatttgtatattaaattatcagtttgtgtacctcggctgattcctggacgaggattttatgcacaaattagttcggaaattntnagtgaatttccgggcgtggcacctcctcttctatcgcctctgtcctggcgggcttcttcctcctctatctccccatctcccctctcttcatctctctcccctctcctttctcttatgggggtgtgnnngtgaggggggggaaggnagggggaggggggggggggagccccagggggaagggagagggggagagccntgggggggggggggtgggggtggtgtgaagtaagncgtgaggggaggnnaaggtgttggccaccttcctt

SEQ ID NO: 33324 - DNA, 657 bp, Oryza sativa
  unsure (1)..(657): unsure at all n locations
tcgtgtttcttnngatagaatcacatttctatangccgaattcnagctcggtacccctattagacgtgaatgtctatttttttataaattttttatgacatttactagttggttttaatgaatcgtgaaaaggaagtttgtatgggtattatatgtcccctaactaggtctctttaggtgttgatatgatactccctccgtcctaaaatataagaaccttgtactggatgggacacnnnctnntnnnnnnnntctnctcngttntttntccaccttcttcttttttcgaatgccccggtatctatcactctctaatgtattggctcgctttgctccttccacaatctccactttgtggaaagtccttcccctttccttaccttaccgctccctttgttcagcatatacctgagttctctttctaggggaggnnnnnaagggncagggccgggacccctctcccctggggctccggggagggggggggggcccccccccccagagggggggggggggggggggggggtttttngccagttcggaagtattaataagagtatagcgcgcgcggcccccccnnaaaaaaaagtatgggaaatgtaaagatgatattaattataatttgcttataggcggagnatagaaggggaggcatga

SEQ ID NO: 33325 - DNA, 661 bp, Oryza sativa
  unsure (1)..(661): unsure at all n locations
cggttctnnaggtggagctctgatgacaacngcgcgaanccagctcctacccatgtgtttggtatttagactattcatcaatagcaaccacccaaagactttaactttctaaattgccttgcactaccataatcagggggaattgnaangnggctgcatagctctaattaaagttcaaagcctacgatttctgagaagaatacttcaaattaccccaaatgtattcccagacatctctatcatgagacagattcacatcatttaaaatgactaacaaatagttcagctcttgaaaagcttaatgagagacgggtaaatgaaagttatcctcaatatacgtaaagagaaagttatgcaaacctttttcaccctcgctttcatatcaactacttcctccgtttcacaatgtaagtcattctatgagtggctatanngatagtacnngtaagaaacccaccactccgnnagctctagacggggggagggggcccccccccccaagggggaaaaaaaaaaaaaataaaaaaannnnnaggtgactacacanctagtttattttagaggngtttcccccnnccagaatgaanagaaannntagaagttataagaggagaggggncgaggggagtggnnccggctcgagggaatggattaggtgcag

SEQ ID NO: 33326 - DNA, 673 bp, Oryza sativa
  unsure (1)..(673): unsure at all n locations
cccgctattnagatgagagcgacctattcactatacgccgaattctagctccgtaccccttttgtaaacatattctatctatataagctatctactataaccaatcggatatacatgccatatgggtatgcggtacccataatctttccaatttcattctagctctgcccctgtctacaatgtgggtcttaaaagacccataaagttccttatgatgaaccttatacattgtgagacttaaccatgaggcattgaatattaagattgaccttaagcttgtggctcacctttaggaataaaataattggataaataaactgcacacgtagcgagtgagagaataataacaaggctctgtcataaaaaacgtgccatttcttaaaaatggttggagaaaacaacggaagaaaaaataacttagtttataaaaacaagccgcttcgaaaaaaccataaagaaaaaaaaaccgttgttaaagtaggagggtaaaggaaaccctccccccagggtttnagtgggaggggggggagagggaatnnntcnnttgtggtggtcgcggtaatattgaacccactttttttttaaaaaaaaaattannaannnctgtagtttttgtataattatttgccaanaanatgaatannntccttcttctaatggacccaagcgtttt

SEQ ID NO: 33327 - DNA, 671 bp, Oryza sativa
  unsure (1)..(671): unsure at all n locations
cgtgtgtgtnnnagtgagtaatcgcatctttataaggcgaattcnagctcggtacccgtattggtgacgttgcttacaatctgcttaaaattccttaaacttagattgggacagtacgtaaggtttggttgatttctgggtgggtggtactgtctcgatcgatataggttttaccaggtacttatgtcgaacgaacgggtacgaccacagtttctagaatggggatagacctagttattatgttaattaacaatatggcacctctgtatagtggttcttatttttaagtcctcgcgcaggaggcaactatagcagcgaaaggcaacttttaaccattaccatgtacaggtaaatggtttgtgatactcgagtataaattatatggtatatttctaaaccctaatcgagatgacgtggtgtcatacgattagttccccttaaatatctcgggaacgccagatgtccaatttnttataaggganaaanaancaaagacacacccctgagtttacagatattcacataaaaaatantttaccgcatagaaagggtcttggaattctaattcatgttgctcattnncagtttccnccnnnnccnttggtggggggggggggggtggtggatttttttnaaggtgtaagataaaanaaaaaataaattggacagaa

SEQ ID NO: 33328 - DNA, 658 bp, Oryza sativa
  unsure (1)..(658): unsure at all n locations
gctgttannagatagtatcacatgtctatangccgaattcnanctcggtacccattaaccaaggtagcacatatctagccaagttattgcaccaaaatattaaattatcaaattcttgtattaaagngcacccacttgctaaggtattgcactttagacgtcacattcttcttgtcctaaatagaacccacgtatcaacgtgttgtactgtgggtgtaatttactcttttgataaagtaaaaaactgaacttatacatatatagcaatgctatcttaccaatatttggtaactttacggcttactcggtttggaggaatttgaatccataggaataggaaaaatgaaggaatataaatgtttgtacacatcaatctattggaatttttctaagagatttgactggatggaataattcttatgtttcctctatataacttgtagaaaaggaattttntatntttagnancctaagggaggagtaagagggagagcctcnncaggtataacgttttttcttgttttanccanaaagancagctagtggtgcacgatgcatcanttttgaaggagaaccttcaagccgcnnacannnntagcagagtgggtgttgagtctagataaacctttcccnntttancataaggttgttttagagg

SEQ ID NO: 33329 - DNA, 661 bp, Oryza sativa
  unsure (1)..(661): unsure at all n locations
cgtgtttnnagtgagatcacatntctatangccgaattcnagcttcngtacccctatcaaagagacgtagaggatatatatcgatgaaggagatattctgaccagaattaccggaaatggaaggaaaaaagggccaattgcgtgtttgccactagtttgaaccggtatcgtggatttgccactgtaaaaagtgtaattgcatatttgccatcaaaatggttggaattcaatatacttgctattggactgacagtttaaataaacaccattaaaaaattggtttttatgaaaattaagacaagaataccccttcccatgaaattgaaagattaacacatcatatgattcattcaaaatcttgcaattgacaacccttactacacaacagaacattgctacgaggtcacaaaatcttcctagcaattcctgctgctagtgatgtagtatgtgttggctttgnttgtgagcnccaaggggggaaataggaagaggggnnnnncgggggggtgaggaagatgggtgtggntgcnntttgagagnnaagaanaagggggattggttataggtaatgttattcccnncnncnncttaggggnaatttnnaaaatttctttttttttttttttttcactcccctgtttgttttgtttgtttgtttttt

SEQ ID NO: 33330 - DNA, 637 bp, Oryza sativa
  unsure (1)..(637): unsure at all n locations
gggtanatttgatcgttacttaggcgaattcactcgtcccactagagtaggtggtgttcaaaacaaatgttaccttcaactttttaattgtacctaaaatgggacggattatttgggcgtgaatgggggaggattaactatatgttggaaaatagatttatttaatattttaaaatacttttaaataattttttttcacaaaatatgtcgtttaacagttaagaacatgctcgtgataaacgaggaagtcatgctgataaaaactcaacctaagctgattaataaccattttaggacctgttgaccaaggttagcagtaggggaacaaaaatagtgtattcaaacttagtggaagctacagcacttagcaactactgttacaaccgctattgacttactgcgcttaaataatacaagatgggtaccccgcgtgttgctaagggagaatngngtnataaggaaananannaancccaccccccccaggggtacgatacgagnntnnnangnngaagggtgttagtggagggcttnataattatctatanntcataaanaaaggtttgtttnnnnnnncagatgggggagggggaagtaatcccttgataaatnnaaaaannaagggcgtatttgtaaa

SEQ ID NO: 33331 - DNA, 565 bp, Oryza sativa
  unsure (1)..(565): unsure at all n locations
attgttgaatcgattactatgggcgaattcnagctcggtacccccgtttttctgtttacgaatgtttctttaatttctaacagaccaaatttggctattttttataagaaatattttggatactttaaatgatcatggcatcttttaacttttaattatacgttctatttgtatcattacgttatttatgcatgattaaaatcacaaattaaaatttgatacacctgttgactataattgcacttgtaaaaattgcattcattttattttgaccctttgcaagtcgttcaaacatagtaccacataaagagttgaaataccctagcccgtttaatccatttattctttacaaacactctcaagccaccacatggcactctaaaaaatagagaaattccaagaaattctaagaacaaanaaaatatttatcccattattttaacttaagtcggtggacgnnntaagggggagggaggaggaganncaaggagagagggagggtggggaccgttttccccnnnaagaccaccaggtccggtagttatatgacaggcagcttaaattc

SEQ ID NO: 33332 - DNA, 609 bp, Oryza sativa
atggctaattatagactaattaggctcaaaagattcgtctcgcgattttcttccctaactgtgtaattagtttttcttttaatctacatttaatgctccgtgtatgtgtctaaagattcaatatgatgttttcgggaaaaactttttggaaactagactgggcctcactggtgcgcaccactgcaatcacaacctcagacataccacaaaaggaaaagacaatgttgcaagaacaggctgttgttgctgtgattgccagttactactactatctcacacaggcccaagtcaggcatcttgtttcccttgcaagctacacctaatgatcaacaccaccacttaatcacactactcaaaagcaaagatcagaattaccatagtagtagtagtcacataatccatcagcaaagctgaaaaaagcattaacacacactgttaagcatcagacagaaagaaagaagcaaagctaacgaacccaaagaattttgttttgccaaagaagggcagaaaaacagcacagtacagaataaccaaccgtcctggaattccattgtttgtctactgtctctacctaagaacatcatgaatgcactcactacacactagtac

SEQ ID NO: 33333 - DNA, 1034 bp, Oryza sativa
ttgatttgaattcggttagaattcaaataaaaatccaaataaattcaaatgaaagtcgaatgcgaaagtcgattattcgcgaactaaggcaaacccaatttcgagttttaatatcctaaactattttgcgggtataaatattttgttgtcctaagtttttaatttaatctacccgagcattatatccatataataggttagaaatttctatcgcgagctaaatgtcggacgaaatcctagaaatattatacgatttaatttagtctatgactaaatgattaaatataacacatggctaaaatccctagtaattaaatccgaatttctaccgtgaattgattacttatagggattacccaaaaataatctataataatctataagaattcatctatttgtttagttattaattacatctaaattactaccgcgaattgatttcttatagaaattacaaagaataattaaattttgcaattctaggaccatgattattctatacttaaattctaattattttaaattttctaaactattatcccccctaattttcttcctaatttttctatttatttttcctttttctctttctccctttttttttcttttctcttcttttctttttctttcttttctctctctgctctccctctcggctctcttttcctctctctctctttctctctctcggctctcttttcctctctctctcggctctcttttctctccctctctttctcggctctatcctacccgagcggcggcggtggacgcaaggggaaaggagggcggctcaccggcggcggcagcggcgacgacggcggtggcgacggtggcgcacggcggcacagaagcggcgacacggtggcacaggaacggcacggcagcgcgggaacggcggcgcggcggcacgagagcgacggcgcggcggcacgggaacggcggctcggcggcacgggagcggcggcgcagtggagaggggagaggggaggaagggtgagatgggatgggggagaatggagaggggggggtat

SEQ ID NO: 33334 - DNA, 649 bp, Oryza sativa
cacggtacccgggtatccaacgataagctttgggccgcacctcatggggtgggtcgagtgtcctaggcccatgcgacgtacttgtaaataaagaaagagagattccctagataagatataaatcttagggatcctgcatatcttttatagatatagaatagagagatttgtagatacttttcttgtaaccctccccctcatcctatataagagggggcaggggtcccgagagaggaggtcggatcatctccacaacccgacatatcttctttttttggcttctcagttcatttttccacatagggaccgagaaaaacacactggattttgggcactggatattggggattattttttttcaagggccctgaccatcattaacacctacggtaccatctttgtttaaatttgcgcaccccattaaatatatggccagtcataaaaatcgaccaccttgcttaagggccttatatggtcaagcgatcccacggtgaggtaagaatattttattttatagcatagaccagaaagagagaagaaacagaaaaaaaaaaacgtccgagcggttaggtagcagcggtgagcacacgcggcagtcctctcgtacagaaagccgcactactgggtcagaacagctccatctttataa

SEQ ID NO: 33335 - DNA, 654 bp, Oryza sativa
gtttttaggggcatggctacatcgatgcgggatctatatgttttaagacattacatatatacttcatccattagagatgcattcttatcatattaagtatggtatatttatactatttatacatgtgaaaataagtgatgaataccgggttatgtagtgtagatgaattttttagtgtattaataatgtatcatttgttttagtggtactaatacagcttcattattaaaagttcacataactcttaaaacgatgttagtaaacaatgatagtaagtagtaatgacaaacatcccgtttatatatgatcaggataaatggatttttatttaaatctaagagacatttttatcacattagtagtatattaaaatctaccatctattttatggtaaatatatttattttttattgtaggatgatctaaattctcttacactatatatatatatatagtgatgtatgattctttttagcattttttttaataacaaataagatggctgtgcatttatgcgaaattcctttccgatttatattctgaaaatgttctatagtttatattccgttgttatagtgtttgaaacaatacatgcatgcacgaatgcgtgggctatctttttagtttatagttaaaaatgtttatattttgaga

SEQ ID NO: 33336 - DNA, 809 bp, Oryza sativa
ggccaggtgggtcgccacgtgaaggggggtgtgctcttgcctctcgcttacgcactcgctctccatttctctcctttgcgtccggcttaattaaagcgggtttttcctccttattcttggctcttgtttttttttcttatcaacctaacacatttcttttttttccaagctgtattgaggttgctgacagctttgcctttcaattttacttaagttcatgaatcatatatcatattttttgcatgaagaaatttaggtgtagtttggtcagctataatgtcacgattggcagtggtgtgttagcacattattcatctggtctcgccactagcgtgaaacaaaactaacatagcggttcactgtttatgtggtctcgccacctgcatcaaacaaaactttcttggccgtttattgtctgtgcaatcccgtcatctacatgacacgaaacacttaatttcagaaagcagaagaaaaggtttattttcggtttttgttagagaggtccagtcgagaaacagcacacacaactattaccagaagcaacattactactactaataggaaaataaaaccaccaagtaatatggaagaaataatatttgaaaatatgccaacagcaacgacaagtaaagcaggaacaggagctggtgagtggggcccccagggggcgtgcctgcgtagcgtctgtctccgcgccagctgtcgtgcgggccccacccgggttcggctgcctttcttttctgctgccgtcgctacggacggtccggatcttgctacaccgaaccaaaccgatcccatcacccttaaac

SEQ ID NO: 33337 - DNA, 680 bp, Oryza sativa
agacccctgttccccgcatcaccttccttggaggccctcgcacccttagcactgctcgcaagagcacacgacctccgggcaagaggcccaagccagatccaggggccactacctctgagccgtggggactcaggtttgcgcgtgccagtgaccaccctctacctgccccgggatcctgcggatggctggaggactagactgacggactccttgaagcttcgatctcgtatcagatggtttttggataatatgcgagacaccccctcccttacctagattgacgagtagtttgatgattagttcgttgtatcttttggatgaaccttatttggactgcgtatgtatgcagtcgattgcatcatgattcatgtaccatttgtgaaactctgtgatgttatttatgatatctattgttgttgtattataaatgagtttattccaccatgcttgcaaaacaaagttcatatcaacataactcccttaatgggataaagccataggagctagttagaaaattaggatacttactccatcaacctacacagatggcaagccgacgttgggcaacaaccagcaatgacgaaactcagacacccgacttaaccactctggccggagttatggccacccaaactcaacttctgcaagctatcgcgaacaaccaaggcaaccgcggaggg

SEQ ID NO: 33338 - DNA, 707 bp, Oryza sativa
ctatgggcgaattcgagctcggtaccctttcttcatattttttacatatttattatcctattattagagtttgaaaaaaaaatttttttattaaataattcagcaattataacacctaaatcaaacaactaatatttatccgcttatatctttaaaattatttatgattaaatcttcagctaaagaccaaatttccacaataatttaactttgaggaaaagatgtcattttggattataattttagacttttgcatgccattcaataaattgtaaaaatatgaaataataacaatattatacacttcataataattaaatgatatctacaatcataaacgtaaaataaaaataactatgagtaatgttcccaaaatatttagttagaaagcaagagttatgctaaaaaataagcagctataccataaatcatgggatcccctaaatcatacaagtaatatttttcttatgtcttttgattattttacatttaaagacccatatttggggttatattttctgacttttgcatgtcattcaaacaattataaaattatgaaaaataatgatatatggtttatcattggatataaggtcacaataaagtaatgaccaaagttaaggaaacctaataacactgactattggtgcaaaaaaattacttctcccattcggatagttaataaatcaataataaattagtagatt

SEQ ID NO: 33339 - DNA, 586 bp, Oryza sativa
atctaaaccctcgcaactgtctgccaccacatccgagcggccgcatcctggtgaacgcagaacatcgaagggagaaacgggagcgaggggaagcgacctggagcacggaggggcgtgcggggaggatcaggaggaagggaagcttgcggcttccatttgacatctggaggtgcggagaacgagagagagacgagaggaatacgcgagagagaggaatacgcgagagagaggtggcaattccgggaaggggaagagataagggccttgtttggatcctccgggctattaaatagccctccggaatcttacgatttaggagtattaaacgtaaattactgacaaaacccattccataacccctaagctattttacgagacgaatctaacgatgtatattaatccatggttaacatatgattattgtagcatcactgtagcaaatcgcggattaatatacctcgttagattcgtctagcaaaatagcccaagggttatggaatgggttttgtcagtaatctatatttaatactccttaatagcaagaatccggagggctatttaatagatcggaggattcaaaccaggc

SEQ ID NO: 33340 - DNA, 725 bp, Oryza sativa
aattctaaatgaaaaggggcacttttccattctcagatatacttatcaccatttctttttacaaaaaaagatacttaccagctaccaccagactatatatttgcatccaaactttatagctaaattttattaatgaggttacgaatattttaaatataattgttgaagtctgttgcacgatatagcggtatagctatatacacaaaccttacttaggccccgttcggtagtgctccaaactccaactccagtgggagctggtgttgacggtccttaaatcataatatatgaccgtcagtacttgcatataatgaaataaaacatggtatccaacttagtggtaggtattattactaatcatttccactagtgttggtgaaatatgtgtatgcaggtaatttgaggtgaaaacacatccgtgatatgacaaaatgcacctctgcacatccaagacacgtttacacggattagaggccccataagtcaataaaaaccatttagaattgggccaaaacatagtgcaggttattagaggcccattaagcaacctaccagccaaaggagaggccgggaggacactttttgggttcggccgaaccaaccagttcggccaaacccgttatgcgacctttcaccgtctgcttccacgtggacggcttggattcctcccctatggcagttgcagggtgttttggtcatttcccatacccctaaccgtcatttgg

SEQ ID NO: 33341 - DNA, 595 bp, Oryza sativa
taccctttggagagaaaccattggtagcatcatctctcttttcaacttttttcttgacataatcagttatcactcttaccctttcgagacacatgtacgttaaagcgatctttaccaattttaaataactgtgtgtatccataattgaaaccgaacattaaaagagaaacagaaaagctaatatttatcaaaacgtcggattgaacagagcagacatgtacagatgtaattaggccctatttctttcaacttaggattattataatctagattattgagagtaggctgaaagaaacaaacaacttattgaagtagcttattataatctagagcccagcttattataatctgataagctcatttaggtaagctttttccagattattgggtgaaaaattatccaccatgccaccccactccctatttagacttaaaaacccaataatctaggctctaataagctaggaaagaaacaactaaccgcttattctactatagattatagcaatctagcttatagtaatctaactcaataatctagattataataatcctaagctgaaagaaacagggccttacaagaacacgtatatac

SEQ ID NO: 33342 - DNA, 509 bp, Oryza sativa
catgccttgaggaatggaattttactagctgaggtcacaagtggatgaatcatcactaagttagattgtatcgaagtcatcacaatgatgcaaaatggagggttctcgacgacagcagctgcggcgatctataatgaatgtgtggttctttctgaagcttctacattggtaactcttgtttactgtcctagagaggctaatttagtttctcacgagcttgctagagcagcctggcttaatccaccatctatttggttggaggagccagtagcttcaattaagcggttagtgagcgatgtaactgctctttgatctaataaagttatgagagttttccttttctaaaaaaggacggctcgtaaggtaaaaaggttacgtgaaaagcacatcaatgttgctgtggttgcagcaccggtgccacacgctcctcatcagcatgtgtgggcaccgccaggccagaccgttctgtacagctagcgtactggctttctccccttcccttccatggc

SEQ ID NO: 33343 - DNA, 3172 bp, Oryza sativa
ccattatatacaaaacctaagggtgtatgtggctaacccacaaatccacttataagttaaatatgggttagccatttacacgtaaaaaatctttatgtgtggtacattgcacctgatgtatataatagacagaaatatattttttgctactcgttccatcctaaaatatagcaccgtctgaccggattagacacatatcctagttttacaaattagacagaggttgcatcttatattttttcagatgaaggtagcaatagatttttaaacatatggtgcatgctctatcatgtacattttagaagggagaagaaaaaggaggtgccccttatctaagagagaacctacacaaacttcaagggataaagaaagataaccatcgatccagagcgaaagaatactagtagtgtgttgttaatggtactcctatacgaatacaagtgattctagttatacactgcacaaatacgaatatccagtatttgtgaataaagatggtatattctattagtaagcatatatgtgatgtggataaaattagaggtatcaatgaccactataactaaacatgttctaatgatgggtctcattttcttagaactcatgtgcaaccaccgactattcatgacatgtataccataaatctgctttatagacatttttgtgaatgtggaagggagagaaggggaagagagtcaaacccttagcttatcatcgactcttgtcacaagatataaatttaccttgctgcaactagttgttggaagggacaaagggtaaaatattttttttggtggtttaatatttaaagcctatgttatctgatgcagaggattagtcacaacatatataacatgttacttagggcatgtgccaggtttaattgttgaacatgcccttagcagctcactcaccctctctctctcctcacttttattctcaagctagacatccatcacacattcccttttttatacttattctcacttgtattgtacttgctactataatcatatgactcgtgaactaccgagaaaaaaataactccgcaacatcaactttttttaggtttagaggagagaaggccaaaagaaaaaaacagtaggaaatttagccacctgaacctgaagccccagcccagtctttttgcccctggatattaagtttgcattttataccataccaaaatagacatgctaaacaacatgcacatgatttttggaggttacaacatgtgaattttccttacctcctaacttatgacaagatccactctttcatcccttctccactcgcggcagcaacggatcttgatccactctttcaccccttcttctccacttcaggcaataacgcccgtggtgatagaattaagggcaacgaattagggttcgagataggggtaggaaaggttgttttggaggaatcataaaatggggagttctctagacttaggggaagtcaccagtggttgaggcggctcagtagtgggccgaagaataagaagttcggaggaagagggcggcatatgcagatctagtgaaaaggagccatcggaaaggggaaagaagcacagggcggggcggggcaggggcactcgccggagtggacgcagtagtggatccggagcagagtggtgatgtatttgtgggggtgggggggatggcggcgggatgaagccaacaagacagaaggcttgcagcccacctaggtaggatggtggcggcgtacaatgtgcaagaaagggtattggaggcttggaggctgagggtagttgatctatttaatagggtttgcaaggaaggctgagggtagttgatctatttaatagggtttgcaaggaaagatttggcccatcgcttttcaatccaatgggtacaaaatcgatcgcgtgttttaggggctaaaaacttgcaaacgatggttacacagtccctatatcaaaaatacaataggagtctatatgccacgtaaagaagttggcatgtatgtacatcacgaatcagtttccatctaggattcaagaaactaaccaatatttctagtttgtatttattatctcatcgccattaattaatagataatactaaaaaggttgtccgaaaccagtttgaacttggtgaaaggcataaaggtaaatgaacttttccttgaagaaaattaacagccatgatttttctctttttttattactatatataatatgggagctcctaacattttttttatgaatgtgagaatttctttcttttaagaccaccagtccaaatttctttaagagattaagaaggaagtatataacctacctttaatttcttatgcgactggctaaatgcccatgatttgctatggataaaggaaaaaataccacagtattttctaaaataaataaatcatatttaccatgaaatatgttacccacatttttcctataggaaaatgtggatatccacattagttttatatgtggctattcttttatatttaactataatagaaaaaagtttaaagggtaatatgtaagaattgcaacaggaataggtgggatggcagattctccgtcggtatacatatgcataaaagactatgatgcacctaatctggagaatgagaagatggttgagggtaggactgagtaaaaattaaatgaagggcggttaagtgagacaaaatccataatttgaaaccttgtatcccttatactccaaccacgaaacaatgaaggttaacattttgtatatcttttccttttttttgcaggatcataaagtaaaataaaacaaaggtcatgtgcatatttgatagaaaaaagtacgaattacccccctccccccccccccaacgaactatcgcggtagaccgtattagcccactgaacctgaaaactagacatcgttcaccctaaacttttaataccagacaaattatcccctcgacccaatccagaatggttttgtcctacatgatgtacgcgtgacagtccagtcagcattctatttattaaaaaaatgtaggatccgtctatcgtactcctcttctactcttcctctctctctcactctttctctctctcttctctctctcctctctctcactctctctctctctcactcttcctctctatctctcgtgggtcggcggcaagcgggcggacatagagtggtggcggcgg

SEQ ID NO: 33344 - DNA, 553 bp, Oryza sativa
agtccttttctaaacatattctatctatataagctatctactataaccaatcggatatacatgccatatgggtatgcggtacccataatctttccaatttcattctagctctgcccctgtctacaatgtgggtcttaaaagacccatagaggtccttatgatgaaccttatacattgtgagacttaaccatgaggcattgaatattaagattgaccttaagcttgtggctcacctttaggaataaaataattggataaataaactgcacacgtagcgagtgagagaataataacaaggctctgtcataaaaaacgtgccatttcttaaaaatggttggagaaaacaacggaagaaaaaataacttagtttataaaaacaagccgcttcgaaaaaaccatggaggaaaaaaaccggttataaaaataccggatcaaagaaactatcggactcaacgcgagaaaaaacccgcaacggtttgagaaaccgtccgacttagcgcgaaaaataaaaccgactgtttctttaaaaaaaaagttagagaaaaccatatga

SEQ ID NO: 33345 - DNA, 512 bp, Oryza sativa
tagtactccttccgtttcacaatgtaagactttttagcattgtccatatacatatagatgtaatgaatctaacacatacatatgtctagattcattatatgatgaatgtagacaatgctagaaagttttatattgtgaaacggaggaagtagtaacaataatcgtttacgacaaaaatacgcatgggcccactagtcagtgtcttcccagctccgcacagtggggaatacctctcgcaaggtgggccccaccaagcgcccatttcttaaccgacgaaacgggctcacgtgtctgaccatcgctcgcaatcgcaattcgcaagttggcatccaactccgtcccgtccctccctcccccccaacccgatgggaaacgcggccgccggcgattcggccgccgagctgctgctccgcgcggcggcgctggtgccgccggcgcactacgccctcgccgccctcctcctcgcctgcgccttactgtaccgcttcctcgagctccacctcatcggcgac

SEQ ID NO: 33346 - DNA, 532 bp, Oryza sativa
gggtcggggataaggaggcgtggagattcgtgcggagatctctgcatcggctgaggtgtccgccgtcagcagtggtattcgtatccaacgtttaaccgtccgtcttatttaaaaaatttatagaaatttttttttaaaaaatagttacacataaagtgctattaatattttattatctaataataaaaaatactaatcataaaaaaatttcaagaaagacgaacggtcaaatgttagacataaacggtataaaactacatttactttatggagggagtacattttgaggcgtttttttttcttcttttaatttgtgtgtgtgtgtgtgtgtgtggtggctagcggagcaaacaacgctacacaggagttggagcaatgtatagggcatatgaaaagaatgtagtaatgttgttttctaaagaaaagaaatgtaatgtatgtgcaagtgtacgtctcttttgaacttggcatgttagcatgtggattttcttcttttttttttcgaggacatgaaatcacgtggttcttactc

SEQ ID NO: 33347 - DNA, 535 bp, Oryza sativa
  unsure (1)..(535): unsure at all n locations
cctgcagcctcagtgagcgtacgtcgcnntnttgggtcacccacccacttacgccgaattcnancctcgtaccccttaattttgtttaagaaagtaccatgctcaaaacacgtagataaccaaaggtcctccgtcatcaaacctagtaacccgtcagcgggatatgtatctttatcacatactggattaaaaaagactcttcggtcacaaaagcaattgccatttactaaccatctgaaatgtaccattgtgtatacagttatgaaatgtcatgccgtttagcagttaactacaccttggtatcaaaatatagtaatttttaactatatgtctgaaatgcttgtctagataaatagctataaattactatattttgaaacagagggaataacattttgctttgggcaaaactgtcagcctgataaaacaaaattaatacttccaatgacatgacaggaaggatttttgagtttctaagcaataaggaaagtnnnaatgagggaaagagacaagnnnnaanagctgaaaccccccc

SEQ ID NO: 33348 - DNA, 522 bp, Oryza sativa
  unsure (1)..(522): unsure at all n locations
agccttcggtctcttatccccggtcacgtgcgctcggcccaagtcagcccaggccaagccgcccctcctcctctctctcagccgccgacatatggggcccacatggcggggtcttctccttcctccagccgctcggccgagtccgagccgctgcgcctctctgccaaattcgctggcgaccatgatgtcccaagccgcagccggtgatgatgtcatgctgacgtcataaagccccttttcccttctaaaaataaatcttaattgtgtcataaatcataaatccttttctgtataaggttaaaatcagattaatcttaaaaaatccatttctaattcattgtaaatcagattaatgtgtttcaagttgcaaaagtgtataaaataaagatctatatattaaaattatatataaattgctgggaggggaggggggggggcttgnagaggggggggganatttnaaggggaggcgtgggaagggnttttcagtaaaggatgatgaaggcaaaatgagggccggtc

SEQ ID NO: 33349 - DNA, 670 bp, Oryza sativa
  unsure (1)..(670): unsure at all n locations
gctgtttnnttttttgagtcaccgatccactataggccgaatncgagctcggtacccagtgcgcagcataaataaactattttactactgttaggtgatatggcagtgtaaatagatatgtaccatatatctagaaaataggagtaagattgattctactacccattagagactgctaccaaaattgttaattttcttatatttctcatgtaaagcattcagacatattttcagtaatttatacggttcagtttctcttagggcgttcacagtgggaggatgtgtcgttcagccttggtgccgaaaaccgaatattcgacgacacgtcagccaaccgcggagccaaaactggtcacacgaacttcgctggaatcgaggtatgcggcacggggagaaaagcgggggcgcggcgttttggaagtcaatccctcgtcgctccgtggtttcncccncttncatnntttagtgtggnnnatggtgcgggaggggggtggaggnnnnnnagtggggcgggggggaaaaannnnnnnnnantagtntnnnttgagggagggagatggtcnnnncacncnnnnnncccnccccnnnnaaaggggnaaggaaaatgaggggggggggctttttctnnntctttctttcttttccttttttcttgtgggggagaaaaatt

SEQ ID NO: 33350 - DNA, 569 bp, Oryza sativa
  unsure (1)..(569): unsure at all n locations
atacgtttatgtttttttgaagggattaaggagagggcaataaaattaaatgggagggttgtgttttatttttgtttttgataggaactgtgaaggttatggttgattaagataaagaagtatatgatgaaattaaatagaaaatggttgtagttggttgagatgaaggaatatgtgaagtaggataaattatatatattaaaggtagctatattttgagatgaagggagtagggccttgtttaactggggaaaatttttgggtttggttgtcacatcggatatacggacacacatttgaagtattaaacgtagagattccgttaggaaactgcgagacgaatttattaagcctaattaatccatcaatagcaaatgtttactgttgaatcataangngagnnaaggnnnnttntgggggggagggggggagggggcnnnnnttaggttgggggggtgtgatnaactttttggctgtttggnaaggaggagtgatggttgcaattctaagaacnaaaangttngnnaaaagggaaaaatattggagttttttaaaaaaaaaaaaggggg

SEQ ID NO: 33351 - DNA, 517 bp, Oryza sativa
  unsure (1)..(517): unsure at all n locations
aattgtaaatgaaaaggggcacttttccattctcagatatacttatcaccattttttttttacaaaaaaagatacttaccanctacgaccaggctatatatttgcatccgaactttatagctaaattttattaatgaggttacgaatattttaaatataattgttgaagtctgttgcacgatatagcggtatagctatatacacaaaccttacttannccccgttcggtagtgctccaaactccaactccagtgggagctggtgttgacggtccttaaatcataatatatgaccgtcagtacttgcatataatgaaataaaacatggtatccaacttagtgggaggtattattactaatcatttccactaggnnnggggaaagatgggaggnaggggnagncgggngnaaaagccgtagggaggagtgagggaggggggtttnaggggtttgntttttttttttttntttnnnnnnntttnaagcccccaggagaaattanattttatccttaatat

SEQ ID NO: 33352 - DNA, 655 bp, Oryza sativa
  unsure (1)..(655): unsure at all n locations
agtgagagcacatattgactatanggcgaattcgagctcggtacccagtctgccgcaaatctcgatatttcccccggaggatcgttcgcacacaagacaactgcctaatgaagagaactcttagatttgagcggagagaacgattctttcggccaaagcgaagccatcccggagatcgagattatccatgaggatcctctgcacatggagtcgaaacccgactcaactgtcgaatcctcattccagtcgctggagccggaggaagaagaaattcattccccggaaattccattccaattcaggggtgatctttatgaaaattatgagaataccctgaattattccagcgaaaagaaggctcatcccaagaatgagccgttcgaggaggtgatgtttgtatcttcgttcgtttcttctggacctatttcccatcttcatgaaactgaacgaatagnntnaccctaaggggagaggggggagagggttncccgcagggggttggatatccntnaatattttatttattatttctgggtaggtggatactatacntatttaatactggtggttccgtacttcnnncctcnnaagcggtcggtggggagttgggtataggncgcgtttgggnannanacncnaaggggggggggagtga

SEQ ID NO: 33353 - DNA, 673 bp, Oryza sativa
  unsure (1)..(673): unsure at all n locations
cggggctnnttggtgaactgactacgacttannncnaattcnanctcngtacccnttacaaaatcaggttattgtctgaacatgcacttgaaatatatttaaattcagtgtggaaacatgctctagaaatatttctagggggagggggtgaacagactttggcgggtgttgttttctcccaaggtgccttgcacgtgcacgattactagtttattaaaaggactgggctcgtatagccaatcttacaggacaaccccttttgggtggaagcagatcctctgacatgcagttgagtcactgatatgtgggtcctactttgctatggcccacacgtcagtgactcaactgcacagcagttaagtcacagaatctctttcccttttgggtacagagaacatacataaaagtcctgaatttagcaaacgactatnnaaaatctctgagcttgaagtcaccgctcctaggaagctcccagggggggaggggggaggggtcgccccccccaagggggagggagagtggttntatannnnncccnnnaagggctgggagtaatcatggtcatagctgtttcctgggggaaatcttcaagcgccnncnnnngaggggagggtgggagggggggggggagntgnnagggcctggnnncttttttntttntcataaggagaca

SEQ ID NO: 33354 - DNA, 579 bp, Oryza sativa
  unsure (1)..(579): unsure at all n locations
cttgctacatacgctgcttgtcatttcataaagcgttgtcaagttttgttaccctagtgaaatgcttttcatactttcatgggggaggtcacacacaccccacatacacgcacatatgcttgacttatacactggaagttagcattcctcatttgtcattcatttcatccatagtccacaaaataaatactccatgtcatttgtgcctcttcctccaaagttctttaaaaaaaagagagagagagaggggcatggctatgaaaaaaaagtgctcatacaagtatggagcatgatgatgagaaaaaaaaaagaaaaaaaagatngccatgcactcttccaaatttaaaaaagaaaataaatggangaggaggcatacaaaaggagttattttcattttcctttttccacttacaaaactannatacacatacaccttccccnccaggaccaaaaaagatgtcttggatttncgtgnnttgcttattttagtttgcaatatatgtgaatcaagcaatgctttactcttttcatncccnnnnaaaagatgaacctgaataaatgnanaaaaaaaaaggcccc

SEQ ID NO: 33355 - DNA, 577 bp, Oryza sativa
ccaattaccagtacataaaagtaaccaacatgtagatcatgattttagatgattttaaagacttgaacggcctcattctgacttcatatgaattagtcataaattttccaggatttaattcaattaaacctatttaaaaaagattaaataaatttataacacaatttatatataattttaatatatagatctttattttatacacttttgcaacttgaaacacattaatctgatttacaatgaattagaaatggattttttaagattaatctgattttacccttatacagaaaaggatttatgatttatgacacaattaagatttatttttagaagggaaaaggggctttatgacgtcagcatgacatcatcaccggctgcggcttgggacatcatggtcgccagcgaatttggcagagaggcgcagcggctcggactcggccgagcggctggaggaaggagaagaccccgacatgtgggccccatatgtcggcggctgagagagaggaggaggggcggcttggcctgggctgacttgggccgagcgcacgtgaccggggataagagagggaaggct

SEQ ID NO: 33356 - DNA, 532 bp, Oryza sativa
attgggatgggattcattttttggtccattttttaccattgaatggtgagcagtacttccttgttgattcctgactcccatctgaacacagaggacttggagctgctacattacgttgacagcgactatgctttcacctcccgccttcgtcacggctacttagcaggaaggtcttcccatggtgctcgatcacatcgccgcctccgcgcacttgctctttccccgacggtcgatgctggcaccgtgccgctccacctcaggcagagaagattagatcgcctccacggctccgccattccgaatccggccagttctgcaaatgaggctgctgacatcatcgatccgccatctcgcacagcttgatgggcatcatcgctcgcctttgcctcatgacctttccgttgccaactatcgaagctgcctaaatttactagcaggttaataaattcatctgggtttctttgctaatcatctttacctaatatatattggatctaattctttggtgctttgggtatattattggattttc

SEQ ID NO: 33357 - DNA, 607 bp, Oryza sativa
gcgacgagccaggctaaccccaccagcgccgcgcggcgatgccggtggagatgatctatgatgtgaaaactcgcccatcttccgcttgttcctcacccagaggcggcgcttcgcttcctccaacaataggtaagtgatgccccgcccctcccctcattccttcttccagaaccataatcttttgcttccgcaatgccctattgcttcaaaactcaaaaatccttcctgtcatgtcattggaagtattaattttgttttatcaggctgacagttttgcccaaagcaaaatgttactccctctgtttcaaaatatagtaatttatagctatttatctagacaagcatttcagacatatagctaaaaattactatattttgataccaaggtgtagttaactgctaaacggcatgacatttcataactgtatacacaatggtacatttcagatggttagtaaatggcaattgcttttgtgaccgaagagtcttttttaatacagtatgtgataaagatgaatataccgctgacgggttactaggtttgatgacgggggacctttggttatctacgtgttttgagcatcgtacattcttaaaaaaaattaag

SEQ ID NO: 33358 - DNA, 627 bp, Oryza sativa
gccataacacgatcaaaaacaacaagcgatcgaatgatacgggggagtcgagtacgcaccaccacctcctgatcgggcttctccttgtcaaacttggagcacgaggacttgttgatgatgtcgctggccatcttgtcgtgcggagaggagagtttatcaccatctgcgccgtgctcggccgccgccgaggacgacgccgaggtcgcggaggcgcagtccatggccgtgggcacccccacctgcggtgccccagacagcgtcgtgccgtgggtggtcatcatctcgacgcccccggaggactcggcgggacggggcgacgacgccggggtggaggaggaagccgccgcggcgtccatggcgcccttgggctcttccgcttcagtagttaagtcccgcttgccctgcaatcgagagagacatcaggaacacacacccgtgagtcgtgagcgtagttggtgccggagaaggagaaacgagggacggcgtacgaggtcgtggcggggaggcattgggcggcggcgccgccgcggcggaggagcagcccgacacggcggattctggaaggttcggcgtggggaggaagacggcttcgcggggaaatgaccagccgctccgcttttttttttt

SEQ ID NO: 33359 - DNA, 1461 bp, Oryza sativa
agattgagggcttcctctctcagtttggtcgacactagagctggggttcaccgccgacggcgacgacgcacgagggctcagccatggtggagttcggcggcggcgcaatgagaaagagacgaacagagagagaggaagaagaagaacagagagagagagattgacaagtgggcccatgggcaaacttgtctttaaccaaagtttctctctccattttgatcggaaataataaaataatagaaggagtgtccagcagctaattaccacttcttgcagtgtccaccagcaaatacacgatcttggggtgtctcacagcaaaggccgtaatctttcggtgtcctgtagcaaattttgccaaaattatagggtccacatcttttttcccttctcttttcttttttcttttattctcttctcttctccttcagccgaacggcggtggcaggtggcgacgggcgacgtacgagagcggcggcggcgacagatgcctctttccccctcccgccgacgcggccgacatcctcaccccctctcctgtcggcctcatctcccctcactcggtcggcctccactccccctctcccgtcggtcgcttggcgaaggtggctcgtgggcctcttccgaggctcggcgggtaggcggctgtagacccccgattttagaaatcggaaatcttctgtgtttatccgtaccaatccctggatcagtagttggtacacacatatatagttggatcacaacatatcacgaatgaatttaggctaaaagagttaaatacttacattagggccaggtaggccaacaactatcagagaacaacagcggaagacaaaataatataagggcccggttaacatgccacaggcagtcgactagggaacgagacctagaacaagaccgcactccgatcatcttgttggatacgcaagcgtaccgacaagggcttctcttcaacactctcctaaaagatatatgaatagcaagggtgagtaccaaccgtactcagcaagccaccacaacaacaatgcatatgatagagggtatttcaaggaatggcttcaggttcttttgcataaagctaattttacaattcttttcacaagcctaaaacctagcatagactgatcaaattttagtaccagtgttcactttaaacaacgacggttctgtccaccatccattgtgatcccaaggatagcttcccgccattgaatcgtcatggttttctgaggatgtccaccttccctcctatcgggaagtggctccatcagcataaaattcatcatgcaataacccatcccccacaagttaagaatttagagtctagccaagtgtaatacatgtcccggtgctcaataaccgcgagcacggctattcgaatagatttggtttactcacactgcagtggatgtacactttacccgcactccgcgactgcccaacacatgagcctcgtcccaa

SEQ ID NO: 33360 - DNA, 1414 bp, Oryza sativa
acaacaatcaaatacgcgcaacaaaatgtactattcatgtctgctaatggattccaatcacgctaggggctaaggtttcttaatctttctattgtcaacgtggcctatttaggagttaaccaacatagcatttatgggatacatatatatttggctaatcggtggtttagtctatcaaatggcttatggaaggattatggctaagcatgcatctatctaaataggacggtcatatactagaggttctattgttagatggatttaggatcaatcaaataattatagtgaatcatttgtattatttattttattgatggaagctttactttaattatgaacatattttacttgtcacaataaattataaaaggttaataattatccatgctctatatgttaagttcgggaagtttataatattatagttacagattatctcttaatgaacaatccggagttacaatcgaactatgaacatatgaggtcaagatttataattaggacttatctactattcatgtttgttatatactccccagtttgatatatgaaaaagataaattaattgtgtaactataatgggatgtacaatatatgtgtgcaacaaggtataaggttttggtcgcctactatacatgagcttatttagaaagtgtactacccaatgctccaagtgattcctgaatatattgtagtttaattatacattagctagtttctatgagtgatattgtatatgtgatgcgacaagtttaagcactggttctattgggttactaataagtggtaatcaatttaggcatatataagctattctatatggtattgcatcgattattttacttagtgattcctccacatctagctctattattattctcctaaacaggttaaagattcatctatgtgtgttcatattttagttgcataatcataaggctacacttgatttaaataacctataagccatggatttaattatatggccatcgaaattttcctatacatccattcatttgatacatcacataaaattagtttgtgtggttgttacagtggcaagacatgttagagacaaatattattatatctactctactgtacaatactaattttatttattaacatattttttttaagttgactattatgcatcatcttgatattaattatttaatgtttataaatatattttatcaaatagtgaattatatatcattggaaagcttatgaatttagatgaatttgggttcaagtttcactcaaatcggagctaaatatcgaacgaaatcctagaaatattatatgatttaatttagtctatgactaaatgattaaatataatacacggctaaaatccctagtaattaaatctgaatttctaccgtgaatcgattacttatagggtttaccc

SEQ ID NO: 33361 - DNA, 1376 bp, Oryza sativa
agagtgcaatgaacagtgacttttcctatttatcccgattttagtgtattttccatataaatttgattccacaattcctagttttacatatatgcattttactcaatatttgtgttatcttaactaatgaattcaccctagattaatattatccatatttatttatttatcgcacaaatgaattctttttagattaatttgagttattggccctaaggtgaacttatatatttttgaagactttggggtactattaaatttaatataacgacttgtcatgattaatacattagcagattggtcaagtttagttgtatagcaatatattttacacggataggtttaatctatttattctataaatagtaaattaagactcggtacaacattaatctaattttaaacactcacatattcttgtttatatataaggattaatttatttatatgaccattattttatatgagtgattttcatgtcatgagtaactcggcgacatgttgcaagtatcaatctatatattccggtgaattacttatttataaacacgatcactataatggtgatcatcatttcatgtgttcttatatttcatgtgagattcgattcaaatgaattagatttaatcttactatttctttagctaattgtgacatcaagctatcaatcatggttcgaatatttaatacctgatttgtaatttgtaatagaaattaatatttgacttaactatcttgtgcataattatttgtaggattaacaatattatattctcgtaaatttacctattacttaaatttttagatccttactttactttctttgtgatcatttacggtttggcaagcaattgcaatcataacaaccagcatgatgaaaaagttttgaaaagttcgaaattttagtgatttttattgttgggaattttcaggatgttacagcggcgcaggaggggtggagccgcgtcgtgaccctcttgcgagcgtctccactactgtgtcgccgtactctacgagtttgttctaggcgcggcggtgtccctcatgacgccgagcgtgcgatgccgacaggtggttctcggggcgtggcgcacccttgtcggcttcttccttgccgagcacgaccgcgagctcgaagcggtcgtgcgtgatctcgcacgccgtctcccgcgtgtgcgccttagatctccgccacgctcatctgtcgccgccctcgctccgctccgtcgggcgcttcgcccctactccgctccgctgccacctcctcaccgcctagccgccgacgctgcctcctcactggccctagtcggcattgtttcctcgccggcccaagctatcgaccatcattagctcgtcgttgccgtgagccttagccg

SEQ ID NO: 33362 - DNA, 580 bp, Oryza sativa
agttagggttatccctaaatcaacatgtgctactgaactttctactgttgcaggcgcagggaaaaataatttcagtcgagatgtcttcagtagcagcgatataaataacttctagaaaaaaattaaataataggaatcaggaaggctataccaactaaagctggtacccgaataattatcctttttaatagtagtgcacacaatttaccaagatagaagtgtatacattattgcagcccttatgtaaactgctgaaatcctttccatgagcaaatatttttctaagtcagtcataaatgaagatagtaatccactctccatgaatagattattagtgtaattaagcattggtgacttgagctgtacagtatatgcatctgtaaattaatactaactataatcgatttacatgagtctctaatttgtctggtccctctgaagctaaagctgggatttttcttttggtgtatttgtttgtgattcatgaaacatttagatacacttcatcatctgttgtgcgataccttaaaaaatcatttactttgagtatacgtaaacagatctacattctacaaaatat

SEQ ID NO: 33363 - DNA, 913 bp, Oryza sativa
tggcccggggcgacgacggcggcggaccggagctcgacggcgacggcggagagagagagcgacggcgcgagctcgattccggcgaggacgaagggcggcgagaggcggaaacggacggaggaggagcggggagggtttaaatagagccgggtcgagagagggtggccggggaagggaggaaaccggcgcgggaggtctggccaccatcaatggcgccggcgagcccacttgtcaatctctctctctctgttcttcttcttcctctctctctgttcgtctctttctcattgcgccgccgccgagctccaccatggctgagccgtcgtgcgtcgtcgccgtcggcggtgaaccccagctctagtgtcgaccaaactgagagaggaagccctcaatctcttcgccgtcctcaaatccctcgccggccatgaagaagaaaacgcccgctgtcactgtagagctatctccatgtctgcctcaccaccgttccatacttaccttaacatgccgaagatttttcattttgattccatcctctctcgtgcagcggatcgacgggaacgccatcgtgtcatcgccggccttggagcgcgctctgcgcgtcgccgcctcgacgtcgtcaccgttccgggtgcagtggatcgttgtaggccgagccaccacgccatcagcttcacctcgacctcctctctatttacccccaagtaccctatccagtcgcgcagcgatcttagagatcggcatcatctttctccaactccggtcgctgagctccatctttgatttctccctctccggtgagtcccaatccgattccttgccatggtagcctctcatggacctttctaacacgaaagacatgcatgcatgacaattctttgaagaaattgagccatcgccgttcatccaaggtgaa

SEQ ID NO: 33364 - DNA, 757 bp, Oryza sativa
tcggcaaattaaagcacatcttgaaaatgttggatcttcaatgtgcccagactctgattggtgggatgtagtggctttgatgctcaattttgaaatatagtcatatcagtcattaaaaaacctatcacagtagaagctcctgttgtagttttctttccctaacaaattgaagggtccatgtggttttttctaactaattgagacctatgttttcagccaaccaaatcagatgaggatatcgacctgtatttttataggattcgcttgaaagaggttctagacgagaaagaataccttgtccacgagttggaatgtgctagacagcagctggatgaggtcaggtcaatgaatagtgaaattctgagagaaaacaggaaattgaaaaggtcgctccgtactagagatgttgaaggaatttcaaggaacgttctagagaagcttggatactgtcatgacatctttttatgccctaatgaggttgatgttgagaaattgcaagaactcctgtgtagatctgagtgcaagcttctatacacagttaagatacctggtgccacaacagatcattcttggaaagtagatacgttggctaaaatgtcaccattttgtaaggtggtatttcttggcatgattgaggatgtctacaggctgcatcggtccggtttatgtctgaatggaaagttctccttgaaagatttttgttggactttgagtcaaaaggtgaagtttagtgctgaactgagaggtctgtgttacg

SEQ ID NO: 33365 - DNA, 629 bp, Oryza sativa
tccttcacaaaaatattaatgtcgtcgtcggcctccataatctcaaaagcaacgacggatgccaaggcggatttctccctgaaaaaaaaacatattagaaaccaagcatagcaatcataggtaacatgtgcacctagcaaaacaggaaagtgttgataactcaaatactgaggccgtgacaacaaataaaatgcataatatgcataacactatcacctcatgtctgtatgcaaatgttgacagtgagaattgaagacaggaggtgatgttttgcagaattcaattgatggtgcacctttaaaatccaatcaatggagtggatgaacaattgacaggagtgacaaactaccatagtaaacaaataagctagggacagtacagagtacattgtcatggttcaagcaaaaataaaagcaagtagatatctatactccttttaatagggagtagtggcggtggtgagaagttaatcttccaccacccccaccaccaactccctacttttttttggaatgaaaaagaagggaccctgcatgtcaacactcctaccaccgacttcctactttttgtggtaagaaaaaatagtgggttaatgataaatttctttaactagtcttctgcccgtgcaa

SEQ ID NO: 33366 - DNA, 706 bp, Oryza sativa
tcccatctcctcttgattgatgtaccacagcccattacgcctgactccagtccaaatcctcctccaaggcagtagccaaaaaaccagccaaaacaagagacgtaccacctccttcttagttcctgcagcaaacaatcctcctatgtcaccaagtctgcagccaagccaccatcctccttttcccttagctgagctcctcacatttcctgcgtgagcagcaggttacaacacacgcgctgcgcccgcgcggccgcgcgcagcgcgcgctcaccagcccctcaacgtggctgtgtgtagaggctggtcaggccggatgagagcaggggcgacgtgcgacgacggcagcggcgacggcggcggcgatggacggcggcggcggcgacagcaagctagggttagggctctgataccataaagttcagttttggggattttttctggtgtgttgttcacagccacacacacactatttcacttagctacatatgcaagaaggtccccaatacaagagcatattacatcaacatgcaaaacatccatcaagtcaaataatctgaaattacttctgcaattataatgctgacaacatgctaacgcatccaacagttaaaagtgtgcaggaactaataccactcaatttagtaattcattacagccacgcttgatggaaacaaagagaaattaaacaatggtttattggaaatta

SEQ ID NO: 33367 - DNA, 1459 bp, Oryza sativa
tagcttatatagcagttgcaagaaaaaaaaacgattccatgttttctggtgtatggtacaaagttgaaagcattttttttctggtatatggtctatattaacctccataagctgccattgtctcattgacctgtaatttgccaccttttatattcactcaaatttcgcacacttttattctggtcctttggctgatatatctgttttgctgtatcattttgttatatagtatgtacaatatgcatataatcagtggaacacctttatgagacaattagaccaaaacatgagagggatactggataagtataaatatcacttcagaaatattggactagctccaacatgaagatcaacttcaactgatctttgctcagttgcatgccatgtaaggaccaagtggaagtgttatggtgcctccaagctgcttcgtattttacccctaagatgcttcagattttttttttatttgcatgtttaaaagggaatacaagtgctgctttcctattggttatgtttgtgttctcctgtactgttggccaaaaaaacttttagcattatgtagtcatgtcctgagtggtggagtacattccaaatcacttcatgctttgttattattggcacacatatttctttcagtgccgatgacatcatgatgaattctagacttgcagcttctgaacatggagcgataatttactagcctgattctcttgggtattccatggatcgatgaactggatatatgtgccatatatagactaggacactaggtattgacatctatagctcttgatacacatgtgtacatcccaattgttaatacacgtatgctaatgatttctaaatgtgtttgctcataattaagttcattgtatacaaaactgtcgatataaatttggttctttagtaaacaactcctatttgttactctaaaagcactattcttgcataaaccaataaaatgcgatttttttcttatcgccgttcagtgggtgctgatacttcatggtaccattttgttcgcaccatccaatgtgtctttgtattttagggctaactaataatatggccctttttttttacatgaccaatgtttccaagcattggtttttgatacctctgtttccagcagttcaaacttcaaagtccctggaagcacatgaaaatagttgcaagtgtacagattaacttgtagattacccagtggtgttgtgaacaagcttgggctggacagcaccaggttcagtccttgcttctttaggcatggtccaactaacacatcaagctgctacttgtaccatgtttgtctttgcaactcatgaatggctctctcctgacatttgaactccagattctgcacaacctcgccgccgccggtgaccgttcccagccaccggcggcggcaccaccaccctaccccagtgacctccccccatcttctttcttctattcccct

SEQ ID NO: 33368 - DNA, 7690 bp, Oryza sativa
aatccaaaaatgcattttgagtcattcgtacaagtttaaggaccgcacgtgtgcttcactcaaaagaaaactaattaggatttctccacagtatccacgaaacaatattcagcacgacacataattcacaattcgatagaatgatggaaagctttttctgatgtgtctctaatttccgatgtgtctctaacatgtgggttccatcataattccattttttttattgacggtaagtaccacgttgtcgacattttaggtcatgactatggtatttgcatggtatggagatcgttggtaccaggatatatgtgatattgaggtaaaagagataaaatgatttttgtacaggttcgggccccttatctgacaggtaatagccctactcttgttgggcgtagccggtgttgctctttattcatctgaatcacataagtataataattgggataacctatctagctgtcatcgatatggcgacacggacaccaacatgtagtcgacgatagggtagtcttcctcctcgaatatgaactcgtcgagatcagagattgcgctagatccctcttgtcggcctccgcaggaacctgattgggtctgtctaggctaatatctgatttcggtgtctagcttgtctttcttgtgtgtctgtatctccctctccctagggggtattgtatttatacccataaatatcccttttccaagtagaactagggagataagtatgggtacaacccgagtagtcctggtcatttccatatggaactctactcattctttcttatttggaactcctttttatatacgagatatgatttcgcataagactcggtatatgttgggccttgccaagtttagtcgactactattgggtatgtttatccatacccctgacacacgtagcatagtagaaaaaattggaccagtcaagcggtttcacccgaaaaaaatgggaacccagttcggtttccttcaaaggatcatttcacgcaattcgacccggttgtacccggggcggttttgcggcaaaccggcagctccttgaccggttcagttccttccaatagttcacgcaatcaacccggtgtgagccggttgaaccggatggttttaccgcggaccgccaaaccgggtgaccctgaaccggctagctcaagctagctagccacttgatagcatatttttatgggccatgtaagacctgagggctcaagctagctgggccacttgatagtatctttcttatgggccatgtaagacctgaggcacaacttaattttatgtgagaaaaaatagtgcaaggggtgggattaggatatatacaaaccttgccaaccaccaggctaagttaactgctctgactttgaagaaacacaaaatatacttaggcaataaaacgcggttccggtgacccaatggttgaaccgatagaccgatagacaggtgaacagagcacttcaccaggtcaaggatcggtctgattttttttactatgccacgtagatggcatgcttacctaaaatcggccttaataaaaactgccttatgattatatttatatcggttattaagatgagagatgccgctttcacggttgacggatatgattgaaactcagaacccttagatgagggacatgaaatggacttcatccttcgcctgaacccatgatgatctacatgggctgtgcgcctgtgccgagttacccaggtccaccaatttgtcattcttacatgcctagtcagcaaatcggatggaaaatgtcctaggctgcgtgcgttcgggagtcctagttcccaacctcttttcctcattttccgcacgtatgtttttcaaactgctaaacgatgtatttttttaaaaaaaatgtatacgaaagttgctttaaaaaatcatattaaactattttttaaaaaaatagcaaatacttaataaatcatgtgataatagatgcttcgttttgcgtgttgaggaggaagggttcctcccgaacacagccaggctagcgcctaaccatgctgagggagagcgagcgtacgacatcggcgctagacatgttccttagcacggcacgatggagggacaaggcggccagtgcgagagagaaaggagctgcgaatggcaacgtcaaggactcaacctggtaggagctagagagaaaactccaatgacggattgatgtggggtgggaaaaaagaagggaataacggggggaatgggttcactggagtcagtggcggagccagaaattatacaagactacggataaggtagggctcgactaatggagtttcagttttctgaaaaatttacatggtgaatcaacaaaatttaagcaagtttttggagcctagctgccctaggcctgtctctgcccctgactggagtggaggagaggtggtggtggaggaggagatcagcaggcggttggcagcggctcgacaaagctcgaacttgaagcttcatcctgaggagggaagaagatatcgatatatagtaatggatggaagggggtggtggctggcttttatagctagaggaagacaagggaagtgagaggtagccgggcagatggcaacaacgcaatggccgaccaagacacgactaggccgcaggtacaaaatcaagtgttggagatcagacttagaaatgggtcgagctagtctggttggggatgacgattggcggcattaattggtgggcttcaaacagaggcggaatggtgtgctccacactgagcctatgttcgggcatccttgttctcaactggaacagcaatcacacaaaacggagcggtctattagaacgtgattaattaagtattagctaatttttctttaaaaaatatattaatttgattttttaagtaactttcatatagatttttttaaaaaaacgcaccgtttagcagtttgaaaagcgtgcgcgtgaaaaacgagtgagaggaattgggaaaaaaggtgccgaacacagcatgagtctatcttcaaatgccatgccagcaaccaggtgccgcagatcgtgctcggattcgacacatccgcgtgtgggccagggttcctgtgagttcaccgtaggattctaaggcacaacttctctattttatattagtatagatatatctatttggtaattagcattccatgccagcatgcatgcagcattagtgcattatgatagtgatatcatataaaaaaaaaggacttccggtggaaagacaagcatcaaagttttgagtctttgagagctactataatatttcttcccaggtagtggtttttgatgttaaattaactttctgcgcttacaatcaaagtgatgaccattttgtatgtgttgtaaaggtagaactaaaaggtgtaacctaaagtgggatgacaaggtatctgcctgtctaaccgcacttaagtgaacttgtgagtgtgcatgagtcagctgcaagaggtcaacatgcaagttaagatcagcacacaaagtaaataatggcttctccaaaaggttagataaaccgtatcggtggttctgatatggtcagggaatttgtgtagacacatgacattttcattacttttaaggtcttcaagataaaattttgaccaaattttaatcagatatagtttataaaatttgtttatgtgattatgaaagtatatttccaaactaactattttaaaacttattaataacaagagtttgaaaggtaaataaaaagaacaatatattttcataggagaaatcacatacttcctccgtttcacaatgtaagtcattctaacatttcccacattcatattgatgttcatgaatctagacatatacatcaatataaatgtgggaaatactagaatgacttacattgtgaaacggagggagtagcaattatctctatccagactaaagatgcctccaacgttaatttaaaaagaaaatatctttatctaagttaaatatgtggagtagatcagatatggtaatgcgcgtgggatacaattaatggttagatcgtaaagacttgtaataagctggttctcacctaacctaacttttgaaggttactaaactatcaagtacaaccctttaagaaacagttggtaagtactcgactttcgagaaaatatggagaccacggtaggtatatactccctccgtctcgaaataagtgtagttttgcactattcacgtttaacgtttgaccgttcgtcttatttgaaaaaaattttatgattagtatttttattgctattagatgataaaacatgaatagtactttatgtgtgactaaatatttttaattttttcacaaaattttcaaataagacagacggttaaacgttgggcacggatatctacggctgcacttattttgggacggaggtagtatgtttggttttctgaaaattttgtaagcagatacagcctacggctaccacccggtccacaggcccacaaacagggcccagggctaggcccaaatcatggtgacatcatcggagctacagaccgtacacctgtccggtgaataaacttatatgtactttggaaatcttttccagcaaacacaaacttcttgtagtatagcgacggctgaaactgtccaaactgaacgaaactttaatttcactggtcctgcctctttcctggcttggttctcgaagcatcgtcgtcctgatcttctccagaaattaaccatctgcattcttagttgattactacattggatcgtctaaaagaatcgtagatgaaaaagaaagtactcgatccgctcctaatcagcaatgtaatagtgtatgcatgtgtgattatatatcgcaatgcagacaaatcaaagttgggtttaagagatttgatagatgtatgatgtatgcaggagatttttgtgtatgatgacgccaaaagtacgtacacctggggccataaactagagcaattcatgacacgtgtcatcaccgccaaattatttggcctgtcattgtacaggcgacaagatcaactgatcgagttgtatgtgtagaataaacgggtaaccctagcatgggatgcttgaagttatttgtagccctagtccaatttacacctgatggatagagtcatgcactacgattccatcataatgattttgtagtacctattagtacataagcctttaaatatacgagtatataatgaaacaggaccaaacgatgaaacattttcaactttggccactaaggtaatttttttttcagaggttgataggtaaattcaacgaaatgttagtacgtttttgtaagggtcttcggttacttccatgcatatactagctcagttcccaaaaatttgttgttgttgaccagtattatttcagttttaaccactaccaattccaaaatgaatggttaaattacgatgtaggaaaattttaatattaatttgtattcatgatatatgcaaccgataccatggctttaattttgagtatttagatttcttttttagaaaaatagaacaagttttcaatgtttaaatatggctggtgcatatatatggtgataaagtaattggaagcggaagaaatgattatgaatgtactccctccatttcatattataaggctttttaatattgtccatattcgtatagatgttaatgaatctagacaaatatttttttataatataaatatggatattactaaaaagtttataatataaaacagaggaagtattatttattataatgaacaaattaacataagctatatcgcgatgacctaaacatcaagtaaaatggacgaaccttggcgcctttacacgcaaaagtttgtaccggctaggttgtaaagtagtgcacgtatatactacagatgagagctagacgtgccaggaccaatgagcagtgcgtgacgtgttccaagaaaaaaaaaagagaaaaggtctggcttgacacctgtccctgcaccggcaccaggcgggctgcttatgcatggatcatacttgtggttaagtatcccttcatatttttgttatttataaattttttgttatttataaattgtattctagttgagctcatatttttatttttctattttctgaatttattttattttttatttcgaattttaattaatctcgtattgtgttttatatagactattattttaatattttttattttttatttccaattttaattgtttcaacattgtattcgtacttaaactctctattttattttttctaattttggattttttttattttcaattttaattagcatcgtattggtttcttatatagagtcttttttcaatattgtttattttcattttaaatgttagttattttaaaaatgtattcctacatgaaatcttcttttattttttttctaattttggattttattttatttttattctgaatttttaattaatctcgtattggattcttatatggaatcttctttcaacattccttctttttaattccgaatttcagttatttttaaattatattcctagttggacttttcttttttttttcctaattttggattttattttatttttatttcgaattttgattaatctcgtattgtgttcttatcttctttcaatattgcttatttttaatttggaatttcagctaattttcacttggaatcttcttttctttttcttcgattaatgtagaaatttctagtcccgacagcgaatgtggtgcatcctttcaaatgaaagctgttttaataatataatagatgtcttcggcttatgaaccgcgcttcaggctctcttggtttggcttaagcttttaactgacattttagcttccatattaaattttaagtcattggcttttaagagcctcatcatttggctttttccctaaataagccaaaacggcttattagggaataaaaatgaatttgtaggtaaaccttttatatatgtgttcttggggacttaaaagtcaatgctgaaaaaaaaactacattgaaaaatctcaaaattaagtttgaaaatttaaaatgtggctttttctttgactgattagaccatccgatgagagcctaagtctcaatgatatagtgttatctgcaaaaaaaagttactcgaacctacctatttatttaatgctataaaaaatggagatccagcaaaaaaaaacgtcatgcttatttgagctagtcttttttgtcttacaaactggctcaagagcccaaacaaagagaccttaaaatgtcttcaaccggatccgtgctcctagccctatttcctctcgcgtcgctctcccctgcggcggttcgggagacgatgacccggccgccccctctctcccacctccctcctctgcctcgccgccgtcggcaaagccgcgcggctgcaaggacggtagcggcggggcttcgcgcttcccaatatcaggcggagggggggcacgcctgggaggcggcggcagggaccgccagatccgcgccgctcggacggatctggtgggacggcaacggcggcgaggttggcgatgatgatggtcgaggcgagaggcgcggggaggggttgtggccgatggcggtggggatggcgacggcggcagggcggcagcagtggagtccgcggatccggcggcggcgcggcggccggtgtcctgcaggtagcctgccccacggctggcgtggccggcagtggtagtaaggaggacggctggatctg

SEQ ID NO: 33369 - DNA, 4867 bp, Oryza sativa
aggaccagcacgtcaatgtcagggttttcgccggttttcctttaattaaccgtgctgttgtaaggtttttggtccaattttccttataaactggatcaactctcttcttctgtaatgaactacatgaactccctacctgtcccctcgaaaaaaaatgtcttcaaccaagtgctaagtttcgtaaacaaaaacaaggctaaataaatatacccagcaaaataatacaacactcagatgcaaattcttaaatcagtaagatcactattagatcaaaatataagagtttgagatttgaaaattgtattggtagatttgtcaatatttgtataaatattacaaaatttcaatcagaaaaatattgatcttatcagtaagaactgaggtaatatatcagcatgattttttttctttataatacaacactcagatgcaaattcttaaatcagtaagatcactattagatcaaaatataagagtttgagatatgaaaattgtattgatagatttgtcaatatttgtataaatattacaaaattttaatcagaaacatattgatcttatcagtaagaactgaggtaatatatcagcaagatttttttcaaagaagaaatccgcacatataagcaacacacttaatataaaacagtgcttaactattgcatcgttgtcaagcaagttgcggtgtgatttcttgcatgggaaatactccctccgtggctccgttcaaaaacaaacgtagttctagataaccaaatgcatattaggaaagagaaactgaaacagtattatgcgtataattaatatggagaggaaacaaggaagatgatacgacaaaaatgagaagaaaatgatgtagtggtattaaagaagttgtatggaccactccattttttttaggttaaaaatacacttttttgaggatggaatggaggagtaaatatgtagctccaaattacctctatttggttaaaaaaaatgaatactatagaatgatctaatatcaaataattaaaatggatgaggcttcaagtcgtctagcccatcaccttggtgaagctaaccgaaagatttctgggcgtttctgattctttgtttggttatataacaaatcgacaaactcttacggactactacgtaaaagatctacttggtgatctactgatgttcgtgaaagttttgaattttcttcgtaatagggcagcaatagcatacgcataacttaaacccggtccacagtaaaatcaattgcaatggctggtaaaatttaacatcccgacatataaataagatttcatcgttgagaattacttgagatatatatggaattgatgagtatcaaagggaaagaaaacaaattcagaatgcgtctcttatatttttgatttcgttctctagctccctaaatttgctgaataatcaagatcgagatgttgtgtttgtgatgacagtgacagtgacaaaagtagatataagctcgattcagttttccgaaagtaaagatcttcaggtcgacgtatctctcatgaaaaccgtgactgtttctaactttcaatggatcgatcatcaaagatataaaacatcacatgaaagtggtgagtcccgtggacatatgctttgtttttcctgtctttggtaaaagcatgtttgtaatagagaaatcttatgctgatgtatcaaaatttcaccaaaaagacaaaattagtatgtttctcatagtacattagcattgcctaacatttaaattttgtattaaaaaaaggtactaatttgtttcgtaaaatttaaaatttgtacaaatgcattactccttgaatctccaaatccccctacccctcccccagcaccgccaccacaccccaatctgtgaagtggagtttctccatattctcattagctagtttctcgtaatttttactttctcaaacaaaaccttaaataattaaataaaagtctaatatatatcaaccaaacacctcttggagaccaaggtggctatataggatggcttcatgcatccaaccaaatgtccccttgcatacatgcatctactccagctactagcttaattatccagcagtgaactagctagcaatgcagtggcaatggccatcttgacaaattcaggcgatcaaaatgacggcacatgtaattgctccctgctttcgaagagattaaactacacacatcacatgcacgcttccaataatgcaatccccaggcgattgggacaatcaaatacatgagcaatcatgcattcatatgaatggtaagtccagcgcaattattggctaccatggtggcgtgtcctcctataatttgtcttatctgtagatttatgttccatctgtcgacttggatcgatctatagcttcttttaaaatatatgaaaaaattgtaattcagaatttatatcacaatataagtgtttctagaatctagacagtaatttcgatgtacggaaatccatatattttaagcgaatcaagtcctatggaatctaagcaaattcaaaattcataatttgatcactaattatgatggctgaaaataatattttccttaatattaatatatttatttagtaaacaacttagaaatggctatatatttttggaatagaggaagtagtactaatctatatatctatatattttggtatattttgataaataaacataaagggttgattatattaattaatagatcatgttgagttgaatcgcgtcttatgaagaacgtatatgctaataaagttctcttggaaaagaaaagaaaacgagacatatattaaatctcttttttgcatttaagcaaaacacagcttttgaatatgtttaagctcagggataaactcgactttaatacttcatgatcacttgagaccggccccctttcagaaagacgaaaccaagacgatttatttgagtgcaacatatcaagatcaggcatatcaattgtacacgaccaattggctgcattattgcagatcaatgtcgcgacaataatgtacaattgtatttaacctcatcatcatgtattatatattcatgtacatgtagagctacattatacctgattaattgatcaacgcgtattaattcctccctgtaactattgtacttctaaatcttgctctttttctcttttgtgctaatggagaatacatatacatacatacatacatacatacatacatacatacatacatacatacatacatacatacatacatacatatatatatatatatatacatacatatatagacttccccctccttaccaaggcccaaaacccacctcccacctcggtcaaaggcccctcccaccggtcaaacccgcctactaactccccccaccacccacctcttctcagctctcgtcccaggatggtgcagtaacacgacgaccactgtgcagtaacattgtgtcttacgtgcagtaacaaagttaaaatatagttaaaatatagtcatgacggatctacttttgataagctctttttttctagcatcatggtgcaaacggttttaaaaaaatcttacatcacttgggagatattgttcttcaaagcttgacttttttgcaatttgtctctccacaagtagtaataccattccattacctggtaccacctggctaatggaccgtaccaccatccccttatgaaggtacctcccctgcgtttacctatttttttggggtggggtacttggataaccccatggtaccgggtcccttccgtccagtaccacttttattttggggcagcaacaagtatatggttagcatctgagacttttaacctatatatttttgtttcaattcctaatttactgtaattcaccacaatattactgtcacatcttacacatgcagtaacgctatattggagggaggagaccaattttcttgagaagagggagaaagatcggttcttgaggaggggaatacgtagatgcatcttgaagtttaatcctccatatgcagtaacactataacatcatggtggaaacggttttaaaaaataatacatatcttgtgagatattgcttttcaaagattgacattttgaactttagccctccacatgcagtaacagaatgtgtaatttacagtaacaggggtatatacatgtagtaacatggttttaccaaatgtataaaattgttcaaaacactcctacatcaatcagacatcgctcaaagccacctacagactttacctatggcccacctatttgatcttcatctcgtaaaaatgacatagtaacactgcatttatcatgcagtaacatagctacttggaagtggtaacatgcacctattatgtagtaacacttctacttttgtgtagtaacaagtatacggttagcatgtgaggctttaacttatatattttttgtttcaattcctagtttatgtagtaatactattcaagaaatgcaagacactttgttactgcaaagcttattgtctttactaaactcttgtagtaacattgtgatagaactgtagtaacgtacagtagtaacaagtaatgctattgtattactacttgtggagagtcaaatttcaaaaagaaaagcttttaagaacaatatctctgatgtcatgtatggttttttaaaattgtttgcaccatgatgctagaaaaaaaagcttatcaaaagtagatccatcatgtctatatttcaactatatttgagcgttgttactgcacgtaaaacacagtgttactacacggtgaccgtcgtgttactacacagcttcgcgagacgagagctgagaagaggtgggtggtgagggaagttagtaggagggtttgactgagttttgaccggcgggagggggttttgaccagcgttt

SEQ ID NO: 33370 - DNA, 628 bp, Oryza sativa
taccactctttcatcctccttgtcttagtgtaagtgaacctcgagtcacattcttcctccttggcgtgccgcccatacccctctccctactcccctatgagctcaaagtacctttcttcctccttactaacaagcccctaggcctaatccccgtgacatcatgaggccttgcccctctttcttcctcagacctggccacaacctgacctcatccctggattgaaagttttttattatttgagataaaagtttgttcatttgggcaaaatgtttgatgtcatgagtgaaactttaggagacttgagttgagagtgaaaagttataagtaaaagttttgaatgggttaaaattggatgaattatgattcaaacgttttgacgataaagtttttgagattgccgttgaaagttttagatcataaagtttttgctattcaaattgaaagtttgaatagaaagtatcaacttgaaagttactgaacataaaggttttatatttcaaattgaaaacttcgattaaaaactttgaagacttcatattgaatatttttaaaattggattggaagattactgcattggtgcttagcagctgcttaagcttataaccatccctgattaaatgttcttg

SEQ ID NO: 33371 - DNA, 514 bp, Oryza sativa
ctagctagctggttatttacccaacgtgcctctctctataagtacatgtacatcaatttgtcccttcacaacccaagacctcaacctcatcattgaccgacttccgtcgaaatggttaacatcaaagaaaaacttacttaattattgcattattgctgttacaaaccttaattaattccaacccagtctaggtctgagtccttctttgctttttattgcgtaatcttggtccgtcagcaacaggagctgccgcgtgcgtcactagcggcaccacttccattttaaaaccttttattcatcttgtgtattcattcatcattcgattggattaattaaatgacagtactgtccaagatatatataaaaagagtccgtgttagctacctaagatcttgttatggtgtttaatttatatcagtaccggctactatcaaatttatttttatacggccaaaatggattttgcagctggcagcagatggacacaccccatgtgaaaatcaatctttttcat

SEQ ID NO: 33372 - DNA, 626 bp, Oryza sativa
gcagcccctgcacacaattacatgatgaagtaacaatgcctaaattatgatctaacaaaacaccaaatgaacttaagggggtggcttagtatttatacatgaagtgatctaggacagtgtgtatgacatggcacgtcgccctacgacaaaccagacccatctgcccaagtggaggtgatgcaacaccattggttttggtttctaggaacaaaccactcttacgattcagattggttggatccgtcggaaagagaattccgagatctttctatcaaatccccacatggatttttagatcaacgggtatgctcgtttgaatttggggtggtgcagcaaactgaaccgaaatattctatcttgcatcctcgttgagcttttgttcatctctaccgtcattcctaatcacaataacatcaccactagcatttagtagtactacccaattcagtaaatcattcttatgcaaccctacatggtaattaagttgacggacacgagctcgagcgattgatccttaatcactggttcaacttgtgtgcttgccgttggtgtgattatattcatgcatggtgctgatgttctcatcattctaagtcatggtgttgtgggtttatgccttcaaaact

SEQ ID NO: 33373 - DNA, 1570 bp, Oryza sativa
gaatttattaaaatctaattggacttacaacaggcctaggctcattaataggtttctcgaggtggcgacccgaaggacactgtcggaggcttggatggacgagagctgatggaggtcggggcggatgcagaagctaccgaccgtggtggatgggagcaatgatatattcaacagacacaagcgacgccgactgtgggggtggacggggaggtcgtctggcatacatggagacgcgacgactgggctgggtgagggagatgaccgcgatggacgaaagcgtcggtccggcgaacactggcaaaagaagcggccatggcggaaaccggaggagcggggtgctcctccatctatggacgacgggcccatagtctcggatagcgcgagcagcccagcgacaaattagtcgtccgctggttccctctctcctctcctctctcttcttatcttctacgtcatttaaaaatcctacggtaatggctattgccaggttatcgtacctgctcttagcgaagaaaattaaactagattcctgaaaactccttattcgttccccttaatttcaggaggagaaaagtggtttgaactaataaaagccatgtacgagctgtgtacttgcgtgtttaaagaaaaagatggatttaataaggccaaatcttcaatgcgctcacttttcagctcatcactccgtcacctcgtgctcgtgctgtccttccttcctgctatcctgcgtcgtcttctccacccccctctctctctctctctgctcagctcagctcgattcatctcagatcagcgcatcgaccgagcgagcaagcgccaagcacccaaggaggaaggagggggcgctgctccggccgaatcgatggctatgaggcacagggcacgctccgcccccagctccccgctcaccccgtcttcaaccacaaggtgcatatgctcattactttctccgttagctcccccctgatgattcttgcttccagtggctgtggatttcttgtccatttaagcagttcttgtgcagcatgctccatgcaatgctcctcttttttttccccaatttgttgggagagcaatgctccgtgaagctggggtgtggtggaatcttggtgatgctttgattcagataaaacaagaaatgggaaatgagaaggatttgtttatagcttggcttttgttttctttctttttagtttttttttggcatttcttagacatacgggctatttggtatctcaaacgaggattctcgatgttatatatgggtatttggtaccagatcgagcacaagaagctcaagaaatgctttttgggtgatatgccatgtgcttacatcggcaagcatcgcagcaaagcttcgtcttttagtcttttatatcgggtcaagtaggataagattagtgagaattttgattcagatccatggctaatggcttcatgtatgggcaatgccgtcggtggctagactgcagtaggaattggtaaccaagaacaagaatggatgtgaccaagtttaatctttttcaccttatcttttctgagaggaaaaggcacaggaagatcttggaag

SEQ ID NO: 33374 - DNA, 674 bp, Oryza sativa
atgttcgcctcacccaaaagcctttgacctgccaggggcctaattgcaataatgccttgtccaaaaacgcattgcgaaaacaaacattagtggaacctcacttcctgaattttctgatcttcagatcatccatgtggcagacacacttgctctaatctctctctctctctctctcttttcccccattctttcatctgcttgaagaagcatcgcaacttggattccaggatcgtgccactgcgatgatgatgatgagcatgattttgcagtagcaacgtgcgtcgttgtgtggctgcaagctaggatgcgagctggtgcgtgccaacaaccacgcgaggtcactgctaccacaaataaatcagagaaaaaaagacgtggagtggacggaaattcctctctcctctctcagctgttcaggcaatcatcgccatggagcttggaccaaaccactaatctgtccacttcttttttaataaaaaggatctcccaacgaaccacctaatcagcaacacctcaactgtttccagtacgggaaattccgacccctcaacatcagccactaaccacgtttcaaaagccaaaaaaaaaaaaagaatcagaaccttcctctgttcaaagaaatcggagacgatatcgatttttcagctggttttgcacagaatctctccgaaaga

SEQ ID NO: 33375 - DNA, 553 bp, Oryza sativa
attggagtgcttggcaaatggcaatagagcatattaataacttctacaaaattaacagaacaaaataaaatccagaagcaagaaggcataaacatataaagaaaataaaacctacacagtattcaagctccctacacagaatgtaatataaccaagctccttagtacaaagaaaataaaagacatcaatcattcaacattcactcaaatatatagagcctacacagtaacactaacacagagtgacagaggtggaggttaaggaatgaggaataacacctgctggttgctcagttgctgccgctgggctgctggctactgcgaggcgaggagtcgtcggcgttggtggcggtgaggaagagtcgccagtggggcttgaggtgttatcggtggtggtggctgtcgcgtcgtcgtcggtggtggtggcggcggtgaaacggcgagacgtggcgggacggcgtcgtgagataacggggaccgagcaggccggcggaggtgcgagatggtggcggcggccagcggggaaacggcgaatagcgagggcggcgcgagat

SEQ ID NO: 33376 - DNA, 621 bp, Oryza sativa
atcgggaggagcattagcggttgtggaggctttgccggaggagaagaatggggatgccgtcgacgagcaagaggaggctgatgttcagggcggtgcgccagcggaggtagagatgccaggccaaatgcggcctagctcggggaagaggcccagctaaagtttcaataaaaaaattaaattatatttggtttaattcttaaattggctgcatagtaacgggctgcatagtaacgtgtctaagaaaaggattgggctaaaatgatattacaattaaatttttctttttaaagaattatgattatgattattgtgtttaaactttaaatatattttataatgctttagttaataataataaaaataataagtgactttattatatggtaaaattctcttttatttatctgcttattttatgatcattacattatgtttattacttaaagttattattattttatgcattgtgagtttatttgcgctgcaaataaatattgtaattaagtgtgacaaacaattgtcattctggccaaagctgattgaattttatttgatcacaaaattttattaattcaattcaaatctggccaaagttgttctgattgaattaataaaaggagt

SEQ ID NO: 33377 - DNA, 644 bp, Oryza sativa
ttaaaattatcctccctattgttgagatgaaatttaacgaaaattccctttcaacaattaaagatatatccaaacagctgcattaattccgagaagtataccccctgatcttcctttaggtggaagacaatgccacatgaaatcagcacccccagagaggcgatctaaattcatctttgacatttcaccctttcttgtctccattaacgcaacatagtctagtatttttctctctaatcacttaaaagtttggcacggttcttttgtttaggaggcgttgtccaactagtgaaaaagttaccggattcatagcttgtccctaattgctgcaaacctatcttcctagctcttaactttccattaatgaaagagcatgctagcctattgattcaaaaagaaaatgcatatctacaaatatccactgagaataaagtaactccatcgcctagactctactgtcttaaaaacttgccacaatcagaacctgtgttggaacatatgagaacataacaagaatataaatgcagaaaaaaaacaaaacagaagatgagaaagcatagaaacttggtgtttgagacacaggaattgttatccatcattccaatggaatatttcccttgtcttcagttcatttttattttcct

SEQ ID NO: 33378 - DNA, 600 bp, Oryza sativa
gactactatagggcgaattcgagctcggtacccaccagtgcagttcaaagttaatcttggttcagtcagagttaggggtcagaatcaaattcagttaaaattgagtttagagtttgaatctgatctacagctagatgccatggtacctatcaattacatgcgactcaaaatagttatagaaaaatttaaaaaaaacttagtaacatcaataagtaaaatatcggtaatcaaatgtgtctcaaagtaaattttaccataatatattggattatatgctacttaccaaatcctatcttaatataaagttatcccccactaactcgttaagcttaacctgcaaagatgccacatcatcatccactaacaagatgtcatatcattatccactaattaacaagatgtcacatcattatccactaacaatcatcacatttaaacatcatgcaaacatgctatatctttatagtttttataatttaagagcttttcaaatacaaatatgttaaattatcatccaacataattcacataatgtttcaatgtatatctttgttatgttttatgatatcctatatacttatatagttcatcctcacttag

SEQ ID NO: 33379 - DNA, 569 bp, Oryza sativa
ccaaaataacccgtcgttgaagattgcatagcaattttctcatggccgccgcggccgtggtggattggttgactggagggagctgttcgtctttgacgccttgacgggttcccgcgggtaaggagaagtaggggccaagaaaccctaggtttccagttgattggagggtttgactgctttgcagcgagtacaaaaactgggctcgacggcggccatgtcgcagcactctttccgcctccaaaccactggagcagccgcagcaagcaacctcttcttcttgttctttcgccgcctcacaaatcacaatccccccggtatgcaaatgcaattcctccttgttcaaatgttgaggatgcgatacttcatttttgtttaaatttttttagggttgaggggattatgtcaagtactgtagtaacattttgggttgcgttttttttccatgtgcttcatcagggtgtaaatgaactaaggggaaggaagggttctagactggagattgcattctggtcatataccaaggtactagatttttgctttgattgtgataaatctacaggaacgaatta

SEQ ID NO: 33380 - DNA, 550 bp, Oryza sativa
ccgagcccgaaagccacgaacgggaaaatgatttttcttttatttttattctaattggctaaatgaactttgtgctattaaaattacttcttgagctccgaaaattcacggataatttcggagagtacattcttgcccaaagaatattacaaaatattcccggaggttataggtctgtttttctatggatagaccaaactaaacatcatttgaaaatagtaatttagagagatcaaaatacaatatggcatacaaagcgggggatcctaatgggcgatcgattgcccggatactggggtagcgatcgatcccctgccccctacctacctctacccctacacctggtttttttttttggcaccgcattacttttctattttagtaaatttatacacataaagtttatacaccttaagtttacacatctaaagttcagagaccaaaagtttataagtcaaaagtttatatatccgattcaaatttgaatttgaattcaaatatttttttatatatagtatttctatacatctaaagtttatacacctaaagt

SEQ ID NO: 33381 - DNA, 630 bp, Oryza sativa
ccacatgtccccaccacatacttcgttgcaacaaattacctacatattttggaaatcgtatattaagggaattcgtttcaatttttattccacaaaaatatttcacctagtgtactcataatgcttcactataaatagatctaatgttgtagtgaattcaaacattctgttgtaacaaattacccacatcttatagaaactctctgttaagggaattcgtttgtttttttgttccacaaaaaatgtttcacctaatgtacttgtaatgtttcactatatatgaatcaaatgttgcagtgacttgaaacattctttcgctatttgctgaaacattgtttttatataaggtgaaacaatgcccgatttaaacgattgaaacatttttgatctacttagtaaaacaattccgatatacttggtgtaacaacgtgcaacatttaaaaataattcaataataagctaaatatttttttcattggaaaatatccatgtgcgttcttgttttaaatatttaattgcaacaaatttaatggtgcaatcggagacatgtttgaccagcttgctttgttatatctcgaagtcagtgaactccatatcgttccatagagcatgcagccacctgtggttgct

SEQ ID NO: 33382 - DNA, 637 bp, Oryza sativa
actatagggcgaattcgagctcggtaccctcatgggaggccgcggtagcgcggatccggccagcgcggctgagctgagacgtcgaccaagcagatctagcagctgagcagccagatcgggcatggtggcggggtggtcctgtgagaggcggcgaagtgcgggaaaggcagcgccgggtgcagggagacagcggcgtcgggcgcaaggagacaacggtgtggagcgagggccgagacgatggtgcttgatcgggattacgttatttttgtgttggtgagatttgagaccgagagaaaaagttgtcaccttcctctagggtcggcctcccattttattttgcactgaggggaatcgggggctttccaaaaacataaggttttgggcgctaccaatcaatgcacgtgattgcataattatggtaataatcatgagttaaaacatgttaatcacgcggcaatgggtggaaaacggcagtgcgcaattgcctcaaagttttcatgccgagagtcaattttcccaacaatggtaattgattgttcggttcttcctatgtgcagcctatacttaatatactaattaccgtttgtttatatttggcagcaaaatgacaaaatattgacttatcttaatcgaattg

SEQ ID NO: 33383 - DNA, 600 bp, Oryza sativa
tgcgcgacggatcgctcgctcgatgtggttctcgttcttggtgatgaggcggcggcgagcgggtgtgtatataggcggcgggggcggtggaggaggagtggagaggagtctggaaagggggagaaggtggcaggaggtggaaggcgacattctagatgaagccaggatagagcccgccacgtcacgtcacgtgcatgtgcctgtgtgcccgtggttcgaaatttccgaaatttggcccctaccggtatgctcaaatctcgtccattttttttggtttttttaatttgatcaaattttattcaaaatcaatcaaaatttcaaataatttttgccagaaattaccgaaattttcaaaattttgataatttcggtaaccctggcataaaattcaatttcgaaattttaaaccctgcccgtggaacgggcacgggcgaggtgtctttggatgcccaaagcgtctccatgaaatacgtcgtcggaattccatatctttagtttcaactcggagaataatatttgcagtagaaatataaatgggttaattcatgaataatttactattaaaagtttgatatctgtattatttacgcctttagaagt

SEQ ID NO: 33384 - DNA, 923 bp, Oryza sativa
ctgttaggtacgcgcgcgaacatcttatttatgttttataaatttaactaaagatatcataattaggttttataattccaaccgatccatcacatattcacatgctcggggcactgagagcaagtttaatagtatagccaactactagctccaattcatccatagccaatctaatagctcatatatataatagttacatactatattattaatatctggtcccacctgtcatatacacgttacatcttggagaccgtgctacagctggctacaaatctgtagcccgctgcccttctctctcattatttatctccttaaaatatatttgcagctgacttatagcctgctattgtacctgctttgaggggttcaccatggtcaaagcaaaagtggcgcgaagggactcaagtactaccccgagttaaggaagtgacgcaacgtcagtatgagtttgggattgcgactgccgctgcagctaggccaggggctcgaaatttatgatttgacccagtcctgtgtaactttaccctactatgattttatattaattgcggcgtgatatggtttctatggatggatcaggctccctttggctgtgtttggctgtgtggtgtggcgcattttccatccacatctgagaggctccctttggccgtgttacatcaaaattgaaagtttggttgaaattagaacgatgtgatggaaaagttaaaagtttatgtatgtaggaaagttttgatgtgatggaaaaattggaagtttgaagaattattttggaactaaacacggtgtttatcggttttggaggttgaccgttgggtccatcgacagtttgggacgaagacttcagctaccctactccacatgtcagttgataggtgaatccgtcacatccgacttgctagcttagtggaacatcgaca

SEQ ID NO: 33385 - DNA, 603 bp, Oryza sativa
aaaataattaataactatcaatacaatacaaaattcaaaattgtgttgctatttttaatatattataataataaaatatggaaatatttaagctattatatgaggaaaaatataatgacgttagccgcgtaatctgcgcgggccatcatgctagtttgtcaaaaagcaagtgaaaaattcatccaagttttgaaagtgagggagataaaaaacgaccccttaaagagagatttgataatttaactcttcttaaacgagcgtcacttcgattatttaatatcttgattcactttcattcactcggatagacccacgtatcatgcttataagtgttaattaaagtaaattgaccataaaaaaagttaaattattaaatttatcctcagagtcatcagaaacgaaactagaccaatttaacggaggcctaacttgggcccaaatcaagcccatagataatgagatgggcctgtggggcccactaagcactaggagcggaggcaagagactctccgcgcacatgacgccttcgtgtgctttggactccttttccccgccgccgctgcctcttgccctctcgtctccggccaccagtccactgcgact

SEQ ID NO: 33386 - DNA, 657 bp, Oryza sativa
tttttctatggatagaccaaactaaacatcatttgaaaatagtaatttagagagatcaaaatacaatatggcatacaaagcgggggatcctaatgggcgatcgattgcccggatactggggtagcgatcgatcccctcccccctccctccctctacccctccacctggttttcttttttggcaccgcattactttcctattttagtaaattatacacataaagtttatacaccttaagtttacacatctaaagttcagagaccaaaagtttataagtcaaaagtttatatatccgattcaaatttgaatttgaattcaaatatttttttatatatagtatttctatacatctaaagtttatacacctaaagtttatagacctaaagtttataagtcaaaagtttacatacccgattcaaatttgaatttgaattcaaatattttctatatatagtatttctatacatctaaagtttatacacctaaagtttatagacccaaagtttataagtcaaaagtttacatacccgattcaaatttgaatttgaattcaaattcaaatttggattcaaaatattttctatatatatagaatttctatacatctaaaagttatacacctaaaagtttatagacccaaagtttataagtcaaaag

SEQ ID NO: 33387 - DNA, 1879 bp, Oryza sativa
aaggactcaagtactaacccgagtaaggaagtgacgcaccgtcagtatagttttggatttgcaactgccgctgcagttaggccaggggcttcaaatttatgatttgacccagtcctgtgtaactttaccatactatgattttatattaattgcggcgtgatatggtttctatggatggatcaggctccctttggctgtgtttggctgtgtggtgtggcgcattttccatccacatctgagaggctccctttggccgtgttacatcaaaattgaaagtttggttgaaattagaacgatgtgatggaaaagttaaaagtttatgtatgtaggaaagttttgatgtgatggaaaaattggaagtttgaagaattattttggaactaaacacggtgtttatcggttttggaggttgaccgttgggtccatcgacagtttgggacgaagacttcagctaccctactccacatgtcagttgataggtgaatccgtcacatccgacttgctagcttagtggaacatcgacaagacctatcttataagttggcccccacctttgtatgtatgcatgggtactatggacgtactcctattagcatatcttatatcctataacctatatatcgggaaaatatgtatatatctatacgagtgatccatctaaacttttcgtaccgcccggtacctactatctagaccatccatcacgctaaatccaacgggtgacaatgctcagtactgccaggtaccaaaatcccctcaatggtacctccccttcgtatgcacgcgttaaacaagtggaagggcaaaattgggttttcgcatggtctattctccctgagtccaagccgctcctccctgacgcctatgcctgcgagccgtttctcccgatcccctccccttgaggcgcctcctctgcatctgtcctccatgcgcggccaagctcgccggccatccgagctagctggacacctccgccaccatccctgccccatcctaactcaactcccctgtcaggattgagaggaattctgagatttcagaaatattctaagtctgaaaacctgaagatgcagtttgaagtctgaagatgatgtgcgaacgggaggaagcagagttatgaagatccaacggtctgcagtgattccgaagaggtatcgcaggatcctaaccattcacatgttgtcgggggaccacttgagtggtaaaatggctgttttctctgaattggtgtgtgtgtgttcagtggcaaagaccactttggaatccttatgtactcctattaaaactattggcttgtggccaggagggagataagaaaaacctcattatcatttgttcttaggagtagggtaaagtagatctgggagaaacgagttcttgcggcgaccacctattttcttcccgatttactctgtttcgagcgaacaaaggagagagagaggcgtccatttccaggtgttttcagctctgatcctgacaaaggtatcagagcaaggttcaatccttggctctggaatccatcgggtgagggttggtggaaggcggcggcgagatccattgtaaaatccctaagccttggtggattttatccggtagcggaaggaaaacacagattactggagcgagggtttgtgaaccacctttcggtgtgttcctgtaaaatctccggagctcgtgatctgggttaggcggcggtagacagttctacttaggcacaaaggggagggagtcagatcctaaaccgacctaagcagtggtgtgaatggtgactactaggtacggaggagctcaacgaattccgggttgatatggcggcactgaagaaggaggtggccgatctcaaaggtctgaagggggaagtaaaagagattaaaggatt

SEQ ID NO: 33388 - DNA, 644 bp, Oryza sativa
aatttttagagttcattgttgtgagtaaccatgttttgcaatactcttgcaagtagttgtgatttatgcatgcatgcaactcttgtgtttgttggtaaataatataaggcattttttcaattcagactaatgtgggggcataaagaaagatggtcacaatgattgtattcatttgacaacaattcctgattttcctcctaaggtcaaaactacctagtgtatgcaacacctccatttctctaattaccctaatcatgtgttctgacatggtaaaatccaattttccctttcatgctcaaaccactgttcctctatccctttgaaaaactgcacaacatttgaaaatttagttccatcacgaaacatcgcttcatgtgcttgcacatgatcttttgcagtaagcaagtaactgcatttacttttaaaattagaaatttaagatattacctgcgtggaataccagcctaggagcaggattttactcaaaattgttgttgtttttctataaccctgataataaccatttattacagtttgcgaatacatattagaaaaagtgattttagcagtttactttttgcaaagcttctgatggtttctcaattcagatttcatggtgcaacagagcacaatgcctttaaagt

SEQ ID NO: 33389 - DNA, 638 bp, Oryza sativa
  unsure (1)..(638): unsure at all n locations
ttacaaaaaaaaaaaaaatgcatcggtagcttttgctgttcaaagcgaaatcgacaataacaaacaagatgagatacagcaggcacctagattgttataaatcttacagctcatttatttctcggaggcaatacagatcgatcaaagcagctacccaactatatccacagattcaactccttatgcctcttcatttgctgcatcaatcacaagaacaagatggaaccagctcaaagatcaattaggcgcacaaactcaaactggactagcatgtcatgtatgctcacccactcaggcaatggagtttcacttagaagatcaagatataagctaaggtcgttcgaattgtctattgaatgatgtttttttccaaaccccaaaacaggacgtgcacatatatccatattaatttcatttacccttcaagtgatgtttatttgtacccccaaaagatgatagtggaaactcttggtccttctttttttacattttgtgctttcatgctgggctgtataagcaaccaaagtatcttctgattcttgccatgttgaaaaaangttacnaaanttccaannacaaacccaaaattttcagggtgcttcaaatgtgtgtactaatggtaagttattgtactttca

SEQ ID NO: 33390 - DNA, 581 bp, Oryza sativa
tcctttgcggatattatgcgtgcgaattccttattaacgcggaggatgtaagtctttatactatgtattagacagctcttgatatttatgatactaatatattgattaatttcaatgcatgcagttgccaagattagaatgtcgaacaagctttgacgatacaggtatcacaaatgtgcagcgtgatctgtgccacttcatccaccatgagtgctctcatgtcaaaggagatttcttcgacccagagggtgccctagcggcaagtgacgaattcaaggatctttgggagtagaacactgctatgccataatataactaaatgacgttatttgaagtgacaatgtaaaacaatattgtaatatatatattttggcaacacttttgatttatgcaatataagtagatttctcagtaccaaatgcttgataatctttcaatatatgtacctgcaagaatttctaataaataatttaaaagtaatttacggccaaattataattaaatttcaatattttctacctatcttcgcaggcggaagttttttttttgcaagcggacgattcctattttcgcaggcggac

SEQ ID NO: 33391 - DNA, 560 bp, Oryza sativa
aagtccttttattttccccatttagctctcacactccagttagaagtggtttttaaactctcatatccaattagtgtgtggtaaccttggggtctgctagtatatgtggctgatacccacatgaggtgtttgacaaacataccaaattttaaaaaaattatataggaccctttttgagtaaactgactgtttatctggtgattccttctgttattaaactgctagtctgcataaatgcatccttccttttacctaaaatagttgagactttgtagacgtagggatgtttaatggtttattattgagcatgttgctgggaagtttactaatggatttcatctgtgtcagtttaggtgataaggttcatatttcacttggaacaggtatggcaggagaaatattgtggcttcaacttatccaatacaatacaaaagttggaacgttgttttggtgttttaattaacctaaagctagtgataaataattggcctcaaaggttggttgggaatgcagtaatatcctttatccaatacaatgctcgcttgtttataatatactag

SEQ ID NO: 33392 - DNA, 855 bp, Oryza sativa
ttttatttgtggtattttttttggatctgtgatgtaatgtatatatgattcgagatgttatattttgatttggggatttgggatttgattatggggggatatgcatcgatcccatccgatttgggggaaaatagaatgaaaaacgcatctagcaaagaaacaataaaaaaatggcaaccaggctgccgctttcctcccctttagtctcgattggtgttatcaccggggactaaagatcaacttttatcccggttattttatccgggactaaagatatatctttagtcccggatttgaactcccggttgtatacccgggagaacaggcagttacgaaccggaggtaaagataacttgtgcagtagtggtggcatactagtcagaaaaaaaaaattaaaaaagtacttagggcccacatatcagttacataatctttttcttttcttttcttctccttctcttctcttttatctcttctctctcttcttcagtgagtgaggccagcggcaatgggcgagcagcgggtgagcgctgcggctggtccgcgcagcagccgggcggcggaagcgagcgtggtctgcgggtagaacggaggcgggcagagcggcaccgggatacgggcagagccgcgatgggcggcggcggccgagcggagtggacggcgggagagcacggcggcgggcgagcggacgaggtcgactaaatcaagtgtaagtacggaaagaaaaacgagggcaagagctttaatccggagaaaataacaattactactagtaagcagctgttattgccggaagccaagctcacacagcaaatcgagcctgtcgaatcgaaggaaggagggggaggaagcaag

SEQ ID NO: 33393 - DNA, 1099 bp, Oryza sativa
acgataaacagggggaactagatttatagaagtaattagtaacaggaaattgctaggatagttaaaaatatttgcatagattaaaaaggtagtccaaaggtttttccgtgcaattttaatgcaaaatgatggatagaaatcggtattctaggatacagttattttaggacatatagtttccacttttctgttattcacatgcggaaatatctatggtattattcatcatctttccccaaatttcccctgtatttctttagtcttctctgtgctccatttatctctaatcggttgattcgatgtgtgtcctcttccagaaggtacagcgtcgtcctctcaggaagatgtagcagcttgtggctgccgatggcagcaggctactgccagcagagtgaaagaccggatgctcctcctgagaggcgaccttgaagaagtcgcagcgtacctcgccgatctgtcggagctggagaacccccccttgacagcgaaacactggatgagagagtttcccaagcgatatccggcgcagcgctgggtggaggaggataaggctgacgacctcgactggggcctctttggcgacgccaatgaccgctgcggcgagctctgcgttttggtggtatcacataatatgtttacatatttataatacgttgttttttgaaataaataattcattattggttaatgaatatgtgtttcattcatgaaactctttatgttgtatgttgttatttctaaaggatccctgatgaaatatcatatgtggagcaaatatggtttagtgatcaacatatgtattgattgatgatcattgtcagggttacggataaggcataccctctattctaggagtcatgagatatatggttggacactgtatatcttcaagtatacgggaccttttggataagaaaattaatgtgttcttaaggaaataatctttgtgaatagaaggtgttagagttgaattcggaggagataacgataccgtacggggtccgttgtctccgagttctacttggagactaaggggatctgcggtatacagagatcccttcagggggtatagggcatcaaatcttagtgcataacaccg

SEQ ID NO: 33394 - DNA, 564 bp, Oryza sativa
  unsure (1)..(564): unsure at all n locations
tgcagccnctcatgtatatatagcacaaagatcactgagtaaaatctggatatgccttggaatatgctacctaagctgacaatgcttgaccagctaataaactgtcacttttgcgtttgcatcttataactgactgacccccgtacccttctggtttctgttgctaatacaaaaggaaccagtcttgaacatgagcttgaattcgatgggccatgtctggatcatattcttttccatttcgtggatcctgctgatagcctgatattatgctctgttctgggacattcttatggatcttccccctgggtgctcttgaagctgtatatgaagaatccgttactgcatctgattctttcacagcaaaggacaacttttataaagtaatactttgtacatgcagcctgaggagctcgccatatggttttgatcagatcaaatcactgccgaaatctgaaacaatgttattatgatattatcaagcagtgacatgaaagagaacttgttagttatgaaatggaacataaatataacttgtatattcaacagtggtaaaaacatcatacc

SEQ ID NO: 33395 - DNA, 3319 bp, Oryza sativa
aaggacttcgccgttttttttcttttcatcttttgtttggtcttttatgtttagatctagacctatgtgtaatttgccttttctcaaggggttgtcatgtaaacctgccattgtaatttgccctttcttaaagggctgccattgtatctgtttcaaatttttttactctttgttaggtatataaatcgacatctatttttcgatccaaccgtaattttcaggtttttactgtttgcaccacttttttttcccacattatccatgctttaccactaaatgtacacccgtacccatgtaggcatgtactatctcctgaaattaaatcacagaaaaatgcgaacgttcggtgttagatacaagagaatcgagtggataagttccccgcacaaagagccatgaccaaagtgtagcttagttcgccatacatcaatatcttcttcattcctaacaactaacagcgggtggaagacgttataaatggtccaagtcatcaaaagcgtgatagactgcccacgtgaacctctccagtctccactgattgtggcagagaagaaacacctcaagtcttcattcttctacaatacgtgaacacctcactcctcacttcctcaggtcaggcataattgacaatttgacaccatgcacttcgtttctggtgtatctttgaacaggagagaagattttgagtgtattttttcttcaaaatctcagacatggaatttagaaagaaagagtaaatttcacaaaattacatgttttggatacaaagatgaatttagcgcaaaaaaaactattaacccatggttatttaagttctaattatgacaaacttgaaaaatgatttatttgatattttattgccatttctacaatatctatatcataaccctcctcacccccaccctggttttacaaaaatagaaaaaaatgggaaacatagtacaaacgtaggcgctcactatatgcgcacacttatctctatgaatatgcacacacaccctatctctatgagcacctccgaaagactgggccgatatatcttgagattgacaaagtcatcacgagcgtatttctgttgacgggtacgatgcctatcactaaaagaataattagcgcacccgtgtcagatctacaattttttttaagtaatcctggattctggggcaaactgtttcataaaacctcatttttatgcaaaatagttatatttcactataaaacatagtatttctagatatatacttacttttttaaaaaagacgatatatacttgcattagagaccgaaaatatacatttctatactgtttattatatttccttcctaactttcccaattcataatggaaaagatggagatgcaaatgctagtacatcatcatgtgagtggattacaaagacccaaacttacggtaattttaccgttcttaagaaaatatcataaggtaccttattttttattataaaattcagtacttccaagtgctagcctgctaggtactttggggtatcaaattttttagtgtaaaatcttggtactttcaagtattttttaagaaccgtaaaatttcttcgaaacataacataattggtaaccgatatttgttgagaaagtagctaatgtgtgtatctacttagaaaatatgacattatttttttatacatgtattatgcatataatagccaaacaaaatacataggaatgaatgtgggattttatgaaatattttgccctaaaatctggggtgggggattgaaacaagttgcaaaacctaaattttgtgttatgaatgtctgaaaacatgtagttttgtgaaatttattcaaaaataaatgcactttggaccttggtaacaaaatgtacagatagggcttacaacttcgcaagttcgcatggatgttaactggccacccaagcacagtgtttcacagccgcctcttcttatatttttcccccacatacgcatagtagcgaagacctaacacacttatgtattgtgacaggtgccaaataatttgtcactacatagtattgtcgcttactgtatgtgtggagtcaagagaaaacttgaggcacgttcctgaaggaaaagaaaattaagaattgctcgtttttccagctagctgctcagttaggaacaacttggtggaaaagttattatccgcagttttatgcacgaaatagatttgcacatgtccatctattgatgaggtcatacttaatgagcttatattggttgcttattaatatatctaaaaaatcttgatgcatttagattttttttccagaaaagtatcgttatatagaaagcgtacaagagttttacagcattatacgtatatttttatatattttcattatctactataaaaaatatatatttttctgtataaaaaatacacacatacacacgtataaaaagtttgtatgtgtgtattttttttgttgcttattttcactatctactataaatataaatatatatatatatatatgtatatttttttgatgtataaaaaaatacgcacatacaaactttgtatacgatgtgtacaaactttgtatactacgtgtataaactttgtatacgatatatacaaactttatatacaacatgtacaaactttgtatacgtacatattaaaaaatcaaaaaaatcacgtatacaaactttgtatacacgtatacaaactttttatacgtatacttatatgctaaaaaaccaaaaagaaaaaaaccggaaagaaaaaaacgaatggaaaaccgcaaaaaacaaaaaaaaacaacggaaaaaaccggcgggccccacccctacgcacgcgctcaccgctcggccccctccgcgcgcgccacgtgcctcaccgcgcggctaatcgcgttttagctttctcgtgagatgcggacgatatggtccagctcgatcgtacaaaggaataagttcatttggcatcccttaactttacgttgagtttgtttgacatccctcatcctcaataccggaaatctttatccttaaactatacaaaaccgtgcaatttagatcccataacagtatcaacagctggtttcactgatgtgatatcctagtcagcaaagagaaaataaaaaaaagtacgggacccacatgtaagtgaaaaaaatcaatgcttctcctttttttttcccaccatgcatgcgaggtcaacatatgaggaggcaacagcagatagggcaactaggacgcagcatcacctagggcggcgaggaggcgacggcgacgcgacaccgactgtggggtggcgacgaggcgaactcaactgggggtgttcaacctgtgggg

SEQ ID NO: 33396 - DNA, 539 bp, Oryza sativa
tcctgcagcccaaattactttggatttctatcaatcaaatcgattaaatttctataatggaatcttaggaaatcaatgtgagggttgttggtcgtttttctccaacttgtagagtagggttccaaattgggtcaaaattaaagaagattaaaacacacaataattaaggcataagatgccaggtaagtcttgattttggatgtgtattttttttctaagaaacatagtacaacacatacacactcgtctctataaacacgggcgcacactcactctctttttttatgattttgtcccaacgacctacactaaatacaagaaaaattaaggtaatttgaggcaactggtcaggagcaccactacaccatgtcgaaaaatatagtatgttgtagtgtatggtgcgtctatatcaaatgggaagatttggccataccttttttttccgtcctccgccactgttaattgcagctccattgccctttcattctcgccctgcgtatatgtacagcgtgcccatagcttccccgtgcccccccccc

SEQ ID NO: 33397 - DNA, 1777 bp, Oryza sativa
cttatacacatgggattagtggaaacataaaattgatatatttggcttgttcctgattgccaaagtatattatatactacatattaagtgttttagtacgtaaggttaacttctaaagtgcttatctgattgccgactttgttatttaagatgagcatgtttcccgcactacaaaagtttcgtgaactaaccgatgcgtgttttctaaatactttggatacaaaagtatttttaaaaaatcaaataaacctattttcaattttgtaatacttaatacttgattaatattttttatgacatgtatcattttgtgagccctagataaagtcagccagatcgattgaaggcctatgtagtagataaaaggcatcgacacggtatcaaaagaatatatttcatcattaattttctagcaatatatgaagaagaaaatattcaagataaatttagtagtgtcattttacaacatcaatatttttttctagtaggtattgagtaaattttgagaatgctacacacagtcgaagttgttttatttttaaaaataaaaatctaatataattatatatgttgttaagtgatatatctataattttaatttatttatatttttcatggatgttttcatgagatatattttttatttgaacataacttgaaataacatatatttttatttttacaacttaaattatagttaagatgtgctgattattagattggtttttcgactagccgagaaataaaaaaaaggaaagagaagttcaagtacaatttttttttgtcgggtgtgggtttcgggatacaaatgtacgtactcacatacagatatggaacgatgtaaatctttggagatatcctatcttactataatgttatcctccactaacttcttaagtttgacatgcaaagatgtcacatcatcatctactaacaagatgccacatcatcatccactaattaacaagatgtcatatcatcatccactaacactcatcacatttaaatatcatgcaaacatgctatatatttatagtttttataatttaagagcttttaaaatacaaacatgttaattatcattcaacataattcacataatgtttcaatgtatatctttattatgttttatgatataaagtatatagttcatcctcacttagttagtgcttaaatgattaatctatggtccaaattatctttctctttttttctctaattaagtcatatcacatcaattgtttttagtcttttgatgattagtatatctccctacttttcttcttccataaaggcataccagcttactttttaagtttgaatcaccattctacatactatttaaatttaaattatcataaaccacattaatttacttaatctgatgttatctagctatcttatatgttatttttttttattgttatcatactaaatttccgcagcaatgcgtggggtttcacctagtaatataaatttgattgttaatttagaagatagatctaatggttaaaaataatggtcccaccacattaaatgaaaatcaatggctagatgttttctttttttcttagattttctatgatttttaaagggccacatgatggcttgagagcctttgtaggaagattaatggaccttttagtatataataattatacatgttggtaagtaatatatctataattttaattcatttatatttttcatggatgttttcatgagatatattttttatttgaacattactcggaataactatatgtttatttttaca

SEQ ID NO: 33398 - DNA, 586 bp, Oryza sativa
catgtctactttgactttggattcgctttacactaaactaaaaactcatgagatgaatattctttctcttaaaggtgattctaagtctagtgctttggtttcgtctacaacttctttggatgttggtgcttcttcatcgaagtcttctgttcttgctttatttaatgccatgtccgatgatcaactcgaacagttcgaggaggaggacttggttttggttgctaacaaagtttttcgagctatgaatagtgtcaggaacaggaaaagaggcggtcctaaacgttgcttttagtgtggtgcacttgatcatcttcgttcacattgtcctaagcttgggagaggcaagaaggaataaaatagtagagtcaaagaggttgaagtggacaagaagaagaacacgaatgagaagaagaagaattgcatgcagtggttaatctaagaactcatagcagcttttgatgaatcggaaaatgaagacgagagcaaaggtaagcaaggtggtgatctagcttttattgctcgaatgcaagttctgatgtgatgaatctgataggatagtgaagaaaagtttagttatgatcaatta

SEQ ID NO: 33399 - DNA, 522 bp, Oryza sativa
  unsure (1)..(522): unsure at all n locations
aaactttgggtttataaactattatttgaattcaaattcaaatttaaatcggattataaacttttgacttataaactttaggtgtataaactttggatgtatagaaatactatatataaaaaatatttgaattcaaattcaaatttgaatcggatatataaacttttgacttataaactttgggtctctgaactttagatgtgtaaacttgatgtgtataaactttagtgcataaatttactaaaatagaaaagtaatacggtgccaaaaaaaccaggtggagggagggagggggagggggggagggggaggggnnnnnnnncnnntngntngntnnncattgnncgacgagcaatcgctcattagccgtttcgcgttaaaccgaccaaaattctctattgatggaacaaaattctcaggctttggcccattttagcagcagtagagaagtactccctccgtctaaaaaaaagacaaatcctgagtttccatgtccaacgtttgactgttcgtcttatatga

SEQ ID NO: 33400 - DNA, 603 bp, Oryza sativa
cccgcgccgcccgtcgccacccctccattcccgcaatccaccggcgtagcaccactccccccaccaaaccgagccggcactgcaatccgccgtgttccggccgccgcttctcgccgctctagccaccgccgtgctgtgccgccacgacctccggcctcgccgcaccgagggctacctcggccgtccctcgctcgccgcgaaacaccgccgtagtgccgattccgccgccaacccgaggctgccgccgcattcgtcgcctccgatcgacgattgccatcgaccgcgaccaccccggaccgcgccgcttgctccgttggcgtcgcaacgtcgtgccgcgccccgtccacccctccgcccttggaaatcactgctggaactccgccagtgccgtcgacccacgggtgccgcctccaacccctcaacgccgacgctctcctttgccacacagccgccacctccgctcgatgcgtccccttcctccctccccgcctcaaccgccttctctcggccccgctcatgccgccgctgctcgccgccggcgctattgggccaggtcgccgctagccggcggcaggctggccgctttccgtgtgcgcctgcccg

SEQ ID NO: 33401 - DNA, 1884 bp, Oryza sativa
gatccatgcactgaatggatatactccctccgatagattttagatagacaacatctgttgacattagtagtaatatgaggtgttccttaaatctaaaatctcttatgctttatggcgattacgcaacaattttgatcgtctgcttttatgatcaatggttcacactaaatattatagtaccatttttgtgaacagtgctttatataaaatattatacgtctcattatctcatgcgtgcatgtgaaacttgattcaattatataaataaaaatgtgtagcgacgattagtcactaattcttaataatattctaaacctagtccaatagagatatcattgttgcattatcgtatccgccgaagagtttattcgaaaataagattgaaccatgaatctctatacaatccaaaggttggggatttaattagtagtatgtgatgtatttacaattatgtataagatattacacaagaaaataatttgttagttttgtaaaaataaaatccatagtccaatctttacacaacaatggcaacaaaacactcaagaaaggcaataggcataggagtgggcagaaaaagactaaaccgaaaagatcaagactgagaccgaaaagactgagatcgagaaattcggtccagacaatgaaagaccgaatttcagttcggccaattcagttagtctcctcggttaaccaaatagaccgaataacaaaaaaaaagtctaaatgcaacctacaatccactgagttcaatatgattaaactatagttttcacatccctacttcttctaggcatgcaacctaataagagtctttattcatacgtgcttacgaattttttttgtgatttttgtgttgaaaatttctattatttctttgcatatatgaactattgttgaatttcggtcaggaccgagaccgagaccgaatttatcggtcctgatatttttgttttgaaattcgatttaactttttaaagactgaaagattgaagttcaagaccgattttcggtcagaaccggatgtcccctccctaaataggcatcattacccataacaaattcacacaacacgggtcgtgccatagacacgaaacgctagccaccacgccaagcgcccaaccccaactccaactccaacccgtcgtgctcaccgagaaaggcgaaattgaaaaccaccccaacccgagaaaattgcatatctaccatcgcataagattggcttcgcagaaataccatcacttaaatcggcttcgctagaataccactcccaactagaacggcttcgccaaaatgccattttggacaaaaatgaccctgcatctatctcttccacctccggcacgagcaaacgacaatggtgcgcggcgcggtagcggcaggtgagatgaggagcgaacgacggtggtcttctccggcgagttcgtccgcctcacctagcctcgcggcccccaacgccttcagtctccgcgacacgccgcctccgtcgccgacgagttcgacgaatcatccccattgccagtgagttcatctgttgcctcgacacaccacccccatcctcaacgagttcttccgccgcacctcaacgcgtcacccctatcgctggtgagttcgtccgctccgcttccgtcaccgatgagtttggccccatcaacgttgatgacgtcggctatggcctcctcttagcgcggcaggcatgatgaaaaggtggggacgacgaggagggcagcgcccccatcgtcgccgacaaggtggcactggtggctgccgacgagctcctccaacattggcattggaggaagggagaagaaccagggttatttttgtccaaaatgtcattttggcaaagccgttctagttgggagtggtattctagcgaagccg

SEQ ID NO: 33402 - DNA, 641 bp, Oryza sativa
taagaatgccatttagggtttgttgttggcgccattgcttttgggaacctttgggagtttattagtggttttttcccaccctccccggcgttaggaggtttacttcttattagctaactttttgtttattttcttgtgttttgatttttttttcttgtccccggtaacggctttctgtttgttgtgttgtgtaactaaacattttctttttttctaatatatcgacgtgtaattgttttgtacattcgccgaaaaaaaacatacgtgagaatgttcactgaaaagaaaaacagatcatgtacgtattgcaagtaccggtttttctcctctaggaacattctcgtcctctcactcccttttaacgtggcatacacgaatgcctctcaaaaataaatcaaaaccaacgatttattttcataaaagaaactaaattaaaaaatcgatcgcagggctccattacttttctcgatcgtcaggcattcgtgtatacgccgtcaattaatagatctccatatatcttcaagaaacaatgcctataaataactagttctacataccacagctcactcaactcgatcgaccatatacatatagaaacactttcttcttcgtcttcctcgatagccaaaatacactgtgct

SEQ ID NO: 33403 - DNA, 698 bp, Oryza sativa
actaacaattgcagagatttatgacatttcatgtgtttggtcgttaaaatttcgcaaagcatattacatgtggcacgtggtttcttgcagataatgcaacatgcacatcaagcacatgggatgtatgaccctgatttcagcccaacaaacaaataacaagtagcaggaaaaaaggaatgcaaaaaagaaagacaactttgttaaatatcacactttcagatcctacatccttagatggctggtgccttccaaactatacaaaaatcatactcaaaacattccaatgcgagttgcttaaattccacaatctgtaattagttcgaacgttgcgagttgcaacaacattaggacaagcagagagaacaaatccatgagcatgttcatgatcaaagattcacctagagacctgaccccttaactcatactccccctgaccataaatatttgacgtttagtctagtgtcataattgcaatgcaatgtttacttagactaggccccaggatgttcatgtcttaatgataccaccacttacagttaccttgggacagaaatcaattgcaaatagtactacactgttagttcaaggttagtaagtttacaaacctcagttagacagccttaattactacttagccattaggacaggttaaaactatgacccctttgcacctgaaagctagctcatcagctacatga

SEQ ID NO: 33404 - DNA, 581 bp, Oryza sativa
aaggataggatagcgagaagcacaaccgaatggccattgaagttttcagttcctaattaacctgaagttttgtttggctgaatttgggggcggaaattggaaattgatagtttcatacaccaccatttgtccatttcatattccagcttcaaatgggcactgaacttgtccagatttctaatttgctatgtttagcttttgaattggacagtgcatgcttgatatagatttgaattattgaacctgaacaaggttttaatctgcctacatccaattgaaacatataagctgatttcaagattccaatatttgaacctgacaaggcttgcatttgccttcaatcaatttgaaaaacagtacctaagggtctgtttggtgagcttaagattctgagaagcagctggctggtaaccagcagccagcttatgagaatatgaaaaaggtgggtttcccagtttctgtcttctatttattttctggattccacaactacagcttcaatctgaaccaaaagctggactgtttaggggagtttctgattctggtagaagctgcattagcttaaaaactcccccaaacat

SEQ ID NO: 33405 - DNA, 694 bp, Oryza sativa
accactctatctattgcatcttacataagttggttcatccaattgcctaattcatcagttaacctagatttcttagtctgaggctttcactgtctcatgtcacactgtcgtagctgtacttttatattatgggcatcatatattcatgttgattaacacttaagcacataattattacgatgggtcgtttattgattattgtattattgttccttgcattgctaactcgatgtgtatcgattgcgtacacacgtaacatccgataaatttaatccgttaccgaactgattccgcaccattttcgacatccgaaacaatctgctccgtatccgcatccgtacactatccgcacccgcttaaaatatatggtttaggatatggtatgaccattatcgtccgaatccgctccgttttcacccctaaatgaaacaacgcccaatttttgagaaacaaatcgggcgcccgatttgtaattgctttgaagtttttgatagctggcccttttatttccggtaatctaattgtgggtctcattttgttgagagtaaaactaaaaattccaatttggctcccttaattataggtcaatctaattcatatccctcaaccataaaaccggatataacgaatacctcaactattaaaaccggtacaaaatgattcataagatagtattgatagtggtattggtgac

SEQ ID NO: 33406 - DNA, 525 bp, Oryza sativa
atcgccacatggccgttggcatcggcgagaaaaagcttcaagcttctcatcgccgaggccgagcacggcagccagcaacggcggtggaggctggcttaccgagcaagttacctcccgtctatttaagacgggccccttgctctctctgagaccttctctcccccaccaccaaaccacgcctcgcccctttcaaatcacgcctcgcgacgatggctgatcccaacggcccccgccacctccccaccccgttcgagccacggcccatcgatggcctaatcggcggcgacaccgccgactccgacagcgggggcaccgccattgtcggcaacatgatgaccaccggtcccggcgcggcgctggtgctggcggcggcggggacgacgacgacctccacctccctcgccgagagcagcgggatcggtggccgcctcgtccaggatcaggaggaggccggctccaggtcgaaatgcattttgttctttgtattaaaaaaagtattgcatgaccgaataattcaaggagggg

SEQ ID NO: 33407 - DNA, 618 bp, Oryza sativa
tctttctcttaaaaaaaactagtcagataccttttataaatacaatatcattaacaaaaataatagttattattcctcatgtaaaaacataggtaatatatattacggagcatacacacatgagctagctgcttagtattcatgtgcaagtaatagtgttttctgtagcaatattattatcaaaaataaataagaataagaaaaaaagaagaagatggaacaacagaagaatataaaaggttaaagtttttagtttcacaccattcactacaaagaacaattttaataatactagtgtattatcgattaatgtgagtatataccataccatagttgtgagcagcaaccaccctcatgtgtttgggctagtgactaacctcctctttttcttacttctttcgaagttctctgaacatatttaggtaaaagatgttttgttttggataaaaaagaaacaatttaactatattagttttagagagaatccattgtgtgccgctgactttgtccttgttctataatatgccactgagtttgttaagttctacagcatgtcattgtattttgcttaaattctataatataccatcgccgtccatttagattctgttagtactg

SEQ ID NO: 33408 - DNA, 695 bp, Oryza sativa
aaattagagagagaataaggaggtttagaaaatttagaataattagaatttaattatagattaattatagtcgtagaatgcaaaacttaatataattatagattatttttggtaatctctataagtaatcaattcgcggtaggagtttagatttattaagagctaaataatatgttgaatcctcaggagtgtacttctaaatcacgaaataacttaggttgaatgacactaaaattggaataacgtggtttcgcaaactttgtagtcgatataggcagatcgattcgcgttcgacttttatttgagtttattggattttatttgaattctaattgaattcaaatcatttcttcgcacgtaattttagagcccgagggggttgcggatccgagcaaggatcaagacccgcaggactacgagcaaggcaagtcatcactattccttgaacatgtcgatcccaattcgaaattattttgtttacaaataaaattgcatgcaattatgaacatcctacttgtgattatgccatgccttgattattgtttacccttatgccttcgtaaccatgtttacgtatgagtccctagtcaattatgacaattgcttagaaatgctattttagaatcatgcatactcatatttatcaaatgctatatgcttgggcaattacctttgggaaggtaattgagatgcgg

SEQ ID NO: 33409 - DNA, 610 bp, Oryza sativa
aagctccaaaagaatatacagctgccataatccgatgaaagaattgccctgcagcaggaggtgccgaggaagagagcttggtcacctagttccttcaccttcaaccacctgcgcttgtccagatctgccttgaacacgtccagcttgatctccttcctcagctcgtcgacgccccaaaggcgtacattgtaaaatatggggagatgccaccgccatcgaaccatcatcagccttccagtagcgcacgatatgacgaggtaaaaagtgctccgccaactgtagccttgacaactctaggcttgaggagctatgccgatcacgatatctgcactgatgctatcgctgaactcgtgaacgaaaagctccccgtcactgctaatggagtagagcttgccattgtagtaggctatgtcgcgcgcgaagcaggggccgccggaggcaaacagccaggttgagtgcattcccggccggtagaagaaaacgccagagccggcgatgacggcggcgacgagatcaggcgagcacacggcgatcttccgccggcgttctcgccgaagcacatggttcgttgtccctctttctcctccccgtagtcggggaggatggcgtc

SEQ ID NO: 33410 - DNA, 728 bp, Oryza sativa
cgctggataactggttttgcgggacgattttgtaactcgatgacaagttgagggaccttcggtgtactttttcccccagaaaatagagtactatttttcctgcaaaacacatatgggctttcagcccaaaacaggtttatgggaaaaagttcctacctgagtgcccgataaaaataaaaatatcgggcgctcctcattctcagccactcgtttcttatctcgctctccctcttctcgcttctctcgctccctcttctatggacgcggccgagcttcgcggcgttgacgatggcggcggcgcagttgtggctgacatggccgagctcggcacggcatcgacaacggcagccacgcggttgtggctgagcttggtctgcatcgacgaccacggtgcagatttgccacatgagcacgtggtagtgattctagggtacgtcggtgccacctcctcatccacagcggcatctgtaacgccccgattttctttcgggattaaaaatcattaaataatatattttttagaaattaaataaaagttaagtcaattcaatcaagtgaaataatgggagaatttaaaatttttcctttaaaaatcattggccgagaatattttgcaatactctttgtgccctaaatattctccgaaattttcgcatgaattttcggagctcaaaaaataattttaatagcacaaagatcatgtaatcaattaattaaaaagaaaagca

SEQ ID NO: 33411 - DNA, 1936 bp, Oryza sativa
aaagtagactttgcaaggggggcgaaagggctgggccgagggagagggataggccggccggggagagggggggcatgggctgcgagagggaagggggatttgggccgaaaatggcccaaggagagtagaaggagttttaatttgttttctatttaatataattgattaaatgaactttgtgtctttaaaattacttcttgagctccgaaaattcgcaggaaattcgagagaatatattaggacgcagagaatattacaaaatattcccggccatgatttttaaaggaaattttaattccctctataatttcacttgattgaattgctttaacttttaatataatttctagaaatgatttttaatcccgaacgaaaatcagagcagtactgatccgatggttaaagcatacatcagctaaaaatccgatgtcataaaatccaatcgatttagataaacagtgaaacctttgttgcaatcagctaaatacaatttgtatgtaatctttgtaagaagatgtaacatccagataacttatcggctagcaccctgataaaacattagcatgaacctatcggcttaacaagaattatattaacaataacaatctagtaggttggatctaaccgatgcagcacgagattatatatgataatctaatactcgatgagccgatagatctgtctaatgtgatggatataataaatatatctataacaacattgtgattgtagagatatatcggctaagacagaagatcagacctaatctagacagtcccaactaaaccgatgcatctctaaacacaatgcaattagagatagaattgagatatcaggtaggcaaatatatcaagcaaaccagagcgatccaagagatcgaagcgatgcagccttgaacaacaccaatgtagccgatagattcaggaccaatggaacgtaggacttaccccttcgccggagatcaaactgaaccgatgcagccccgcgtcaggtgccaaattccaccagttgttaagtaaaacctcaaaaaagagggtggcgatgcgccgagagtagtattgatcgagagataaattacaatgaccccgggtgtacatatttataccctcgtcacctccgctgcggcatcgcctctcgctagccgccaaaccttttcatctccctcctcgccccgccgacatcctaccgacctgccggcctcctgccttctcaagcgtcgccacagtcaccgccgttgcgttgcccgtcaccggccgccgacgccctcctctcccgcctcgccccgccggccagcctgcgcaaagaagtgagagagagatagaggaggaagggagagaagaggggaaagagaggtgccgacgtggacaccctgacgtcggacaaaactggggccaaaccacctatggacctaaagcgtgagtgggcaaactaacttgggactataggtgatgactggtctaaaagctttatctacctattattttagaaacttaaacgtttgaaacctagtatttaaactaccatgtttgtataaatggctaattctttcaaacaaaacagataaaatagggcaagcattgtaggcttagcatttaagattatgcaatataaatataatcactaaatgcccaatgcatgttagctaaaataaaatgacaaagagtgatcgtttggatcatacaaattcctaatgtttaacaaaaaaaattagagtaaaaatatttaaatcatgaaaacaatcataccacactacataataatcacgcatgcagagttatttttagctatgaaattatgttcttgttaagctatatggagtctcacacactctgcacgacaatgagctctctcatactgcgaaatcaattaagactcgagaaggctttttagaaggctttttatttgaaatatatatagtgtcacatgcacccaaggc

SEQ ID NO: 33412 - DNA, 1892 bp, Oryza sativa
cttcgtagtcctaggatgggtctaatcccatcctaggttgtaatatattgggatggagggagtaagaaagtttttcttagcaatcagggtgtatgattcactacattcgcttaagaaatattgtgagatatttcaaaatccatggaatttagatggtagtgaatttattcttgaattttttccattgttgcgtacaagtattacttatattgacctatttccattcagtcgcacttttattcgtcgttttattcttgttgtacgtcaatagtcttgctttccaaatgattggcctgtaatatagctcttggagttgaaagtgtttatcgagtgtgtccagaaaattggtagcttgattcctctattgtgggtaagaaaatttgccatatacgctttatgctctttttatccagatataccactggtataaattcaaactccttgcacttgtcggaagtacaaatctctagctctagtcatgaatctccaaatttttatggtcatgaatgtcaggatggggagtttcagagtaggaaatggagatcaaatattcagacatgcagagaagttcagataagcagagaagaagcagagttcaggacatatcgtttcgctgagaacgtaagtgaagatggacggccggatgaaggaaattaaactttaccgcaggatccaaaggtgtagaaggagttatcttgtactattcactatttagtatttgtcgttgcctgcgagcacgatttttactctgattatgtcagcagcgctgtaattttgaacatgtgggtgaaaatgcgactgggagtatataacccagcgccgtaaggagaagaaggcatgaaaaagcaaattaatttgtcctagagtaacttagaaccctagtttttctcctgttcttgtcttgcggcggccacatcgtgagagagtgggagtccatttcaggtctgaatacgctggatctgacaatgaataccctggatagatcttgttcaaggtatattttcaaccaataattttgtgtcctctaattattttctccttgttgattcataaacttcgatgctgattctcctagtgtagagaaaattgggaattcaatctttaaagaaaatttgtcgtagatggctcgcaccctttttatccaaatacattgtcaatatccgatcaaactcttggcacttgccaaaattgtaaacttcttccttcagtcatacgtcttcgagtagtagcatggtttgtcatgccttgaagggatcttgtatatttctaacatatatttttgtatcatttaatttcttcatatattttctcctagtctgatatacccatttatatttttaggataaatgagtacaatatgtttctttagtactactatcttgaataattgttggttcacatccatttctccagatcaaggtcttgaataaaatatctctattattcagacatttgtagttggtcatccttggtcttctttgtctcaacctgagtttgtagccttcaaattatgaatagttgtgcctatgtgttgtagttaatatggcacataagtcatcattctaccttcttgtgtaaaccttcattttattctctctatacaatgccgtcttataactcaggttcatccatttagactccttttgtaggtcttcattccgttcactcgcggttttagcttaatagatataactattgttggcggtatgtcatgagacccttcgaccagacttgccgaaaccatgcacccagcgaggattcagactcgagacgtcaagattcatcggggcgaagcctcgtggcgaagactatggggcaaaggcggcgaagggtgaagagtcgcgttgggaccccgcaagtccaaatgcgtcctgggcgaagactaaatggcg

SEQ ID NO: 33413 - DNA, 770 bp, Oryza sativa
atatatatagccctagatctttagtcccggttgatgagaacaaccgggactaaagaaagttctttagtcccggttgttctcaacaaccgggagtaaagatatctttactcccggttgttcgcatcaaccgggactaaagatattttcctgctatttccaaattctttttaaacccagttagggttaagaatcgggactactgataagcgcactgaatattattttccattacatatgtgtttctaaaatagaagataatgcattacaattatttaaagtacaaagattaatgacaattactttgaaaaattattgttgtctgtaataaattaagtcgataaaacgtaataagcaaatatatgatttaaaattaataaaaattctagtaatcatatatacttagcatatgaatgatattattaaatcggtgaaaactctaattaacatatgtatatacatacggcatgatttaaaattaataaaaattgtaatcatcatatatacttagcataggaattatattaaattaaattgtgaaaaactctaattaacatatgtaaatgccacatgcatgatttaaaaattttaaaaattcgaatagtcatatataattagcatttgaatgatagtaaattaaattgtgaaaaactctaattaacatatgtaaatgccacatgcatgatttgaaacttttaaaaattctctagtcaattataattagcatatgaatgatagtaaaataaatgttaaaaactctaattaacatatga

SEQ ID NO: 33414 - DNA, 1034 bp, Oryza sativa
cttgcatttactctgcacttatgggtgtgtcttgttgagtacggtggttgtactcagtcttgctcaatttttcccaaacccagaagaggagcccctggatgatgaaggctttggtgtctagctcgtgcctgccgtcaagcgcctgtggtcgtcgccctagtcttccgctgtttcccgtttgtctttgtgtgtgctgggccttcaccgcccatgtaataaagtgtcacatcctgattttcgtttcaggatttataaattatttaataaattaataatagaatttatattaaatgttcattaatttacaagtgaagttaaatgtgggaaataaaatttcctaaatataaagcatggatggatttaatttttattaaattctccatggttaattatactctctggaattttctcggatttttcggagctcaattcctatttttttaatcttacaaagagcatttcagtgattaatttaattggaaaagtatttaaaatcacctttaccttttcgggccgaattaggaaaagtcctctcactctcggcccagtctcctctcagcctgcagcccttttcctctctttcccgaagtctgcttttgtccctcctttaatcagtctttggaagtagaagcccagcagaaagtctactttccctccctggcactgttcatcttccagctctggacagagccgagccgcccgtgctgtgccctgtgccgccgcctcttccttccaaatctcgcctccccgttgctcctttttccaatttagttgaggggaaatattcctcttatcctcctctatctttaccccccaaaaatcggagcaaatcgttgagtatcttatccgaatcaaactcgttttcgagtttatctccaaaaccgagtttttgatttcccggatcgatttcttgcgggaggagtccgatctcttcaatccaaggctataaataggaccccctagtcctcctctttcggttgccacctctcccgtggtctcccgtgcctcgtagcgccggcggcacgtgcttcacc

SEQ ID NO: 33415 - DNA, 666 bp, Oryza sativa
gtcggagttgtccctcaagccagagtggtagagctagccctcgaaggaattcgcccaggcaagtgacataattatatatatgattgttataattgtaatgcaattaagattattagatttgtaattagacttaattagaatataagattgtgtagtgttctaatatacgacagttacacttagaatacatgattatttgagttttagtataagattattggagttttaatataagattattatatttgtaattagacttagtatataattattgactagctagggtcctataatatacgtcacctagacttagcatatatatcactatttgagttttagtataagattattagatttgtaattagacttagcatgtaagattgtgtagggttctaatatacgacagttacacttagcatacatggctatttttgtcttagcatataagattatttgagttttaatataagattattatatttgtaattagacttagtatataattattgactagctagggccctataatatacgtcacctagacttagcatatgtcactatttgagttttagtataagattattagatttgtaattagacttaacatgtaagattgtgtagggttctaatatatgacaattacacttagcatacatgggctatttt

SEQ ID NO: 33416 - DNA, 2101 bp, Oryza sativa
cggcccaagagaggggggaactttaaggtttttctttttataaaatcattttaactttgtttatttcttaacaattattatttatgctctgaaaattccacgaaaatttatttacaaattttaggcttttaggaaatattcaaaaatcctctaagccttgtttgacttttactttgcacattttaatttttggaggctttcacacggattttaattattctaggcataatttagaggatatattttagggtcgttttgggacgtgacaatttatacccgagaattacaagatatgtccataccggacacgatcactatctctaacaaactctaagataccgtaagtctttgtggcagacttttgcccaaacatatctctaaggaagttgcataaaacatcctaattaatagatacaattgccttctcaggactctatccatgtgcggcaatcatcttgaagcacctcaattcaacccgatgtcatacaccaaattatactgtcggaatcggctgcatcggcttacctagtccgacttagacccagcagatcctaatcgtagccgatctggacttcagccgattcttgttctgttctcgaatcaatctctgccttcgactccacctcgatctagtctcctcttccgatgctgatattaccaaatttggttattaacaatagtcccattcccagcaaccccattcccagcatcacagcattcacaaccaattcacagcatcatagcatttatattcccagcatcgcagcatttatattccatcacaacacatgcattcacagccaattcacaactcattcacatttatattccatcacaacacatgcattcacatcacatatatgtcattcacatctatttttctctccaaaccgccgacatgcatcaaaacctgcaaactaagttataaattggaaagattttatatgtaattagaaatgcaagtatatacagagatgagctacctaggactttactctaaagaatttaattgtattacaaagaatatttacaaaaatcaaatgtttgtcgcatatgcattgcaaatgttctgccattccgagacgagctacctagaacttcactctaaacatccctttcggtgacaagagatcatctagtatgaattgtgctatctcctctctaatgatatcgaagttgatttccggaatcgttgaaattttttcctgcatgttcggcgccaagttagtctacatacttgtaaaattgtcgtcctatgtgtgtataaacaattgaaggacacacctcagggtcgagcaatgtcaccttgtctgcgaagctcctcatgttatggcagacatggaacccgcactggtcgccaacttgttgacgtattgggaagtcttttgtgtgaccgagtttcggatgcccatccttatgcctcccgccacttgccacgtattggtcccatgcctcgttcaaggcagatttgatggccgaccaatcgtatatttttggattgatattggagttaaggtagtgtaccaaactccacttcggcattattaccagaagaatccaatgacgcctgcgaaattaataaattgccagttacaaactacagttgtacgcatcacgcatttgagtataagtatggtacacgcttactgttgattgtaggcacacataatgaagtccttgtcttgacgggcaaataagcagtccttgatatagtccaccatgttggctcagtcattttttagcgttatctcattgacgacagctggatcgagtaaaacaacatggggtgctttatgatggacatgcttccaggttaacctacgagcaagacaaaagtcagggtaagcgtaatttatggatagttactaccatatcgcgtacccagaaatacttaaaaggaatagcacttaaggaggttggtgtcgatcgctcgcaccctgtagaggtcccatagatctttgaagtctacggcgatgaaggtagaaggcccgaggaacggctgactattgtgctagcccaacatggaggtctctctattcttcctccttgcattggacttctccatgtagtacctgtgcaactcattgcatgcagggccctt

SEQ ID NO: 33417 - DNA, 592 bp, Oryza sativa
aatagccatgtatgctaagtgtaattgtcatatattagaaccctacacaatcttacatgctaagtctaattacaaatctaataatcttatactaaaactcaaatagtgacatatgctaagtctaggtgacgtatattataggcccctagctagtcaataattatatactaagtctaattacaaatataataatcttatattaaaactcaaataatcttatatgctaagacaaaaatagccatgtatgctaagtgtaactgtcgtatattagaaccctacacaatcttacatgctaagtctaattacaaatctaataatcttatactaaaactcaaatagtgatatatatgctaagtctaggtgacgtatattataggaccctagctagtcaataattatatactaagtctaattacaaatataataatcttatattaaaactccaataatcttatactaaaactcaaataatcatgtattctaagtgtaactgtcgtatattagaacactacacaatcttatattctaattaagtctaattacaaatctaataatcttaattgcattacaattataacaatcatatatataa

SEQ ID NO: 33418 - DNA, 533 bp, Oryza sativa
gcataacctgttttgcttcatatgtcgtctcgggcaatgtgttctcctgagaaagcatgtccttcagtattcccaaaagttctataaaactcttgtctgtccatccactactagccttcaacttcattaggtctaatgtggctgacaatttggtgtgctttggcttgcatccggcgtatagaggagtctccaagtcactgaccaacctgctgaacttcatggaatctctctcgttcatagctgggtcatcagcgtcacgtaacatgtcttgcagcagatcagggtccacatcaaccatttcaccgcccaatagagatgggacaaacatgccatgctcttcttcatctccttcttcatgattgtctgcaccatttccatctacagttgcaccatcagtatccgaatcttgctctccatacttcacccaacatgtgtaactctccatgaatccccggcatatcaagtgagcgtgtacttcctttcatcttcccaccaaatctcattcctgcaatcactacatggacaacacatgc

SEQ ID NO: 33419 - DNA, 1355 bp, Oryza sativa
cgagtacatttacaacggagtatttttaagcctgattgagataacttcgttctgacggcccaagaagtctaggcatatgttcgctcgtcacagagggccggatctgtactagtgacaattagtttaagttagctgcattcaatattttatatgaggaagtaccattttattgagaacatcacaaagtgtcaaacagcaaaaatatgacctatttatacaagtgaacgaaatacagcttcgtcggaatattcataactatatataccgcatattcttctctctatctattattttcatgtgttctgttgctttgctataacgaagagtttcgtcctttgataaatcggagagggaaaaaatggataagtgttttcgaaaaagaaaaacagagaaatgttgcatcgccgtttgcaaaatgccaagtcaacagcagcatacagaattttgagtcaactgcaataaatgcatagccccatagtatcgcttatgctagccgaattttaaatttaaaacttaatttttttgattttgtagtttttttatcgaagtttattttacacatcggacactagaaacatgtatatacaagtcttacccataaatttcttttttgttgttaatatgcggttcggattaacatatgcataagcaaaataagtccactttgactctctctccaatctaattcgtatctctcaaccagaatactaatatcttagccctagctattcaaaccggtgcaatttaactgctaagacagtacaacccctgtccggcatcgatggttaccaccgccgcccgccgcctcaggccactgccaccgctccttcctcaccactgctgatgggggagaaggtaggaagagagacagagaggaagtgagtatgacaagtgggccacagtatttttttctctctagtcacttacatttggcccacttctacgttgtgactggagctgctacgtcagcaagggttgaacaaggtaacaagccacgtcagaaaaaaactgctctcaaaaccgttgaggaagtcaaattacaatatatctggtgttgcagttaaggggtaagattggagcagtacgtgagggagttaaagtggacttacacctaaacggaaaaatggggccgtgcctctatgacatcggttttgataattagcgcgtacgcgcgacttctctaagtcacgcacgtaccacgtggcaggccctcgtcaccgtgtggatctgagtcccatgagcttttcttttttttccagaattttctttccggagacgcgttcatctaaactaactaatccggttagtgttagataatgacgataattaaggtaagatttatgttttttttgaag

SEQ ID NO: 33420 - DNA, 2075 bp, Oryza sativa
caatttgaaaaactttcaacttttcatgtcaaattggaaaaattttcaactcaaatttaaaacttttaacccagatttgaaaactttcaacccagatttaaaaactttcaactcaaatttgaaaactttcaagtcaagattaaaaacttacaaatctacatttgtaaagaggtgtgcgaaagattgaaaaaaaaatcagaaagaaacggaaaaaaaaaaagagtccgaaggcgccaaaatcggaaaaaaaagtatgaaaaaaaaggcgcgcggggatgggctgggccgatccgtacatgcaaccgtcccggtccagctttgcgagccaagaccaccattgtcgacaactaccatctgggccgcagtggactaggcccaaaccgggcccacctacgaatcgccgagcttacccggagcgctgcctcctgccgccgcacgccacgctggtgcaccgtcgtgctccgccgaggccgcgagctctcctccctccgcgcgccatggatgggtcgatggggtatgagaggaagaacatcgcgcgggttattagttattactccgcttctgtaagaaccctagcccccaaatttttacccccccccccccccccatttcttaattttaacccgtccccgatgtgctgcattgctttcgcattggatttgatttgatgttacttcttactcctgtgttgggttagagatgatgtagattagtttacgggcaggccaacttgcgtcattggtttgtatccatggattgtagtggttagccttggagatatgagattggagattcttctgttattactgatgcattgtgacgattagagcgtgttaatttttttaaaagataatcgtatatgttatctcttgtttattgctaccagaagacgttagaggatttgtttacctctagggaccggttaattcatgctcaaccattttttgtgagggttcttgatgtagcttaggctattgtttttgttcaagaaaagaatttgatgaatcttttatgtgcttttgataaattgactatggaatgtggagtagcaagctttcattgctcaagaaaatggtaaacagtctacatctcaccacgctataatatatttttctagcagtattgtattttataatttgtcaagtctattttgcattgtctcaaagggtgccaattgctgtcaagtgttgtacgacttcatgcatgctgtattctctgcacataggaagccagagcattaaacctggcagataaactatttgaaggaaaattgagtttattggagaaagagttacataacacaatagatctgcttcaatagctagtagccttctggcctccataggtacaaaagaagtcgtcaggggtccaattgcttttataccatcctgttttggcagatcgcatccaccttccatgttgtttgatcaaacattcagcatccatatttcctcattttccctattttccccttccaaattgtggggatgttggcgtcataaaccctctggaatattttgatatcagttagatcagaagaattgcattttggaccacttaatttccatctttctttggatttagctattgaagtgtttttttttttcaaattcttctgcaaattgagaagtaataatactcggattggagtctatgatgttgcctagagctgcagcattatcatgcatgggtttgatgaaaaattaaaggggtattgatctgattcaaatgtaaagggtgactagccttaatcaattgttagtaaatcagctatttttacacaacgtcagcgaacaaccaagaaaaccgggaggttggcttgctacggttattagtggtggagaggtgaatggaccacaaccaacactctgttgtttattaatagtaaagataaaaggttgagaaaatggcaaatgaacaaaatgccccttgcgctttccatctctctctttcatcatccctcgcctctactctctccatcttcatctcttttttttctggtctgcagatctggcggtacaacagccttctccccagcctatgctcctcaccggaggaggctaaatatattgtat

SEQ ID NO: 33421 - DNA, 521 bp, Oryza sativa
gcatggccagatggccaggtccagtccacgaacatagtaggaactagttgataccccgcactttgttgtaaaatatgtagataaaatgcatgttatacattataaaaagagataatccattctatgccgtagacaaagcacggattctacaatataccactgacaaagctcagttctataatataccatcgaacaactatttttcttccttacataccatcaccgctagtcaacagctagtcaaattccgttaagaggaagaaaatgtccattttaccccctagggtatcatgcgtactcagatttcattggtcaagatccactaattcttctcattgatgaaaaatagaaatcacttgtctttttatcctccaagattatttaatgagtcatgacattgtgcaaaatctcaattttatcctaagggtaaaattgtcatttttttcttccttaacggtgtatgactaacgactgactaacaccgatggcatataaggaagaaaatgagtcgttcaatggta

SEQ ID NO: 33422 - DNA, 554 bp, Oryza sativa
cacgagagcccttgtgggagaaatccaaacacacggcacaaactttttgaaggatggaaaaagctataaaaaccatcagttttacattccaccatgtaatttatgccttgtttagttacaaactttttcttcaaacttccaacttttatatcacatcaaaacttttctacacatataaacttctaactttttcatcacatcgttccaatttcaaccaaacttctaattttggcgtgaactaaacacacccttactttgttataaatacccaccactctacttggtttgaacacacggttcaaaattttcaatgatggaaagttataaagaccatcagtttggcattccatcctgtaatttatttatttttcaaatgcccaccactccacttagttttgatgtaacaaccacccagtgcgcactggcttaaccaaatcagctattattgctactgtagaggtacccccagactaagctagctgagtcaatcttatcgaggtacttgtatttgatttattctttatatttcatcgatttttttaccgtacatagca

SEQ ID NO: 33423 - DNA, 547 bp, Oryza sativa
cagagggagtggcaaaatggcattgtttgctagtagaacaaaactctgaaggcagcatttgctgtcacttctcattgctccttgcatcccctcagctctgcatgtctcacagttgcaataattcaagggcagcaaaagggtacaaggaagggaccaagctttggttcttcatcctccctaatcttttgtgcatcactgtgtgtcctccttttcggaagcacctctctgttgcaattgaaggctttttctttatcatcatccaggcccatcctctctctctctctcagcctcagaagtgagtgagctctctgttcccgctgacactggacactgctggccctgggcagcagctcagcatgctcctcctgcaaacattatcagtggtgttgggcttttacgacacctgttgctaatctgcattttgcacgagttgtgccgcttacaaggctccaattacaaaatcatgtcaattttattaggaactataatggtatccatttgattgattgagtccacatatcaatcataaaaagagggcaaaggtaca

SEQ ID NO: 33424 - DNA, 567 bp, Oryza sativa
tatagggcgaattcgagctcggtaccctgtgggctcacgagggtgggtcccacgtgacagtgacacatgtccatctttactctacgtcggaggaactgcttcccaatacggccatgcattttggttggtctcttcaggaaatggagcattgctatatgtttgtaagttgcctgctggtcctgctattggcattgtgaagacactgttttagacatttcctttttcttgctcatagatctgatctggggtttatggtgagttggtgacagtacatacaaaccaaaaaaaaacaagaagaagaaatacatggataaaggttttaacattatcaaatttcggtagggtaaaagaactacccgacctcgacgaagtgtaacacattgtgaggcgctaactgttgccgacatgtgctcgaaatcttcactgatctaagttcaattatttgctttgatattgacctttttggcggaaaacaaaaaggttagaggcagagggtacaaatctataaaagcgagtactactgattagcgacgaaattcagaaaaacaagagtcttagagcacccac

SEQ ID NO: 33425 - DNA, 609 bp, Oryza sativa
caccacccacttcagaaggggatggagaagagagatgtgggcggggattccaacgagtgggccctagcaatttttttttaaaaaaaactgatgtctggactgccacgtgtgctatttgaatcctaaaccgcttgcaacagtgctcggggggagggggtgttttgtccggtattaaaagttcaaggtgagcgatatctggttttcgagttcagggggtaattcagtcgaccacgatatttcagggagtaatttgtatttttttcctaaaaaaaatgcttcaccgacttctagcttgtagagagtacctgaccattgaccaagtataaaccatcccttctatagatccagagatgagaaacgaactatcttgagagaaggctaaacaacttatagcatttttatgtccgcaccatcttttcaataatgctccacttgctatctgaaatgaacaatattttcaagtgaaaaagagttcatattaaacagaaatttgtcactaagtgtgtgatgcaaaatttaaattattactctttttagatatttgtactatttgcaagaatatttcccatagaagatgcaatctttatttatgatgatgaactacttgca

SEQ ID NO: 33426 - DNA, 560 bp, Oryza sativa
tacagtagttcatcaccttgctggatcaactgaatatgagacaacttgctaaaggggttgtagcctagtggttacagtgctcaagtagcacctctaggtccttcattcgactttccaagggagcaaatttcatgcttgaataaaagaaaaagatgccgtgagggcctccctcgctatttccaataaaaaaataaacaactctaattgcaatccaaggattgtctcaaatagtctacaagcctgatgagactgttgcgcttatatagtttgcaagctatttgggacatttttctctttgtcataagtagttctttagctacctattcttgctagttggttctggtagtgctgaataatgtagtggcgctttgttcctatgcttgaatggcaagcctgcgtgtaatactagtaaacccaacaggaaaagttgggccttaaaaaaaaggaaaaaagtacaaattaccccctgaactatcacggtcgaccgaattaccccccccccccgaactcgaaaaccagatatcgctcaccctaaacttttaataccggacaaaacaccc

SEQ ID NO: 33427 - DNA, 584 bp, Oryza sativa
ctttggaacatcatccgtgtgtgatcggcttctaagtcctttggctttttaaaatatagatatgtatttgagtcggattttaaattcattcgtttttggaaataatgaggaatcttataagaaatctctttaaaaaaacttgcctactaacttaaaagatgatcggacttattattgcaactcatgattttctagaaaaatatatatgcaagtgaattctcacaacgaaactattatatatatctctactggtataaaaatcaaaattgaagatacttttgcatacgttatctttctttgaggggggttttaagctcattcgattttagaaatacagatccatgttcgaggtgattttaagattatctgctttggaaatataaaaagagacgtataaaaacctctttaaaaaaacccgcatactaacctgagatgaaacatatactcctaattgcagcctatgattttcaaagaaaaaaatatcaaacccgattccacggggaattttaccatagctcaaccttattacaataataaaactaaaacaagatttaccggtgcaacgcacgggcattttttctagt

SEQ ID NO: 33428 - DNA, 566 bp, Oryza sativa
ttttaaaatggcaagatttttatatggcatttgattaattcagctgtttgggataatttcacaatgaaatactgtcagagcttctaaatgtgactattctcaggtcattccgagatgtatctattttactgtttttttatcctttgattatatacacaaacataatatgcttactagaattaccttgtgcaggttttcacttaccatagacatgagataatgtacacccaggaaggaaggaagtctaccgtttcttctaggtaatccatgtaaatatcaaaatatggtataacagccacatactgatttttgtatgtaagcaaccatatttgttttgggcaatcatgtgtaccagtcaactactaactcgggtcagtaagtaatagtaattattttagactggaaaacacattatgaacttaccaaggcaagggtggatagtcctgaccaaagggagggaggggactaatcaagtcaagggactgtagagtcgcatgcatgaccaggctcaggatcctctctgtgtatagtggcatggtacctctgttgtgtgccttggtaggaca

SEQ ID NO: 33429 - DNA, 589 bp, Oryza sativa
atcaagagcatccgaaaacatttgtttttaacttccatttgtttcttcgacaacaagtttccacactttccagtcagttgccaataatttgactatagcatatgcatccctgaaaaatcaaggggtggcccataagctcacttctatcacctctttacttattatagatgaaatattaaaatacgtctagtcaaactttcaaatcttaaatcaccaacagataaaattaatttatgaagatttgttatgtgaaaataattaatttgaagtatatgcttcaatggaaaaatacattcatatgattataattcccatatgaataatgtaaggctatgtacaacgttgtgtaataacaacctctcttcattaccatgtaagtaaaattgatgacgtggaaaagagatagaggaaaaagaaacatgggtgctacgcatcacagcggatcagagtcgacttttaatgtttattaaagagaattttgttgcagggtggagaaaaggaaagaagggtagtaaaaaaatattttggtaccttccttttccaacctccctcccttgattgggtaccgagctcgaattcgccctatagt

SEQ ID NO: 33430 - DNA, 519 bp, Oryza sativa
caaatgcataaccgaataaaaagcgaataaaaattcacaacacaaattaatagaacaaaatattaaaatttatagcacaaattcatgaaactcgtagcagttgaagacgtggttcgatcatgttgctgcatgaagggttccccttcatgacctcatccacctccgccgctgtggacggcctctcccctcttctggatccgcacgccaccgccatggacgacacctcctaatctggattcgctaagtcctcctcatagcctttatcatatgcatttacaacccactagtttgctataaaattccatgtacattgaaacatattatcttatgtttggtatataagcatattatcttatgtttggtatataagcatccaagtatcatatagaattacaatttcatattaaccactatagaacgcattatcaaataagataatatgagtacacgagatgattatcgagtacacgagatgaactggtgtctagagccgtgctaactaaaagactgctagcacgg

SEQ ID NO: 33431 - DNA, 598 bp, Oryza sativa
cccaaccaggttttcacaatacacacacagcgcgcaataatcaatatatttacctgtgcctcggtaaatattataatcgccctgctcggcgtaaatttgcctcctgcgtgaggacttaaagaagaaccactgtacagaggtaccacctttgctagataacctactttgctaagtctgtccccattctagaattggcggtcgtactcgttcgttcttcagatgtacttggcaatcttatgtcggttggaacagtatgagccacccggaaatcatgcatttctaccgtactgttccaatctaagttcgttatattttatgcaatctaactaggcatggctaagcaaaatctagcatatatctggtttgctatatgttcaagttatgcatttaaaatcatgaatgggtaatgcatggaataatagagatatagaatataggataataatgctcaaaggggaggaataataacttgccttgctccaacgcaaataaatccgagataggcaacctgattatccgatcctcgaaataccacaggttgccatccaaaataaaatagattctactaagaaagacgaagaaccattttcaataaaag

SEQ ID NO: 33432 - DNA, 513 bp, Oryza sativa
atgctagagctatcgttgtttggcatatgctgattataagccgtaacggcttatcagcgatcaaaaaatattccgttcgtaaaactttatatatgtgaactagttagcgatttaaaagccaatgctggaaacataaactacaatgaaaaaaacctcataatcaattcaaaaattaagtttccaaattaaattttggcagtggcttataagctgaaaggcaaacgctggggctctaacttgtgcgcctatcaaaaaaaaatgtgaaaatgagtattttggtaacaccacactggatatctaccaccaaaatggcttcggaaaatgaacatataaggaacacaacatcaatgtaccgtgaatgattgtttggttgcaatgcccactaaatttcctgccctgttgtgggtaacaaaatgccatccattattgcaagtagtactacttctttttccaccacatcatgctactagtaacacaaaatcaattaagagaagctgcttaagcttaattcgt

SEQ ID NO: 33433 - DNA, 649 bp, Oryza sativa
ggtactaaactccacatgcatgccatcccatgaggggggcttttgtgattttccaaaaaattaatcttcgagtgggctagggcccatccattaattccaacgggggcaggccggttcgggtgttgcctttgattaatggatttggattggtttggtttgtgaagtatagtgtatatacagatgaatggagcgggtcctactaatgcgcgggtgatcgctgggcgcactcccctcctcctatgccgattcctctctccccctttctccttcccatcttctcttcctactacagtacaccacaaatattttttaaaaaaacaaaaagttagaaaaaattatggatagaaatactatatataaaaaatttgaattcaaattcaaatttgaatttgaatacaaatttaaatttgaattcaaatttgaatcaaattcgaaatcgaattcaaattcgaattcaaattcaaattcgaatttgaatcgggtatgtaaatttttgacttataaactttgtatctataaactttagatgtatagaactactatatatagaaaatatttgaattcaaattcaaatttgaatcagatataattcaaattcaaatttaaaacgggtatataaactttaggtctataaactttaggtctataa

SEQ ID NO: 33434 - DNA, 761 bp, Oryza sativa
tcatccaaccttgatctacaccctaccaattaagaattaataagaacaagaacaccaacttgatgcgggtagaatattggtgccatatgctgttatgcgcagcatcagtacactcctagagaagttaatttccagagtaaaaagaagaattaatttgataaaataccactcatttatagatgaatatatatataaggccttgcctaccatacatttcctttatatatagtttgctaattagttcatagaggattacataactctttacatatgaaactgaatatatactcgcataaatattatcatattcaattttgtttctccatcactaaaaaaacataacagacaaaaaaacatgatcttatcacatataaagtgcaataataatgaagatagaaattattaaatcacaagggccctaataggaagcagagtaaagaggggagcattatcatctctaatgccaataggaatttttttaaagaagttgatgtgatgtccctcccctggtagccctcctgtctgtgatggaccactgaattttctccctttaactttctgagtgcatgcagcacaattctgcttttcccatgcacacacatgatttcccattgatccttaagcaaagcaccctttgatatgcacacaaaaatatatatttgcaggaactttaaaaatccctttttctaacatcacatctggtgacaagtaatataatgcagatctccccactcaaccagagacacaatcactgatgttac

SEQ ID NO: 33435 - DNA, 1259 bp, Oryza sativa
tagggcgaattcgagctcggtaccctgttgggcagtcgcagagtgcgggtaaagtgtacatccactacagtgtgagtaaaccaaatctattcgaatagccgtgctcacggttattgagtaccgggacatgtattacacttggctagactataaattctttaactggtgtgggatgggatattacatgatgatttttatgctgatggagccacttcctgagaggtgggaatgtggacgtcctcagaaaaccatgacgactcaatggcggtaagctattcttgggatcacaatggatggtggacagaaccgtcggtgattaatgtgaacactggtattaaaactagatcagtctatgctaggatttacgcttatgaaaagaattacaaaacttgctttgcgcaaaagaaccatagccatactttgaattcttctgtgatgtgcattattgctgcggtggcttgctgagtacgggtggtactcacccttgcaatattcaaacttaatcagaggccggagatgaagcttcggaggatccctatgcctattaccaggagggtgatgaggacgatggcgctcaataggtcttagttacggtcgttgcctgtggcaatagcgtgccgctgccttaactccgctgccttacctacttctgtttttgaaatgtattccggaccgctcggtccgatgatttaagactgtgcctgcgggcttatgatgtaataattcgtactagactctcatgtatgtgcacttgatatttcagctataagttcgtgtgtaccagactacttgatccagggaaatggtactgtttacacgattaattcctgttataaaaacgggggtctaaggaagctcaatttgagaagttttatatcccgggagatattcattaccgtattcatttcactctatattcgatccatatctttattgataatattttattacgtttttatacaagttttcaattctgattatgtttctgaaaaaaatgaaaataaacatggtagatcaaattttcatccgtttctgttccattttcataactagctaatactgaacagaataattgaatgcggcaggtaaaatcgttgcagcaatactcatacatcaacctgaaacgaccatcctaggctgtgaccaagatgatatctattgatgactttttaagaaatgctagataaaaaagtattcatgttcggtatcaatatctcgaaatttcaatattattttggaaaataccatatttatcgatt

SEQ ID NO: 33436 - DNA, 560 bp, Oryza sativa
actactatagggcgaattcgagctcggtaccccaatagtacatccactatactgacatgacaatatggatggctctctccaaaaaccacttttttgaatcagtacttgcttaccaacgaaggtcaaagtttttagtgggacaaacacaatttatactgggatgctgataccttgcgtgatcaaacaattaatgatcgaactctggacaatacatagagatagcagtgttttcataaaactgaaagcaatatcatctagctgcagcaattattaactctaacaccaatcttctaacctttttggaatatgacaagttctgtataaagaagcaatggcaatcattaaacctacatataacatgaaacttaatgcatacacctgaatcaaaaatactaaccaaatacttgaattcctaatcgcatagattcgtcgtgtgggcttaaacatgcatatgttcacaccgatcgatttcatgaggttggtgcaggatcaataaagaacatgttgctctggcggaattattttgcaataacttaagaattgagtcaccaacatcaagt

SEQ ID NO: 33437 - DNA, 551 bp, Oryza sativa
ctcactatgggcgaattcgagctcggtaccctactccgacaaccgtgagtggcggcggagcggctaggatcacacagagcccaagagctaactgtgcggcgtgctgtggaggtcgagggaatagtgaagctccgaccgctgtacgcatcaaggcgtggggtgccaggagcagcatttcgatcttgggtttgggttttgccaggctttacaaccaacggtccaacgtcggggtcgatagaccgcacgaacgtccccatgaaaggcgtaaagttccaaccggcggctttttagtggctaaaaggtattttgaaaataaacggaaatattcgaaaagcaaatataagtttaaattgtaaattcaattataagatcaaatatttatccaaatggtatttgaataaattaaggaaatttaaataaaatattaaaatagcaaatttggtaccaaaatgtagattttgaatttagatgaatttaggtccaaagttcactggaatcggatctacggtttaagagatatgggcttctaaagattgggttttgaattaaat

SEQ ID NO: 33438 - DNA, 501 bp, Oryza sativa
tgtctatttactccaatgtacaaataacgaatagacttaataaatgaacacaaatatgtagatcatttaggaataacttcaaaaaaactatatgtagatcaatttggaatggagggagtacttctcttcagaaaatgtagccttttggtcttttagaaaagaaaaaggttagccttttgtatttatcgaaggtcagaaaagttactgctagacaatggcaacttcaatctaatggttaatggaggaaaatgcaaagaattacaatagtccttaattatgagttttgttttttgctctatttgagttatacatcacaagtaaaaaagtataattgatgtaggtgagtgggaccacttttaactgtcatttagcactctctcatgcaacttatctctggctttttgagagctcaaggccctatttcaaatgtcgagacttcaaatattcaccaaatgtaagaccactttctcatagtatttggcaaccagccgaataatatat

SEQ ID NO: 33439 - DNA, 681 bp, Oryza sativa
attcctgcagccccgagataagagacattgtcaaacagataaaatttcctggccactcaaagcaggggtgggcattcgggctagaccgaaatttcggtccggttagttcggtcttttaaaaattcggtctttggaaacaggaaaccgaagttgttaagcaaaaattactaaccgctacttcggttaaccgaaaattcggttcggtcttcggtctaaaccgaggtgcccgaaccagaacgtgcgtcctcttcaatcttctcgtcttcttgctcctgaaaacctccatggctccacctcagtcacatgggacggatatccactagcatggtgacaagtgctggcgggacggaaggcgacgacgcggcagaaatcagccgcgcgacgcagacggcacgcgatggcgcagcggccggcatgcggctgtgcagcaggatcagcaagccagcagcctgtggcctccttatggcttccacgtgaccacacgattgcatgcgacactgcggcgacgccggcgagcagcagcatgcggcagcactgcagaagatggcggcgtggaaggaaggggacatgcgatgcgacgagataagtggtgcgccggcggcgcgtggcctaactagggttaggagtgcttcggtcaatggaatggtggggtcatggggattgggtcattgacgtggattt

SEQ ID NO: 33440 - DNA, 570 bp, Oryza sativa
ttagaaataaaccctaccactatgttggatgttttatatttatggtcttatgcaagtattgacggtgttaatttggtacttaatagccatcaacaaacccacacacttagctctttactcgtcccgagtaaatgttgaggattaatgtggaacaaaattttcaaaaatataataaaagtacacaaactattctaagccataactgtacctataaactttgcagtgtataacttaccatcttgggtaactgatgaatggaacggttgtgactcaagtccttcatgtttctcctgtcaatctcttgagttttcatatgttttcacaaagtatctatacttctcaaatgacttttctctcaaatcacgcatgtggtttaatttgtggatccttaccaaggcatattttgccgaattgtccctattctaaaaggttgtatatgtggagcttggtagggatcaatcggggcataccttgcatacatattttgcaaagccaaaaggtcggacccaaggagatagcgagttatacttttttgatcaagaatgtgcatgtgtgtgatatgtgtatggg

SEQ ID NO: 33441 - DNA, 705 bp, Oryza sativa
gccggtggtgtcctccaaggaggtgaagggaacgcctcccgtgccaatcccaacgcggggcatggtctggataagctcgctcgccgggcacctcgggaatggtggccattgcaacctgcagaagtgcccagtgtagtgtagtggagaggagcacaatgaggtttttctctgtgggtagctatatataggaaaagaatggatctcctccttgaggtttcgtgctgcaagacttaaacaacacaagtgacgatgaaggtaacatttttctaggtgaagcatgggcagggatagagctagagcgaaacagaatgtggtgttactctcttaatttactttactttagattaaagtttaacctaatacaaatgtctaagtttgtattaagggggtacatatacggtgaaaatagataaggtatagtttaaaaaattttctttatcgggttcctgagcaccccctaatatatactagctccgcccctgcatgggtaagttagtaagagatcaatatgcggtacaaagttcatttgcaatataaacctgaaatatcatgggataaacaaatgagcatctgagatttgttcttgttatcatgagtaattttttttgccacaagattaaccataagtaacttttttttttggaataaactatttagtggcatggataaatcttaagcaatgggtaccgagctcgggttcgccca

SEQ ID NO: 33442 - DNA, 665 bp, Oryza sativa
taagattttcagacaagaactgaacacataataggaaggtaatgcagaaacacaatattatcaactaaaggtctgtttggcagtgctccagttccaaatattcttggagatggggctggcgatggactgggaattatatggtaagtccctgaaagaactatatggcaagcatctttcttaacgtatttaatatgtaagatagaagactaaacgttagcctacaaactccatagtccattctacgagaatccagaagcttccgtaaacagagcctaaataatatagttgaaaaagagaagaattcaacaaacagacaatcttgctccaatgatgttcgtctccagtatgaataattataaatgggtataaaaatataaaaggatttcatagactaatgattcagtgcaatggaatttcttcctgatacaactagcactaaacaggaatcaaattaaacaagatttaataaacaaaaataacgccgcacaatgatgatccatttcaatgtaaagtacagataccatggaaatggaatgtctggattgaccgtattttcctttccagcaggagcattttttccagtatgatctgaagcatcagaaaatagtatgtgaaatacaagaataacccattttttcacttaagagctactttgaagtggacac

SEQ ID NO: 33443 - DNA, 546 bp, Oryza sativa
tttataatagtatagataagtcatttgatttttctcttagtcaacttttttaaatttgatcaaatttatagcaaaatattgtaatgcctggcaccaatctcgttgattagtacttagctttctcggatgggacagtgccaacgtcattgacgtcatcatgttagaccacggcactaatgacgttggtgctgcgaaaaaaaattagcaatagtgcccgtgcgttgcaatgggaaaaactacatgcccaaaatatcagctcgacccatttagcgcgagcgcacggcgagcggtgcacggcccatctaccggcgatggcccgcccgaggcgaactaagcgcgacccaaagactgcatggcccaacaatgatggcggcccgacgcggggtcgatctgagttgttcgattggtcctgcgccgatgaaatcgctggccggaggggggaggggtgcgaaaaccctaaccctaatcccctttctcccctactctctctgatccaaactccggcagcacgagagagtggatggtggcgacggtgctgacagcggt

SEQ ID NO: 33444 - DNA, 690 bp, Oryza sativa
aaaaatttaaaactaaacacggtgcgtatctcttgacctttctgatagtatcacatcgttggcttgtacttttttcaagttctcggcaaactcttgtacggttctcaaatctcaaaccatatttttccacaaacaaacaacggtgttgtttacgtttccgactgactacccgatcccgcgccatgtggtggtattttgattgcatttcgacatgtgtttagttcacgttgaaattgaaaatttggttaaaattataacgatgtgatggaaaagttgaaagtttacgtgtgtagaaaagttttgatgcgagggaaaaattggaagtttgaagaaaaagtttaaaactaaacaaggccaaaacttggatcaaactactgtttcaaatttgaatttatcaaagaccattcgaaatccctcccagatattgattttgagccacgtcgaaaacattgaaaatcgcaaaaaatcgatcgggtttcgttgatgaagtaaacccaaccttcttgcccataaccaagaatgatacgcatatgtaagtgtgctttagatggaaattaagtaagatcgaatatttgcctctagtctgataacgggaaaaaaaaagaagattctttatgtgaattattgataaactcactgctgtaataccaagggactcaacatttttttcttatacttattataagcaaa

SEQ ID NO: 33445 - DNA, 686 bp, Oryza sativa
cttcttcgatcatctgacatctcggaagcttctgaatttttcaaatcacgtaaagctcaagtgtccatgtcactgatgcaagcagatagattagctcgttctcttttgactgagatcatcattaatgaacaagttattttggagccaaagtgtttaatcaatactccagttgttaattagtagatactcctactttgctgtgaaggaactaggaagccatgatcccggatcagaaaaagggaacgcagtctttagcctgaaaaagtatgttacacgttgcaatcatcgaaaattaagcaaaatgatcatcttagaaacaatgatccaaagcttgagctgcatgcactttcactttctccaggtcacactggatgctaccaatgtccatctgagatgcagcaatgcagtgccttttgtctcaagatcagagaagcttgtaacatacacacatctttgagtgacatgtatcagacaggtgctaatttgatttcacttcaactgtgtcatccctaataatttcagactttgagtggaatggttagaatggttagaagtctgcagatcaagttctaccataaaaggaaggatcattaacagtaatttgtactggtgtagtatactgcagtgccgttctgaagatgatagcactgccatttcctctgggagacagaattcagcaatccatg

SEQ ID NO: 33446 - DNA, 797 bp, Oryza sativa
aagttgtattgattgatagttatgtaagaatttataaggagtattgaaaaataaaactcattgatttactgaacaacggtaaataagaagataaaagtaaacttatttcaagacaaatggcataggctagagataaacttatttgggaatagggaagtatacattgctagatggatatgtgtcataacttaaccaagggcggaggtaaagtataggagggggaggggggtgctgaggaacccagttaagaaatttttttagctatatatcacctatttttcactatgtgttcaccccccctcagtacaaaagacttaggaacccacatcaacttaaatttgatctaaagtagagtaaattaagcaagtggtatccttctcaatttcattctacccctgcccctgaacttaacgagagtgacatctttatcgaaaccctcggtgatctattggcacttataaataaaaaccatatatagaattaaaggtgaattaagggttcgaccatggcggtgagctgattttcactaacaatatacttccattcttcatctaagttgacattgtttaggatatgattatacagtatcgaagcacattcatattattttttattgaagttattaataagatataactacacgcaagcatattaatgttgtttttagatattgttaacgccagaatttggtaagcccaaagtaatcatcggtctagagttagtatcggcttcagagtcttggaatcagccgatgggaatcgtcaaatcgccagcagttgtgttcttggtggagtcgg

SEQ ID NO: 33447 - DNA, 717 bp, Oryza sativa
gataatgctcgagtcgcttcgttcattttagccaccattagtactgtattagcaccggtggctagtcatggtgtatagtgataagactgatggttacagcttcagcaatcagcatacgtatgcagacatggcatgtttatggcactgtacgattataccgtgttgacgtgaaccgtagtagagactttgtaagccgcgagtacgtggtagggtccatggatcatcacgacagccatgccatggagagggagtattctgttcggttttcagctgagcattatcatcagattcattttttttttgtttttgatagaggattatagtcagaaattggttggttaatttgtttttataatttaattgtacatggatgtctattaattaaatgtacacgacttggtggattttctagattccattaccccacttgctctctttgacaaaaatagcaaagaaatagtacaatggtgctcagcctagtacagatatgtacatagaacttgctctttccctgtaaaatagggcagagattcagtaaattctccgcggaagttttgacttggaaatcaaattagcgcgaaatctttgacatggtgtcagccatgtgcctaaaacaatcatatacatggaactaaagagagattcagaatcaatcaatcagagtatgaaatcgtgaagcagtaaacaaacctgcacaactgaagactctgcactcta

SEQ ID NO: 33448 - DNA, 684 bp, Oryza sativa
tcgaattggtaccaaaaattacattaccaattttttttagtaagttaaacagtaagagttcctttgaaacacctcactgaaaaaaaagtacggatagaaaaaggaaacacacgatttttatctattccataataatttcaaagataaggatagggtttcctataaattttcccctataataaattgaaagtatctcaaattctttttttttttacaaatcaatgggtgttaaatgtggtaggcttggatgaaggttaaacaggcgtaattggtagtgcctacgtttaatttggtcatattctagaagttcagtaccaattcaaacaataaccagataacattaccaaacaattgatgaggtagagaaccaaacttaatcgatctcaactaggagagttacttctctatctctacttctctactattataaaaattgaatatgtttttgccggtattttggtacgtcatccgtgtatgaatcggtttttaagttcgtttgcttttggagatacatatatgtatttgatttggtttttaagatcgttcactttttgtaatacagaaggaatcatataagaattctgtttaaaaaaactcgtatagtaacttgagacgattagacgtctaactgcagcttatgaatttctatatatatatatatatatatatatatatatatatata

SEQ ID NO: 33449 - DNA, 690 bp, Oryza sativa
tgcgtgtgatatgagaatgcataaatttgtatgaattttctgttggtccactcaccaccctttccacatgaagcaagaaaaaactgatccgttattacattttaaacactacaacattatcaccatcagaaagaagagcaaatagggatagaatggctaatatatgtgactggaaattggatattatttaatttggtttgtgtttaacgactttagcctgtccctttcttagagcacaataaagccacagtttgagtgagacaaatttctgtctggtctcccacttttgggctgttcttccattctgtctttgttcatctctgagctacctaactttcctcctttgttcttccatactactttctcaaattctgatcatcaattcttagctatacattttttagggcaaatcttgatattggtaagtgttaagttagaacctagtcaggtgggtcgatgtgttctcagtcaggaaaaggaacttgtcacctgttgctccaaaaagggagaatatcctctttaactaatatatgttcacatttatggtaattgatgtttcacttagcttctttgtaggggaatatatctaaagttgttttctctttggcttaacatatattcccctttatggtaattgatgtgctatatatagctttttcttgctcttgtagcatgacgtttttatgtatt

SEQ ID NO: 33450 - DNA, 688 bp, Oryza sativa
aaattgatttttccatgcgggtccttaagtggtccacatacaaacaaatgaaaaaaattcaattattaaaaataaccactcaaatttttaaaaactttcatgttcaacccaaaatttaaaatattcaaccaattttcaaaaatttcaatgtgcatgcgaaaatttcagtgatgcacattaatttatttgttttatgataacataaatttgtatggaaagtaaacacaacattttctatctcccccttgcccttataaatagagataaaatttgaaaatggtgatgttttgtttttgaaaactaatggctacagctcttccttgatttaagaagcttattttgaggggtcttaatattttgataattattcgttagcgtattcgtttcaattcgtattcgctccatacctgtattcgataatattcgattccgttttcgtatccaggttttcgattccgagaaaaaaatatgaaaacaaatatgatagagcttgtttccgaccgtattcgattcgttttcattcctacatatgtgtgtactgcgattttttttcttcctcaccagaacaaatcttgtaatagatctaatgattcaaaattgcgtgaaacttacatacaagttacactgtagtacatgcaagttacagtgtaattacatgcaagttatagtgtaattacactatgattgt

SEQ ID NO: 33451 - DNA, 716 bp, Oryza sativa
tgaaccaagtgcgatggtaccttttcagagctggaagaacggaattcttcccagaacctcctgaagtccaactccaactcattttttcccctgcaaatacaaggttaagaacatttatttaacaatgggagtacaaactgagaaatttttgcaggaaattcacttgaaacagcagataaaattctggagaataattgaagcaaagggatcaaatgcctcgttttgtcattcttagtacaatccatgcatcagaaccatgtgatgcatatataatgtgaatgcctgacatgacacctacaaatacatgaactgccatgcaaggattggaagggcaactagccaactaacaagtacgagagagaactataacattatacaggctctaatattatccctttcccagtgccagttaccatacaatacaagtttaagttacagaacaccttgaaacaacgcacacaacgaagttaccaactttaacaacataatatctagtggtagtccagagtccagacaaagccacaaaggaataaaggatgagactcacgatatctcattagtaatgcaattgcaaaagtcactattctttcttggtaggttaatgatatttattgaatgctgaagaaatgacaagagaacatctgaataaagaaccaggtatcaagcatatacaaatgaaaacagctcataaatctccattctacagtaaaatatag

SEQ ID NO: 33452 - DNA, 533 bp, Oryza sativa
agttaagggagtcaaagtgtagttattgctctaacaaccccgaaactaattgggccatacttgtaggctgtgtatgaacgtgcaactactcattgtctacccctcattctccgtgcgtaccttgttcgagcggttaaacgatgtgtttttaaaatatatatatataaaagttgctttaaaaattatattttttttaaaaaaagctaaaacctaattaactatgtggtaataagttgctccattttacgtgcacgggaagagagttcccaaacctagctaccgaacatagcctaaagaatccgataacattttgatagttgggaacattgttttctagtttttcttttagaactcatgcactttatttgtttgaaagttttaaaaacacaaggcaagagtgattcttacatctccttttcttgatcggacatacactttgttggcaaatatgagtactattactacagtcaaaggccatctgattttgctctgaagtttgtctagttgctctcgcaggaccatcagcaaccttg

SEQ ID NO: 33453 - DNA, 556 bp, Oryza sativa
tcggtacccctatcattagcaaaaactaacgatgtacacctttacggtaaagtaggaaccgatatctattctcacttttcaacttttcaatttggaacattaacaccaattaaaaatattaatccctcaatagcattatcgttagaagccacgcgtaatatcgaccgaataccgaactagggctaggtattggttttataaaacgtaaaggctttaactttgctaaaagttggttggcagaatcttatcaaaaccaaaaacctagacctaatggttttggtttttggttaggtaatgaacaatataaagtaaatcgttattcttcattaccgatctacttaacattaaaacaaaactttaagcttaatgggcataaaaagataaacctttatgttaaaggtgatcttggctattcctttaataaaattaagaacacacattattcattagacacaaaatttacgaataatgctggaatacctgaattaacctctttccctgtcgagataaaagctaaaaatggcttatattatggtttagcggtaggtgctgaata

SEQ ID NO: 33454 - DNA, 582 bp, Oryza sativa
aagttcataaaacatcggcagctggggattgggattcggcagcgtacttgccaaatgcaactggattttgttcttcaggacatttaatactccctccgttctaaaaaaaactcaattcctgggtttctgttaggtccgtatctaacgtgttcgtcttatttgaaaaagttatgaaaaaaattaaaaagataagttatgcataaagtattattaatgttttatcatctaacaataatgaaaatactaatcataaaaaaagcattattaagtctttttaggacagagggagtaagtttgatgatgtcgattggcgaatccgctactgtttatttgccgctacacttcgtagtggcaggttcatttatactcggaataagatcactttgactccctcaactgaccaccgaatctaaatcgtatccctcaatcgcaatactagaaatctcgaccccctgaacttgcaaaaccggtgcaatttgactccctcaccggttttgggaggtggtttcgccgatgtagcgccatgtggcgcctatgtggtgatattgaccgagtcttcggtccacgtggcattgacgtggc

SEQ ID NO: 33455 - DNA, 605 bp, Oryza sativa
ttatcggattctttaggctatgttcggtagctaggtttgggaactctcttcccgtgcacgtaaaatggagcaacttattaccacatagttaattaggttttagctttttttaaaaaaaatataatttttaaagcaacttttatatatatatattttaaaaacacatcgtttaaccgctcgaacaaggtacgcacggagaatgaggggtagacaatgagtagttgcacgttcatacacagcctacaagtatggcccaattagtttcgggtttgttagagcaataactacactttgactcccttaactaggggccaaatctgattcgtatccctaaaccacaattccggatatctcaaccccctaactattaaaaccggtggaatttgactcccacgatggttttgaagggtagtttcgctaacatggcgcttacgtggcggtgttgactcggtcttcattccacgtggcattgatgtggcagtataattaaaattatatgtgggaccaatttgtcatccacacaaaaatatatggttaattggatctatgccacttggaaatgtgattaattagaaaaatgtcactactattcgcgataacggcta

SEQ ID NO: 33456 - DNA, 543 bp, Oryza sativa
aacaaaaaagaaaaaaaacatcaagttggacgttgtggtggtggtcatcgtcgtaggaaggatgccaccgtcgctgccgaggagccgatccggaagccggcttcctccaccatgatgacgaggaagacaaccatgagcaatgcgaggagggtgcgcccccgccacccatgcgtgtcgctgtcgctggatccacaactcacgtgtgtcgccgtcgccgaatcctcctcgccgcgcgtcgcctttaccatatttgctgcccacgcatgccatcgtcgctggatccccgcctcccaggtgcgttgccgtctattatcccgcgcgccacggccttggagagccaccgctgctcccttccccaccaccgccgccctcgccaccctcatcgccgaactaaggagaagagagggggttgggacttagaaatatctgatgtttcagtttcctctagcatctatttaaatgccacaaccaattttcacaagcggacgacttaagaggtccgcctgaaaaaataaaggtatttttgcatacgcacctcttaag

SEQ ID NO: 33457 - DNA, 725 bp, Oryza sativa
ctcaaatgataaatatatgaaagtattatatgtttaccgtgttttatctaagagtacatgagcttgtcaagttgtgtggcgagattaaatatatcattgctgattgctgatttgttggctaccttgatgatgtccatatgagagcatctgaacatatatccattgaaataatccaatttcacgtccttagaatgcatacagacttcgaacaagtattaaaaaaataactcaacgcaaaaactcaacgcaaaagcttagtgcactcaggtcaagtcacaagcatacaacagaaaaacggcttccccttccatacacctgcatcatctgattataccaaagtacattcacgaataaaaacatggttccataacgtgattcagtattcaaacatgcattgcttgctgcttgccatagacaggactaatatctatactgaactgatttccttttgttttcgctatattaaatcgcctgcttcgagcacgcgcggcttagcgcgcgagaccgttctagtatttttacatatcacactaaatgtttgataagagacactactacaaaatcggtttttgcatgcggccaaaatcgattttcgtagacggttgcatgcggacacttaagccatccgactgcgaaattgaaaaataacaaaaaaaaaatctgaaaatcaatttccctagaccctaaccctagaatcgcaaaagggaactaatacaaactcatag

SEQ ID NO: 33458 - DNA, 1560 bp, Oryza sativa
tttttttaatatgcgtaggaaatataaatagcattgtattttaaatcaatgaaggatcattatgggttgttttgagtagttatatatagtttttatgtacttcctatatcctataaaaaagcaaattgacaggaggaatttgcacatagttctacagatttattttcatgtgacggagggagtacacttcatacacattaagaaacattagccaaaagggtggagcaatttcaatttgttctcccttgtgatttgggttgtaaaatttggcgatatatatggatttttagttctaccctcacaactaaaaggatttatattaggtagatgaaactaattttgctacttgtgttttcatatgatctttttttaaacactgtataaacacatacgctcacaatacttaaaaaaactatataaacactcacaatacttacgcacttactcatatgtattcacacacgtacaaaatattcctattcgcatctctgaattcgctcacaagattgtgaatttgagatggggctaagggggaagagttgatcaactgtttgcattggcgagattattcggaatagtttagctttgtactactctcttttttagactggtctttgtactcttgtcttcgttagggtcaatctagcatggaattgctccattactttggaagccctggagtgccaagaaaggctatgcattttgtgttgaatggatttgtctacctattactgttgcgtcctattacgagctgacaataaaagcttacaatcttgcaggtgatcggttgcctaaacatttcaaagatgtttcgtggagcaacctaaactagtctcatctctatatttatttgtttagagcgctcgatctagttttacttctatttttaatggacattaaactgtttggctaacattcagctccacgagagatggagttagagctagaattgtgtcaaacaaaccctgagataattgaaattagaggattaatgaataatctatttttatactatctgaggacataaataaataaattaactactacagagttaaaaagtcatatttagaaaagtattcaaataaaattttataaatatttgcttttaagcacacgccgtttagaagcataagaagcgtgcaaatgaaaattcggaatcagaaatgaacagtgccttgatatatcaccttgacccttcgtgggaaaaaaaaacaactccctttgcttctgaataaattatacgacactatttattttcatactttgaccacttgtctctcgtgtaacatatttgcaaatacttagtaaaatgtcatgatgttgaagtgtttagtgtccataaatataagcaaaatttaattatttaagagtagctagtggtcaaaggcgaagaaactgaaacatattgtcagttagtcgaaaacagtatccttattgtgaaattcgcagtatatatctcacgcaatactatttaaacattaaactcagaaactacagtaagcccaaatctgtggtttaagtaatcttacacccaaaagcaaaacctcatatcttcccgat

SEQ ID NO: 33459 - DNA, 553 bp, Oryza sativa
ttgtttaaaacaatttatccaagcaatacaattgaagaaaattttacgagaaaatgtatttgtagaggcatatggagcaaataacatgagcaagttagttaggtagatgaaaagaatgcggctcccgtttcctacattttagaacagcaattttgtgacaaggtagttattttcacccaacatacaagtgcattatatgcgagacatactgtgttctttccggggaaaaaaatattgtggcgcattttttataatttaaataaatccaggctatatatatgtatctggctaggctcgctatctactactccctccgtcccaaaataagtacagttttagcactgttcatgtccaatgtttgaccgttcgtcttatttgaaatttttttatgattactacttttatcattattagatgataaaacatgaatagtactttatgtgtgacttatgtttttaatatttttcataaatttttcaaataagacgaatgatcaaaatgatgaacacggatatatatggccgcacttattctgggacggaggtagtattat

SEQ ID NO: 33460 - DNA, 702 bp, Oryza sativa
aataatctatttgtttgtttcagcttactcctaataattcagattataataatcctaagctgaatcaagcggggtcttagtttgttgaaaaaccacccattacgtatatgcttaactgaatcaacatgtattttaaagtgtcagcgttaatgtggtctttaccaaaattaaatacctatagtcttgatacttttttgggtaagattccacaaacaaaattactgacaagagcttaaacgttctctcattgagttttgctatatgcacaaaaaaaagttcaattaaatatgaaaataagtctaatgtaagcacttggataaggttgaataggcttagcttagcctgtggtaactctacatcagtgctaacaggttaattcagttaagcacgtacgtagtgagatggttttgcaacaaaattaagtaggggtagatatttgcataaaatgatttattatgggggtagaatgtcatatgagatgattttggaatttttctctattatattttagagcggagggacatgagatttaattaaacacatccactataaaactcataggcaacaatgagatttaattaaacacattcactaaacacatccactatcaaaagcaaaacacccaccttgtgacacaaacccaggggctactgtaaaccgatggagtagaatgtacaaccgcacaaggcagcaactgaaaat

SEQ ID NO: 33461 - DNA, 833 bp, Oryza sativa
ccggttttttaaattaatctactaatttcatagatacatccgacatgtatttacaaaggtacgcaatattttatatgcaatttaccgtacctattttcagatattttcaatcaataatttattatgtttatctagagcatgttttttatacaatatctgtcgtgcgagtgttcccgatgttaggccgactacagtctaacgctgggagctcgccctattttcttccgtataaatcatgcttgtttacggtttacataatgcctgatatttacatctgctcgctatatcctgataatactagaagatccatacagtttttcaaatacatactcgatattctctgctatatgtcttaccttctagaaaatatttttcaggaaccattgagcactcgagtaggttgtggtcaagtacaccgtattgtcgagaacgatctcgacaaatgcagagtcgtcgcacctaacctaccaacgaagaccgatgacctatctcatagcaccggccatggctggactactcgagaaaaggttgttaacggataactcctcgcgaacgccgtcggcttgatcacccgacatgattgcgaacggacatctggatatgctataagttgggtgcgtgagtcatgctggctacatgagatgcacatgtaataaaccaactctagcacttcaattggtgtccgagagataactctacacgttcactggtcctcgaaccagtacgtagcaatctctcgcaccgcaacttccattggtgttcgagagataattctactcgttcgctggttttcgaaccagtacgtagcaatctctcgcaccgcaaacttccat

SEQ ID NO: 33462 - DNA, 830 bp, Oryza sativa
gattaaggtccatcaccaaagaatgcatatctaccacatctcattatcgggaaataaccttgttgaaaacttatgtaaaagagaggttaatcccataaacatttgtttatcatctatcaccaaagtaacaattacacaaattgtttaatccaagatctttcaatcttttctctcttttgtgatagataataatccgatataaacaatacaaagagatgatatgaaagataatttcaaatcaaggtagagatcttataatgaacaaaatatagaataagctcccctcaagatgtgcatacatatggatatgaaggaatgcatatgcacataatcaatcaatatcaatgagggagctcacactatattttggatccacaagagataccaagttagaatatgtgaagtttaatacatacctcccatcatttttactttcatatccaaataagactagtcaaagaaaggctcataaaaacgttagtctcatataattagatttgtcattaatcaccaaaaccaaattaaggcacttaaacttacatagggtcgatccatttatctactaaaactatccgtaaatttgtcctaatggatttttttgtcgctccaaaaatataaatggatcaaaccattagaacctaggtttaaggggttcaacccaaaataactttacatgtataaaatgattcaaaaaattgtacaaaggtgcttctctatataataatccattcctacaaaattcaactaaatttaccaagttttcatagtgtgaacgtgagtttaaaaatttttggtccgagttttacacacattaaaactagaatttttgg

SEQ ID NO: 33463 - DNA, 699 bp, Oryza sativa
catcgtgctccacgccgtcgcctactggccgttgcgaagaacgacactagcagtctagcagtacgcctcgagtcctcgacacgccgcagccgacacaggtgcgcatgccgctagacggcattatcagcacgattcagcagtttcgtctgcttggtgtcacacctgaacggaagctgtgcttcatcgacgcagcgaattcctcaggatatgtcggtttggcatcaatggtctttgagaccaccggagatgacatgtgtggtggtgccggagaatgggtgaggaaaggtggcatcggacaattgagccgccagttcaagattaagagtgcggatgccagtaaactgcggtggttctgcgagaagagttgcaccctcttgttcaccctcggcaaaggaagcagtccctggacctttgcgcttaacctcggaacaaagaaaatcgagaagttgactaccggtgtcgactgcaattggtggagaaactttgtgggatatgagatggatgctgcagcttacctcatgtccatagcaagacgctgatcattccctttcatgctttggcgcggttctgaaaatgtgagcacaagcgaatgagtgatctactgatctagttgtggcatttgtgggcgcattactctgcctgtgtttagttccatgccaaaatggaagtttgaaaagaatagaacgatgcgatggaaaa

SEQ ID NO: 33464 - DNA, 1032 bp, Oryza sativa
aaaaaaagttaaaatacattataatataaattggggttaataaaatatatgtgcatttcacttcacgggccacttttaaagcccatgtatgtcgaccaaaacgtcatggcctacttctaaagcccatataatctatgtgataaaaagcataccattggaaattatgtgtaccttttaagcgtttttttactttaattaaaaaaaacagtactccaaacgaatgcaactcattgcttattaatttcgatttttagaatcattaaattataaagataatactaaattgagacccccacataagaccaaatttgtagtgattaacttcgaattttagaattattaaaccaaaaaaaaaagctatagttgaaaattgaaaccaagcattagctcaatatttattaattacgaattcataactattgaatcaatacgatttaattgaaactccaaactgagtacagcttgatatatttattaattataaattttaaaattatcatatcaaaaggagctaaaatttaaactccaaactgaaaacaatttgaaatttatcgattacgaatttcagaattatattgatactcatgaaaaaagatgaagttgcatcttcaaaccgagtataattaggtactgatttattccaaatactatatcgattatgtgctgtttattgatgatttttttttcttgcgcgatgattcgggaatactggtgggcatcgaaaacgtgcgtgctgatcaccccagttagttgctttcgcctaccaaaacttgattgatgcatacacagcaaaaacatgcatccaacttgccaatatgtatagacagtatatagtatagaattggtcgtgacgctgtgacgtaaccaatctcttgacagccctttcccctcatgaaacagtcaaggaaaatttctggttttgcatgtgcgataggcggcggattttcttaaccaaaaccacttttcggcaagttgccaaaaagaacaatattctcccctcgatggatcgggacagtcacaaaacttttatca

SEQ ID NO: 33465 - DNA, 791 bp, Oryza sativa
ttcatgagaaagcaaaaaattgacaatacaaggttcatggcatatgttatctcatagaaatcgttaaatcatgaccatcatcttccccctttttgtttcaccctaacatctctaatgcaatcctctcaaacgtcgcgtggtaaaccaatgcataacactgaacttatacaggtttggtcctcaagatgagaccttactatttctgatgcaccccaccaacgatttgtggttagatacctcaagtgcaaccgttgtggcaagtgctacaagacatgttacagcttagaactgagctaaaggcagtactagtatgtcttttgcctatacaacgacaaggagtgcacaaaccaggtgtatgaagaaagggaaacaaagtcttctacagtaatgaaaaacactcttcccttgccccttcatgatttggaagactgttattaggccccattggatgcttgttggcatagaaagaccctaactcagactggggagcaatatgtgggttacgtgatcaccttccatgtaccctatcaccatggtgaagtgagcaaaagtaaaaggaaaagtgtaaaacccaaacctcattgaggggtagggcttatctccaataagtccatacatggagaagccttttcgcataataccactttgagcaaaagaacaatctcttatcacactgagattgcaagcatagatcgccatcaataataaatcatatggtgttcataccaatcaatcgggggcgccatatggtcatccaatcaactggataatgtgcataaccacgaaaaaga

SEQ ID NO: 33466 - DNA, 1228 bp, Oryza sativa
acccaacatcgtgttgacccgagtaattcccctgtaacacaccgccccgcccgattggtggtgcggaaaagccccgtacttttgcgaaaacgacgtccgtttcgacccaaacccgtcgcgtgcgcgcggctctttgttctctcggtgatttccgtgcggaagtcgcggttagttcgttgtaggtgacgacggggttttcgcgcaagaccgccgagacgaagtaggagatgggccacgggaatatttgggctgtgcgctcgcgagcgcggccgaaagatgcatgcgaaaagcgggggcccggcccgcgtatcgaaccggagaaaaacgaccggacaggaggagacgtcgacgagagagaggatcatctatctgaagctgactcatcataaggcgaccggcacgcaacgggacaccaccgaccggccgtctttacgcgagcggctgatatcccctagatccgtgtgagctgctttatccgctgccaggcttagcttcgtcaatagagaacatatttttctcattttttttagacaataacttatttttctcatgtcgtgggaaaattatgggaacgggaaagacaagagaatcgcgtgccagtagctcagaagatcggccatcaattgcgtgatccacgttcaacgggggggaaatcagaaaagaggagaaacaatcgcgacaaagagggggcgccaaaagctaatccattatggactcctcatccattggcgctgctgatccagcacaatcagtgacaaactgacgatgatcgtgacatacagtggagcttccatggcgtcgcatcttaacccatattcggtgattacataatatctcatgataaaatatagcaatgttttttgcgtgctattgcaaaagtcagcataatactaaaatattagcttctgcgagtgcaatggagacttggagagtaggacatggacactcatgctaattcaagtcattttgtcaatttgatccttcgtatgcagggaaacttcgaactgttcttacttatatatcttgatatctgtacagctatactgattgtcattatgtaaaaaaacccatgttaatcaaataaatagtaaataaataaatctagtcatccatttaggcgggatcaaattacaaaggcttagattagatgaagagtatatgccactagcaaatggctagttactgcgaagtattacaaagtttgggattaaattagtaaggttccaaa

SEQ ID NO: 33467 - DNA, 546 bp, Oryza sativa
acctcgcaagtggcaatcatttctaccaacacgttattcggcactcggcagtgacgactacagttgacaagtactacgtgacagtttcctctccgacaagctagcgatctgaacgaaggacaacccacaaattatggaagtggtgtaaatcttgatcaactctgaatttatattgcaatctagttatgcggtctgcacttctctatacagtactattgtgaatacttttgcattggcgtgaattctcgatcttttttccccggcctgttagagtttctgggcctcaagaagcccatccacgcgcaacgggagccctcaactcttgacctcaagtccaacatcgtccgggggcagcacatccattccctcggcctcgtagcggcagcgccgctcgtcgccttccccctcaccgccagcgcgccgcagttcgagaaaatagacatttagccactttcaaaaagcggtttcgctggaatgccattctgaaaatgcgtttcgctaaaatgccaatacgaagcgtgaactcaccgccactttgccatgttt

SEQ ID NO: 33468 - DNA, 687 bp, Oryza sativa
ctaacatatattctggtttcaagcattttcaattattgatgcacttatgttgatgtatcaaaatccaaatgtgttacatgcacatataaaagcataaatttagattatgtttattgaaatacaaaattataacatgtgtacaatactatatactttctccatctcaaaatgttactacctaagatgagatatgatctatcctaggataacaaatctggacggagataataattgattgttactgaaggaggtccgttaaaattcgttgtcataggatgagttacgtcccattctagatagcaatattttgggacggaggtagtaattgttttttgctggtcaagggttttgacttgacggcaaattgatggcaatttcacaataagatgaatatgaacggtataatttggaattagagggtttgactagtggcatgtatatatagagcaaattccatcaaatacattttaaatgtgtggatacttatatacttgtaacatatgtcaataataaccatgagaatcccctttcatgaccacaaccttgcattttttaatacatatatgccatatatggattaaaatcttataaggtgaagttagagggacgtggtcacttacatgtaaacccacatgtcaatgatcacataaacaattcttcctgtatcttccttgcatggagtttcat

SEQ ID NO: 33469 - DNA, 597 bp, Oryza sativa
tgtgctgctactgagccgtggggtccccaccgccaaagctgctggtatccgtcgagatgagatcgaacggcgcaggagcaggatccggtgtgcggttttgaactgttgaccaaaccgtaacggcaggagttgtactggatgaatttattgggattacattttcaaaagagtatttcaaagttgtttttagatgattcactgatatggacagaaacggaatcttaacccaatcagaatcgatcggtcgtgcttagcaacttgtcctttttaaaaaaatgatgatccctcgttacggataagttgctctgatgaggcgatggtactagcaaattgcattacatggatttttgtttccgtctatcaagtggcagtctttctccctcttattgctcccaggtcttcatcgttgtgtgattgggctcgaaacaattatataaaaaccacgtcattttctcgccgaggattattagagcaaatagcccactagtagctataaatcatctattgtaatattatactagctaattcatataataattggatcctatactattaatatcttagcctatttattatacacacattacgtcttagaga

SEQ ID NO: 33470 - DNA, 686 bp, Oryza sativa
acaaattcagaaattctttgcttccacatcctgctgctaccagagcagagtctttacctgcaaatcacttgctgaactattaacccaatgaatttaatctgatctccaaataacaagcttagctgttccacacacacacaaaacaatcttcatataaaccagtttaattccctctaacaaatcagagagaattcagaccaactctgaatttctgacagagagttttcagagcattttcgctcactgaatccaaagatgaggcaagtggtgttctaggcttctgccatactactcctaagctgcagggttcaatcattgacggtttcttgtagcatcacactcacaaccgatggaggagaagaaagaatccaatgattgatgttttcttgtggtgagcccctgctgctgtgcctacgcatccaaaaatcgatcgatcgaatcgaccagtgtgtgtgtgcgcgtgctgggcccacatgaacgggtgccttgtcagtgtcaggggcccaggggttttggcaaacggttgcagctaagctaaccctctgtggataagccaaaagcagtgtgggtctcatgccttttctgcttcagtgaccagcttggccgggttgggttggccgtctgatcggtctggtccaattttgtctctgtgcctctagtgttttaggctttcagtttcttcgctg

SEQ ID NO: 33471 - DNA, 616 bp, Oryza sativa
aaaaatcgatcgggtttcgttgatgaagtaaacccaaccttcttgcccataaccaagaatgatacgcatatgtaagtgtgctttagatggaaattaagtaagatcgaatatttgcctctagtctgataacgggaaaaaaaaagaagattctttatgtgaattattgataaactcactgctgtaataccaagggactcaacatttttttcttatacttattataagcaaaataacttatcaacaattaaaaaaataatttattgctaaaacttttatataattgttcctaactatttaaaaaaagtaaatactggaaaataaatcatagtgaaaaacctttaaactatattttaaaaactaaatgttatgcttataagttaccatgttggtcgtaaggcgcatgatatatatattgatgcaaaagatgcaaaacgaaggaaacatgattgcacagctaagatacattagtttcatcatgtttgaactttgaaggacattgatagcaaccagagacaacaagtccaattgtggcacatgtcatattgtcattagtggccaaacaaatcacgtttatttcgagtagccggcggaagaaagagcactgaacctgccgtgg

SEQ ID NO: 33472 - DNA, 529 bp, Oryza sativa
agtagagtaaattaagcaagtggtatccttctcaatttcattctacccctgcccctgaacttaacgagagtgacatctttatcgaaaccctcggtgatctattggcacttataaataaaaaccatatatagaattaaaggtgaattaagggttcgaccatggcggtgagctgattttcactaacaatatacttccattcttcatctaagttgacattgtttaggatatgattatacagtatcgaagcacattcatattattttttattgaagttattaataagatataactacacgcaagcatattaatgttgtttttagatattgttaacgccagaatttggtaagcccaaagtaatcatcgggctagagttagtatcggcttcagagtcttggaatcagccgatgggaatcgtcaaatcgccagcagttgtgttcttggtggagtcggatcaattaaagaaaatttatctagaagagtccgagtttaaggaggatacagcacgtgtaacgccctgattttcgttcgg

SEQ ID NO: 33473 - DNA, 560 bp, Oryza sativa
atattacatgacctaaaaaaataaataacttattgtagccataaatataggagtcaataaaaaacaattttatttcaaggtggtatcaatatctttcttataatcataaatcgagcggatccggtagtgggaatgcgcggcagcaacggatccggtaatgaagaagcatgggggcagcggattcaactccccctccctcgcgtcgatggtgaagggagctggtggacccagccacccctagcccactaccccccacgacaaggacgaggacgaggacagcaacgacgacgatgacgaggaggacggcgggcatacatgatatggacaatattacatgacctaaaaaaataaataatttattgtagccataaatataggagtcagtaaaaaaacaattttattttaaggtggtatcaatatctttcttataatcataaatcgagtagatttaaaacaacaaacaattaggtatgagtgtagtgagtgtcaattcgttgcacaacaatagaaggttcgatttagtggagtcactttcggttgatatgtcatcgctttcgatt

SEQ ID NO: 33474 - DNA, 692 bp, Oryza sativa
actagagagcaagttcaggatatcgttagtttcctctacaggcttgtgaggaggcttatgatcttactctggaagagggaggacgacgaattcggggagaggaaggactcggcggcggatccggttgccggcggcacgggaggcgcggtggccggcgcctttccctggagtttgattgtggccgtagcgacgactgtactcggcatcgcctgtgcctgtgcggctgcttactaccactacaggcggcgtcgcccagtgtctcgtcctcgtcaggcgcagccgccgcagtacgtggtgtcgacccgtgcccccccgacgcaggcgccaccacctgggctcctccagctcctcgacgacatcccggaggctgctgctgtgatcggtacgcaatcccgtctccctctccaacacctcctgaatcctgattttgtggttgctgagtttggatcgaattggtgtctgttcgccacgaatcggttatgtgttttcgagatttgttcgccgtgtctattcgccgggatttgttcgccgtgatttgctgtttgaatttccctttcaattcgtaggtagttcagatggattccatttgtttggaatttgttcagactttgattgttaaccagcgcatattcatgcagcagctgagccaccggatacaggcagcagacgccgtcctggacgcgcacgcaccc

SEQ ID NO: 33475 - DNA, 968 bp, Oryza sativa
agtactcaaagttcactcgttcacattttgaacacttccatcaattcccgatcgttttctgtccaccttagtcgctattgacccatccacgcacaccatataacctttctacccctcattgcctgcattctacttggacctctctcgccggttcggagacagcgacggagccccacgcggcgccgttgtcctcagccggcagtgtaggttccgggagggcggggtggagcacgaggcggcggtgcacgccacccgcggcagtgacaacggtggcgagggggaggtgcgggtcagcatcgatgggaagagagtggctgaggtgagctgtgtagggtggggtttccgcagcaaccgcgccaccgtgctcactgacgttgagatgatggacgtgttgtgggacgtgcacttcagagacatcccagtaagaacaagatgagagatggagagagatgggtgaagggattgactgacatgtgggccccacctgtcagtgggtcctacaatctttttaatgacaaatgggtcccatgtatattttttaattctgatattataaatgggtcccacttatgtgatgtctgatatacaagtgattatatagtgataatgcagtaatgtagtggagtcatgaaattggtgctttttaggttttgattgagccaatggggtgggcagtttttggtgcacccatgggttgccactactgttatttctatgatgcactgcatattacaatttgattagtttgtgctaagttaatgaaaacaattattttttaatgttcattatgcaatgaacggtttttttccggcacaattaaaattaagttcacccattgcaaagcacatgactcatactagatatcttaaagcgcctgcgtttgccgctcccaaagcgatttggctcctgttgactaatccgcttgagacacctcgctaatatggattgaatatggttgggttttagat

SEQ ID NO: 33476 - DNA, 549 bp, Oryza sativa
attgaagatcgaaaccgatgcagctcaacccgaaagcaagaactcgttgaaataaaactaaagcaaaaaaggtggcgatgcgtggagattgtattgaacgtgtgtgttaaaagttacatagggctcgggtctatttatacccaaaaattacaagatatggccataacagacacgacaactatttttaacaaactccaagataccataagtctttgcggcggacttttgcccaagaatatctctaaggaaattacataaaacatcctaattaatagatacaattgccttcttaggactctatccatgtgcgggaatcaccttgaagcacctcaattcaacctgatgtcatacatcgaggtgcattgtcagaatcggctgcatcggcttacctagcccgactcagacccagccgattctaatcgtagccgatctggactctagccgattcctgctctgtttccgaactcgatcttcgcctccgactttgcttcgatctaatcctttttcctaatgccgatattaccaaaattggttgttaacacatgcccc

SEQ ID NO: 33477 - DNA, 536 bp, Oryza sativa
gttcaacgcgtacgtgcgagatcactgcgcttgcccaaactggcagcccaactgaaaagcttaccaatgctgtagcttcgtagctgttccgtctttttggatggttgcgctgaggcgggaccgaggggtacatgatagccgtgcggctcatccgaattgcgcgcggttggcaacgtgaggttgaaggctagtagaaaattgcagtccgactcgaaaggtccaagcagaaagggagcagaaaatggactttcctcttcatcagatgacagcatttacacctcacgcaatgaacacggccacccaacaacgcaccccctgtgtgtttgtgccacaatcaaatgcaaggaaggaaatactggcctgatctctaatctctttgcacagccggatcaactggtgctcgaacatgcagtacacgctatacagacaggaactgatctctcattcagtgctcagtactagccaaaaggaccagtaacatcactccggcctggttcacgggtgtttagatggtgctaaaactttttagtccatat

SEQ ID NO: 33478 - DNA, 612 bp, Oryza sativa
attttttttcctttttctctcccttttgtttcctccttttctcccacgcgcctcctcgctatctcgtcttcctcgacgacgcgctcttccttcccctctgtctttctctctctgtttggtttgtaatttgtgtgtgtactgtgcgatttggtgggtgatttggttgcttagcttccttgtccatttttgtgtttttttcttttattgtgaaaagaaaatggccttgtgggtaacatcgttaactaggctttactaacctcgtctgactttgtgtgcgttttactttaaaatcttttgtgacttttgcttgacgtcttcgcactaccgtaattgggagaaaaatgttttgcctgttccgactcacctatcttttgttttcctttgtgaaagtggcaagcttgatgtgtgtatttgaaatagattttaaaaaataaaattctagagagcatggtgcctattccatccgtccaaaaaaaaatctaggattggatatgacatattctagtataatgaatttggacagatgtatatccagattctgtaataggatgtgttatatttattactaggttggttttttataagacagggtaccgagctcgaattcgccct

SEQ ID NO: 33479 - DNA, 564 bp, Oryza sativa
atatcattagatgctcggttgcttgaactccattgacctatttggcttttggggtatgcatccatgccaacatataatattttccatcattctttttacactgagcgctgcccaaatgttggtttggttcgtggactgagattctcgggaggcttctatgttttttgatcgaaaggttcgtggtttctttgctggtttgtggttattttatcttcttggagtatatgtttgtcgagataattgttgatgtaaatgcagtcgtaaagctcttaaacgaactctaccaacagctcttattccgaaaaagtagctaaactgaagaatgaagaactctggttgggcaggccgagcacctgcagcatcggccactgccttacgagtactttccgtctgtgaggtcgactagacatcaacccttgtaattccgtctgtgtggtacacaggatttgttatttagtaattgtaaccattcaaattatctactgctattcatttaaagttttcaacttacctaaaagtgttttttgtcgctcgtcaatcgtcatgataacgaatgctcataca

SEQ ID NO: 33480 - DNA, 596 bp, Oryza sativa
cttgtttcatgttggacttcatagtgctcagaagtgagaacaatagaacataagaggcagctagctagcatcccatacctttgaggtagcaatctagctcaacataagagaccatatataatgcgtggtcctatgtaagaactatgtgctgcgctacttgatcccctaaaacctacttttattggtagcaaatactcaaatctggatactacacagagtaaattgtggttgaagtacaaaatttataggaaacccatacaacatccacataatttggtcgctagtcgcaataatccttcaccatgtcatccatagtcaactattgaaatttattttctttcgcatcgcactgtaataatccatacatatataaacatgtatcgtataaatcaagcaaatttgactgaaccaaatttagcggataaatgttgtgtatgatacctcataattgtcttgtccagctgcttttcgcaacaactttcgcagaggaaacactggaacctctttgtcaggttagtcccaaatgttattcaaaccgcttacatccctgcaatcctccaaccaaaatatatctttcttcgcctaatcaaccacac

SEQ ID NO: 33481 - DNA, 598 bp, Oryza sativa
agttatataaaagaaattaaagatattatatgttcaagttgagatggttacaatggttttctaataattggtgcatggggtgacatccaaatacacgatgttttaaaacaatactctagccttattaagtctaatctaacatatatacccagtagtttgaaggaggctataggtacatatgatatgataatggtgcatcagcaaatcgaccgcgtgatcaaatgcaaatatatatactccatatataagcagcaaagattttgaagttgctagcataccatcttttccatagagaacaggctaaattagtttcctagtatgtaaaaaacatgccctttcaaccaaccacgctacattaacatatccaacaaaagaaaatcacaaaatctacctttcttactaacagtaaaaaaatctcattgaaacagtgcaatagaaaacaaaacccagttatagaagtgtatggacaggtatgcaacacaacacatctaataccatgtggcctatggtcacagtttcatctattactttgctgaaaatgttcagtggataactggagtcaatggatcatcagtatgcaagatgttccataagactt

SEQ ID NO: 33482 - DNA, 663 bp, Oryza sativa
cctgctgttcatatttttggcccagcttgatgaagcaggctgtcatcctattctaaagagattatcaagctaatagcatgggcctaaaggaccaaaattattgtgggcctatggcagtgtaaccttgcttttttcttcattcatacacgtccgttttccgggtattgctagtgggcgggtgattgcttccctctcctcctagcgatcacccgtccctccctactaatactcctttttcatctctctttttaacttttctattacatcataaagttcaaaataaaattagtaaaagaaaattaagaaaaaaaatctaatattcattcatgtgcatagactttataccgtaaactttgcagcataaactttgtgtatagaaatattacatacatataatgtttgaatccgaatttgaatttgaatcggatatataaacttttgacttataaacattcgctctacaaactttaggtggataaactttagatgtgtaaactttaggtgtataaacttactaaaagagaaaaatataaagtatttaaattcgaatttgaatttgaattgagtatataaacttttgacttataaacattcgctttacaaactttagatgtgtaaactttaagtgcataaacttattaaaagaggaaaagaaaaaaaaag

SEQ ID NO: 33483 - DNA, 743 bp, Oryza sativa
tgatcaacacttaatcaagatcgtaagatatcaagatcgtaagatgaatctgtgagagctactatgaacaattgtaaataggtgtcaaaatatgtactacttctaatggctatcacataaatcagataattcatcaatgtcagttgtcctaaaccctaagttgtattttttttttcatgtgagtcttggtgatcagtaaattggtgatcaacgcataatcaagagcctaagatgaatctgtaagagctactatgaataattgtaaataggtgtcaaaatatgtactactattaattagacttctaatggcttgctagcattgtatataaacatggacgaagctagaacgaatattaacatatatcccatacatatatattacatggttaatattctaatcacatgtggtaagtccattaaatttttttaaaatgcccccaagctaccacgtgttgctataataaattagagaaaatattagaaattctaatgagaaaaaaaagcaaagtatctattacttgatcttcacttaaatcggtgggtccaatattataaacctgttgacagaaaacacgaggcctggtagatctgcttaactcctgcaggtccaaagctcgccttcgggtgtgttagcgtgctagttgatttgatcctgcaatcaacaagaaatagaaacaaagagaccgcggttaaatctataaatgatagccgatcggctaggtgccgatgacatatcatttatc

SEQ ID NO: 33484 - DNA, 828 bp, Oryza sativa
ttagctccaaacaaaaaggccaaattcaagaaaaactaaaccgactgataagccgactaatgatctgcccgccttggatccatctattgaacaagctctagatgaagaggaaattggtgaagatgttgaccaggctgtagccgaaatgagtgacacagaaagaacaccatcggcttcacccaagcaaacgcctccaactccttctgcccccgttcattttacaagagtaagtatctctctttgacttcttctgaaattacctccctcttcggctaaatactcatagactttgtggttgtagaagaagaaaactgctgtgaagaaaaaaccagcagcaacaattgtcaactcggctccaccagtaagatgtctttaattcttttgcttaatcaatctcaactggctctatataacacttgtctattctacagcctccttatcctgtacaacaaccgtcaagtgaccagactccatcggttgtggggagtcatcacatcgaggaagaagaacaaccaactgctcctgctatcccagtaagttttcctttgtctcaacaattagatcggctacattttacccagctcttactctttccgaaattgtctctacaggttctagccgatcttttctcttttgacatcagaaattatctcgatgaggcagaagaagacacttcaagcaaagctctagctcccctatctgacgatgtgagaagaacacttgaagatatctctcatcggctagaagcctcttctttagatagtttggtagttgactgtggatcaattaggacacggctgcatgaagttcaagctctgattcccgaag

SEQ ID NO: 33485 - DNA, 565 bp, Oryza sativa
catccaggagtccctcatctatacagcagtatattaaaaagttccatggaaatttaaaagcaggaacttgcacttcttcagtatgcaatcatgatttccactaatttagttgtctattcagatttcagaagatgacagatggatctactgcctggttggaggattaaaccatctttgctatcctaatcgatgttaaagagagcttcttcaatcctataaactcataatctctcgctaaggcatgtgaagttgtaacaagaccaatggacgacgattagcccaagcagaagtgtcccacccttttcttccgcctttctctactgcaaaaatagattgaaagatgctagaaaagaagcgttcttggtaatacaggaacatgaggaaaataaatagactataagctgctttgacatgggtgagtacacctgttatttttatgcaggtcctattttttttatcaaataaactttgcctcatattcatatcattaacggtttggaccatcatcaaaatgcatgtaattggacagttttactctatgtggtgctaatatgagctatcacag

SEQ ID NO: 33486 - DNA, 518 bp, Oryza sativa
ctattcccaataatcttccaaaattatcaaccacccctaccgtaccacggggacacatgggacaaatattctgggaactccactcaaagatattgcactggacttattgcttgttcgtggtgaaattaacacactactacagaaagcgtttttgcatacgggcggaatcgatcttcacatgcggttggccagcccgcatgcgcgaaatggtctgcaaagatcaccatttgcgcatgcggccgtcgcagccgcatgcgaagatcgatcttcgcatgcggtcccttaagacggccgcacgcgaagatagatcttcggacgctgtcgctcttgcaggccggccgccagcatgtattgtccgatgcggcccgtctacgaagacgctatgcgaagttgtattttcgcatgccggcgtactagctagacggcatgcgaaatacaattgagtgatggctacagaaatattgattcttgcgtcccggtgatacggaagggatggttgattattgagggatgaatta

SEQ ID NO: 33487 - DNA, 612 bp, Oryza sativa
gattcggtttattccttccatccaattgtctggtgatgagctgagaccattcatgttttagtgttttaccaggaaaaaacaaccgtgcacatagtagtttgtggcgatggaaggttcacgttacaaaatatgtcaagtatcaaagacataagaaattcgcctacaaaatctctagctatatgagtatatataataaaacaatgatggacagctttgcaaatcatacatacataaggttgacacccctaaaagtaacgaattacttgatcgattgctccagaacagcaaaatacctttaattggtatgattctctcacctgcagtaaaattgggcatcaggatttacctttacctcccccacaaccccgataggtagccgaatcagaatgtacatacacagaaaaaagagagaaaatgtttagaaaattgcacatgtaaaggcgtacagcacattgtgaaggaaagtttagagaaagcaagaggcaattctgcaggaaggacaggtgaaggagacaaacaaataagaaagtgtatagcaaggaaggaggatgggtggaacaaaaatggcaccttgctgcaggtcgccaatgcaacggaaaagagactgctgat

SEQ ID NO: 33488 - DNA, 866 bp, Oryza sativa
cccattgactcaccaagaaggaacttcttttttcctttgcactctcctctttctagaataaggtgtacacatagaaatatttacaatagaaatctttgtaaacatccaccaatcacatatactaatatagacaacaatttctataaaggtcatatgcaagtgtttacgcttcacaaatgcacaattaagggaccatcttcattattgcaatatgccaatggcctcaagaagtaaaaatatggaaacatggagtacattttacaagtactaaaagtaggaacaaagaaatgttagggttttttttctgctaaagggcaattgtaattgttagataattctaaagatatatcataaaaaacaatcttacatgggagcatcgttctggaaaaggaggcaaaaaatcatagaggataataatggaattgcttatagttttcagtgactcatatatatttgaaccaaatatattatgtgtacgtggttaaagcatgtggttacaaaaaagaaacaaaatatggtgataccaagtaaaattttattcaatatatatactatttggcagtgacaactgacaagtaatttgagataacattttgttgctaatttatatatatatgtttacattttttttgaaacaacatatgtctaaatttaattaaatccacttttataaatacattaattaaaatatacatgagcattgtagcatggttgattttctttctcaaaatacatattttgagtgaccaagcatttgagaaatcaaatactctctccattttttattataagtcgttttgacttttttcttaatcaaactttgttaagtttgaccaagtttataaagaaatatatcaaccattcca

SEQ ID NO: 33489 - DNA, 513 bp, Oryza sativa
tacatggtcataggcgtataaatccaggaagtttggcttatcatcagttacactatttaaaaagaaagattattgcaatgaaataccaaataagtggccattactcaccagggaggtgaagggtgagagtttggcgcccagggtttccgtttttctaagcacccagggaagatgagcaaaacaggtgcgacggaagcagaagaggcataggggggggggtgagattatggtgctggcttgctgcgtgaggaaggacggcaagcggggaaggagagcgaacagttggggcagggcaatgggatgggccttgctcatcagttgggctttttgcaatgatttggctatgctcatcaggataactcgacatctcactagggaccttctcatccaatggtttatacgcgatctcatccaccgattgaacgactgagaattagtgatgacgtggcacgctgaggttttagctttgagtcgtaactttatagaaagaagggatgtcaccatgcttattta

SEQ ID NO: 33490 - DNA, 639 bp, Oryza sativa
gcttcgagccgatcaatattggatttgatcggaccttcagatagctgatcaagtttggtcttctcttcatgcacaagctgccgattagcttggattgcggcctcaatctctttgcgctcacggtgttcgactagtcttagcttggctttttccagcttgaactgatgttgctcgagataagcggctggagttaggacatcggccaaatcttcgggaatcagagcttgaacttcatgcagccgtgtcctaattgatccacagtcaactaccaaactatctaaagaagaggcttctagccgatgagagatatcttcaagtgttcttctcacatcgtcagataggggagctagagctttgcttgaagtgtcttcttctgcctcatcgagataatttctgatgtcaaaagagaaaagatcggctagaacctgtagagacaatttcggaaagagtaagagctgggtaaaatgtagccgatctaattgttgagacaaaggaaaacttactgggatagcaggagcagttggttgttcttcttcctcgatgtgatgactccccacaccgatggagtctggtcacttgacggttgttgtacaggataaggaggctgtagaatagacaagtgttatatagagccagttg

SEQ ID NO: 33491 - DNA, 2379 bp, Oryza sativa
acgtcctttgttgtcataccagctcggtacccaacggcgtcatacattaaaatacgttaaaatacggagggattacagcttgcttgcattgcaggttctgtacatagccaagaaaaactcaaactgcaatgagcgagaagtgagaacatagcttagctagctataggggaatggtcagctgcgctacttattgcggagattgaggtatatatcagggctcttgaatgaatcttgattcccggcgccgcgagttcgttcgtcaaagcgtgatactaatccagaatcctaagtaaagaaccaactgataaacaaatcacacggcatacctaagaaaaaggtatggccatgtatcttctgtagtaaaagctagctcaacgcatgtaaaagtacatgctttagggcttgtttgatttagtgtcctaccaaagtattggtagtgccaaaacttacgtatgttttggcactaccaatattttggtaggatagcattttaggtgaatggatttggattgataccaattggaagccaaatttatattatactcaggaaagttctagaattataccaaattaatcatggtcattaccattcatttggcttcaaaccaaacctttacattcactatttcaaactacgaaccaaactggtagggcacattttggcatcaatccaaaatggcccataatgcttatacagtaatatagaatagttctttttttagatcataatatagttattttctgaaactttgatgctttcacttcgatcatggccatgtttagttcacccccaactactctaaacttccaactttccatcatatcacatcacattcaaaactttcctacacatataaacttttaacttttttccaaacttttaacttttcccaaacttccaacttttttcaggaactaaacacagcccatatatcatgtactaaagaactgtgttcggatgctacttttcccaacctctctctctcgtttccgcacgcacgcttttcaaattgttaaacggtgtgtttttttaaatagtttctatacgaaagttgcttaaaaaatcaaattaatctatttttttaaaaaaataacaaatacttaattaatcgcgtgctaatggatcgtcccttttccgtgcatactgtacaccgtttccatccaccggtagcgaacacaccctccttcaagaaagtatagaaggaatctacatgtaacatgctgttagttggcagatcagcatacatactttggaggaattctgtacggaacattttacttggctaaatgctgacacaataactgatattttaacgaactcagcctaaactgaaggaaagaatgtgagtcaaaaggagggttgaaaatcacaaaaaggtgtaggagaccaaacccagaatggtagtgagtggagtggaccagatattaggcccatgtccaactccaaccattgcataattcaagcttttgcacatgcatgtgcatgtacctacgtaccacaattatttgaacaggttttcaaacctcatttaatatcttctttcccatcaaaatgaataagtgtactcctcaccctcaaattaacctcatcatgtcattgcaaaaaatatccattattcagaaaacatcacacatgatctcattccgatccaatgctctctgcataaatgtatcttacttatactatgatttgatttgcgatagttcaaattttgaaacataaacaaatatgtgccaattggagttcattaggaagatgagtgtgatgtggatggcatcacatgaggtggaggtccaccagagcacgggagtaggccggatcccatcgcttgcactgcacccgactcgatcagcttcagctcgcttcccacggagacaaccacacgagatttcctctctttctcactagacactagtctcctcctgctcatggcccatcacgtgatcgcacctcttcttttgtggacatcttctctcatttttactcctcctgattctggaattttctgtttaggtcccattcttgtcacaaatgtaaccccttgccatgctctagttatgctcggccatgttttgtaataattctggttaggtcccatgttttgtaatttttttaaataaaatcataaatataaagttttaatagaaaatgtaccgtttaatagattgaaaaatgcatattcatgcatcatttctcactcttccagctaggatattgataacgtggatagctattcaacctgctgaatgttattgtacatgctcttaagagagaataaaagcctatcggtaaaaaagaagtaatgggggtaaagtagtttatcaaatttttttcacactgagctgatgcatgttgtggtccctttaacaaggtagata

SEQ ID NO: 33492 - DNA, 1163 bp, Oryza sativa
  unsure (1)..(1163): unsure at all n locations
agctgccattgaaatcatgatcgacaatcccgcaagccngcaggttgactctagaggatccccatgagcaattaaccactttgtatcttcagcaacacagattagcagttgataacacgggagcacaagcaccaaaccacaaattgcatcgttgctacatgcatcctagtggagttatatgtagtaatttctgtaactgaccagtgtgcatttcttgatttacttactaattaactctagggtacatgaaccctgtactcattaactttaggttgcatgagtttgtactaaagctataaatagtccatagggcatgtaatgggggattcaaaattccacaaatcaatacacattgttttacttttcactgtgtgaaccacgtctttcgacgtacacagttgtcaatcgacaataatattatcaagatatattcttagttaaatataatgaaactaatttgatattgaaaatattgctaattttttctataaacttagttaaatctaatactttctccatctactcccttaatctttatatttcatcttagcagacggaggaaacggaggatttttgtgtcagcgaggccgccaactcgcctggatcgtcgcatggccttgtcgccgcatgcacgcacgcagctgggatcatagtctcaactgtacacactcttttaatttgccggctgcagtagcatgagtcctgttttatgtgctcgtttcatgtgaacacacacatccagtatatgctctccagttatgctcctctaactagcatgagttctgttcagattgcaacctgcatatccaaagatgcactgttattaatgggagccgtctatgtcagagctataataatttcttaattaaagtctacctatacttccatttggtggtgcttaatctcaagttaatgcacgcagctgcttctgtcctttggagtccccactatatatgtatactcctatcaagttaggtttggttcacatttgctgtaatcaactaatcttgcatcaaacttacacagttacacataacacatcagttgctagagctatcagctatgtgattcagatcaatatccattgcgtgccatggtaatggcagttcagagctagctaggggtacaaggtgaattncaggtttgccaatcaancggaccca

SEQ ID NO: 33493 - DNA, 606 bp, Oryza sativa
gcaacggctggcgcccccccagaccgcggcgccacggtggctggcgccgccctcctcccccaatcgaagcccttctgcctccgggcctcggctggcgccgccctcatggaccacggcgccagggtagctggcgccgccctccccccagcccgaaacccttctgcctcgcggcactggctggcgccgccctcctcaaccgcggcgccagggtggttggcgccgccctctgcctccctgcaaattgaagatccatattgcacaaatgtaccaattcacagttcgcaattcaaatcacaattccagattcgtacagactaaaactagttccaattgcacaaatcacaatgccaaaagtccatcacatagtcctcacatagtccatcacatattccacacatcaaacaatgccaaaagtccatcacatatcccacacatcaacaatgccaaaagtccatcacatatcccacacatcaaacaatgccaaaagtccatcctatatttcacacatgaaacaatgtcaaaagtccatcacatagtcctcacatagtccatcacattttatatcacatagtgcaccacatatgtcatactaccgggctgcaggaa

SEQ ID NO: 33494 - DNA, 628 bp, Oryza sativa
tcctgtccggcgagaatctcctttaatggccccaaataaatatgactagtacgttagtggagcagtaccaaagatttattcagtgaggttctagcttgtaattcgtagattaatttgttctgaacatgttttgaaggtcaacgccaactttatgtgtgtgaggtcgtcgaacgttttaatttcaagattctctgcttcctttttatgctaccagtacaagatcaatgcgtctcatcgatatatcaatgtatctcgactagaaattaatcgcaccaatcatgcactttggtcatgcacggtccatcgtcgaattattgcgttttagaggtcgatcggctttcgtcaccatgcacgtactagcaggccaccaccacgtacaccaccatcttcttattgtgtggggctactgactactcactccgtattttaattaatgtacgacgtcgttgtctttttaagtaatgtttgactattcgttttattcaattttttaaaaaaaatatgaaaatgtttatgttatgcttaaagaacatttgatgatgaatcaaatacaataaaataaatgataattacataaattttttgcataagacgaacggtcaaacgttgaacaaaaagtcaactgtgt

SEQ ID NO: 33495 - DNA, 1598 bp, Oryza sativa
  unsure (1)..(1598): unsure at all n locations
ccttgcgttgttcctaaatgctttcggccgtaaaccccttccccatcggcaaaattcttttcaacggcattttctaatcccaaatagaacgccgcgacggggtaccttttcagcgccccggcgtttgcgcctacttcacggttaacaagggtggggccccccgcgctcacctccaaagaggacaatcccgagtcgtccccgccgtttccgctacctcgtgggcctcgtggacgacgaccgggaggaaagcccgagcgcctctcctcccaaccgcccgcacgcgcgccgccctttcttgccgcccgcccgccgctccacccaccgccgtcgcgtcggccgtccccgccatcaccgtcgccgcaacgcccgtccccggccgccggccacaaacgccctcctcctcccgccagttgactcagaagggagagagagggatgaggaagggacagaagggagagagagaggaggctaacgtggcagcctgacatgtggggcctacgtgggtccatgctaattcagccgccacgtagcataaaaccggggtcaaaaccacttaggccaagtgctatggtagatgtgactaccatctttaaatttatctattttattcactcatgaattaagaggcaacacatacaatgtatcacctctaacacacaaataccaatatctctaatactctcacacacttcttgaaatttgtgtggaggttgcctcttgatttaggggtggctcatcttctctctctccacttctctcctccacctcatcacccaatccaatgtggcattcttaggggcaacatatgagatattatagtacttgtcctaaagtacttattgtgtccggttttggttagttaagggacgttagatacctatttttgcgcttggaggacgattttgtaactcgatgacaagttgagggaccttcggtgtactttcctatggcccatactcgcacttgggccgtaggacgcggccttgggtggctggtggaaatttctccacgtgacgcaacgcgatcccttctcttccccatttgcgttcgtagcgaatcgcgattccacccaccaccaccaccaccaccactgagagaggcggaggcgctgaccaatcgcgatgcggccgccgtcgccgccgcggccgctggccttcccgacgctggactcgctggcggcgttcctcggctcgcgcctgccggcgtcggcgctggcgtcctggggcacggcgccgggaaccaagaccctcctcaacctctttctcgagctctcacagggggagtgcgtnctcatctncgccgccgccgncggggggccggcatcgcagcagcagcaacagcattccgtcgtccgcgccgtccacgtcgccagcgttcggatccgcaacgggcgcggcgcgctgctgatggagaccgggcagctcctctccgacggcacgctccgctcccgcggcgggctccgcccgctgtcggagaagatgcgccccggcgagacccccgaggccgcggccgtccgcgccgtccgggaggagctcggcgagcgcgtccgcgtccggatcctgggcggcgaggaggcccgcgtggaggagcgggactcg

SEQ ID NO: 33496 - DNA, 2986 bp, Oryza sativa
  unsure (1)..(2986): unsure at all n locations
cgcggtgnnnanagtaggacaanctgcctcgnacccggcgccgnggtggcgttgaggtagccgccgcaggggaccagcttcgacgcgcacgacggcacccccgcggccgcccccgtgtccaccgccgtctgcgccgccgccgagctcgaggctgcgcccacgaataaggccgcgacgacgaccaccaccacggggacgaacgcccgcgccgccataggtgatcagagcgatcgagtgaggtcgcggtgatcgagcgagcgagtgagcgaggtggtgtgggtagagtgtacgtagaggcgtttgtgtgtgggttgggttggcggttggtgcatgatatatgggacgtgtcagtgtgacactgccagggaggtttagttggcggcttgtacgtcggctagctggagtacgtttctttctttccacagctaattaagctagttagatactccctccgtttcaagttataaactttgataaaagtaaaactattttaagtttgattaaatttatagagaagagtagtaatatatttttaacccaagacaaatttagggcatgttcactttgacgtcaaaaaaaaccttaccaaattttagcaacttgccaaattttggtaggatttcttatatagttaccaaaatttggcaacaaactaaatgtagccacttttttgacaactttatcaaaatttagtaaggttgaaaatgacatcaaagtgaacaggcccttaatataaaaatatattcaattattgatttgattaaattaatttagtattataaatactattatatttatttataaacttagtcaaacataaaacagtctaactttgaccaaagtaaaaatatattataacctaaaacggaggtaatagaactcatgcgacgagtaagttataggcattacgctgccaaataaatatttcaaactaaatttaaaatttattgatagttaaagttttacccatttgattttagtcattttttaaaaagtcaataaattatggaaatataatatattattgtactctctctaaagttgaaagtatttaacccatcttgtcgaccgacctgtgtgtttggaaaaatcttaaaaaaaaggtcgatcggaatcggaatggactccggattgggcttagctggatcatcacagaaaaaagcccaccttgttgctccaggcgaacgtggtagagattgtgcagtttttacggccggcgagcagttgaaacttgaaagttgcagggcctcgctcgtactttcctctattctaaaataagctcatttctcagcttacctacacatatcaataaaaaagtaaaaaagataaaaatatcattactgtatttaatcttaatgtaatgattcctttctttatctactttctctgcatttattcagtacttatacaaattctaatataatgattactaaaataaaattatttaggacaaacggtataggctaaaagaacttaggatgggggagtataccgcgggtagccactaaaggacctgttgaggttgtagctaaaatgaaccttactaaatttttgacattgctaaaattttagcaatttaataatattgctatgttttggtgggattttttatgtatttttcaaagtttagtaaaaaaaattaaatgggtgtgcatatttgacaattttattaaaagttgataaagtttatttcggcttgatcaggcccctaaagctgcatattcgtttggtcgcaggctactcgcgcgtgccgggcggtcgtattgctgtccagtacagtgcgacgatctcgatcactgataagatgagcatgcatgtacagtagaggatggttcgagaaacaccacacgcatgcatatgatcgatcgatagcgtcgagggcacgcgcgtaggacgtactctgatcatgcatgcatcccctatcggaaggacaacacagaccagctacggcatcacatcggaatccaatgcaaaactggagtgagtacacctcggcggtctcctctgcagtcctgtatgaactctctctctcttctataatataatggattttagaagaatgtgatacatcctaatcaataacggacacacccattagacagggtgggtcggctggtccagctatggtctatgtagtcccacatctccaaaccttattttagtcctatttctaacacattagttgctagtctactattgaataatcaggtaaatcaagtattttaagtaggaacaaaaatatttatgaaaattcgtgtataagtagtaggatgtgtctattcattgtactaggatatgtcacatctacccaaaatttgttatattataggaccgaacagatggagtataatattgttcgacgaaacatggatatgtgaggatctgtagtaccttttccgtttcatattatacttcttctgttctaaaatattgttcgatgatacatggatatgtgagaatctgaagtactccttccgattcatattatactacttccatttcatattacacatccggtcaaaatctcttatattttaagacagagggagtaagtcatttgattttttccaaactttattaagtttgatcaaatatataggaaaatacagtaatattttcaataataaataaatatatttgttgaaggcatatcatgagaaccttcgaccaaggctgccaaaacctggtgggctcgatcgggcgaagcatagggggttcactaaaggccaagacacttttgccacctgagggcccataacaaagcccatcaaggagcccaaggcacaatagactctagttaccctcacaaatgcccatatcataagggtattcatgtaaattctccttactaattaactctagggtacatgaaccctgtactcattaactttaggttgcatgagtttgtactaaagctataaatagtccatagggcatgtaatgggggattcaaaattccacaaatcaatacaccctgttttacttt

SEQ ID NO: 33497 - DNA, 2261 bp, Oryza sativa
cccaaataattaatttaaagaacttgtttggacgatttgaaacttaaaggaataaactgagtccaaagataaacttcagggaccatattagctattcaccctttttttttattttatgtacggtgctttgacaactatattaatatattaaattatttagttaagtaaagtgaaaagagcatcattggatctgccatcaatattgcattagtatatttgtagaaaagacaaataatcgattcaaataaatttaaaagttaaatgagtcatatattaaaatggagttcctaattaccaaagcctgacaattaagtggttaaccatgatgattgtgtgctcgcctgctcggcctttgagcaatttttgtcgtgagcgaggtcattgattggcccagaaaaaaataggcccaagttcagatggaacccaacagtagttgatgtgggcctcgtaggatggtccagtacttcagctggtttgggcctgtgtttgtgtagacttaattgggcctcttttcttttccctactttatcaattgggcctcttgactagcttctctcaaaatatcgtagatttgatttttgagcaagttaatttattgcagaaatcatcgctccaccaaagctgtagttagcttgcaaatgttgtttaaccgcgtatcagattatctcagaatcaagcagagaaggatactcgagcacatgaacatactcaggggcgaagctacatgcagctatgggggttcctaggcatccgagtaagagaaaagttttagctataattaccccatctccaccatatatgcacccccctcatcccaacaatgtgtacccccaagcaaaccatcaggccgagcaaaggtaacaaggccaacagagaagcgcacaaccatgaggattttcttgtggtgcagcatgtttagttgacaaatttgccctgcataacagcactgttaactacttcacggtgaaacagaatgcactcggtggccagccgcagcctattaatcgtagcaggtaagggatgacgtcaaaagaaagttttgcaatttgctttcatagtttcattccattttttcgataatttcaaacgaaaaattaagctgttttgtctttttttttcttcagatgttgatgttggacgagtagttctccagttttggccacctattggttgtgattttaatctttaacttcttcagtacactgcgctgataactatcgtcattgggaattcccattttggcaagtagttttataatttaccgctaagttttcgttcttatatcactcgttcatgttaatgtagatactgaaatcaatggttttagtattgtttaccataatgttctttgataaaacatggtaggtcatacatatatcattttcgaacatggtaatatattgctactatagtggtgcaccaccctctgttttgctctagcttcgcgactgaacatacttattgaaaacccacaaagtattcattcctcttgattgaattgcagagacttaggggtatgtcgtttcttttggttaatactatatgtttatatgtttttattaatgggatctgttcacatgttcggcctccgtcaaaagtcacacaaccattaagttctattctttttttttaaaaaaaaggaatcattaaggttatgggacaaatccacttcttgtgcaatgatatccgctgaaatattggatagagattctataatgaaagttttataagaattatttcatccaaaacgaaataaaagatctctggctaccgattctaagagtgcaacaccattgtaaatagtatcttactcatactgtgaaagcataaaaaaaccaagagtgatgcaagctaaaagacaagaagataacatgcattcttttagataattctgtgtaattgaaaactatatagctatgtgttttcttgtttaaccatgtatgcattcactttgaattttttttaataaaggtatgcactttattttagttctatatatctgacttagcctaatagccttagccttggactttgaggcttgagcacatcctttatttttatttcggacttttcatggtactgaataacattagatatgtaatttgtcacatatttttatctggtttaaaatttgaactgaagggagtatagccgtcaaagttatatgatgaccaaggctgatgagcaacaattaactgattaaattgtgtctcgtgccgacgatgtcctccttttgtcgtggagcatatgcaaacatgcat

SEQ ID NO: 33498 - DNA, 529 bp, Oryza sativa
ttctttgaacttcactcattttaagtgtgaggttgtaataatggctgtacctttttgaccaaaggccggaatactctatttcattatctaaaaaaaataaaaatggggtggtagatatggccacaattgaataggtggcggcaaaggtggtggtgtttgtaacgctccgcttttcgcgagacgttaaaaactaattcgacaaaatcttatatgcgaaaatttagttctttgtgtgagagtctaagttgtgccaaggatctcaatttaatcccgttgttcctcctcatcgaaatcaaaatcctccacctcaaaaattcctcttccgattcgagtctccgaaatcaaattccgaaagtcaatcccttcccttgaatcctctccaaataattgttcccattcccgaaagtatcaaactcccactttgtttccttactcgtctccttgaacccttgtgtacaagtatcaaatttagattcaaatccccttttttgaatccccttggcgactcctccctctcattcaaatccca

SEQ ID NO: 33499 - DNA, 506 bp, Oryza sativa
  unsure (1)..(506): unsure at all n locations
tcgctcgtctaactaggattcggtgttgtactattttaaacaacccttccccgtttttntaactnncgntgctcttggcgcgttaaaaaactctnctnttctcnncnccncccccccccccccgagcggccttttgatgctgctcgnactggaccaaacgnanagctagaagaactntacaaggtccaaatcatggcttgataacatgccacccatgttaagtgaaatatgttcagttaatatacacatcaaaccaatgaagtggagataacttcaatgcgcaaggataaccgaacataaaagagaattttcattaccttatctacctgtcaccctttctcttacaatgttccccccacttgtggtagggattggacgcattcacacaatcaggattgatttctcctgtttgctctgctttcacaaaagttttgcccttccttgagtctgtaacagagagatagtaggcattaaaatgtctgccaaagctctcgtatatatacaca

SEQ ID NO: 33500 - DNA, 707 bp, Oryza sativa
  unsure (1)..(707): unsure at all n locations
tcgagcaggaagaggaggcaccggcgtggccttcctccgcctcccctcggcctcctccgtctcctcttggccacgagccaccggctcggcgctccacgctgtcctcctcctccgtgccgccgccgttcgcgtcaccggccgccgcgcaacgtttttctccgggtcggcctcctgcttcagctcgacgggcagcgaccttgcgaccgcacgcctacgggctttacaaccactgcggaaggcgcgagcggcggggggaggagctactcgtggacggcggccggcgggggagcccgtgtgccgctttccccaccggcgccgggtngactgcatcaccgccgacgcccgccgcctaggcgctgccggccacagagaagggagagagagatgaggaagagagagaagagaggacaagagagatgagggtgttgacgtggccagctgacatgtgggacccacgctgactcagccgttacgtcggataaaaccgggttcaaaactaccgaaggatgtcgggtgacccgttttatataattaaagagaactcgcgtatctggtttttgcggttcgaggatgttttttaccctgattacaaaggtgagggaccttcgtgtaccttttcgctggataattaagctcatgcgttgtggccttattgggatggggccatttggatcggatttccaatgggcctatgcgttctattttgg

SEQ ID NO: 33501 - DNA, 531 bp, Oryza sativa
  unsure (1)..(531): unsure at all n locations
gggaagggatttcagnacnnncnnannnnncntagagatcccaagatgcaggtgtggtgatcgttgtcaggttcttctttccataaatcctacaacattgggtcgaaggttctttgtttgtccaaatattcttgacgacgatttcatggtaagaatattttgattacatgaatccttattttctcacaacatttactaactttgcttgctttacatctattctttcctccccggaaccaccaaggagatgtcaatacagagaatggatagacaccagaagggttctaactccacctagccgtgttgtgcagcttgaactaccagagcaatacagggttactaaagcgcggtttgagagaggaaagggatcctcacataggggttagctattatcatataactttaagagcatggatcattatggccatgcttttataatcaagatagcagttgatataactttaagagcatggatcattatggccatgcttttataatcaagatagcagttgatacagagtaggtgctaaa

SEQ ID NO: 33502 - DNA, 586 bp, Oryza sativa
aggcctgtctccgcccccgaaagacctaatatcaaatataattagaaggggtgaggcttcgaacccagatcgtccagcccactactttgtgaagctagccaaaatatccctaggtgtttctggcaccacttgctgccgatcggtgccgaggcgaagctgcggggtgtcgtggacgcactcgaggctgaaatcgtcggacagcgagcagtttggcccgatgccgaacgggtactcgatgtcgacgttgccgcacttcttcggacacagcggcgacggcggcggccgccgtgatgcggccgcgatcagaggctgcagggcgagcaaagctaggccaaggaagagcagcattggatgatgcttcgtcatccgtgcctggaggtggctgtcgtagcagatgctaatttttgagaggagaatgtataggcgtgttaaattcttgagaaacttgacatctatgctaagctagcttcatgcatgttatatagtacttgggcgaacccgatgacttgagtgttagaataattgggctaggcccaacttataatattaaatctcaaaggcccataataagtgttgaggataataa

SEQ ID NO: 33503 - DNA, 556 bp, Oryza sativa
tctcaaaccgtgtcattaacattttgcataagttttagttcatcagataactactttgcacactgagtctcagacatcaaatttgacaaggagctgaactaacagatcattaatttccgtgaaagcaaacaattctctcactgacagaacagctgaaagattaaaaaagagaacagtgacaaaataagtatataaccaaataaaggagcgacagcgaagaacttatatgagatgttagtgtagacgctggaagcggaacaagttgacgtcttcacacttatcaacacaaaactgtgtaggatgcaaaagattatgcagaggcgctagaataaggcccatatcaatccaagatgaaacctgcacagcaggttacaaggttgatcagatcgatgagtcaagcagtgcgtgcattttaccaaacagaaagtaatcgggtatgagttgaaaaggggcatgtttgtacctgtaccttggatattagtactttctgtcttggatgatcggaatggttcctcttagcttacggcactgtctctttgagctctcgtttttgctc

SEQ ID NO: 33504 - DNA, 521 bp, Oryza sativa
gcaagtggaaaggtaatgtatctgggagatctctcagttccttcggtgaattacctggatatggaatttacctctcgtcactgcacaatcttgaaactaccgcctgaggacaccagttccagaatgcaatagcttgtcaggcttgccgacagaagtgtgtcgttccatgcatcatctaactgcaagtctgcaactgatactccctccgtcccaaaataagtgcagttttgcactattcacgttcaacgtttgatcgttcgtcttatttaaatttttttatgattagtatttttattgctattagatgataaaatatgaatagtactttatgtgtgactaaatattttcaattttttcacaaaattttcaaataagacggacggtcaaacgttgggcacggatatccatagttgcacttattttgggacgaaggtagtagtttgattggacagctccatccatccagtagaactcttggttgcacaatcaagaaaagaacatagcccgatagatccaacaga

SEQ ID NO: 33505 - DNA, 681 bp, Oryza sativa
cctgatcaaacataattttgattagaaaagattaaaataatctactatattattaaaggaatagaaaaagaagcctccatgtgtgctctcatggtatagaaattctcacattaatcagaaaaaagaaaaaacagagtccatatagaaatacaattaggaaatagctgaaatttgaaattaaaaacaaggaatattagaagaggagactagagtccatatagaaatataattagaaaataactgaaattcgaaattaaaaacaaggaatattagaagaggagactagagcccatatagaaatataattagaaaataactgaaattcggaattaaaaacaaggaatattagaagaggagactagaatccatatagaaatacaattaggaaataactgaaattcggaatcaaaaacaaggaatattagaagaggagactagagtccatatagaaatacaattaagaaataactgaaattcggaattaaaaacaaggaatattagaagaggagtatagagtccatatagaaatacaattagaaaataactgaaattcggaatcaaaaacaaggaatattagaagaggagactagagtccatatagaaatacaattaggaaataactgaaattcagaattaaaaacaaggaatattagaagaggagtatagagtccatatagaaat

SEQ ID NO: 33506 - DNA, 524 bp, Oryza sativa
tatgtggagggttggactgccctaaagctacaaccaactaaatcctaaaactcaacatgccaaagtgccacattatcattcattagcaattattacattttaaacctcatgtaaacctgctatatcatctatattttggtatatttaaaagttttaaaatacaagcatgttcaatcatcatcccatataatttacataatatttcaatatatatctccctatcgttttctacaatattctatatacatgtaccgttcatctccactagttaatgccttttatcttctctcattaaaccttatcacttcaattgttcctaacctttagattattaatctatagtccaaattatttccctcatttttttctctcatgaagccacatcaccttacttttttacttttggataatcattctatatactatttaaaatatcataaaccacatcaacttaagggccctttttaatgatggatcaaaaaataaaaaaaaattctaagcttatgacatctagctatgttaca

SEQ ID NO: 33507 - DNA, 624 bp, Oryza sativa
attcctgcagccctttctagaggagttctcaactgtcatcgagatcgacagtcgagagggggagatagttgaggttgatgcacataagcaaggtgatgaggatgtggttattgggtcaattccgagttttgttggtgatactattgagaaggttgtggacattggtgagaaggtagtagacattagttgtgacaaggatgagggggtagttgtcgggacaatcccatgtcctctggagcgtgtggaagtacaacaaactaaaatgagagtatatcaaagaaggaacaagaaccaagttgataaggtgacagggaaggagcaagtgcaccagaggagccaaattcagaatcagggggagagaagtggtgagcctatgcaagagcaagacaaggagtcacaacagctgcagcagtttgagtacccagtcccagattcctcctctagcctctctccaacaagttcctccctccttgagacaagtggtaacatttctcctacctttaaacaagtagagttacctcttgcacaacgtagagaaactagatctaatgctggaagacctcctatacgccttggttttgaacaccttagttctagacatgacattgcaaactatatctcata

SEQ ID NO: 33508 - DNA, 519 bp, Oryza sativa
ctgggactggtatcgattaacaggttaatttggagcgtcacgggctagttccggtcgggactagttcggggcgtgacaccaccccgccgcgcgcgccctcctccttgtgggccggcccaagccgccctccctctctccccgggacgccgacaggtgggccccacctgttgggcccgtctccttcctccagtcggcgccggcgcgcccgcaaccgccgccgcgtccacgcctccgcctcctccgggccacgtcagccacgcccgcgcgtgcgcctcatcaaccgcacccacttctcctctctctctcccgcccgcgcccgcgcccgagatggccgggattcgattttcgaatcccgactctctctcctcccccactccccacgttggccggcaaaatcccgcccctaccggccacgtctagggctcccctcccctatttaggcttccccgtcgctccctctcgctttttccccatctcgccgaactccctcgtgctccccattgctcccgcgccgtgcaa

SEQ ID NO: 33509 - DNA, 849 bp, Oryza sativa
caccaacataaggttccaccactctaccaccgtagtaaacacgaacaagtctatccatctacaccaaaaaatcaaatgtaactttgcaacaaaaattaaatcttcattactaaacgtattccaaaccgacatattataaccaatgcataacttaaattgggccaaagctaactactccaaaaaaatatctaatccacctgcaactatcaacaagtttactagggcattacacatcgaaatattacaaatactccgtcatacaacccaacctagttctagttaactataatcaatttatataatgcaaccaaaattttctcaccttcatataattaatgggtaaaagtttaacctatagactatagcatcaattccatcaaattaaaattactttcatacctcaaccataatttttcatccatccatccatccaaaccatccaaaaatcaacattaccacatatatggttaaaaaaatcgtgacaccaatgagtacattgcaaacatgtagcactacaacaaaccaatcctaagaacaaatgctaaaaatcacaaattcgggtaaaaaaggggttctagggttacccaccgatctacaaattcaaccaataaaaacaaaaaaaaagaggggtgaatgaaggagtctacctttctcttcgatttccacaaaaaaatcccgcgaaaaacgagttcaaatggagtggatttgaggtggggaggtgagagggagagagagggggagagctgctgctgctcagctcgggttggtgcttgggcgaaaatgggagtggggaggagataggtggtagggcccacggggtttaaggggtcggcccacagaggaggggcg

SEQ ID NO: 33510 - DNA, 540 bp, Oryza sativa
caacggcaaagcggtttgcaatgatcgccatgggctgcctgcttgtgttctttctttgcgagtgcaaaaaggaaaagttgctgctttgggcgctgattgattcagcaaagcgacgtcgcgtgtacatgcctgcctgcctgcctgctcgtgccagcgtttgcgtcgcctgcgctgcactgcactgcactgcaacttcgttggattcggtcacttttgctgctgctggtggtggtggtcagtggtcactcccatttcagaattcagaattcagatatctctcggtgtctctctgctaatgtgggcgtcaacaacgacgaggagatgtggtgtggcttttgctttctgaatgattgttctgaagataaacgtactacgttcagttagttgcattgcatccagaattcagacatcatgcggatatctaacgtaaaagagccatcctttctttctctgatggtgtgtatcatcacagcgagtgatggtgatttctgctggaattaatcattaatcccaccattgcctgatcatgtgctggtaatt

SEQ ID NO: 33511 - DNA, 529 bp, Oryza sativa
ttaacttgacatagtgaacttgtgtagttcaggtggtatggttgggcctattcaacatggtatagcattgtttagaggatatttaatcttgccttaattaattagtagttttattgttttcaactataaatgtttacaaccgcctttatgcaaccgccttgtctccccttgcatgtatgcatcgttggtgtggcttgctgagtatggtggttgtactcagtcttgctatattccccattttcagaagtgtagtgcttatgtgttgaagatgaatgtagaggacgaaggcttatacctcagttgtgtttttgcctgtggggtggagctgaagtcccgctaggatcgcccgaatttttgttgttattgctttcttttcggtttgaggactaaatgcgtcctttgtaagcatttacaggttatttacgtttggatctatatattaatttgtcattttggggaccttggcttaattatggacagggatttatacacaaaatagtctagaaattggccaaatttcatagcataa

SEQ ID NO: 33512 - DNA, 598 bp, Oryza sativa
aaatttagcttataaagttttctttggcacaacttcggatccaaaattttccgaagcggtattccgaactacacaaatccatgcataggtctagatctataattacgttgataaaattcagataaattatttttgttcatgttttagatgaaatttagtactttaaacaattacaatttaacatacaaactttaaatctaccgtgggtctgagatctaaagcggtaccgaatagaatctaaacataagcataaatcaaacaatgagacctccaccattaaacatatcttcacagagagtagaaggttgtgttcggtatggtagattaggaactaatccctcggcacataaacggagcaagccgttagcatatgaataattaaatacttccaccgtttcatattgtaaatagtttgacattttttttctaatcaaacttcgataagtttgatcaagtttataaaaaaataagcaacatctaaaatatcaaatgacttataatataaaacgaagagtattagcctaaaacttaaaaatgaattaatatgatttttttaaaacataaattcttttaaaataaataccgtttaatcgttcag

SEQ ID NO: 33513 - DNA, 608 bp, Oryza sativa
ccttttttgcaaacatatccccaatcaggcacatcaatttttttcatcaagatgtatgggatatcatggcatagattaaaaatgaggggagtggtgcctgggatctcggactcaagcctagaggagaggtgccttttatttttcgtttttaaggggaatcggatctagagttggatttttttcgtcagagatagagaatcggacatattttttttttatttttttcgtccttctttttacccggagtcggacagatccaatttttttgtccggattttttttctgtaatggacagatccgattttttcctttaatgaacagatccgacttttttcctttttcgcctttttttttatcagacgggtttaggttttttttttcacccggttttttctggattggatagatttggttttttcgcccggtttttcgttttttcgcccttttttatcggacaagtttgttttttttcctttttttcgtccagttttttttacggacagatttggttttttggtctggtttttttttacgaacgatggaagcacctcttatttttttttaagtagtagagataagagaattgttgagttcattttgattgtgtt

SEQ ID NO: 33514 - DNA, 1192 bp, Oryza sativa
tcagtttgatgggcaaccccctttcacagtgacgattgaccctagcatcctcctatcaaatgaagacaccccttactcacgtagcgatcacaaggaaggaacaatagtgaggagaatgtacgtgcggtcagaaagtacgtgcggtcaaccgtcaccgccgatgtattgccgtaattgttgtgtacacgatgaaaactatttttggtgtattgaatatccatacaaatcaattgttgtatggcatatgttaattatgtatgattattagaatttttatcaaattgaaatcatccatatgctagttatatatgattattataatttttaaaagttttaaatcatgcgcatggtatttacatatgttaattagaattttcaacaatttattatcatgatatgctaattatatatgattattagaatttttattaatattaaatcatgcatgtggtatttacatatgttaattagaattttcaacaatctaatatgatcatatgctaaatatatatgattattagaatttttattaattttaaatcatgcatgtggtatttacatatgttaattagaattttcaacaatttgatatcatcatatgctaattatatatgattattataatttttattaattttaaatcatgcatgcggtatttacatatgttaattagaattttcaacaatttaatatcatcatatgctaattatatatgattattagaatttttattaattttaaatcatgcatgtggtatttacatatgttaattagaattttcaacaatttaatatcatcatatgctaattatatatgattattagaatttttcttaatattaaatcatgcatgtggtatgaacatatgttaattactttttttaacaatttaatatcattcatatgctaattatatatgattattagaatttttattaattttaaatcatatatttgcttattacgttttatccacttaatttactacagacaacaataatttttcgaagtaattgtcattaatttttcgactttaaataattttaattcagtgcgtttatcagtagtcccggttcttaaccctaaccaggtttaaaaagaatttagaaatagcgggaaaatatctttagtcccggttggtaagaacaaccgggagtgttcttacgaaccgggactaaagacccaggggtata

SEQ ID NO: 33515 - DNA, 602 bp, Oryza sativa
tcatccggatcttctgtgctcactccgggagactgtatttcattattttgtgctgaacctgtgttgacggtcgttatcaatcagtttcgaccgtcaatattactaaaatagaggagaactagtgatgcttgcaatgcatatgtttgttagaataataatatttcactagtattaggtatactaaccttttatagagaatgacaataaagtggaggagaatcgacatcaacttagacgataaatcaatcggacgatgtcgagaaccagacttatgtatgaatagaccaagaactcagaattgacacgatgaattgggccaaatttcacaagtctgcggagaagagaagtccaggatgccagcagccaaattgtgggctggttgggccggccccaggttcggccgaacccatctctccattgttggatgtggggtttggcagggacgctccagatcttctcctgatggcgggtgcggggtacttcggacaattcccctttcacaaccgtcataactacctctatataaggagctcactctcttcacttcaacacacacctcaagcaataactctctcaattctcttaaggttaagttagtagta

SEQ ID NO: 33516 - DNA, 594 bp, Oryza sativa
atatagtacttactaaatatgaatagttttgatgtaaataaaagactaagcactagtcaataaacactaagttcataaagatttggagatattttatagtaacgagctaaaagggcaggtcttccctgggggccctccttaatactttttgcccgccctacccccttttcctccaaaactggtgatggcggctaaagtggagatggctggtgcgtacgccaggcaaggtggccgacggccggcgatgggttgccggaattattatccttttttttaattggtggaaggctttagggcccggttccaagattacaaccgacaaatggaggcggccccaaaaacgggacctatgagggccttataactgggaccaaagagtatttttgtgggagtgataatatggagcgggaaattaacattgcaccggcgaaataatacaggtgcaaataatatgcatccaaaactggtgctccccataattatcgatcttcttctctcgcgatcggtcagttctattaagacagagacgatcgatactaaaaaaagggacctagcttgcttgtgatcgatattgatggaaaagatccatcgatg

SEQ ID NO: 33517 - DNA, 600 bp, Oryza sativa
gtggggaagattgctacgtactggttcgagaaccagcgagcgagtagaatcatctctcgatcaccaatgaaggttgcggtgcgggagattgctacgtactggttcgagaaccagcgagtgagtagaatcatctctcgaacaccaatggagtttgcggtgcggcagattgctacgtactggttcgagaaccagcgagcgagtagaaacatctcttcgaacaccaatggaagttgcggtgtgagagattgctacgtactggttcgagaaccagcgagctcttcgaacaccaatggaagttgcggtgtgagagatggctacgtactggttcgaggaccagcgaatgaacgtttagaattatctctcgaacaccaatgggggtgctagagttggtttattacatgtgcgtctcatgtggccaacatgactcacgcacccaacttatagcatatccggatgtccgttcgcaatcatgtcgggagatcaagccgacgacgttcgcgagaattgtccgttaacgaccttttctcgagtagtccagccatggccggtgctatgagataggtcgtcggtcttcgttggtaggttgggcgcgacgactct

SEQ ID NO: 33518 - DNA, 711 bp, Oryza sativa
ttcctgcagcccacgactgctcgcgcaccgcgagagggaaccatgcaatcaagcctacaacgatggtggatttggcatccttgcatgacgctcgtaccgagggtgacggcacggggaagacctgacatgcggggcctcctatggctgatccaccctagagacactgggtaaaccatgaggaggccactatgcatggatactacgtccgcttaaacgaaaggtacaacgagtctacacccatacaaaagacacgggaggccggccgacagaggatgctgggatacgtgggttggggcttaatagacggccgacggcgctgaccgtttccggataccacccaaatcctttgtccgccccaaactaaaatagatgctttaaaaatatttctctgttcacaaatcatgtaatcaatatcatggaaatgtggcgctgatgtatacacatgccccatctctattaccttaccaaaggtaattgaccaagcataaagcattttgataaatatgagtatgcatgattctagaatatcatatctaaacaataggcataattgactgaggactcatacgtaaacatggttacgacggaatatcgggtaaacaatgatcaaggcatgctataatcacaagttggatgttcatcattgcatgcatttctatttgcatacaaaacaatctcgcaactgagatcagcatgttcaacgaatagtga

SEQ ID NO: 33519 - DNA, 2927 bp, Oryza sativa
aatgtcatgaatcagctcaacattgccacgtagacaccacgttagtgaaatagtcctctaaaactgtcaagggagtcaaatttgatcgattttaatagttgagggaggggccgatatatagttaaggaagtcaaagtgggcttattccttagggccaaccgtgtaacttagggccacatcccactagcccactagacatgaaccttacccaacaaaaatattaggggcaatttcattcttgctcctgctcctgttttgatatatacaatattgattttgctcctattttttaggatttcatttttgcccttgtttttttaaacaaatccaaagtttatccctattttgggtggacatgttgacggtgttaaatctttggcaaaaaagacatccatgcccttacatgctattgcacatttgacactattttttttatcatttgtgtatttgcttccatttgtacaagtagcaattttgataaacttccacaagcgtggcaattttgacatactatggataaattttgatttaaaatttgacataattttgctagaaattttgacacattttgacaaaaaaaaaagaaagataaaatggcacaaattagacacattctttacacaacatatagcaagcataagaaactcaagaaaatccaaaccaaagtcaagcaaatccaatctcgcaaacatggtatcgcggccgttgccgctgctgccgtcacttcctccccatgctgcgtcgcgccgtcttccaccttggggacagccgatctggactcgggggctgtttggttgtttgccacactttactacgccacactttagttatgccacaatttcttacgtatgtgtttggttcgctacggcaattgtgtcatgccacactttcatagccttgggacccacatatcacactctcaaatttgaagctaagcttgccacacttgtggccaactatttttaagccacactttgtgccaccatgcctcaactagcctaaacttagttacggcaaggttaggcatcaaccaaacatccccttggtcccctcaatctgcagggtcgctgttaccatcgtcgtctcctgctcacatcccaacaccaacacaaatcctccccacagctcctcccctaccgccgccaagccccttccctgccaccaccttcaagcccccattctgctgccgccttcaaaccccttgcccgtcgccgcctagccccctcccagccgccaccaagtcccctcaacgccgtcgcctagccccctccctgccgccgcctagcccgcgcaaagtgccggtgggaggggtctgttcctgactgacgcacgctcgccgccacttgccgcgccgccggatggggtttctttcgggagtgaacccgtgcacacgagaggctggaaggtttcccctacttggatatttcctaagggtaaaaaggtcaataacaaattaaaaaaaatattttctttttttctctatttctttactgccataaacccggtcccactcaattccgtctaaaccttacccttttggttaaaaaagtggggataaaaacaaaaaccctaaaaaaggtaaaatcaatattagacatggcagaaatgaaattatcccaaaatattatcagctgatagttaaatatttctacttttgagataggattgaatgtgttcatgagccaagtcctgtctttgtatcccactggtctctggcggcttccctagagcctctggttaatggatttgttgatcctatgtcaaaaagaaaatttctgcttttcagatactccctctatcctataagacatggtcaaatttgacatggtctccaaaactaatatttgtcttataatttctcatatattatagggaaaattggaaccatgccattataattttgcaaaatttgagatatgccatcctgaccatatgaaagtaaattcaaatgtgaatccaatgatatattttttagcaattaaatttaattcatattgtacttgaatgttggtcaaaatattttaaaggtagaatctggaaatgtgtggacaccttatattatgggatgggggagtaggatctaaatcaaaatcgaattctcctagattaattcaatagcatcccatttggccatttgcaaaaacttgtactagtacagttgaagccaattttgacatactattttctcttttatggattgtagtatcaaattaaagcaaactgatcatgtttgatgaaccatcattagttcaaattcaaatactcctagcattatgtttcaaatgattagtcccatttaggcccgttcgaatcctctataaatgaaggataaactttgattttcgtggtacgcttttcaaacggttaaacggtgtgtttcgtgcgaaaactttctatataaaagttgttctaaaatatcagattaatccatttttcaagtttgtaataattaaaaattaattaatcacacattattactacctcgttttacgtgaaacacttgatattcatctttatgggtctgtttggttcacagcccaaaccagccatcaagttgtggcgtcgccagagattgtggcgagagaaataatcgccacagctgtggcggaaataagcatgcaaatgaactagcaaaaagtgtggctgccacaactcacgtattaatcaaacatcagtcaaactgttgtggcagccgcatgtttggcgaggcaatgtgtggcggggatccaaacaccccctatatcttcagaaattcaaacaccaccttataagcaactttgagtgtaaaaacaaagaaaataaaaggagagctttaaccccctcctctctgccttttcccacgagtggagtgaagcggaggagaaggaagcatcgcatccgcctccgatccggcgatggcgagggcgccgccgccgctgtcgtcgttg

SEQ ID NO: 33520 - DNA, 925 bp, Oryza sativa
ataaaatatgccagataatcacgatgcatataatctgaatttcagttaattcatcaagcacgtgggaattgatttgtttaatataaaccagattagttaacagtatggtaaataaacctcatgtttctacttcgtttggagcatttcgtatttgacataacacaaaacatatttttaagcgccacaaagagtcagctaccaggtatcgaactgttttttttccgattttacaagaatatatcaaatttgatgatattgcaaaaatataaccgtgtcaccgaatcacctagcgacacctggtgttgccgaagggccaaattggaccaaattcccatttgttatcgcctacttcctccgtcccataaaaaaccaatctaggtgggaatgtgacaccagctaggataacgaatccaaattcattgttctaggtggtttcacatgcttacctatgataacgaattgtctaggtggtttcgcatccccacctaagttggtttttttggaaggaaggcaataggtgaaaacagccatgcattttgtgactttaccttcgctttgtccatgcttggtgcagtggctcatagcccaaggcaatgtccacatttaaataagctacatcacacagtgtcgcgtgatgaaatggtgtcatcatgtaaattgacaacacaaatatatttttatttgaatttcatatattcccacaagataatatatatatatatatatatatatttaaaaatttaattcccgagtattttccttagatcaatcatattttcaaatattgagatatacatttattttaatatctacaaatgcaattatatttctaattaagaaactaataaattgtatttttctattactgcacatttattgttccttaaaatgattgatgagatgcacatccttacatgttatcatc

SEQ ID NO: 33521 - DNA, 712 bp, Oryza sativa
tttagatgtgaagagtaaaatagatatttggacaatagtaatacatgcatgtcacactcacaccaccatatgtacataggcaccaaaataaaaaaatacttagattcataaaacacatgcctgctagtttagtttctagtagctcttaggaaaaacttgcattcacattatatgccattatagcataacagatgtaaccgtggtacgaggaaatgaagaatctaggttcatgcatagtcggacgcatgtattgataatatcatcacaatgcattttgaagtgtgtcttgtaatagaatggggtgtcaattgtccttccatcatccattatcattgccgacatcaccatttctatgaacacaatcggttagtataaaattaatcaaggattcgaaagagaataaaatactaatatatagaactcatgtggttacctgatgatagcaacataaggacaagactaaatattactattataatgcacgtcctcgtccttgtcatatcttgaaactgcatgttgtttatgttaagaatattgatgtcttatgtttcagattgatgatgcctactgattgatgtttcagattgatgatgcctacatatggacaagactaaatattactataatgatgcacatcctcatccttgtcatatcttaaaactgcctgttgtttatgtcaagaatattgatgtcttatgtttcagattgatga

SEQ ID NO: 33522 - DNA, 630 bp, Oryza sativa
aattcgagctcggtacccaaaactatatgtatagataaaagtatatttaacaataaatcaaatgataggaaaagaattaataattacttaattttttaaaataagacgaacggtcaaacatattttaaaaaattaacagcgtcaaacattttggatggagggagtattattttaatattagttttacacaaaacaagtttgataccggcggaaatttccgtacattttttttacccctacaaccgaacatgcacgtacgcgtgcgggttgttccacaccctgtcctttttgatcgatcgatccggacaagcaacaagcagctagcaagctttcgatcgagccacaaaatttcaaaggaaaataagctaaaaccccccccgggggggtgctcaactacttcagcccgaacaaacttgcatccggccggtgtgcaagccgcgcggcgcgcgcttcggtttacgtacccggtagcgaaaaaccggaaaccacggcgcgcggtttacgtgcgtgcgtgccggggatgcttcccactcgcgcgcggcgtgggggtttcgtgggggtggacatggactggtcgtcgactcaacttgtgcaggtgagacggcacttcccctgactggctgggtgacg

SEQ ID NO: 33523 - DNA, 516 bp, Oryza sativa
gcgaattcaagctcggtaccctgtgaatttgcccaaaatttaatattgtccaatatttaaggtttattaaagattctataattttctaatgagaccgttattaacacaataccacattagctcaatttatttatatgttagtttattttatatggaggggtttaatatatcaaatttcaatccctaaatgcaattaggaacttggtgcaaaatcgatctacatatcgaattaaatactcccgtaattctattatatatatagagagctcagtttatttgaatgatcatcatttcatgtgtacacatattatggcacccacctacattattcaaatattttaatatttgataaaataggttaataataacttttcttttatttgattttaatatcttgtgcataattatttgtaggattaaatatattcccgtaaatcatatctattgcttaaatgtagttcttttctttactttcttggtgatcatttacggtttggcaagcaatagcaatcataa

SEQ ID NO: 33524 - DNA, 599 bp, Oryza sativa
atctaagactaaagtatgttctcattatttattaattgatggattaggatggttcgagactatgttaaatacacaagcttgtagagtccaaatctattgcgcagtatataggagacaacctatataggattattttttgcaagtgtgcaaagcttcacatagcctagcaagaacacgattggatggtaaaatataactacgtacgaaggcatcattttttttggaataattaatattaggaattatgtactcgaagccaacctctctacaaataatttgtttagctagactgcactggagcataaattaagtacaccgagattatgtaatcatgcatatgatgcttacaatatgtctatccacttgccacaattttcattgttttcatgctatattatttagattataaaccatagtttatgataatcttttaaaataaatagctaatttttataagcttacgacattggattatttataactaatttgcagttaaagactcatattaactatattccaatacttctaaaagaaatatgttattttgaattatagtatgacattataatatgttatgtgctgatggttatatattggat

SEQ ID NO: 33525 - DNA, 597 bp, Oryza sativa
tgttctggttagtttgttcaatcaatacaatggaatatatgaacaaaccagccaaatgactcattatttagagattatctagagagagaaatcaagtactagcagagtgatctggtattgttgaacgtatacgcttagctagctggtcgacagcgaccaatattaaaattaatggataaatcgatcaaccttgagcgaagcaacaatatgtgtattgatcgaaagttcacaaggaatatatgcttttatactctcttcaacaaaaaaaaatgtatttgcccccaaaaaaacaaaaaaaaagtattttatttttcaaagtcaagatgaatgctgtgcgtgatcagaaattttctcatcataacactaaaactagccgaaatatgattgtcgtttatttgaaactaaatttgtttggatggacaactctggtaattccttctatctctagaaactactccctcttggcctcttgtacaaaatataaggattattacgtgatttccaaaatttttctcgacgttccgatgcatttttttcagaaatacacaaaaccttcatatatattttaggaaacactaaaaatccttatatatttta

SEQ ID NO: 33526 - DNA, 536 bp, Oryza sativa
gtcttttgggatggagtgaagcaatggattttcaaaactccaactccacccctgtagttcattttctaggggtagctctgctagatctactccaaaagacgaggatctgtaccgtttggcaattggcacagctctggctcgaagtaagttagagttgggagctcgaaacgggcaacggtggatacagtggtcccgggaccacctgaaaaaagggcgatcgactcactattaaaaaaaatagcgactattgaaaagaaaaaaaagcgatataatcccccttcccgactcccgacgccctaactatggctcacaggtcccacacgtgagtcgcgacgtgcgtgtatcgaatcgatcgacacaactctctctgtctctctcctcatcgccctaacccggagcccccggccataacccatagcgaggacgccgcgacgcgagcagccgatcaccgaagcagaggcacaccgccggcagtccgccaatccatgcgcgatccagagcccgggccccacgctggctccggcggaaacggggcc

SEQ ID NO: 33527 - DNA, 575 bp, Oryza sativa
tcacaaaaaaattgtaaaaaacctaaaatttcgggcgagatttgagcacaccggtgggggacgaaattaccgaaatttcggaaattatgaaccgaaatttcaaaccctaccgggagatcagtaactaaaaatccgagatcaaaacgatgttgccactaaacgctcttgatttctcaacgaaacccaacaaaacgaggagtttctaaaacagcgattaaaatctctccagcaaccaaagcggaccccattttgaccagcgaagcatgtcaatcaacatggacctcgtcgacgtacgagtgctccggccgacaagtccccacagtagccaggtgcaggcaaagccgagcggagaggagaatggataacctcgccgacgagtgcgctaccactgccggaagacgtgaacggtaactcctagtggtgggagttcagtggggatttggaaaggaatgacgtctgggacccatgtgtcaacgatgtggaaagaagacatgtcacaggggtattttgggcaatacgaaatgtcatggcctgcacgtgggtacactagaggctaggtgtctaaaatggcatat

SEQ ID NO: 33528 - DNA, 1109 bp, Oryza sativa
ccccctaattttatatgcatatgcgtgatgaaaaatactcagtgacactacctatagctatgtttctatctctctatatggaagcgtgtgtttgttcctccttgacaatgcctatacttagtgtatataatttttttctaaaaaaatcatattgatttattttttaagtttattttatctaatgcttaattaattatgcgaaaaagatcgctttgttttatgtgtggagaggtgaacatcttaaccttcacctccgaacgagattcttctgagcagttggatatggtcccaaaccatattcttatgattatctctatagaagcacttttgtttggcatggatttagcgtctcgcagacgcaagattaaacatgaacaagctagtacaacctgtgtacctttttaattgatgttcttgactagaggtgtacctttttaattgatgttcttgactagaggcgcgcccttcctttgaggtgtgactttcaccattaagtttttgacaaatttcgttacataggctgtgtttagtttcacgttaaaattggaagttttaaaaaattgaaacgatgtgacggaaaagttgaaagttcgtgtatgtaggaaagtttgatgtaatggaaaagttggaatctaatcagggccataacacacaaattttgttttcggctgtgtttagttcataccaaaattggaagtttgcttgaaattgaaacgatgtgacggaaaagttgaaagtttgtgtgtgtaggagaaagttttgatgcgattgaaaagttgtaagtttgaagaaaaactttagaactaaacacggcgttcgtaatttattggtaacatcatgaaaatgtgtgaggactcaaagacattgtaaaaactggcaaattgctagaagacactctcatcttaattgggagagaatttctttaaaaagataagagaatggccaaaagcatctagcttaaggatgtcgtgaatatgaaatattatgtatgatgatgatgtacttgggggtaataacagacttagagttaaataatttagaaagcttaattccaaggactacagccccagatggcatatatttagatagtgttgggaggtaatcttccg

SEQ ID NO: 33529 - DNA, 571 bp, Oryza sativa
ttcatctgcaaatggcccataatattatgagcctcactccggtgctttctacttatagtagaaaataatccgagccgttgatcgtatataatcgtagggttgagatctaattctactaccaccactcatagtggtagtagaaacgtggaggggtatatttgtccatagataataattcatgtaagggtattatcgtaaattattattcagtaactctaaaccttcgccattctcaagcggctgaccccatccatcgttgacttcgtcgcttgtccatctccctctccgcctccatcatctccagcgcgatcgacatctcctccccctccagcgaccaagggtggcccttctcctcttcgccaagccgctgaaggtccttgcccacggcggacgactagtcctgccatgtagctttgaccaagacaggagatcgccgggcaattggacggcggacgaaattcaacgggttccggcgaacggcggcgaggtaggaggaatgggcaactgggaatgaacgagtgtagtatggggatgtggtggacggctcggattggccaaaaaatgagctatg

SEQ ID NO: 33530 - DNA, 547 bp, Oryza sativa
gcgaattcgagctcggtacccaactgatgttgagagcaaaaggggtggatcattttttactagagagttgtgaagaaccttctgataaggagagccaagcatggaggacgtggaatactacaaattccactgtggtatcttggttgatgaaccggtggctccttctattggcaggatgatagaagctatccagaatgctgcagttgtatggaagacgctgagcaacatgtattcaggagagggaaatgtaatgatgatggttgaggctcagaacaaagtggagaatttgaagcaagagaggagaacagtcaaagagtacgctagcgagctgcaacagttatgggcaaatcttgaccactatgatcccttacaattgaaacatgaggatgacattgtgattggaaataaatggctgcagaggcgaagagtcattcatttcttgaaggggttgaacaaggagtttgaggataggagtgtcacgcccggaaattcactagtaatttccgaacttatttgtgcataaaatcctcgtccaggaatcagccga

SEQ ID NO: 33531 - DNA, 574 bp, Oryza sativa
gaattcgagctcggtacccacaaacgtatagagaatttggagacaatttagtaagtgctttaacatcttagaaattatcctttgaatgaatctttatctctcgtctgattcctgcggtccaatcaaataatggtcattcctgtgtttagcaatcgtctgttttgcacttacattcctatcagaatcttgtgtttttttattcctttgtttttccattcctgcgattcaaaggagctcttagattcattcttgatttaatagttgggattaaatctgtcttagatctgacggcttataattgcgtattggcgtggtgcattctagtggtaagaagtattatcttttcactacttttagatatcttgtggctaggcaaatgatcacactacaccatatcctcacccctttgactgcatacctgtgatgggcataagtgttggtcagtgatgagggttacctttgacgggttctacgggatgccgtcattagtgagccatccggctatagcccgtcacaggtatctactcacttgtgaatgcaacccgtttacggtcgagaatgcaacccgtcagag

SEQ ID NO: 33532 - DNA, 717 bp, Oryza sativa
aaaaaataattatacccaacaattaggtacaaataaattagtacaattacacctaaccattaggtacaaataagttagtacagggacaagtgctctcagttaaagtacaccaacccaaccattaggtacaaataaattagtacagggtggattacattccttcagatactaatattcaatatacaaatacagtggcagccactaggccgcaaataaataaggagattgaaacgccactttattagttggaagcaatacaaatctcagcacacacaagtacaacgccgaaactcctaatgggtgatcaatcactgggtgacaggagcagcgatcgatttccctttccgccacttgccgccaccacttgccttttctggcttttctcagcctctttcctattgggcttggcccacgagagcccatccacagcacgcaatatcagttttttttgccaggcacatgcacttgctctcgtcttttccaccgcttttttcttttctgtttttttctgtttcctcacgtggtttttttttggcactgcattatttttctattttagtaaatttttgcacctaaagtttgtacatcttaaatttacacatctaaagtttatacacctagagtttatagacccaaagtttataagttaaaagtttatatactcgatttaaattgaatttaaatttaaatattttttatatatagtacacgtaaaag

SEQ ID NO: 33533 - DNA, 614 bp, Oryza sativa
ccaagtcataaagtaaacaatgtttttctaatactaagttttacgccttcctcccctgtgttgcggaaattggtctcgacacatctttacaggtatcaccaaatgagctctgtgggttcattcataatcatattatagacccagctggcgaggacaacgtcaacaaagaaccaccagtatcacaatcactaggtgaaaccccgcgtgttgctgcaggagtttactataacactaagtaaaactaatgcgtaagatagctagacaatataaacttacataagttgatgtggtttacgataatttaaatttaaataatgtatagaatgataattcaaatgtaaaagtaaggtgatgcggctttaagagagaaaaaggagggagatagtttggaccatagattaatcatcttagacgacttaatgagagaggagagaaaaataacgctaagtgaggataaactatataggaatgtttagatttagtaacctttgacttaggatatactagaaaatgggcgcgtcgttggcacgccaactaatataacccgcggatattataatctatttatttagaatgtatgaataatatcatgttaagttatcatattacttttt

SEQ ID NO: 33534 - DNA, 598 bp, Oryza sativa
cctctcgactccatgccggaatgactgggttcgtcgcgggttgaagttaccttaatgaactcgaagcgaagcccggtagcctcccaactccatgccgggatggctggggtcgtgctggggtcgagagtgagtaatgtaaggacctgtgccaggctcttagatgcgcacccagcacctgcggagccgggctctgaggcaggagatcacaagcctcctacgtggcaataccaaggaaacaaggaccgtgaagcccatgaacccgaggtcttcgctcaactcctagagggctctgaccagggtcgggtgatggcctaagggtagtgggcccccgggtgtggccgtacttcatgtgacgggggccgtcggacctgaagcctttgctcaacccctaggtggttaccggccacctgcggggccgatggtataaggaacacctagcttagccgggaggggcatggccagggcctggcggttgccgggagatttcgagccttcgggcgtggcagaatttcttgtggtcaggcccggcagcgtgtgatcttcacctcgtgccttgacggttgcggtccgctggttggagagggagacgctcctgacc

SEQ ID NO: 33535 - DNA, 583 bp, Oryza sativa
gcattccttgctagttaataaaaaatattcaagctagctaaggtacgactaattaactaattaaatttctctcttgagagaatacaggattgaagatggaagttatgtcaatgtaacattggaatgatcatgtggagatccatgcagcggtaatttttaaaatattgcagacattgctgtactcccttttaaagtacacaaattttactatggtctctactagactgtaggtaaaagatacgacaaacatcttgttattttttcatctgagatggagggagtatttcagaccgacaacatctgaaatactcatttctgactaaagtcctgataaaaataaaaaaaatttgacaacatatatagattaagcaccaaatactttctctgggttttacaagttgtgaaacagtaaaagtattcgaaaaaaaaacactctgttttcagtttcctccaaaattttataggattttcacatgaaaccgttcaataccttaaagttcgtgcgaaattcctccaaaccgaatagcacccttcaaggtttaaaagccaaacaaactctgccagaatgacgtgtctgattgtt

SEQ ID NO: 33536 - DNA, 638 bp, Oryza sativa
cattttcggctggcggcctcctggacttcttctcttcgcggacttgtgaatcttggcccaattgatcgtgtcatttctgagttcttggcccattcgttgataagtttaattctcgacattgtccgattgattgatcgcctgttttgatgtcgattcttctccatcttatatttattctctgcgagaggttagtaatcctagtgctagtgaaatatttattatcaaacataaatatgcattgcaagcatgactagttctcctttattttggtactattgacaatcgaaactgatcgttaacgaccgtcaacaaaatcccccaagcttgaacctttgctcgtcccgagtaaaggacgaaaggaaacaaagtcctgattgttgatcaggagttgctactatgatgtatatctcaaatgtacaggtgcaacgtatgtgtactctttctcaaatcaaataatttttggcacggtgtcttacccttacccctgattctgtcacgaccggaaataacccaacgggcgttccttacgtgtgtgtattattccttgtcccaggaggcaaggtacaccaaaagttgatacaactcagagtttatcaagcggaagcgtaaatagttaattattacatgggcaacgaagg

SEQ ID NO: 33537 - DNA, 591 bp, Oryza sativa
atccaattcaaaggaaacaatatgggataggatacatgataagtccgtatcaggctccgaatttaaaggaaaatatggtttaggatatgggaatgtcatgattcaaccgtacccgtccgttttcacccctgcttatatctcttaaccgatgaccgaaattatcggccccacctactgggtgtcggttacctaaggggttcctaaccggtaccaatgagttttctgtagtagtaatatttggtaatttccaggagtatcgaagcagaaatcatacatagcaagcaaaagtcgttgagcaacatgacaccaattgttccacttgcaacaacacggtttcatcggttctattttctcctgcatgtacgaacactcttaataagtttaataagtgtccgtagtttctattaaagcaaaggctggattttaagtttgtatggaaatcgcgagacgaatattttgagcctaattagtccatgattagccataagtgctacagtaacccgcatgtgctaatgattgattaattaggcttgataatccgtctcatggtttccagacaagttattaaattagttttttcattcatataaa

SEQ ID NO: 33538 - DNA, 507 bp, Oryza sativa
actatagggcgaattcgagctcggtacccacgcggctaccgagcgggcacactaacacggtcaccacacgcacaagcgaacgactaccgacaccgatacacgggtaccggggccgacaaccgcacaacaggcacaggcgacaccgaaaggacgaggacggggcagcgagggagagggatccttaccaccacgcgacgaggcgtgggaacgacaacgacgaacgggcgcggcggaggcggtcgggaacgacggagacgaacggcgaggggacgacttcggcggcgatccttggacgaaggcgagacacggccggcgcagggcttgacgacgcggaggcgaggacgaagacgacgacggggctgcagcggcacacttgacagacgcggacgtattagattgtgtctaatccagtattaagttgctataatttacaagagggagtagtacgatgagtaaatgtaatggtttttctttgaccgaaatactatgggtattgttagaaaggat

SEQ ID NO: 33539 - DNA, 547 bp, Oryza sativa
gtgcgccggaagtattcaggaagattaattgaagaccgattattgcaaggcaagtcacacagatcctaaacacaatcctttgagcatgttgattctatatttaaattctctatttatttcaactgtgcatttattttcgaatgtcaccgggtggtgtgaaccttttcctttgttatggccaatttgcattgaatgccctattccttgataccttgggtaataaattgattagcttgaaccttatgtattggtttggttcagctaaatgttatatatataattgcttagcaatgcttagaaacattagctcactaatgtgatgaatcatatatactacattattatttatggttatatttaatggtagctcacgatggttaatcgggttatgataattaattgataattaaaacttgattaaaggtgggtggtaagcaaatggttttaaaagtcgtgctcatggcaattaaggaccggttcgcgagctactgttgtgagacatttaccgtaccaacaacaagccagcatgggcaacggttttaccttt

SEQ ID NO: 33540 - DNA, 739 bp, Oryza sativa
tggtaattggtttgtgagtttcagtgtcatgttgtaatatacactattaattgaataaaccgggtttatttagctattgaataaatttgaaagcacaagtactttcaagattgaaacattctgattctggtgtatgattttttttagtatatgcatataactctacagttgaaggatcccctgagccaatcctctgagccaatctgtttcttttattcagggctatgttgacaaatatgtgaagctatagttggatcagtaaatgggactatgaactggagcaatcaggacagtgtccttttcctgttgcagaaatcgtgatgggactatggactatgaacagctcacacgaatctgagctatgctatggtatttggatcatcaatttgcagtctttcagcagtaagggattccgggtaatagttctgcagaaatggatgtatttatcagaaaatcacgagtttacattggaacaattgctgcctagtcttcatagccttgtaagatgtatctttgctccactgtttctttttttcttttcttttgagtagtttgctctactatttcaccatcattaggcaagtgatagtagaacgttctttaatactgactgcatgaacgcattgctgaaaagaattatatttcttcaaggtaaatgtaaatgatttaatcttattgctacttcaatagttcaatgaacgtgttcatgtctgattaacccaaagatttccttaagacc

SEQ ID NO: 33541 - DNA, 738 bp, Oryza sativa
gtcaaacatgtggggccgggtcgcggcgggagctgattggtgtgcaggcacgcgatcgatgcgcattcaccggcctggacggcctgcagctagcagcacgcgagctaggggtacgtacacacgcaaacactggagctagcttgcaaattgccagcatatgcagcaagcgagagggggatcgatcagccggagcagcaggtcacggtggtggtggtgggcgtccgtccgtccgtcgcgctcccggtgtcgccatccgccttgatcaagcttttgccgcgcatgaatggcgccgctagctgatgcgcagcgcggcgttccgatcgatcagattcgtgtgtgctcccgtgtgcgttctgatctcagtggtgatgacagtcagtactcgtaatcaatcctctgtgatgtctgtgtgtgactgtctctctctcttgatttcgatcaaactgctggccaaagtgcacacatggctgatgagatattgagatctctctcaatcgatcgagctctcgctggtgagcctgagatagatctaggttggaaatgtcgctagctgcatgcatgcggctcgagcagcgagagagcctttgatgatgagggagagatcagctactacagagatctaattgtgatcaatatgctggcatgcatgcttgcatcagtggatggccccagctgcatgctatgctgcgtgtaacacaacccatcgctagcgagagccactagtgttgctctcatgca

SEQ ID NO: 33542 - DNA, 650 bp, Oryza sativa
tcaaatgataggaaaagaattaataattacttaaattttttgaataagacgaacggtcaaacatgtttaaaaaagtcaacggcgtcaaacattttaaaacgttaaaacggaggtagtaagtgataatggcttcatttctagttagcattgctgtaagcgcggtggcaatggatttggtcattaacgcaatactccgtctgtttaagaaactccaaatcttaaggatgaatctggacagttcattgctagatttttttttatttttaacagagggagtaggtcacaaacagtttttgccaaattggtccaattagggtcatgaacagtttccgctcgagataggttaatttagtttgtttcttgtgccatttatacttgtattttatagcaagccaaaagcaaaattacaaacttcaaatatttcaagttatagctaataaaaaattagttttttaaatggatcctggtatagatgaatagcatctgatgtcgtgggcaaatgtggtgcaaccacataaaacagatcgatttgttcatgtgcaaatatgtgtggtgcacctacaaattaaaacatatggatatttgatttatcacttcaatcagctctttacgatggcatttaacattatacctcccctagctactaactg

SEQ ID NO: 33543 - DNA, 689 bp, Oryza sativa
cccaacagcatagctccaaattttctagtcaaaaataatattttatcaaatatcagaggcttaggaaaaaacgatttacctctaataaaagagccaaaatttatggactaattaagttttctgacctaaacaaaaagtaaccatgccacaaaaaggaatccaagaataatcttacaacactgtcactcacaaatcggaagaaccttttactaagcctacttaccaatggttggatcatccttacagtcctactcctaatgctctactggttggtccattttgaaattgctagtaccatatttctcaactaagggtgaatgcaagcatttaagatgcttattgttattgcaatctctatttatataaccagtttttaactttgaagtagcttgaaattaacatagtagtataatgaatcctttagtgcagacatgaccaggaggtactgatatcactactctctgttatctccaagatccttcttttccaagtctaccatccaaattaactatgtgaaagcatatagagtcatatgaataaatcctgaatgctacagcatattcaatgaaccctacctggtttgcaacaaatgctctaatggagctgcctatgtatggaagatttcatcttatgaaacaaaacttatagtggaaaataacaccagaatcagaatgttttgtagctgacta

SEQ ID NO: 33544 - DNA, 1040 bp, Oryza sativa
tgcaccgcagatcgtacagcggtcagttagcctttattagcacctcctccatcagtccaaaaaagacaaatcataagtttccgtatctaacgtttgactgtccgtcttatatgaaattttttataattagtatttttattgttgttagatgataaaacattattaatattttatacgtgacttgtctttttatttttttttatattttttttaaataagatggacggtcaaacgttggatacagaaatccaaggcttgtcttttttttaacggagtgtgtagctattgatttcgtccaaaacaacatcattagctggtgctagtgtggagattatggcgagctgtcaccaccagaatgactctgtagcgaaacaggatgcatgccatgccagggcaagttctgcatggtgcacaactatgcatgtacgtgcacggcactatcagtggatcgactagtaaatgatagtactatgcccgtaatataagcaaagtttatatatacgcagaagaatgctattggaacaagacaacacagcacattcaacttgagaacaatataggtgatgtttgaaaagcagggactaaactcacaaaaacataaattcctatgagagggactaatccctccttcccaaacaccaccgtaacatcattatttgcttgtactatgctactgattagtttggctctgatttgaacctgatgtttgtcgatttaaatgtgtggacgtgtcaatctaaattttcgaactctcaatttatcttaggtgtcatgcagatccaaatagactccaatctactcgtgctaatattcatatcacgataacacctatgtatcaatgggactcatatgttagtcacatagaagaaaataaagatatctcatctctctatcgctaatctattgtaggcgtctctctagcgaaaatatgtttttaattttattttttatatgactaacatatgggtctcactgacacgtatacgtcaccatggcatgtcacgtcagcctacgaagcgggttggtgcctgtttagactt

SEQ ID NO: 33545 - DNA, 539 bp, Oryza sativa
atccatgattgaaggggctcgtatcatgaccattgttatcatatgtctatgttaatctagtcttagaatatcgatttagttctatcggctgcttctcgctttagattttctgctggtatcggctaaatcgacttgctagattagattaatttagacatctaccatcttgaaaatcagtcaacggcttgattgtctagatattgtgtttcttttcatacttagtgctgcatcaatgcattttcgacctagtaagtcgtgtttagaaccatgatccatagcaagcttcttgatcactaataggggtagtatcggggttttagccgatcttacctaatatacatgtttctttcaggtggcaagcaagccatccatattgtattgagcactttgtgcttgactgcttgaagaaagaactgcattacgcatctaccctatccatcctataaaataacatcctactactagatatatcacatcctagtacaatgaatctgaatatgtctttatccagattcgttctattaagatatgtcgcgtcc

SEQ ID NO: 33546 - DNA, 570 bp, Oryza sativa
cttagatataatctgtttttgtccagaacctgcggtttgtacagtctttggttatttaatggttcttatcgttgctatggatgcctcatgccagaaaggcataatcaagtcaacatgcctgtttcatgcagtctattgtgctggtgttgtttagatgtagtttctcatttacttatgcagtaatttcagcactctgcagcattctgttgccacctaattaggctaacatgtttcctctgtttaattatggtgaatattagaaggccccaagataacaggatgaatatgtctagttttacactattgagcttcgagcaatgaaacgaggctgttgacaagcttgaatcttgatgatgttataagtactagtagtttagtagtatgcaaagtaatttttaatagagcgctgtaatttttaatgacatttgtgcttaacaatgtctcttcctgtttccagagttctgcacttggatttttacttgcccaaaagcacttcacgaatccactcgtagctgttccatctgctgtcagtgttgtatgcatggcggtacgtttcattcctattttctc

SEQ ID NO: 33547 - DNA, 715 bp, Oryza sativa
ctctttcaacagagacatcttccttgccactctactgttctttgatacttctttcaccaaggaaatcactcccttcatttgctatcttttctatcattcttccagcggatccaaccgaggagtccattttttaactgaaactacaacagcatgaataattcacacattttttcagtcattttttggccccacacataacaagcagaacacaaaccattatagcttgaaaaaaatagacatgctgatacctacactagagacaagctgatacctaaactagagaaaaacactgatacccaaaactagagaagatgatacctgtctgggcagaagaaggagcactcctgctcggagtgaggcgtgccgggttctggctggggctgctcggagtagttgcggcgtcgcggagcgtcgccggcgaggtatcgcacgcctccgcgcgcgataccgagccaggttctggcttgggggagtccctacttggagtagttgcaggcggtgccggcgaggtatcgaggattcggggcgaaggaaggagcgctcttgctcagagtattgcggcgtcgcggagcgtcgccggcgaggtatcgagcgcgataccgagctgggttctggctggggtcgctcagagtagttgcggcggagctccgcgccgccggcgaggtatcgcacgcagctgggttctggttggggttgctatgagtagttgcatatc

SEQ ID NO: 33548 - DNA, 605 bp, Oryza sativa
ttcgatgtttaagggaaaattcatcattaccttctatattttgagtatcttctggactatatttgcatgcctcagaacaagatagaaagtgaattgattggaacttctcatagtattatgttctgtctctgtagtcagtcgaagtatttgctgttctgtttagtgcaatcatgacccattcttcaatcccctaatctgattgttttcaccatttttctgttgcaccttatgttttagtgttatggcatttctaatctgtagttcagtagtttatatttgagaaaaaaagcccagtaccttttgcaattaaattttctactaattagaccaaaaatttcaaggcgtgatagctagcatacttgctttccttacaggccacatagttatatttttaaatagtgcaatttcatccacatgattaatgatcctacagatcagcaaaactatattgctggcctttcttgaataatctcattattaaacacttgttgctctgattttaattacttatggtaatgatgaaatgatctgttgtttcctcagaagctgtcaactattgtgcaaggctgaagctaacatatccagtaatctgccagagagcattc

SEQ ID NO: 33549 - DNA, 1592 bp, Oryza sativa
attgatcccccaccaatctaagtacaccaataaactccatgtaactatcaatccatcaatccctccatggaccacccaagatcgcattccatgcctacctgcccctgcccagaaggagaaacggcaagcagatcgagtcctcacctttcaaacgaacaccggcgccgcaagaacagcggtggggggattctgcggccacggagcgaagaagaaacacgaggatagccgccgattttgttgcgaggttggggagaagaggggaaaaaaagaaaaagaagagaaaaacaagtcaatggaaaccacgaggtgaccgtagaccggccgacctcgtcgggagcgcaggcgcggatctagatgctggagagtcaacgcggggagagcccgcggcgcacgcgatctgggggattgaggaggagggagggaggggatcgcgcaccggcgcacgcgagagagattacgctgcggatcgaaatatttggaaatggcgccttgctatctcatcaaccctcgcgagcgggcgatcggccgccattcgggacgcgccgccgcgggtcgcgggtcgcgacgcgagatgccgagatgcggatgcgatgggaagaggagaggaaaacccgtggacccatatccacgggattatcacgcgggccgcacgttcccggggggctcgcagaagatgggccgcgggatgcccaaagccgaagcaggccgcagcgtcagcccatgtaggccgagtgaaaaacgcgggactcgatcggctcgtgtaacgctgtgggtggctcgtgggattgtgaccggagtgacaggcctgtgcgggtttcccagacccagcacgcgcggtcccaataatgcgggcggggatgcagagccagcacgcgcgggcggaagacgacgacgactgggctgagcagccgccgtgccgtcacggcagctcatatcgcaggcggcgatgcaaggtgtgatttgatgacgcgagaacgccggacttgttggtgcgagatgcgattcatcacccttggtggcagtagtttggtggggataaaactaattttcttgcggtgcttcgatctgcatctgaaaactctttgcttgcagacttgcacgcgcgcgctggccggcagccggcagcggactgtgggctagatagagtgtaggatgccaaccccctccaaagatgggccttcttaactctctctgggctagctagcactgctctccgtgctaactggcctcatcagggagtttaactaatagtagtatttaattagagcgtagtacttctgtactggagtacgtggtagtgtgtgctagtagcttgcatgtgctcaattagggctggggaagttgggagatgaggatatagacacacacaggtcaactgatggatcaaattagttttattcaccacgcaaaaaaaaagttttattcagctcagtttaagaatacttgcatgtatatatatcacaaacacatgcaatctcagggatacacatgaattttcttcttcttcttcttcttcttcttctttgtatgtggcaagggttaaggacaaatcactactggggtaaccgtttttactcccggttgggaactag

SEQ ID NO: 33550 - DNA, 549 bp, Oryza sativa
aagtatcagcgaaaaacaacttcaatttttataatagtagagttagagatgaataaattgatgacggaattaatttctttagtaaataataattatattgaaatttgtgaattgaagactaaaaatcaatctagctccgccacttactgcatgctactgtgttttatcacagtgttaatccatggtatactgttccaccactttaaaatttgataatggtacgaactggtttctaaatatgtaaagcactggccagctccaataacaacttgtcaaattaagaaacccacaaacgaaaggcaataatagccttcatcactgcaggagaacactactggtcctcctccctgaactggatagggcaaaattaaaccatggtgaggactgcggaccatatgccacacggccaggccactacttttagtgatgcgtactacgcatatatatatgcatcgatctgagatattctggatttctggctactggttagagtgtgaggaccatcttttgacccactttatagagtgatccgtattggacacagatata

SEQ ID NO: 33551 - DNA, 864 bp, Oryza sativa
caattgctaaatctggtatacatgtcttgctgactcacatattcgttcctcctaattaaagcactcatttatttattttacacggttttcaatgatatactttaaatattaatttgtttgatgttatatttctatgaatatgaaattagcatcatatgaaaatactttaaaacaaatatagtgatataacatgcataatacttagcatatacttgtatgattagcatggtcattaatcaaaagttgccgagcttgaattttctaaaggacagggtgccttgtaatttgggacaaagaaccattggaaaacgaacacaaagaaactttcattacattaattatctgaaaaagaaagaaactttcattaacctcgtacagtaaatagaaaagaggaactatgcatgtataacgaaatagctaggatcacagcaattaattagttgttctctggctttacttttcttttggagtaactttaatttttctttggaggatgaagtagttaattatacaggtttccaattcttgtttggtagatccttttttatgttcctggaagagctactatatttttgtacttgagatggagctgaggtaccgttatctagctatgtcgcatctcaaggagttacgaattaacatatatcaccaatatcacaaaaatgctccatacaaaaagatcataaaaattcttgaatttgcttgctgtgtttttttactatatatgcttggaattaaaaaaatgactgaattaatcgtttgcaatctttaacggtgcgtgcagtaccaaattggaaaggtatccacttgttcaaacttaaaaatattttttttactgatattactctctaaaaaggtgcatgg

SEQ ID NO: 33552 - DNA, 1375 bp, Oryza sativa
accaacgatccccatacaatccaaataccatagtcacgatctcaaacgtcgacaatattataattatatactatagttatatttaaaaagttgggggaataaccaaagtggtccttcaagtttcatgcaatgatcagtttagtccttaatgtttcaatctgtccatgttagtccttcaagtttttattttaattcaaacttatccctgaacccacataaccaacaactctcttgataaatgacacttataccccctcattcgcatatataagagaaaatttgcatgcaatgaattctttttatagataatgcataacagtttatgtaaaccaaaaataaatcatgtacttgcaagtatatacgatagccattaggctcaagtttcatgtgcacatgttgaaataataggaagtacatatgcaatgttgtttatttatttgggtttttcttttttctactatatagttgtatacaaattaagggcaaaggggactttttctaatagaattgttgactagaaatagccatatttcatattaagtgggcccaaggatgattttaggccaaaacaaatatttagaggatctatgtggacaaaatgaaatatgaaggactaaattagctattcacccttaaaagtttcattaaaaaaacttgtagcatttttttaagatagtccattgaattttacctatgtaagaatcacaccccgggccgctcaaagagaaagacattgtcgataaattcctgatcccttgctaaacccttattaaaagtgtagcaagatgtacgccatcgtgggcacacgaatttcaaacctggcgaatggaataaggcatcaacaactccatcacaacaaggacttcctgaggaacatatacacacaagacacaaccattgtgtgcacaccaactaataaatataaaaaaatcaagaaaaaattatgcatataagttacagctatatgtaaagttttaacctcaaattcattatatttagcgataacaaacaaacatttagactgttttaatttaagactataaatgaaaatctgtaagattttttttctccctatgtatgatgaatttgaagatgggattttacacgtaaatataatattattgacaatatatgtacatctttttttaaaaaaatatgacatttattagttggtgtaaacggtacgtgcacatgaagacttccgtgtataggatacgttctctccatagtcacctctacttcatattcattgaataggataactggatcattctattttttttatttatgtttctatacttccgtcatttgagtccttgactactttaaaatgtttacaattcaatgaaggcacattagatgacatgagacaaca

SEQ ID NO: 33553 - DNA, 601 bp, Oryza sativa
gctcggaagggctcggccgagaaaggaaaagagagaggaaggtgcgggcgtgcttaaataggaggggggcggcgagtcgtggccgggaacggcgcaattttgccggagtagtggaggaggtggaggaggagagagagagtggggaaaagagcaaatcccccgccgtttgcgggcgcgcgagctagcgggaggtgagcggcgacgtgggcgtgcggcacgggcggagtgggcgcgggagcagcgggatacgcggcggcgtgggcggtggtttcgacggcggttggcgcgggcgtgggcggccggaggttagggaaagggctgacaggtgggccccacctgtcagcgcccgagagggagagggaggccgggtgaacttcgggagtgggagggaggagcgggccggcgcgggaggaaatgggccggcggcccaagaaaaggaaaaaggagggaaaagaaaagataaaaggaaaaaggattttcccagggatttaatattgcactttgcttattttaattgattaaaattatttccaaggctctgaaaattccactaaaaatcctgttagcatattttgacatgtagaatccaagaaaaattcca

SEQ ID NO: 33554 - DNA, 1046 bp, Oryza sativa
acatattcttctcccacctctctctctctctctccccacattaccaacaacacgtacaccaaatcagtcggactatcatatcgggtttattccttttctcccatacgccttctacggcatcgcctctagcaccgaaaaggtcataccaataatgccttctttccctccttctcctctacactaagatgagcagcagtgacatgctcctttcccacagtattttcccatctccggccggatggcttgcgccatcggagatgccaccaatcaccccttctaactaattcagataacacccctgccactagccccacccagggtcctttggcattgccaacgccacctcactgccctctcatgttcatcacctatcatcgatctaccgtctctccatttggtcttctaagcttagagaaatcttctcttccctctttcatcgtccctaatccccacccctaccttgtaaccctaatcccagcatcaccgtcaacatcacataatcataggaaaagacaccatcgctgagaaatatgaatagagcacgaataaacttagtaacttataaaattggtaaaaatatttttaatagtttctttccaaaacttttatataaaaaatatttgtaaagaatcatattatttaacagtttagaaacatacccatggtatttagtggtggccacaatctaactttttatatatagttggtacacactaacaattagttgaaactaaaactcaacatggaatgatgcaacatcatcactcactagcagttaatattctagagcatcttaaatcttatacaaagatgacatatcagttaggctatgtccatttcctggagttggaaactaatccctctgacctgtacaacggaacgactcattagcacatgactaattaagtattaactatttttaaaaaaaagattaatatgattttcaaaagcaactttcgtatagctttttttggtgaaaaacgcacaaccttagaatataatgttgtaaaactcaacatacaaatatgtcaaatattttttcttac

SEQ ID NO: 33555 - DNA, 1062 bp, Oryza sativa
aaaagtgatgtaactaacatatggtgcccaccacatgtgtttgccacatttcactaacattagggggccacatgctgaatcggcaaaaaccacttcctaagccaccgaaggagtatatttgcaccgctttccgaagtgggggagggagggcgtcatacccgcttttgtggttgatagatgcaatttgactagagtaagaaacaagggaagcaaaatagacttatttcataacctttcaccgatgagttttgcggcttcgagccttgcctttgaacaaggccaataataagttgccttaaagtttcaatgttctgaaatgagccaatatgcaagggcaaaaggccacgctatataccttgtttagttagcccatgttttccggtccactccacgttagtgggccacaattttgaactagattttgggcccatcgacgggaacgggttgggatcatggactaccaaactaatgaagatgaggtcacagatggaatttgctaggaataagaacagactaccgactactagttgccaaaatcaaagaagcatcaagcatccatgctacggtagtaagggtttgtttggttcacggttaaggttggatgggatacagcggtacatttttttttcatatggcaatccagtttttttggtagaatgaatatggcgatccagttttttgtttgatgtagggatgaaggtggatttggtgatctaattttttgtttggttgaagggagtatgatggatttgtaggtgtggtcacctcttacttgagatggtgaatataccccccctaatcaaattaatgcataatgcattttataaattctgtagcaattttacaccactacccctccatattataaacacacatataaaaagaaaaaaagaaaaaagaaaaaagcaatagatctagggctcactgccaccgccgcctctttccgccggcggccggcttccgccggctataggcttcgctgccgcctcccgccgacgcggctatcgccacccgcaccgtcgtcgtcgtcatcgtcaggttcgcatcgtcgtcgtcgccatt

SEQ ID NO: 33556 - DNA, 1306 bp, Oryza sativa
atatatatatatatatatatatatatatatatatatatatatatatatatatatatatattatcctctagtcaagttatggatatgttcagacttcctcaatctactccaaaagacgatactagtagtatacaagagttgttcaaaaaaaaaaactctaaaaagaaagtactcactgttccaccataggtgcagttgtagtttttcgtattcaacgtttaaccgtccgttttttttaaaaaaagttatgtccgttttttttaaaaaaatatgattagtatttttgttgttattagataataaaacataaatagtcctttatgactaacttattttttaattttttttataaaatttttaataagacgaagggtcaaccacaatagcacttacgatgaaatagagggagtggtatacaagagtccaatatgtggggaaaatgctccatactagtcccatgtgtggcgcagcgcgttggctgatgcttggcgggtcgtactcttcacggattttctatcatcctatcatatatgagcttcatatatgagcttctaggtagtaagttaaaaacgttttcttgcttttctgttcttccacgacgtcatcttaattaggagttatacatctaaaagtagatattaggaagagatagcttcatccttcccatatcttttatttagaaagtctcttcgctcttaaaaaagttaaaatactacttgtgtcgtttggttcaactacaatttcattggacaaaaataagagccgaagcccttattatgatgcgtttgatctcagttatttgatcggattacaaacatgccaataacatctgaactcttttcctggtccaagtagcatctatctggcgaaaatgctctggttcggacacccaataggaaagagaatatcgggtgctcgcaccccagtcgtccatgtctcatcgtccttttctctccttctctctcgatcttatccatttcccttctctctctacaccgtttctcttcacgcgaggcgcttctcctccagctctctctccgtatggcaacacttctccttccgctcctccttcgcaacggcgacatcactgaatgccgccacctcattccccgcctagccgtagtctgccagtggttgcggcgacgatgacaacagccggatccctagccctgaccctgcagccactgcagcaaccgcggcctccgccgtcacaacatggctcgggcccctgccaccgacgttgtgttgtcgtcgatgatctagccaaccaccggagagaatgaagcggatctaagtagtatttaggg

SEQ ID NO: 33557 - DNA, 1215 bp, Oryza sativa
ctgccaaaaaaaaaagttccttttgtccatcagtaccaactaacgagaagcttgtagggcacgatgagcaaagtcatgttctaaaattactctagcaatattgaccgattgccatgcttctggaaccttaatcaagctgactagaacgcaaaaaccacattcaagaatacaaacaccagaaaataccgagataaagtacagctcatacgcgccacaaataaaatattggtgtaaaacctcaccagcacgacataccccgaaaaaagaaaaaaaaatctttacagggtcccgttcaagctatgatcatactaccgatatccgatcaaattgccgtggttcatgaacctgattttctggaggtataaacctccaatccacacagacagcatcagccaagaaacatgatgtaatcactaacactgcacaaaaaaaaagagaagatttccctttccccttctatgttgtaacatcccaaagcccccaaagccctgcgctcctctacatgcaaagcaacacaaacaccagagaagttgaccaggctcttcttgttccccagccaatttccgatcgcccaatctcaaagaacacataaacgacaccaccaacaccacccatcatgctatatactaacacaagaattaaagaaaaaaaaggcatccaaaatccaagaaaaacaagagcacgacgagcaagaaccaagaagacaaccagcaaaaaaggaacaaatctttgcagttgctgggagaaggaggccgaagaggaagcaaaatcacttacaggaggagggggtagcttgcttccggtagcacacacaggagagcggcaggagaggaggaggaggaggagcggagaaggcgaggtggggaagcggagaacggaaatgggaaggagagggagcaggagggaaggaaggaaaaggggaagaagagaagagaggagaagagatggttggttggtttggtttggttggttggggatagcgagtgggcagccaagtccgagatgtcatgcggtggagggacggacgcggtcagggcgaccggcggctggctgcggctgcctctgcctctgctcgcgtcgccactgccgccgggatcctctgcggctgcgccaccgcccacgggaaccaccaggccccgctcctccagttttgcttctctcctttgatgacttcttgttgccgactgctatacgtatacgtatggagtatcgaat

SEQ ID NO: 33558 - DNA, 661 bp, Oryza sativa
gcagtttttttcttgcaggcttccgatttttcggttttcttttcgtcactgttttttttcttcccaggctaatcctacctccgtcgccacgtcgatctgtctctccatgcatttccttctccaattgattgcaaaaaattgattccccactcatccatcatcatttttcttatgatttcccatcaattcggctttaaatggctggatttaatatccgtttaattgtgtgttttacttcctatgttcacaaatatataatatgagcacgtttataatagtgttaacaagtcaagcatttctcttttaactttgatcgtcaatagaaaaaaaacaattataaagattagtgacttaagaatgatatgttactaaatttgttgtgaaacaatccatcgttatatacaactcttttcatttaaagtattttatttcctcataggtattattattggtcaaagattgcattgatatcttaaaatgcttatctttgtggatggatagagagtaacgaactattaggaaaatgtgtcttcatatttttcttcctcttacattatgaacatagaattatgcatgcaatgttgaacagaaaacacgcatgtgaacgaccccgtattgatgcgtccatgcatgcactaccaccagtatttcgttaaaaagg

SEQ ID NO: 33559 - DNA, 588 bp, Oryza sativa
aatttgtgaaggtagaggataaatatattgggagtatataaagaaagaaataattgaactgttatttgataaaatatgtatattttagttttttgttttgtattggtatgcaaggaatgagtcaaaaaatgaatttattttgataggaggacatactaggcatgggatgtacatcttagaaatataaatgcccaatcgtgtggcttcaaggtggtacgattattaggtggccgttggggaatgggaatatatattttgcggtggtcatcctgtgtggtggcttcattcgagtattagttacctccgtcccagaatataagcatttctaactataaatatggataaatgtttatctagattcatagttataagttttgttatattttgggacggaagtaatattaatttttggttcttttcgtagtgtcttagcttgtgattcaatgacgatgccaatctaaacttccttcttgaatgcatctcggagaaatatgtgagatattggagcaaattaaaccattatagcttgatccgaccttaataggtgtggtatatcatcacaatggcgtctttgtatgagactgaata

SEQ ID NO: 33560 - DNA, 805 bp, Oryza sativa
ttataggccgaatagtttgttaagtctgtttttattgagtgatcttttttaagatcatgtttattaggttcgcaacttgtatttaaaggttgttttgggaatttctacttggtaatttcaacttatatttgaaaattttcaattcaaattttttaaaaaaaatcaaatccacccaaaatttgaaaacttcgtatattaccatcgtgacaaagtgaatctcaatgctccctgccatgttgtttgaagtgatcttacgctgaatttctttttcattttcccaacctatctcacttgtttttcacgccaagtttttcaaactactaaacaatatgtttttttaaaaaaaatctatacgaaagttactttaaaaatcatattaatttatttttcaagttttttagattaatacttaattaatcatgcactaatgtgtaatatcgtttttcatgtagagaggcaggggcggagctagaacgaaatggaggagggtcctcttgcttaatttactctaatttagatcaagttttaagctgatatgtgtatgcctaagtttgtattaaggagggtgcacacatggtgaaaatcggtgagttataactaaaaatttttttttgaccggattcttgggcaccccttccatactctacctccgccccatcagggaggtggagttaacacagtcttaaggtggagcccaagtggcgtgcagaagtttctctagatttgcaagtgtttgggaaatgcacatatgtgggctctacattttcctaaaagtaaagaaaaatagaattccaaaacaacctgt

SEQ ID NO: 33561 - DNA, 1104 bp, Oryza sativa
cttacattcaggaaaaaggaataaaatacgatggtggaacttacatgtcagacaaaaaaaaaactacccttctcttccccctctcccactaacacgtcctgacagtgtgctcctgtccctctatctccttccgctgccccaccacttagccacctgtggcgacaaacagagagagctcgcgcatgcaaggaagtatcatcgtcttcgcccatcatgttggtatccgcaacattcgttggagcaggggggaccagcctcgttccttgtcatgctcgctgtcgtgttggctgtagtgtgtgtgtgggcggcgtcggggataggcaggaggacgacaggcagtgcttcgtcacaatcaacacgctcaccatggccatcgtgttgtacctcctcgttggcgacctcatcggtgtcggcgttgtcaataatggcagggttgtctcgaacaccttcgtgggcatgctcctagtactagtgctctctctctctctctctctctctctctctctctctctctcttcgtcgatgttgtaggaggctcaccgaggggcaggacaagctgtcctccccggcgtccctccccctccctgcgctcaaagcctccgttgaaatccaccgccgccgcagaaccccttttaccccaaactggtcatgtggcggctgccgcgtgtttggacgaaggtgccatccacatcattgtggtggaaacaaaggaaaattcgatccaagaggttggggagtgggggggtggggagagagagagagagagcatgggtttggggatggaattttcgagcttagctctcctcccgtcaatcgctgtccttctccctgctagccaccatcctaccttggagtccatagaaatgggaatagaggggagaagtgagagataagggcccctaacatgtagggcccatgctgattcagcgttgttgatttcgatcaattagccacgtcggacaaaaccagccgctatattatcatgggacctcctttacattggttggttttgtaagttaaggaagatgttatatctggtattgcagtttaagaacaaaatttgaactaggtgtcaagataaggacctaaagtgaactaaggggg

SEQ ID NO: 33562 - DNA, 933 bp, Oryza sativa
ctttcggaggaggatgtaataggcctgcactgcgaatgacttgaccgtttactctgctggttttgtgttaagggaaccacttcgatgatgaaggcgcccataatgacagcagcgcatcacacaacggataaagctgtgcaagggcatctttttttccttcagagaggacatggaaataattgtgtgggtacgtgtttgttctccaaagtttatgcgagtagtgaccgtatgtctgtgtcaagtaaaaaggacactaaggttagcacgtccttaaagttaatcattagtactagtatgcttcaattctggcaaagaaagtagtacgtcgtatatactgcacgttttaaatacagaatatgcagatagcatttttagtcgtctacagtccacgaaaatgctactcgaaatttcatctgctcgagacatgctctccctgtgtagaaagcaacgatccaaaaggttgttcttcaattatgcagttccgactcttcgtcgatacgtaatgtcaccctccgtgtacgtacgtacgtgcgagctagcgcagcgcagatcaggaccacatacgtcgtacgacgaacagcattcttgctgtgcatcccaggagatgatgcaagaacgcagcgcacctgccgcgccaccgtaacagtgcatgtcgcgctgccagtacaggaccaacgtacacgtacagtacgccgctagcgctgaaacgatcgatacgatacggctgatctgaattcctgtagtgtagtacggatctttccagccggccggcgcccgtaagctagcggtactaggccagtaccgtcacatcgccatatatacggtggcacagccggaccggccttcgtctccgatcgcctcctcatcgcgcgcgcagctcgcgtcccacgccgaatcgacggatccgggggaaagcaacggtgggtaggcgca

SEQ ID NO: 33563 - DNA, 1169 bp, Oryza sativa
agctcctcgtcgtgatgttgcaggggatcggcgattgcttaaagtaggcgatcaatagagctaccagcctgatggcatgcctgatgccactagcacctctgcaacagcatgttaccaacgcccagatttggcctcctctacaaaatcgccactctacccgggcgcacgtcttcatcgtgttctgacacctagcctcgtagatctgggccctgccacccctccaatctctggtcaggggatgtttccaccacaccgcaaggccacgattgctgacaagactccaacgcaccatccaacacagccactgcctcacctccaccaccacaccgcctcaacttcatttgatgaccgtcgtcgatacctcctctccgccagtttccttgcttgtgcgtcagacctgtcgtccatgtcccatcctccacctttgtcgcaccctctagccgaagattgtggagacaagcacccatcgccagcatcctctccaacctttgctccttacgactagggcgttgccgacctctcgccatgctctacctgggagagaaaggagagagagagaagaggagtggaaagaaagaagggatgacacatgggtcccactacaaatttattagttttttctgctaagagactcgccgactaagcgaataaaccgtggtcaacctgtcatatcagcaaaaaaaaagcttctcaatccactgaatgagttaatttacatatttttgaaagatgggggaggtgttatacttatacctggtttggtgattgagggaggtgattcaatcatgagcaagagatgtaggaggcaaaatagacttaatacaatggttaatcccggtcctggtcgagcctatgaaaaacgattttacctttcattcatttctgtaatgaaaataaattagtttattattttaacgtcatgtatgaatataacatatttagtgataattacgcctttgagcttgtatttagctataggcctgaaacaaaggtgccgtacatgtaaaccacaatggagcgacttattagatatgagtagagaatgttgcaattacactggaggggaagcagcattggagaacagcaccagagcgtggacatggtgagtcgagctgatggggaagatgattaggcacttgagcaattgggctggtagaactgtagaagta

SEQ ID NO: 33564 - DNA, 541 bp, Oryza sativa
catggctacattgtgaatatgtgacaacctgacaacaggtggtttagttttccatgattaacgtatgctgatgtacaaaaactgtgcatgtttgcccggcatcgtgatggactgatggcttcgtgttcgctgggaccggcagatggcatggctaaacgaactctttagattcacccggacggggatgcaacccaagaggaaagtgtctgccgtgcacggttgggcaatttcaagtatccttagcgtagcttcaaaagatgtctatcatgtcggcttcacgaggcaaaccagggcagagcatgtagaggtgaggaatgctatcaaactccaaatcgtgcgatgatcatgacagtgtttcgtggggaagggaatgcagtggaatgaaattatctgcattatattactttctgccagtaaaaacgaagactgtggtttgcggagagacattgtatcaccggtcttgcactagcggaacttccgcaggtgagatctgattccgttccatcttgggggtgcaatgcttagaaatggaacacacaat

SEQ ID NO: 33565 - DNA, 587 bp, Oryza sativa
actatagggcgaattcgagctcggtacccccgagtgcggatgcagacaagcggataggttcggcgtgccgcgtgcgctatccgcaattagcatgactgaggcgtcgccagaacattatcatctcgcctcactcgtagtggtggtccatcaggccatcactcgcagcaaccttttttccgccgtagcgtccaccgaccaccgccctcttcaccgccccatatgcagatgtgcgcaaccggccctacgacccaacgagcagaagtactgaaccaagaccaaccaacttcggagttgtgctctgcgcctccgcctacccacttcggaagtgcactggacaacgaatgcgccgtgacgcaccagtcaatgtcaagtaaacagaagcgccaagatgtttgtggatcgtcgatgctaatccacttcgaacctggcaaacgaccatctattcgactgtaggattgtagtaaggaacatggacaaagggtgttgactgccttttgaatgagattatcaaatgcgacacagaatttacgggcccagcccaacttgttcagagaggccttctttggacccttgagttcgaccttcaa

SEQ ID NO: 33566 - DNA, 501 bp, Oryza sativa
ttagtttaggtactagtgacatctgagagacctaacggaatagaatacaatagccgtgaccgtttcaaacttcaaaccctcgtggattgggttctggagtcgggacgcatgcagattcgtataggtcaaaagtttgtcatcgtacagtagtataactcaactaggaacatgaagacatgagcttaatactaattaagtacgagtagctataaccctccatctggtcttcaactaaaagttctgggcaacttgaaggccttggagtatgagacttggcgagtttatcctatccgctactaggggctactagtactctgtctgactcggcttacgtagtaatttcgatcatcaccatgctaggtgcactttattctagctgaacatgcgtgtatacggcatagtactgtggtaggtttctatcggtgatcagccaatctgctgttgacctagcaaaggtcaagttaatatactccgtacagaagattagtacattgtgcaatg

SEQ ID NO: 33567 - DNA, 606 bp, Oryza sativa
gggctcatattattaatttgctaatgatatgaacaacgattactcaggtacgagattatgtgcaactagtatatccaagaaaaaatttagcaacattgacgaacacaaaaaaaattataaaagataaatacatgtaacaagaaaataacacaagaaactttacactggaggcggtagacagaaaaacatgaaactgagaagatttaccagttcttgtttagatagctctgtactcgtaaaggatcagatacatgaagccattcaagcggaacctacagagagtagataattaagtgtctagggaacaatatttgcatggtccacatcaagtatagcaattacataataaatattaggcaaagtgtggcaggatacaattctaacatcataaacaaacattaggaagatgccgtttttttttttgtgaatacgccaaatatgtgtatgtttgcattaaaatagaaatcaaagtgtagcagctgcagcatgacatttttttagttgtagcagcaagggctaatacaaagtttcatgacttgaaagaaatgaaatatacaatgcaaggtaccagttcaaagaaactcaatataatgtactgctacaaac

SEQ ID NO: 33568 - DNA, 573 bp, Oryza sativa
tcaatcacttttgaggatcacaaggggaacttattcctaaaagttactactagtttgagggacaaatgatgaactttttcccgtttggctcaagcccacgcgaccatccaaatccagttggaacgttatcgcgagtaacgtgcggtgcggcccatctgtgtgggccgtggagcgagtagattgggcgcggattacgtgcaggccgtgcggcctgctaatgcgtgggctatcgccaatccggagagcttcgtgccatcgtaggatggccccggagtgattacctgcgctggcccgcgcggtgcggagaggatcggagtaggatatggcgtcaaacgccgtcgtgcgtcgcggactcgcggtcggcaggcggctggcgcgtgttccgtgtgggaggcctgcctgcgtgccaaccagcgcaacgtgtcagcacagcccctaactttaaatgagctccaccgacgacgaccaccagtgtgttgcacctgtgcgtcacctcctgttgatgtcagtaacagtctcttgcgtggtaggcccccgagaagtacttgccttcagagcattgcatcatcagtt

SEQ ID NO: 33569 - DNA, 599 bp, Oryza sativa
cgtggctccgtgtctcccggagagggcgcgacggtttttttcgtggagtttggcgcgatgcggctttggcgcggcgtgcggggcggcgctacgtggccctggcacgttgcggggcgcacgggagggtggtatggtgcaacgcggcacgggaacgagggcggaacggtgcggcacttggcccagacattttgtcgaacacctggcgtgcatgcttgtggctggtctggggaagaagacgatgagcagtcaggggctgggatgggctggcgcagaaataagactgtgggccggcctgcttagggggagctaaagagaggaggtatgcagggtagttgggcctgggatagaaaatagagaaggaggcccaattcgaacagtgagctttcacaattttcaagagatttgtagagtttgaattttgagaagatttcaatggatttgaatttgaatttgacttagggtatcacaggtatttgaaggaaatttctagtagagtatttgagatccatttggcacaaaatcaactaagaaccaaattaactcctatttttaaatgacaaactttttaaataaaagcacataaaatacggatgctacag

SEQ ID NO: 33570 - DNA, 569 bp, Oryza sativa
ctcgtctatgaaatatgaattaaatgcttagcaaagctacatttctgatttgctttgcaacgttaccacgcctttttttttttttgtaagaatctaatccctggcaaagatgtggaaattatggagtagaatcaagttcgagatgacttctctatgaagtttgggttaaacaacccaattttttttggcgcgaaaatacacatatccacagaatttaaattctctaaacagaaaaaaagaacccgagaaaattcattgcatgccctgaattctacctcaatcctttccaggccctgaattataccgcaagcctacatgccctggggttttgtttaggtcttatctatatgcttatatccatcttgtatacatatttcgacagttaactggcaatatttattctaaaatgaccgtattatctatttctcatactaatgatccaacgtaaatcttaatgtgagaaaaatataataaaatcaaatgtgattgaattatttaataccaaatttcttgcgaataaacacaagacaaaaattggcttggaaactcatcttcccgcgcaagtaaaa

SEQ ID NO: 33571 - DNA, 591 bp, Oryza sativa
cattctatataatctctacaaaggagtggctaaggataactggtgatgacacgctaaaatacgtccactatgctctcagctacgctccacaaataattggagtagaaatctttctccaaacagaagcgcacgacacggcgaattttatccccttttattttttttaaataatttattttaaaaataaacaccagtaaaacttattttcacaattcaaagttccaaaatttctggtcacacgagccccacctaatatggtaaaataacattgttaccccacccacagcggacgtgataattttgttatgctacagtggcatgacagtactacgctgttacaacgttgttacagtcagatcgatgtgatcaaataatgttatcacgttatttagacgggcgtgaccttgttattttactacgacggtctatttagactagccaaaagtttcatatcttaaaaattaaatagtcgaaatgtttatttttaaaattaaaaaggttaaaagagaaagagaaacgtctctatcttgcattgcatgcccctagtggccttcgctccaaccattcggcgtgagccgagccacaaagccg

SEQ ID NO: 33572 - DNA, 508 bp, Oryza sativa
ttgtacaaactccacatgtcagttatccctatacaagtgcagtaactcacgttttgcacaatgttgtagttggtaattccttcctacagatataattcaattgagatttatacagaatcaaatgactgcaacggttttgtgtttccctttccaattgtcatatacctttatgtagattattaagaactatgatctgaaagagtcttgctagacaagcaaaacaatataggagcatatatcaatggaagcatcgaaagtaatgggaaccaaatgttcaaggggtaatactaatagagtaatattaactctgtcagcacaacatcaacaacattactatgcacgtttttaaggccctgtttgattcagcttaggattattataatctagcttattaagagtaagctgaaacaaacaagtagattattatagcagattattataatctataagccagattattataatctaataagttgctctagaggagctttttttcagattattgagt

SEQ ID NO: 33573 - DNA, 654 bp, Oryza sativa
ttttgacttacattgaccaaaggatgtaggaatcgataccgttaacttttgacatacattaaccattcgtcttcttaaaatatagaaaacaatataaaccatgctcaaagtatctttaataataaaataaatcatacaaaaataaattataattacataaatctattatatactaaaagtcatttaagcttcctacaaatactcttaggatgcgctctaaaaaattagagaaaatccaagcaattctgagaaaaaaaaagcaaaacatcttgcctttaattttaatttaatacagtggacccattttttaaaccattggattacatctattaaaaataaaccacctaatctctcgtctgtacatacaacagaaaaaatatgtaattattcaacagagagaaaaatctcttgtgttatgtacatacgaaaaaagaatcaccgaagaaaaactacgtacgtatgattgggaaaaaaaacacgattaatccttcacccctaatcctcacattaaatatattttgattaaaaacatgtcacatagaactaaaggctatccttttttcatttcattctcatcctaatagtgttacaatattagtggccaaatgaattaaaaaataatagattattccataatatattaacccatgcatg

SEQ ID NO: 33574 - DNA, 852 bp, Oryza sativa
tagcatgtgtatctcatcttctaaattctcatgtgaattgggtagcaaaaatgtcgaaacaagatttcggcaatacgaaaagagggtggctatcaagctggaaaagtgaatgggttaagaaacaaggaattttatacaagttcaggccctctctatgagaagtaataccatacttctgtccggggattgatccgccgagtatgttattgatcgtatgatctgggagaaaagttatatcctaagaggcacccagacccctccttatatagagggaggagtccgtattatattcttaacggaataggcaagtaaattttaaatacaatcgtaaacgactaggatcccgggtatttccttgatacacaagttaggaatttaacccgaatcccttaaagatattctatctacatatagtacccatatacccagtcggatatacatgccatgcgggtatggggtatccataatctccaaaaaaacaactagatgattagagaaaaaaaagtggctaatttgtttgtgtatttaaaatgtgtataataagtttttttttctaaaattcagttgtaacataccgacattcagctagtaattccttaaaaaaaattccaaccagcggtggatcccgctgttaggcgcctgcttcaggatccgccacaatgttgccactgtcaatcgctgaaattcctatgaacagttacggtaggaggttaggcagtagagtgatcttatcgttgggcttgttttttgggacaagttaaaggctgtatgatcccctgttattcttcaattcctaaaattatttccttctttcctacttggtgtggaatcttggatttaaggggtggacat

SEQ ID NO: 33575 - DNA, 1241 bp, Oryza sativa
accatgcgcgccaggtgcatgatggtagcgtcatcctccgagctagcatcccggaaggtggcgtagtcgcgggctcctcccgggcaagggtggtaacgtagggcgagtgctgcaactcgtccgggtagcgctggtgaagagtgccgatggcgaggagagcggtgttctggcaagtggcggagaaagaatctccacccgcggtgactgccaacgaagtcctctcgggtgagccagtgaggatcactgcggtaacctcccaagcagcgtggggctctgcatcgtcaccctcctgctccgggagctgcttgccctggtagtccactccatgcggataccccaggacaacgcacatgccccgcagctccaaaacgaatccagtcaggtccagaccacaacggttgatgctgccggccatctacaaacaaaaacaaaagagaaaagcaacattttaaaggtcagattttgacgataaatgaagcagcaggacagagagagactaaaggattttcacaaataagaaaggatttttattttgaaaatattgctaaggcttgggatctacggctcgtcctagggtcaaggggggctctgataccaacttgtcacgaccggaattaacccaacgggcgttccttacgtgcgtgtattaatccttgtcccaggaggcaaggtacaccaaaagttgatacaattcagagtttaacaagcggaagcgtaaatagttaattattacatgggcggcgaaggcccagcacacacaaaaacaaactggaaagagtggaagactagggcgacgaccacaggcgcttgacggcaggcacgagctagacaccaaagccttcatcttccaggggctcctcttctaggtttgggaaaaaattgagcaagactgagtacaaccaccgtactcaacaagacacacccacaagtgcaggataaatgcaagggagtacaaggggattataacataaagggttagggtttgcagtaaacagcattaaaagacacttagttgctcaaagctattttgtaaacacgattccagagctatacaatattattaatcaaggccgtgaacccacacgaacctgccttaacccaaggcctacgatgattcagaccgaactggcaacccgaccctgggtcctagctcgtcccaagccaacctaggccaaccattccacattttagttgttaagcaggttttaagaattaaaacactaacttgggtacattgctcg

SEQ ID NO: 33576 - DNA, 867 bp, Oryza sativa
caggtgggccccacccgtcagcgagggtggcgggcgggcctgcccgtcagcggcgcgcgcgcggggaggggccgatgggccgcgggggagaggagagagagggagggagttgggccgagccggcccaagagggaaaaaggggggggaaagaagacttttagggattttctttttataaaatcattttaactttgtttatttcttctcaattattatttgtgctctgaaaattgcactaaaatttgagggctctttttagaccaaggagaatttaacaaaaattctccgggccacatttgaatttttcttgtacgtattttagtgtttgccaatttctttccgaattttaattaattctattattccttttagaaaatgatttttatttcgggatgaatttatcaggacgtgacaaatccaccccccttacaagaatctcgtccccgagattcgaggatgctagcaagaagataggttgggcggtcttctcttcttgtctgacttcttgcgtcgcgtcttctaatacaaacttgcctagcaaaacttctccactctggactgcttggctcgatctcctgttatagatggaatcttctcttcacctgacttttccctggttgtacctctagctgacttcgattgggctgcggcattggaagatgaggcttcagttccagaacttcttataactcatatccttggagtcaacctcatacaagttaccacttcatgtcatgcgtcaacaccagcttgtcattactaggataccatgtttgtcatcataagaatatcatgcttgtcatttacttctaacttgccaccaactgcctcatattatctttcctggtctccgggtgccagctattt

SEQ ID NO: 33577 - DNA, 691 bp, Oryza sativa
ggtcaaactatgctatgattggcccatatgacgcagatggtaaccgtattacgtacccttttcttgggggactaaactacaactctactacccctgttaaatttacaaaactagcaaaaccacttaaagtcggggatacacaggtttttggagaagaagttagtctatggaacggacaggtaccgaaagactaccaacgtagtattatcatgcggggttataaaaactcgttcggctatacttatccccatggaacctataatcagcttatgcagatgaggacatatgatattggtgcaaatgacaccacaacttacaagattacgttaaacaagccatgggcagttgccaacccaaataattcaaatgggaatttcccactagggcatacacttaacccaacttatgacgggtccacatatttgtatttgaatggtcacgtaaatataccagtacctactacgtacaccaagaacagccatttggattagtggctcttttgagtttgctaatacaacgattatcccagtagaaacaaggttttattcaacttggattcttggtgaaacgggagacaacaaggtggaaaaatctcggctactggtttacgtctacggaactatacagatacggtttaaaactaaacgaaggacctttgagaaaacacaagaaaactgttgacaaagctcaa

SEQ ID NO: 33578 - DNA, 1284 bp, Oryza sativa
agtcctgtcaaacgcttcaattatactcctctatgaccatccactgcatcttctctttattgtcattactccctccgtcccattttaattgcaaccataagttttcgcgcccaactttgatcgtccgtcttatttgaattttttataattagtatttttgttgttatgtgatgataaaatatgaatagtactttactcgtgactaatgtttttaattgttttttaaaaaattgtcaaataagatagacggtcaaaattaggtgcgaaaaactatggctgcatttaaaatgggatggaggaagtattattttaaaaatcgaacataattatcctttaggtttatttttttacattctagaattccgccaaaacgtcagcaactttgtcactatactcctccgcagctcgcccgctgccgcccttctttattgtcattgagattataaaatcaaacatgattatcattggggttttttttttaactttttagaagccctaacctttaaaaattgaacttatactttttagagtttattgtctcgttgggtttcattttttcttataattaggtgaaaccccgcgcattgttgtgggaatttagtatgataacaataaaaaaaaataatgtgtaagatagctagataacatcagattaagtaaattaatgtggtttatgataatttaaatttaaatagcatgtagaatggtgattcaaatgtaaaaagtaaggtggtatgactttatggaagaagaaaagtagggagatagtttggaccgtagattattcatctcaaggctaaaaacaattgatgtgatatgacttaattagagaaaaaaaaggagaaagataatttggaccatagattaatcatttaagcactaactaagtatataggatgaactatataagtatataggatatcaaaaaacataataaagatattcattgaaacattatgtgaattatgttggatgataatttaacatatttgtatttgaaaagctcttaaattataaagactataaagatataacatatttgcatgatatttaaatatggtcattgttagtggatgatgatgtggcatcttgttaattagtggatgatgatgtggcatcttgttagtgaatgatgatgtagcatctttgcatgttaagcttaaagagttagtgggggataactttataataagataggatttatagaaatcccgtcaaacggtgtcactatattcctctatgacccgtccgccgcatactctttgttctcattgggattgtaaa

SEQ ID NO: 33579 - DNA, 2006 bp, Oryza sativa
ctgctagttagtaattcctaaaatttttagcgcttgtttttttccgtacagaaatctttttttccctttttttacaaaaatctttttttaacgttgcttcacccgctgctgcagctttcgtccctctaatatttgttgatctgtttccgtccatatcaaagcctgaatattgttgtgatacatgattgatttatagaagtatatatgtataatctaattcatacggaacttcttttggctaacagaaatcagacaataatttatattgagtccgtacatccgtatagatcctatatcatgtttgatttcaattccgcaaggctgcgtgcctctgaaaaattttattttgagtgaattatgctttgggccacattttattacctaagtttcactttagaccagataaatttgtcattgttgcgatttgaaccactacaaatgatttttttttctagtgcaatcaacgaccttaaacacatcagctctaagtatacggccgaactcttctatgtatggttcatatatttgccgaaaggaaagttagacatgacgagaaaagttgttcatggtagtccaaaccgcaatgacggtaaatttacccggtccaaattgaaaagataggtttaagggtggtccaaattgaaacttgggtaataaaaggtggaccaaagtgcaatttactcttttatttttataggaatcttatacgtagaagtgtattttgattttatacaacttttagtttagtttaatagacatacagctcttaacttctatttatgtagatataattgtatcttggatacaactatatcaattaatctataccattataattcggacccactataatctaacgggtaagattttaattccgaaatttaactggctttagattgtatttctacttggactcttcttttctttttttttctttttctccgattaatgtgggaatttctagtccccatggcgaacgtggtgcctcctttcaaagctgttttaataatataatagatagatagatttcccacattcatattgaggaagtagtaatattttcaatctaacacaaatttattatgaaaatatattcaattatttatttgatgaaactaatgtagtattataaatattactccctccatccacaaaagtgacacctatttcacatttgagtttttccaaataagttgttcctatttgtaatctttacgcattcaagacttaaattaagagataaattaaatattttattagaatccaaggagtcatctaaatagttattggttacatgtttgcattcactctttgattttataacattcaagatgatttaattcttccttagtcttgatgtcaaaagtaatatgtgtaacttttgtggatggagggagtactatatttatctataaacttagttaaacctaaaataatttaacttagttaaacctaaaataagttaaaacgtcttattacgtaaaacgaacggagtagtagttttttctttttcaacgatgattatatcatttttgcattcgtggtcacatttcactcgtccaagttctcacttctcaggctctccgctgtcgttcggctgtctcgtggaattgggcttttggcaccgaagcaggttcctcgccggcagctacccgctggccgctgttcgcctgtgccgctccggtcgtattcgtgcacacacgtcaaacagccaaactcttggagaggctggaactgggtcagaacttccagaaacggcccatcacattaggccctgaattgggctggaagcctggtacggccacaacagaggccctttgaatgatagggtcgctacgggttatcagcctaatatgacccgcaaggactcggcttccaacttccaagtagacaagtagtgaagcttccattgcaccttcgggatgaacaggtgagcagcgccctaaatagcagcagccagcaagatttgccataactaaagtggtctaaattgggggggggggggg

SEQ ID NO: 33580 - DNA, 577 bp, Oryza sativa
tctgtccattttaactcgattttttttaatatttctagttgacagacagtgaacccatttttggtaccagtcgagaaattgtggtggtgacaacattgccatatgaattatccagctcaaaaggaatttgaagtgtatacaataataacctgacaaaattattttgaggggatcaattccattgcctccttgagcaatctatgaccatgaattttcagttgcaaagttggtttatcagccacatgggatgggactgaaccctaaccataaactaggtggcaaacgcactgatgcagctgtctcctcctcctccactgtgtgaaccattttttatagtgcagcttttgagcctgaagagagagggcatcagcaagcaatcaagcactgaatcatcactgcacaacacaacaactctggcttacaaactctggactttttaggttggataacgctgttgggtttaagcgtttcagatgacaagaattacaaagaaatattttcttcaatttgcagtgaaaacgaaaggggaagttgacagccacattaaagcattgacactgcacatacatggaccact

SEQ ID NO: 33581 - DNA, 609 bp, Oryza sativa
ttaagttgacaatcaactacttctgaattaacaaagagagaaattggacctttttttttcattaattaacgagctttctgaactttgcatctacatggcgttttagttcttttcttttcgaagtttttgacattgtcaattaagttgacaatcaactacttctgaattaactaagagagaaattggacgtttttttttcattaattaacgagcagtcagttatatgaggtaccatcaacaaatgcaagttaattttatgaaatgcgatgtgagccgagtccgataggggtgattgccggcatgaagctggacaatggacctcaatttgcaggaatggtgggagtcgatttttttttctttgagaattacacagtacaacacagacactcactcaaatcctacccctatgaggatcttcgaatacggccagcaaatcatctttgagattgacgaagtcaccacaggcgcctcgctatcgacgggcacgtcgtctaccactgaaagcacaatgcgttatcgacgggcacatcgtctaccactaaaagcataatgccgttaaatcctggaaaattcactcccgtagggagtcgaacccaggaccaaaggtgc

SEQ ID NO: 33582 - DNA, 800 bp, Oryza sativa
acttctttcaatattgcttatttttaatttcgaatttcaggtatttttaaattgtatttccacttggactcttttttttttaattttggattttattttatttttatttcgaattttaattaatcttgtattggtttcttatatggaaacttctttcaatattgcatatatttaattacgaatttcagctatttttatattgtatttttgcttggactctccttttcttttttttctttttctccgattaatctgggaatttctagcccccacaacgaacgtggtgtttcatttcaaagctgttttaataatataatagaaagatagatagatagattatgactttacgtagagggtcaaagaatcgggtgtgcagccgtcttggaatgacgtgctcggtgacatccgccgatctggtgttctggtgacatgcgactcgcaaggaggtggcgaagatcggccgcaaaaacgttcagtgcgggtgtcatccttgtggcatggtcggtttagaaggatagggtattcgaagacaaagcaaccttggtgactcagctatgcgcgaccatgacggatgagtggggaactaattagacagcggtcggtctcttggcgctcataagcgaaacctgaacgttgcgaggtggacccaggcatcgggccaactgagccacggcccaaggcactgaaaagcctattatgcagtacaaaacttcgccatgtaaattcaagtttagcccaaaataaatcctacatggcgttgatatgacatgccacatagatatgatgtggcataatcttga

SEQ ID NO: 33583 - DNA, 591 bp, Oryza sativa
ttaccaattatcattggtagtgattttaatattttatgtagtcctatgaaaaagaataatgacaattttgataatagatagccctttccatttaatgctattatagatgatcttaatcttagagaacttttaatatctggaagaaattttacttgagccaataatctagcactgacaacttatgagaagttagatagaatgttaatgtcgatggagtgggaaaaaattcttcagagaagttagatagagcgttaatgtcgacagagtgggaacaaattcttcatctacttccaatcggcatcaaaaattttaagtttgagttgggctgtctataaagagatgtttttgtggatatggataacggaaatttggttaagtgttgttgatggtaatactcttctagagagttggcaggctaagattcgtagattaagacaatatttaagaggttgggccaaacatactaaattttattataaaaaggcataatcaactttgttaactcaagaagagcttgattctagactttatttgaggaatagattatcttgtcttctaagggaagagaaaattaaatggtatcagcgagct

SEQ ID NO: 33584 - DNA, 580 bp, Oryza sativa
cccctccacaccgacgaacgaacgaagcatggggacacctcgttcgaacgaacgagcgaacaactcaacaacggctgcgactaaaccgatgggctagacacgattcacggtaaagccccggtacggcaacgataggccggtaggaatttagggatgcacctacggccagacaacttgactaccgagcaacggctaaagcggcggctagattaaagcggcacacagctgcgacacggcagcactagggcgacttggctcggctaggcggcagcgactcggcagaggcacgcggctagggttagggtgacggcatagcgatgacgacacacagctacggcagatggtggctacggtagtgggacagcagcgacttggcacgcacgagcagcagcagcacggctgtagcagggagtggcacagcgacggctaggcggctagtgcagcggcgacgctagggcagcagctaagcgtggcacggcgacggctactcgacgacaaaaacaagagattaaaaactaatccgagggaacacggatagaagtttctccgaaccaaagcgatcggagaggaagggtcgacg

SEQ ID NO: 33585 - DNA, 518 bp, Oryza sativa
acctttgagcatgttgatcctatatttaaattctctatttatttcaactatgaatttattttcgaatgtcaccgggtgagtgtgaacctgttcctttgttatggccaatttgcattgattatcctatttcttgattacctcgggttataatttgactagttggatttatatattggttcaactagatatattagataaattgcttagccatgcttagaaacattagtacacgattgggataactaatgtttcactactacttaatgatggacatgataatggtagctcacgatgtctaatcatgattggttaattaattaatgtgccaactaaaacttgataatggtgggttgtgagcacatggttttgatggtcgtgctcatgacaattaaggaccggttcacgagtttcggttgtgaaacattaaccgtgctaaccacaaaccagaatgggcaacagctggacactttgtatagcaaggctcattgtggtgtgccagactgagatgtggcggagac

SEQ ID NO: 33586 - DNA, 564 bp, Oryza sativa
agattatttcatggactaattcttgcctaacctagtcaataacttgacccttgtacacacgcacagtactaaggtactactagtacaaagtacttcgtgcgatttagatcgtatctaagaaagagaaaaatattactactcccattgatctggcattcaatttttttaatgaaaatagtgctccattcatttcatattataaatcgttttgaatttttctctagtgaaatttctttaagtttaatcaaatattaaaaaattagtaatatctgcaacataaaattagttttatcgaatgtaacattaaatatatttttataaaatatttattttgtgtttgaaatattgctatattttctttataaatttggtcaacagggaaaaagtcaaaacgacttataataaaaaaatgagggagtacttattagtctcatattctaaaacaattttaaagatgacattccctttctatcgttcattaatacacatttacaactcttatgggctcatctcaacaaatcacagttaatacggctgctttggaaaaacaataggatgtattta

SEQ ID NO: 33587 - DNA, 718 bp, Oryza sativa
tccagtggtcggctcctcagtcgaagagacgtagattggcgcactcgaagagaccagcggaacctatcgagggccggccccagcacgggcagctggcggaggggagctaggtagtgaaagtggaacacacttgagaggaagccatcgaacatgcgtctccgtgctattgcgtgatagaagtcgtgaggcacactggcagaggatggaaagacacacttggtgtgtcgtgttaacacacctgaaaatttgaccaataaaaacaaaactctaaaaatgcggaccttccaaaactttttaaataaattgcatcatgccgactttatttgcctattccattgaattttgatttcgaagtttgttgatcgcgaataaagaataactaattaggaataaaccctaaaaattaattgggctaaataaataatcggaatacaatttaaaataaaggttgaggtgaggatagaaatgaataaaatattatcgcgatcatatttggttcaattaaatctaaatagacggaatgagaattaactctaattaaaatcaagtgaattatataaaaataaaatatgggtacaattaatctttaatctggagtggatccattggtttggataatacacatattgagtaaacttcatttatgcaagatttagaaattatagaatcaaatttatatgggaaataaactaaaatcgggataaataggaaaatatac

SEQ ID NO: 33588 - DNA, 549 bp, Oryza sativa
taagtatttctaatagcaaatgtaatgatattttttttaatctccattctatatattcataacatatggaggatcaattttagaaagtttagtttcatggatttagattttaggatgcaagtaaaaataaatgaagggaatatattgcaagtaaagaggaaagtgcacaactgtttagtccttctgaattctgtattgagcgatgcgaaaacatttatgttttctcgcctatgtgtttgatatgcactgaacatttatgttctgtatagtctagatgttaattattaaacatggttttctggcatggcagccacaagatttcatttgttctttttcttatattctgataaatgtaaatttacaggaatcagaaatcctggaacagatagatcgagatgtgaaaagaacacatcctgaaatgccgtttttctctgccaaggctaaccaggtttcacttcagtgccttggaattccttatttccatttaaactacaagtaattgtcatttggactaaatttttcaaacacatttcaggaatctctaaggcg

SEQ ID NO: 33589 - DNA, 509 bp, Oryza sativa
aaggatattttggtcttggtttttagatcatgtaccaacccctgctctcactataagggaacaaagcttggtaggtacattttaccctagtgccaagtatgcatgctgtaagatctgcacaggcctatggatggtcaagattgctggtgcatatgcacctaggttcataaaatctgtaactacacttttctgaaaaatcatccgcaaagaatggtagcactgttgattcttcatagcgtcagatgaaggcattttgtggtgtaaactatggaacacacatgggatgatatagtttgcattgcaagtagcaacgtgcagaataatgtcttcaagatggactccaacacaaacgaaagtcttcatgaccccgtagtttttgttcaccctaaaaaggtgctcttaaaattatgggctacaatagtgtgtgtgtgtgtgtgtgtgaattccagatctgcctatcatcattcttattttaaccaacagagctttcataaattgcatatttttcc

SEQ ID NO: 33590 - DNA, 579 bp, Oryza sativa
gagtggttttgataatcgtaatcaaccaagtgacttgatatcaatatatagcatatgcggtgtgaatcctccaaataacatgatccgagtgatataccaaccgctttgtaaaatatgatgagtgatatagcaaaatagctataaagaagcttgtatattgtgaataaagaaatttccaaagtattgggcatacgccatgcgcacactgctttaacagatgtacttaagtccctagaagacacatggtttcaccacacctggaaatatatggcatatgtggtgtaaaatccgagtaaataaactcataaaggatttaccaaccgcctagaaaatgaccgcaatatataatcagcttaagccataatattggtcaataaaaatgcacacttacgtggcaaaaagcaatgatattgtatccaatcaattgcttaaaaacccaaacagcaccatgactatataaaaagtcagcgggccagctatataaagctttactgtttgacaccttttaagatgcattgtaccagactcctaaaaaggttaataactaacggtatgaaaggattttaaggtattgggcac

SEQ ID NO: 33591 - DNA, 618 bp, Oryza sativa
caatatttgcggtgtagcgtaaccttaaggtgggccctatgaatagtgagccattgttaaagccataccctcattgctatggttagaatttagccacaagataggcccacatagaatagaaaaataattgtttcatctcttgttcatgaagtgaatgagagagaaaaaatattttctttttcttgtggtagaccttaagcataaggtgcacccctaaactaatgctactttccacaatgtatatagctcactttacaagtgcaatcattaccttaaggtcacctttttcatacattgtggttgccctaaggtagtaactcaggatttgattttgagtttagggcatgtttgaggaagcttctgacagatgcagtttttcgtccaaaacagtcagtttttttttccagattttaagaagatgtagttgtagaatccaaaaaaatgaattaaaaaccccaatcagacccttagacatgccacaaatcaacataacagaaaacgccatggaatacaaccgacttcacagcttctaaccaaaggctccaaagctctttccatacaccctgcattttcaggctaacaaaattcctgaacaaatgaaaccgaaaacttctccca

SEQ ID NO: 33592 - DNA, 648 bp, Oryza sativa
gcccttacgttgtgcacatgtaccaacgacaagtaatactgctattgtgtcagtttcagacaatcacgatattattgctaatttgccgaatcaaacgtatgccaaattatctaattatgatgaagtaagggaaatgaatcgccaaaatgtcgatgttgaatctgtagaaattaattttcaatcagctaaatttgaaaatgggtttacgttgcaagatacaccaggtgttgattcaaatgttgcatcacatcagtcaataacagaacaatatatgtatacaagtaatatgatattttatacggttgactataaccacgttcaatctgaacttaactttaagtttatgaagcatataaatgatgttggaatacctgttgtgtttatcattaatcaaattgacaagcatcaagacgatgaattgtcattctctacgtttaaatcacgagttgaaaaatcaattgcagattggggcattaaattagaacgcaccttttatgtatctaaatttgatcaccctgaaaatgaacttgaagtattatcaagttatctaatttcattagatcaacatagagagacaatagaggattatacatcaagaacggttgaatatattaccgaagctcagctagattacattcagtctgaaat

SEQ ID NO: 33593 - DNA, 691 bp, Oryza sativa
tcctgcaccccgtgatttcactacaattcaaatgttctggaaatacgagtactcggtagtaaaattgtgctacgacggcttgctacaattcaaagttctggattctctctctaaaaaaaaaatcaaatgttctggaatattacgtagcggtgcttctttatatcttggccgtgagcccgtgactcatcagcatgcgttatgtactcattttgggtgtactgtatcatatacttattttggatgtgttcttttctctatgttctcgacttctcctcactcgttttttacgtgcatgtttcttaaatcactaaaaaaatatgtattttgtaaaattttctagaagaaagttgttttaaataatcatactaatatattttttaaagttttttcagttgattcataattaattaggcaccactacattccatcattttacatgcctatctccgaccatagccggaaggctgatcaaacagcttactatagaaggccatgcatcctggtgaagcaacccaataactgggctggagcagggttagcctctggaggtaaaggtccactttacttttttttttaaccgtaaaaccagatattgttcgcgcaccagccatcgaccatgcatctgcgacattggcaacacagttcatggtgttgtcggtgggtaggcatggttctggtaggagtgggggtg

SEQ ID NO: 33594 - DNA, 531 bp, Oryza sativa
attcctgcagccctgcaaatgtacatatgtgttactgttaacgttattgacgtgtggtgttgccatgttggcaatggtactttgggtttgggagtctcatggttttgtatttgcttttgcgttatcattttttgatgtggtacgagtggcacatctttggctgtgtgatattttcaatttgttactgtaatggaatttatcaggagctgtacatcagtgtgtgcaacatgattactttttccgaaacagaccgtaagttcaatatgatggtattaatattagcaagagactaactagcattttccccatggaagtccagaaaaatggctaggtcgactgcttgattgataggcacatggatattgactggtgtactataacaatttaatgtagaattaatcatttgaaataattttttatttcatgataggaaatcactaattcttaattccctcaatctccagtaaaattaagcatttcaactgtaacggatgcagacagtagcttaagaaaaagaaaagcaagggctgg

SEQ ID NO: 33595 - DNA, 583 bp, Oryza sativa
atatgtatatgtgtgtgtgtgtgtgtgtgtgtatatatatatatatatatatagtaaaactcactggggcaccatggagcccgtctccaagattgaaattgtatatatacctaatataaatgagtatgaattttttataaatgagcatgaatgaacattaacttgttcactaacacgcacccaatcacaattagccatcataccaccgcagggtacttcaacaccaacaaaatacactgctcctgctgcaacaaatgacacaccaactagcaaatcaagctccttagtatttaccaaaaaaaaaagcgttattgactctagctctctctatgctgtctgacactgtacagacctctaccgatagtaaggtatccttatcaatgcctactcttgcacttcctctgctataacctaattttcctaaatatatggagatacactctgacctattgactaactgggcaaggcacacattgtcacacatcatgaagagaagatctctctgagtgcatctttgattgcaatggtaccccatgatacttcggataacgcattcctgctctttcttttcataacctaatcc

SEQ ID NO: 33596 - DNA, 3637 bp, Oryza sativa
aactgatatggggaaggagctatttgtgagggattcggacgcgaaaattggtcgctagatttgggagggagcgatctgagtggggatcggatagaaaatttggagcgttctggggatggagtcggacaaaaaaaaatcgctacggatgtgatctgaaagaaaaaaaaggcgtgcgctattacggatgcgatatgagaaaggaaaaaaccatgtgctaggtagaactaattaattatgaacgattacttagtccaactaattaaaaaaaaggcgatgggaaaaaactggacccacaaaaaaatccacaaaataaaacctcgtgcacgaaccggtgacggaaagaaactcggacccaaaaaaatgcgaagaaaacactggacaaaaaaaccgcatgcgtgaaccggtgatggaaaaaaccggacctactcgaaaatagccgcgtcaagaaaacgcgctattggccagtcggacaaaaaaaaccaagcgctattccaattgtgggcgatatccaaaatttgtggggagtaaaaaaaaccagtcgctaaaaaaacccggcgttaggtgacgtacgaaattttttaggcaaaaacatcttcaacttttataataggtaaagataaagattatgtatagtgattccaatgtttcactttatcgcttggactctaatagctattatatcactgaaaaaacatctttatctgttgcaacgtacatgcatctatatatctatctatcttctattatatactaaaagtccattaaactttttacaaatgctcctaagctgccatgtggcatcctataaacactctcgagtcgccacatatcactctaataaaatagaaaaatctgaccatcgattttcatttaaattggtggacccattaattttgattgttagatttatctttccaataaaataaaatcttcctccatccacgtaacgtacgactatccatctgtagagcaacgtgcgtacatccatccgtttcctttttttccttttttatctcgataataataataataattagaattaaaaaatatgggcctgaaaagcccatcaacctactagctagcatctcctaataagtttattaaacatcatataaatatttctaaacatctatatcgcattcctaaattagagaaaatctagaaatactaaaacatttgaccatcgatttacattattttagattattagatatatctttttcttatggaaaaacatctcaaacttccttgcgctcccatgcggcgttaaaacccattcaccacccttataaatatttctaaaccactatataacacttctaaattagataaaatcataaaccattagtttcaacttaaattgatagacataccatttaggttgttattagatttttgcttaaaaaaaactagcaaacctcctttcctccctcccgcccctataatgttaaagacttaaattacattaaacattctataaatatttctaagccactatggatctctttaagtttaaagaatcatacagaattatgaaaaaaaaacatctgaccgtcgatttcgacttgaacatctaatacattattttaggtcattatatcaatcatttttttaagaaaaaacatcctgcctctctgtcctcatgtggtgtgtgtcgttcatccttttctcttatttttatccttatgataattgaaattaaaattatttttatgaggagaaaaccacaaatggacctccacatatcaggtctagccagctcttctacagttccttttcttctctttctcttcttactagcacttatagaaacaatataaataaaataattataatattttaaatcatatattcagcttatgatctgtttgagctatttttttagtgaaaacaatactttaatatccatattgactatatttaaatgctaacataaaatttacattccggacccacatcaatcttgaggcctccactaaataaaaaaacctaaattcgtcattataaatcaaaatatcccatttttatatacaacattttaaaaattaaaacgtgctcggttgaacatcaaactgatcgtaccaaacatgtaagattgcaccgagaaatcttagcagtgaaacaaccatgaggtctctttttggtaaaacttgctatgctacattgtaaattcctaaaatttagcatataataatctagaaatgtatatttattatataacctctatttttcatatttcttactcacaattgagagataatttagaatagatgactttaccccatgttaggttataggttcaacccgcatatatttttagcccaaattgtagagatcaaatcatttcaaagatgcttgatagagtggatttctccaaaaaaaaatttaaaaaaatggatgtgaaaagagttcaaaatttttgtaaatgtttttaaaaaattgttgggattaaaacccattctatatagaaatattcaaatattttagcacgataaacagaatgaaaatatctaaaattttgaatagaatcttaaaaaaatggactttttatcaaatgtttgggggtgagaaatccccgtggggattcaaaatacccaaaattttctcatagaaactacatctattgttttgacataatattatttcataaattgaaaactgtacggtttcgagtagttttagtttagaatttatgtgctacatgggtaattagaagaaaattataaccaacattcaaagcgcaataaataagttaaattataatttagatatagtaaaataatattttaatacaaaatcacctatatatggacattcgtaataaaatttgacacatattaaattaggtgcacgcgcatgtgcgcgggctacatttctagtttttttatagtacaaacttacaacgaccacggaccatcgagatatctttagaaaaatccatagtatccggtctctctgattaagttgaattagaaatttctgaactttgcatccacatggtgttgtagttcttttcttttcgaagtttttgacattgtcaattaatttgacaatcaactacttctgaattaactaagagagaaaatggacgtatttttcatttactaaggaaggaggacgatcgcatttaaggtggtagagatattttcctcttcgtgagctgtgagcaccaacttacaaggctatgttgtttcttctattttgatacaaacttgcaacgaccacggaccatcgagaaaaagcacaagctttagtcgaataattcagtggagccatcgttgtgtccatagcatatatatccggccactctgattatgttgaactagatatttctgaacttcgcatctacatggtgttttagttcttttcttttcgccactctgattatgttgaactagatatttctgaactttgcatgtacatggcgttttagttcttttcttttcgaagtttttgacattgtcaattaagttgacaatcaactacttctgaattaacaaagagagaaattggacctttttttttcattaattaacgagctttctgaactttgcatctacatggcgttttagttcttttcttttcgaagtttttgacattgtcaattaagttgacaatcaactacttctgaattaac

SEQ ID NO: 33597 - DNA, 562 bp, Oryza sativa
catacatacatatatatatatatatatatatatatatatatatatatatatatatgtacacatatatgtatgtatacatatatatgtatacatatatatatagtaaatttgtttggtgctccatggtgcccgggcaccatgattgaaatttactatatacccaattcaaatgagtatgaaactttttcaaatatttaggtattaacgttaactactttactaactagttcaaagcaagtttgaactgaattcaaacttgcttttgttagattttgattctaggtatatagcatccaaacatataattagttaggtacgtaataatggattgtgaaataaagttaaatttgagttgttttgttgctaggtataggtatgaatcgaatacttataactaggtatatactcacaatttgaaaattttgaaaaatttaggcgaatttgtgtatttcataccatggtgcccgggcaccatggtgccccatatgagtgtcctatatatatatatatgtatacatatatatatatgtatacatatctatatatgtgtatatatgtgtat

SEQ ID NO: 33598 - DNA, 665 bp, Oryza sativa
aggatatacaaatcaaaatggtgggctaattattcctctcatttgcttcaatatatatttgttattttctgaaatgcatgcatggatgcatgttttaattgcattgttaagatttgcctctggacgtgtacactattttatataggatttttaattaatttttatctgtcattatcattgatgtgttcatttgcagagcacacaacttgttaagatcgggacatggggtggaaatggaggaggtcgtgtagacctatctgtactcccaaggagcttgaaaagtgtgacaatccgtagtggtgcagccattgatactaggggcaggagcgcgcaaagcgcgctgcacttgtggagttggaagttttttcatcgtttatatgtataggaatatagatagtgtagtgtatttcaaaaatctttccatcccataggattgaggcaatggagtttacttgtttcaataatttgtgctatttatcatgtaatccctccgtttcacaatgtaaatcattctagtattttccatattcatgttgatgttaatgaatctagatagatatatatgtctagattcattaacatcaatatgaatgtgggaaaaaaaaaaatttgctagaatgacttacattgtgaaacgaaggaagtagtatattgtatggttcgat

SEQ ID NO: 33599 - DNA, 507 bp, Oryza sativa
ccggccagatcgatcaaattccaagatatcgtcgccgcggagtcaacccaatattaagttgctgatcaagccctccgcctgcgacatcagctagtacggctggtgtacaagcgtcagggattcatctgtacctgtgccccttgtgttgccgtgttctgctcggagttggtcaactggagtgtgcttgcttaatcatgtctcgtgcacaattatgggcacacacggccatactactacaggtcagcacgctcccagtcatatgtggactcacgtcctaatccactaaatgcatgggacttctaccagagatgttcggcataaaaaacaaagtaattagtagattaatttaaaaaattgatctactaattttgtagatatatacagcatatatctacacaggtacgcaataatctatatacaatttaccgtacctattttttctaatctatacaatattggcagatcattaatttattatgtttagctagagcgtgtttttatacaata

SEQ ID NO: 33600 - DNA, 620 bp, Oryza sativa
atatcccccaacgagatcggaatcatcgccatcaactagtcgatccggccagatcgatcaaattccaagatatcgtcgccgcggagtcaacccaatattaagttgctgatcaagccctccgcctgcgacatcagctagtacggctggtgtacaagcgtcagggattcatctgtacctgtgccccttgtgttgccgtgttctgctcggagttggtcaactggagtgtgcttgcttaatcatgtctcgtgcacaattatgggcacacacggccatactactacaggtcagcacgctcccagtcatatgtggactcacgtcctaatccactaaatgcatgggacttctaccagagatgttcggcataaaaaacaaagtaattagtagattaatttaaaaaattgatctactaattttgtagatatatacagcatatacttacacaggtacgcaataatctatatacaatttcccgtccctattttttctaatctatacaatattggcagatcattgttttattatgtttagctagagcgtgtttttatacaatatctattgtgcgagtgcttctgatgttaggccaactacggtctaacgctgggggctcgctctgttctctt

SEQ ID NO: 33601 - DNA, 709 bp, Oryza sativa
cttacaactacaagtaaagaatgacagtcccagtcttgctaatcctgtatatacaaaccattgtttctcaaaataaacagaaaaaaaaatgcatacaagaaaggaaggcaacctacggtaaacactgcagtatatgagtataaaattgaggcctctgtgacagccaactcaacggcagtgccccttatttctgaaaaagcatattatgccagaaaatggttgctgaattgaaatacagtttgatttccgttcttcgcaacaacgaattatccaccctccaacaaggagtggggatggtggttccatctgccttgaccacccttcaacaatcatccctccatgatcatggaatctgcaagagaggggcagcttttgacatgctttccatcagatgtaaatgttgttgatgtcactaagttgtcctagccatgctattgaatgaacaagctagaggcatcagaaattcgcatcctattgacagaaagcacccatataaaagacaaaggcttattggaggtgacctacaagctctattaattttttcgtacaaccgcgtacaaccatctttgttgctggtaggatgctttctaacatatcttgcccaattcgtgattaacaataatcaatttaacattggagctatctaacgaatcatgaaagataaatggcaaggtatgtatctctctcttttttagtcatttaccaaaga

SEQ ID NO: 33602 - DNA, 698 bp, Oryza sativa
taataacacatattggtaaagccaacccttagagttgggaataaccacacacatattataagtttatggggcatttttagtgggcttaactctaacatatttttatcaagtttcacgctaaaagtggtgcctaaacatgatagctcgatagaaaaaaaatataataattttgttggaacattggcccgttttagtcacccactctatttgtggttaagtgacatgattaaaatgttacacaaatttatataagtaggtataattcaactagttaggttcctgtggtagaacccgatccacttaggttcaagttctagatagacttgacacgagtgtttatattttgggctaattattctttcattaagtggtagacgacttactatgtgaggctgtattcgggagcgccacagaaaactatatatatgcattaacacatgattaattaaatattagctaattccttttttaaaaaatagattaatatgattttttgaaacaactttcgtatagaaaattaataaaaatgtatcgtttagttgtttgaaaaacgtgcacacggataacgagtgtaagcgcgcggtgaatccatacgcttgcgctgtgtttcttacaaagaaaaataactagaaaaaatgcccgtgcgttgtaacaggtgaagtctattttaatcttattattgttatatggtttagtta

SEQ ID NO: 33603 - DNA, 569 bp, Oryza sativa
tacatcgttagctcaatcgaccccgtgtctgtgttttattatactattgtcaaaaacatatgaacattgttagctcactattcgcagcgaaaatgcggatcaaacataaagtagcggtttctagtatgttttaataaatagttatgcacacttgaacaggttggcacatgttaccaatgaaaaacacaaaacgttgctgtagatgctgaaattctaagcaacagtcgctgttggctgtttgccatcgaagttcagagtctttagatagacgtcgacacaaactgctctctatttagtcaaagcatcaacagcacagaatacacaattggccaaaatataggggcacaagttgctgtagtacatcaatagactcctaacacaaaccaaaccaatgtaatcttagtgttgtatcaacaaaaaagaaaaaaggacaagaaaataagcactgcccaagcacccaaaatctcaactttcatcatcattcttgcaactatacccatgcaagatcacaaaagcacaccagaaaggactttacaagacgccatccttcgacagatttttccttatat

SEQ ID NO: 33604 - DNA, 625 bp, Oryza sativa
tttgggaagagggaaaaaaaaaaaaaaggggggggccccattttatttttaacataaaagccaaattttgttgtacaatcaatcttcatcatgtatggcctttccaccaactgaatcatgcattcttcacttcgtggattactgcattggtatcctacatcatttgtgtcattgatctgagcaatggtcaatgaaatcaccatggaaagttgtttccatttcatttctttataatgagtttcctatgaaaacatggtcacagacttattgtgctgaaaacaacttttctcccttcctcacgttattgccttttgctcttgcaatctgtatttcttttagtctcaaacaatggaactcacaaatggatcatcttttatttcaaaaaattcatagaactatagcttgttatgacaggccgtcctagtaaactaatagtagttcaacttgtaactgcgcatatatctcacactgaagttaggatccaaattatagctagcagagcagaagaatgttgggctagctgtttatgggcaatcagctagcagagcagaagaatgttgggctagctgtttatgggcaatcaacacaatatgccgtatacatgttaactctcatatgttccctt

SEQ ID NO: 33605 - DNA, 716 bp, Oryza sativa
  unsure (1)..(716): unsure at all n locations
ttttacagctctcgagacgctggtgcaacacaagatctctggtttccctgttgttgatgacaccggaaagttggttagtgcccatcaaaacttcactctattcaatctttttctacttactctctgcaatttttattctcaaaacagttatgcttacaagtcaacaacgttgggcttttctcaaggggaaatgatttattgctaaatagttatctcagtaacatgattctaggatattttctttctcaaacacggtttcaaactttatacctttttacatgctaaattcgaactagtatggtgattctacctaaaggatttagagatcttggaatgctcacatctagaatgtagtgctgattcataaaacggtgtccttgtccccatgacatgcgggccttttgatctcctctattatgttgtgtcttaagaaacattacattgacattatggttgaattgatctgattttcattctgcactaatctacttccactggnnggggggtnttgnnnnnnnnnncggttaggccacacttcgaccttccaattattccagggtatttttcctttctctgggaacccttcaaaatcacctttgcttacaacccaaattcatanttacttagtaccaatattgcattcctcttaaactgcataaagcctagtatttgtcattaacacaccattgcactaccatctaaccatctgcttgcag

SEQ ID NO: 33606 - DNA, 1107 bp, Oryza sativa
  unsure (1)..(1107): unsure at all n locations
aatttgatttgtagctctaaactgaaaagtgtgtgtttggtgttttctgttccctatctatccagtcaactaagaacgtgcanntatttntgtaatgcagcaattntggaatggagccaatggaaaggacacacnccaatcaaaaanntagcatgcnnccaatcgtaaagagaaatgcaatgaagggtacccttgcttgagggctttaacccacaacagatttaaggtcattatgcaggaagttcgctcttccagaagcagaagaaagaacagctccagctgcagctgtttcaacaggaagaggaactggaagaccaacagcctcaggtggttcgctctctttcatttaatttgatgcattcatttcttgatgatcatccaattctcatgcttcatcttaccatcaactggttgctgggggtctaatcgtgttatctctttttttagtaaaagctctctatatgttgaaatgatcacaactatcataataaacattttggttttttagttctaatatattgtgcatatttgtagttctagtaactatttttggtatcagagagtttcttttataatacattgtgatgtgtagttagtaaatacatatgtaatattgcataatcatcaaaattttatatttccattgcaccaaaattgacccctcttaaggtctgaaagttttcaaaacgaaaatcaaatgatccgaatcgaattgcctcaacttgataatctgcttccacccacccaactctgtgtgtgtcacacacacacacacaaaaacaaacaaacaaatgtgcccacacaacaccgaacggcaacacgtgtcaacaacatacaaacaatcaaacgcaaacttatatctccactgtaccaaaattgacccctcttaaggtctaaaagttttcaaaacgaaaatcaaatgatccgaatcgaattgcctcaacttgataatctgcttccacccacccaactgtgtgtgtgtgtgtcacacacacaaacaaacaaacaaatgtgaccacaaaacaccgaacggcaacacatgtcactaacaagcaaacacaaactaaatgccgggggtaagcaacctacagagaagctcatagctcc

SEQ ID NO: 33607 - DNA, 621 bp, Oryza sativa
agggtttttaacaacccccaaaaaagtttttttttttaatataatccacaaattaaaattgtagttaaccgggttattttttttacgtgaaaccaactcaccagggtttaagttttaaattttaactcacaaactaattttatatttgtggtagagtgagtattggaacccatggtgattttgttaaaaattaattcgtggacagtaaagacttttccccttctctatctaatagagcagaaaacccagcgaggccataatccgttgtagtctagctggttagatactcggctctcacccgagagacccgggtttgagtcccggcaacggaaattccttttttttttttgaaattttcattagctttgacgttatatctttacttttgaagcatacaaacgaaagacatggaaaagggtcctaattcaaaccgaatgtacgttttcaggttctatctatgcaaagcacagatcaactaaatcccacatttgacatttcctgttgcatagagcttatgtactctaatactacctccctttttcccttttttaatagataacgccgttaactttttatcacacgttggaccattcgtcttattcgaaacatttacgtaactat

SEQ ID NO: 33608 - DNA, 734 bp, Oryza sativa
  unsure (1)..(734): unsure at all n locations
gtgactagcttacatgacacacttcatgaaaaactatatcgataactgaggtatataatgacctgtagggactatcagcataggatcaaggcgactcatagaatattagacatcaacatctaccatacccaagcaggtgttgcataggaagaccgcttaaactccgagggctcccaaaaagctgaacgagggactagaggatgggaaataaccatgacaccaccacacatgtgtctctctacgcattgcgaccactttcatcattaacataatactctaaagatgacagatcgccctgagctcacagaaaccatactggagatgtattgccaacacacaactgcctgaatgtgtctgcttaatgccgctcatgcgaagtccttttacatacttaaagaagaagaacgatggccacaagcaaagaatcttgagaatactttcctttgtcatgcatatgactgacaatacatggcataagaggcttgaacaagaaagggtagtcacataccatggtcctgaagatcgttacgactgagaatagcaaagacggctgtgcgtggttcatcncattaccattgccgaagtgcattcaagaagaacattccgcaggccatggcaggacaaaatgactaattgaaatggctataaacgcagcgctgccatcagtgaggtactcgccattgtgacacaagaataggacaagtacggttgcagatagtccaccatatggaaaa

SEQ ID NO: 33609 - DNA, 1502 bp, Oryza sativa
tcacttccaaacttgtgacatgccacagttttttaattcaaaggcccacatgtcatacaaccattttttagccaaaccatgtctaagttgtggccatcaatttataagccacatatttggctaggtttggcaagaaagtttggcaatgtttgggagggaaccaaacaacccctagtcttgcatggtaggcataatacgcatggaagtctatatacagttaggcaccagcaatagaacttttttttttcatctaatcagtgcatatattatattaaacaaaagaaaagatgattataacccgactattacaagaaagaggcatataagagataccgaaacaaaacaaataaatgaactctaaatcttaaaacgtttgtaagagacgtgagcagacaggcaaaaccacataatgtacatgcatgcaaaaagtatatgaatgagcatgaacaaataaattaagccactcggttgtctgcccgttctcaagaatccgaacatatacaaaatacatataagtgtaatatgattggatctccaaatgtgtctactccaagatgccggatttcatttataggcacatttgaaaagaaattatgggaaaatgtgtacaagctagtatagtgagagaagaatcgatgcaacaaagaaaaattaccccacctctagaatatgagtcctttctcaaatcaatcttttattaaactaaatcattcctcttaacatagacatgtctataggatactttatattcgttcactgccttacctaagctacctcaatatatttaaatggagtggacatcagttaagcagatcagattaatccataccatgtttaaattgaaatcctaatttatgaatcctctatctaacactccaccctgtaaaataggttagaccaatattttaacattgttacgtatatcacctcaccattgcttatctcgaattgtttataattaattatactcgcttcatctcgatttgttcctaattcattcctccttgttataaggaataaatgacatcatgataatatcttcaaactaagcatatagtaagtactatttatcatatgcaacatttatatgaggcaagattctatgtgaggtagagctcatattgcttcacgcgttctcatgcgaaactataacaaataataataataaaaatggtggcttttatgaacttatgatatcctaccattgcacgtatggtacgcatgaggtccatctatccatgccggtgttctggcgccccggtcaggatgaaactactggcgataggtagttataacatggaccgtagattaatccattggggtttgcagaacaatgagaatcagttaaccagttctcaacaatcgcttacgattcagcaaagatatatatacaaaaaaaaaaagcaaatgcttatcaattgtatcatcatgtatatatgttgctgggagttcttggtagcatcgcaatcacgctaagcagaccatgtgttgatgaaaacagt

SEQ ID NO: 33610 - DNA, 731 bp, Oryza sativa
tatactctgatcagaggtgtacatctttacccacaagacacatctttctcacgtgtaaccacgtgccacataccaccacggtatacggacggaagacgtgacatagtttccaacccatcatagccatagacaagagtaccgacctaaccccgcctacggccggaacccccgggacaggtaggcaggattgatgtcacgaccggaaatcacccaacaggcgttcctgacgtgcgtgtattattccttgtcccaggaggcaaggtacaccaaaagttgatacaattcagagtttaacaagcggaagcgtaaatataatcattacacgggcagcgaaggcccagcacacaaagacaacgaaaaacagcggaagactagggcgacgaccacaggcgcttgacggcaggcacgagctagacaccaaagccttcatcttcaaggagctcctcttctgtgcttgggaaaaattgagcaagactgagtacaaccaccgtactcaacaagacacacccacaaatgcagaataaatgcaagggagtacaaagggaattataatataaggggttagggttgcagtaaacagcatttaaagacatttagttgctcaaagctatttggtaaacacgaatctagaactatacaacgttattaatcaaggccgtgaacccacacgaacctgcttaacccaaggcctacgatgatccggaccgaactggcaacccgaccctgggtcc

SEQ ID NO: 33611 - DNA, 622 bp, Oryza sativa
tgcataaaatttcctccatgttgccacacctgactatccttcctagcaatcgcattattaggcatatataaaatgtagagtcaggtatagtcttagttaatacatatcacttagaaactatactcctataataattgagataacaaaaactcttaaccattaatgcaccaaaatattttttctacacttctttctttttctccacgcccatacaacaaaattttctttaacaaatgttaggagtcaacttcgaaccattgtcatgtgtagcaaccacccccctatctctcttccatgtcatatattttacttacgtggcaacgaatagagaccgttattacacaccgttatacgtgcccttagttagccaattttaattctgaaatcccatgagatccaacaccctaaatacttgggacgttcaactttcacatgagacgaagttttcaaaattttgaactatcgaatcaatactgaaaagaaccaacagatcgataatccgttggagcatggtgacaaacacccttgatcacggacacgttgcttttgttgtgaaaaaaatgcgccgccccacatggagagggattatattccaggagtcatggaaagaaggttgtgactt

SEQ ID NO: 33612 - DNA, 703 bp, Oryza sativa
ttcaggatttgggagcatacacaactacacaaacacaactacacaagtactcactctggattcagtgtaattggtggttactactactccgtagttggttagtttggttttcacggccagcatatatccacatcgatcccatccctcttccgttgaacacgtacgtcatacttatgatgtttcattaacctaaaccttagtgcatttgctagggtttaaatcttactgcttaacggatcagtgaccggtctatgtgtaaatataagcatgtcttaggctacgttcggttcggctcaacggctgagatgctttcccctttttttatgagaatgtttcctaaaatgttaaatggtgttttttttaaaaaaaaagatctagataaaagttactaaaaagatgaaataaataaaattttcaattaattatatgtttatggcttgttttatttcacgtgttgctgaatctcatattatcctctcattgtcttgtatatgctctaagcggttgcgagggagagggacggtaaaggacggacggtatcttggtgtggttaattggtgagtcgatgatggtaccactaaaacaacattaagggagatggtttgcggcgtggttaatcagtaggatgggtaggttgaaatattacaaagggaaccttgttgagaatatagacatataatgatttaatatgggctgcaggaat

SEQ ID NO: 33613 - DNA, 509 bp, Oryza sativa
ccgccatcgtccaaaggatttggcccatgcgtaggggccgggccgagtagtagcaccactagtctagcgcaagctctctggtggacaagcgacctctccaacatcaacattaagcgcaaggtgatcgcacatcagtggccccactaatttgaggacgaagctgctaactctagtgattgttcagaatagaaggataagcaaggtagaaaagacaagagagatgtccctatcaaccatgagtcgacgaggagccggtattgatggtgccatagaggtcaagtgcacgaggagcacgatgtttcagggcataaacacgaacagaaggccatgaaggactaaggtaggaggagatagagataatatgtagttctaagacaagtgaaaaaccggaagagattaaagcaagaagaagaaatcaaaatcctttcttgtggatgaacgactctggaatactagtagccaatgcagaggatctgaatccaacaaatattatttgttcagaacttcag

SEQ ID NO: 33614 - DNA, 728 bp, Oryza sativa
ccgaagagggaggaatcggccgcggagatctcggccgccattgatgacgccggcgaggattgcgggcgcgatttcggacgaatccgagggagagagagagggaaaaacgggggaaacgggagagggaatcacggggagtgatttccccctctttattgcgcgcggggacggcgggatgcggcggattcggcggcggcggcggcgctagggcacgggcgggcggcgggcgcggcgcgaggagggagatgacaggtgggtcccacccgtcagcgagagtggcgggcgggcccgcctgtcagcggcgcgcgcgcgcgggggaggccgatgggccgcggggagaggagagagggggagggaattgggccgagccggcccaagaaggaaaaggggggaaagaagacttcttttagggttttttctttttataaaaccatttcaactttgtttatttcttttccattattatttgtgctctgaaaattccactaaaatttatttacacattttaggcttttaggaaatatacaaaaatcctccaagcctcatttgacttttatctttgcacattttaattgttggaggctttcacatgaattttaattattctttgcacaatttcgaggatgaattttagagtcgttttgggacgcgacaataggtgccaccgggttttgataaagtgtcgagtgatttgttccccttgtagaccttgctctttgagtttcaac

SEQ ID NO: 33615 - DNA, 1276 bp, Oryza sativa
catatatgctattatatgagagaaaatataatgatgctagccacgcaatctgtgcgggccaccatactagttagtgtattaaatctgcacgtcgcacctcgtagctggcgttaaatagaggatggttaatttgcctatgattaaagaataactcccgtgtgtaagggggcaaaatatgttttgattgttaaaacaacacataaacagtccaatcgtcgatgagagccgaacatgtctgtacagtttgttatcggaatcaaagtatcggatcaacgatccgatcaccaatgaaggttctagtttcgattgaaattcaaatagtacttgggtagtccgatcgccggaggcagggaggggggggggggggcaaataccaccctaatcaagagatagagatgcagtttgatggttgtgtttcagcctccttattgacaagtttccgtggtcaataccctgcatgtagggatgcaagtgggatagtcccgctatccaaataaaaattcgcttactagttcatttctcacatgatagtacaaaatttaaaagaaaaaatgaattagaagtgagataagtgagtaaaaaaacccgcttgcccgccccactggcatgcacgtcgtttgcattaacttgagtctactactgccacactacagataataagcgtatgtggccacgtgattagtagcaaaccaactaggtgcagctattactagttaattgctttcttttttttaactactcgaaactttcaaatcatatatcgaaatcataaactggtcgaacccagtattttctatttgaaatatgcaacaaaacgagttagatcagacactttccttatgtattttgtaaatttgggctgcaaacaatattcacatgtgaaattaatgactaattatttattatttacctttgaattttggtaaaaaaaatattcatcaaacaagtatacaagaaacctactgtgttcctaacattttttacctaataatcaccaatctaaaaagaaactaacaatcaccaacaaccatctgaaaaggctatatagtgtgaacttgtgcttgctaatcaaacttactatcatcatggcgattactttcacgattaaggtggtggtgcttctttccattattttgcctgtgacatcctttgagaaggatcctcttcgtaacaggtatatatgctactctctccattaagttatcttttgatcgaattggcactttaactatgcatgtaaaactagtcaagtttttatgatcattttgcccttaaa

SEQ ID NO: 33616 - DNA, 5223 bp, Oryza sativa
atgaaggtcgaaaatataaaatgagaaaaagagcaggacctcagctctctaaagtcagtaaaatcacttagcttgaaaaacaactctaaaattctggatccaaataaaaccacaacaaggtaatacccatgctaaaataagttcattttgcacacataccgatacaaagttaaaaggactagggtgtctttactttagcaaatctcaatacaaccatttctcaattcatttacttctaatacattattctctatttctacaaactcagatataatgattactctaaaaataaatttattttgagacaaatgaaagaagctgaaagtaaacttattacgggacaatggaagtattttggtttgatgctttgatcctctttcagacttcgagcatgagtattgtacgtgtcttctctgtattctctccaccataaaaaaaattaatttagtattgaatttaacacatgctatacatatttatagtactagcatgttttaatccgatactaggttaagcttttatgaaacggagcgaggacatgtcttttggacacgcatacttcctccgtctcaaaaaaaaatcaacctatgagggatgtgatctgtgctaggacaatgtgtttgaacgtagggatgtctctatgtctagatacattgttcatatcctctcctcctagttgtttttttttttggatggggggagtaccagctagtcgtaggctgcgacagtgcgaggcgtagaggagacaaccaagtggatcccacatggccacttcacagcatcgatgatcggtcgcttgtgtgttacgagtagttctagatagggctgtcaacgagccgagctcgagcgagtttggctatataggcttgagtttgacatgaactcgagctgagcctgcataccgatcgagcttgggactaagctcgagttcgagctcgagcgagcttcgagcctactcgagcttgacagcttgacttggtgaaactccaaagaacttactcttgtataagagatattaatacaaattatcggtagtcaaaattaatgggtgctacttgtcttgaatgaagcctctgcagcttttctcatgaattcatggctttgaaacattacaattaacaaagctagctactacatctaataggaatagtagtactaattctaaaaaagaaaaggaatagtagtactattactagcagccagttaattactttattgagaagcattgatgagatcttgagacttgagcaggtcaagcacgatgataagtatacattgacccatcaagaatatcttcctacgtgcaatgcatcttatgctaattaagccctaccgagctattcgagctcgaacttgctaggattgcgagcctcagcctaggcttaagcttggcttgtctagtatttgagccgagctcaaatcaagcctgtaacgaatcaagctcgagcagcttgcaagctccgagcttttttgacagtcatagttctagatcagctgcaatagtaagatagactgcaacttaagttattgtagctgctaagttggatctaactctaacggcaaggattagtttggtcactgtagtaaaatatattgtatcataaaacagtgctcagggtactgtagggtgaacactgttgcaattaatttggaccattatcatataaatgaaatgactaaaaaatatatgcagtcctatggtgcggccgcagttaagactacacccaatttcaatccttaattagtggctagacggtcctatcttttcgcttatgtatataattttccaagctactcattactaacttaaaaaaaattataagtaatttttttgcatacgtgtttttaattatttaaaagcaaaaagtatgataagaaataaaattaatttaaaaattatctcgtaagcataagaaaaagaaggtgttgtcaatctcttcagtattgaccaccaccaacgcacgcacagtcgcacagtcccccatcggcccatcccatgcgtacgtggtttgcctgccttgctctggttggagagccggaggcactttggtgtaccacgcggctctctctctctctctctcacagagaaattcagatcccagtttaacctgtttcaaaaaaaaaaaaacctagtgtatgtaagacagtaagagcaaggtcaatagtatagccagctgatggctccactcgtatccatgtcattctatagttgattttaaagctaacttgtacaacagagtggctattgtgttggctgtatctcatccatcaaaaaatgtattttacacgcatatattgatatacatgatcgaaagtgaactcaatccctgtggtcgttgttgtgcaatactcaggagtgctctatacataaaagaaaaataaaagtcacagacagcaaatagatgagaagaacaaaagaattaggaagagattagatgacaataactcaaattagaaagctattttctgctccatcaacgatgagatccgtttgttctgtttgtagatgcatcggccccttcttgacgcgatggccagcagcagcgccagcccgcggttgtcgtcggcgcccgttgctgccaccacgttcgcgatctgctgcgccgcgagcgctgcgttcgtcgatgccagcggccgagtcgccgagaggaacgcccttgtcatcgccgccaccacgggcgccgacgacatcaacagacccttcttggtcaggcttttgagcgagattgggctaggcgtcggggtggaagacaattgcaaacggcggtcggcgaagacacgccaggaagactgggggggaatcgacgcggaagacaactgcgaggcggtggccggcagagatcgatctgcgacactcccgtgaggagagaaacaagatgggctgcggagggggagggaatacgctgcatgtcacacgggatcggatggctcgtcgtgagacccacaaagcacacacgaacccgtgctattgcccggctatagattagtcgctcgctttcttctctctcctgttcctctctcttccacataggaatttaatgagctggatatttttagagcctgctcagtcaacttattgtacctgcttacgtacaatcacagcgtggtccagactccagacgtaatcacataccctgtacacctagcacacattagtgatcagtcaatggaaatggttaagtggattttagtttgacgagacgcagtccctcacgaacgagctagagacaatttttgaaaagaaacggtgcgtgcagcgctgcttacgtacgtgctccgatccacccggcccctgatccggccggctaacttttgcttttacttttgtggcgctgatggggatgcacagtctccggaatgcaagaacacgggtgcgccagctgctgcgtgcgttgcatgcaaatgcgtccaagcaaagcggtcgtcccagcagcttgactgaaacttgaagacttgaggtgctgatttgaaattttcattaggctcaattggccagaaaaagaaacctaaaacgattgatcaaaacaaaaagaaaggtggtttagccttgatctaatcagctaaggtcgatgaattaatccctagttagctgctcatctcttcagttcaaactagtagtatagctatagcccagcttgtgttgatattcagatactgtgtgcaaatgcgtgcaacgcgggcaggcgaccagatgatcctgaagctgggctgtacagtgcctggtgcagaggagatgatagccaagtggacccggccctctacatggcgcagggcaggggtacgtggagtgcccagatttgttgtcactcgatcgatcgtgtgatctgcgacgccatacgtgagacagacatgcatatgcactcgccgtgttcctgtgtgttggccctggactagtactacagtaaatgtaccgcaggaagtggattttatgggtacatccccttgttttatgtatggtgtttaaaaaattataaaaaaatttgaaaaaaattatcaagatagattcatacatgatatatcttttcgcaaacatgtaagttaaaattcgatttatacaattcgaaacaaaaataacaacattaaccgtgaattacgcgttctattcatagtcaaatttgttatttttggttctacatgtataagttgaatttgaatatgcatgtttatgaagtgacatatcacatattgatctatcgtactaaattttttaaaattttttgatgattttttaagtgacataaaaaatgagagaatatccccttaagggatgaatacagttttccatataccgcgttgcatgttttatttaccacacacggacatacacctggtactccagttcaaacctgagttagttttgcaaactacggttaataatactcgtacttaccacgcatgcacggttaataataagctcttgcaaaccctgtgctagctagctagctaggagtaacatacatcaaccttttttttcaaaaaaagaaaaaaaaaagctttcttgatactttctctcgcggagggcaagctgggccaggcggaaacggccgccacggctacgcgaccgagcagcgtcgttgcggtagagtcgtagagaccgagccattgaagagctcttcccccccttgaccaccaccaccaacgcacccatgcgtacacgtggtttgtcaccgatcgagcgctcacagagagagagagggggagatactccctccgtccaaaaaaaaaaaaaaagacaaaccctaggttttcgtgtccaattttaactgtcagtcttatatgaaatttgtttataattcgtattttcattgttgttagatgataaaacatgactaatattttatgcgtgacttatctttttaatttttttaataattttttcaaataagacgaacggttaaatattggacacggaaaccagagtttgtttttttttggacggagggagtatgtgtgtgtgtgtgaggtgggcgccccatgtcccgatgcgcgggcgtgtcgggggttgggcccgatggggatttctgttgttggttggaggcagaggcacgcagatcgcgcgtgggtgggttggggacgtactggggtaaccggtggtaacctgaccaacccacgcagctcaattcccgtgctggcggaagacaagggcatgcatgtaaggcggctggttgggatggaggagatgggaatcaatctcctgtgcacggaaaacggagtgatctatta

SEQ ID NO: 33617 - DNA, 571 bp, Oryza sativa
ttcctgcagccccatcgtttggcatatttagtaccagagcacttccgatgcatttcttcgtattaatgcgatatacagtttgcttgcttttacactttctgggtttgtttctaatctcataaaaaaatatgcatgatattagttggagtgctatgggatcagcagcttttagtttcagaatttttctacctgctaccctagtcaagctactacacaattatgatatggggcgggctgattcatgacatatgcccattcttcatttgccatgtggatggtagatacaaatttatttgtacgtgtctttcttttaccagcgaaaattcatcgcaacattgctacattcgacactgcccgtaccttaaagggaacactgggagaaaggggcaaaagctatggacacctcatgaaagccatgctcattgtaaacctatcataatttgatttggcttcaaaatataccatactggattgctggatgcttcttcaggctatctgtattatctagactattgacaatatgtggcctgcagtgactgcccattaggactttcttttgtgggtactctta

SEQ ID NO: 33618 - DNA, 705 bp, Oryza sativa
cagtagttcatcacatacaaatcggcctctaattaagtaggaagtttggttatccgcacttcaagcttatatacattgatattgatctacttccttgaaaataattaatatataactaaatatataaacgtagccgaattgacatttgtttactagtaactggcgatcaaagtgcgtcatttggaactgcacccactatttaattaagctgacattggtcaaactagcaccgagcaatgcaacgaccaagtgacgttgtggttcatgcacccaacagtattgtcccttatctggtccacgaagtttcttcatttggtattggagattgcaaaatttcgtcgtcctgacccgaatttggctacatttattctcggccgggctaatcgaaaattcatcaatcgttttttccacgacggatagaactagtccttcgaaggcacgcggtctcataccttcttgaaactaacagtgcttagaattttagttccgagatgaattgtccgatgcacgcgagaagtagaacatattgggttcaagttagtttggattgaaaccaaaccagtcaaccaaaggtttacaaaataacttgaatcgaatatgaatctatatccccgtaaacaaaaaagaatttatatcaatactatcttctctggcaaggtatatgttgctaaatatatatatggtcaaaaggaaaaagtgacagat

SEQ ID NO: 33619 - DNA, 3084 bp, Oryza sativa
cttatccattaacaacagcaggtcaccactctcctactctttcaacgccgaggtggcgccaccgtggtctcttgctgccctggccacctacacaactagccgctactgtcctagccatccttctaagtcgggcactaccttccgccctcagccccaactctgaaatcctaaccacttgggggattgtcggagatgaggaaggaggccgtggagtacaaatcttgaagtggatctgaaggttagaatcacttgatttttcctctaaaatcgtgcgcacgatgtatagatttgtttgatacgtacgtacagacttgatttccgtttccttttaatttgtggaactatgatcgtcactgtaaagttttactcttaacctatcagagaaacaaaaaaaaatttgtttctaggcactattccaagatctagcaatgcatcggaggaatcagaatactagtatagtagatgctacgcagacatatatttccattcggaggatgagattaattgtggcattggcatgttcagacttcagaacattgtcgcttgcctgtactgatggatgatcgttgttgctatgttggagagagttcacaatcacaatgtacacgttgttggtgtgagcgtaaggcatggattacttctgatactgaacagtgaaattgatgatcatagtgacgtctctttttctctagaatggtgcaaaacattttcttcaggattcctggtagctggcttgctgctcgtggcaaacgtttcaattgactggcagagctactgctgacgtttcagaaaacaaaaggaagaactttctgcacgaaaaatatacatccaacattgctgcaatccgatagatggtgacatgaaaagcctaaactggatagatggtgacatgaaaagcctaaactggagaaatgcttctacttgacttaaatctgatgagctgggcgattatataaatcattctgaagaaaacttgcgctgtcgtagcgcttgaaattcggccgaagattgcagatcctttacacgcagtgatcagaagctggattctatataattccctttttcatcttctgtctgaattcgtccgtgtaggcgacatttgatcatgcagtgcagagcatatatagcaggggcgcagtctgaatttcgtaatgccttttttttgtgacatgctccttccttatatttacaccttagtaatattaatacgtgacattatcagggcaagcagaatacagatcttatcttatagagaaatctcgaaagaaaaaaaaggcctatagagaaatctcctctataggctttttttaggcaatcgtccttagagaggcagcgcatgcagtgtacattatatgcaaaagagaagagagaagagagaaaggattagaaaagagaagaaaataagatatgcagctgacatgtgggtcacatgtgctttgtttattttttttttgctgactaggatgccacgtcagtgaaaccacctatatatactgcctagggatcttgagtgaacggttttgtatagtttaggggtggagatttctggttttgtggttaagggaccttaaaaaaatctcgctgttaagttgagggacctccggtgaacttattccatattgggaacagcatcgtcagaccttggttgcatatgggccgaggccaacattatccagggcccaaggccgattaaacatctacctagacttggaggcccaatggaggacaggtaccaatctacctgggcccaaggccatcagctagcgcgcgtgcgtgacaaagacggcccagcaacacctaggtgtggatcggccgcagaatgcggaagaaacgagatgcacttcatactgtgatgacaaagtgatgtgtggtatcaacatcgaggttccgtattcaatccttagcacatttaaagtttttttaaaaaaaatatttagagtgacgtccctctctttaaatctcgttttttaaaatgcagagaaaaccatgagcaacgcagcggcggaagacggccatcggtggtgtatcaatttgctagtcggccgtacaccgtctggcgggtcgttgtgtttggcatctgcggttctgcacagtactcttttctaaccgtccgtccctagacaacttctttttttcaccgtgtttggcaatgcatgcatcgtacttcgatcgatgtgagagacatagtacggcactgtctgggacgaccgtctcagtgatcatcggccgtaccgtacgtgattattccctgaacgtaagtacgcactcgtgtgaaaacgacgaattgcccgtccttccgcaagatggcacatgccagatgcaaagaaatttttatgtattcccttcatcttaaattatagggtgttctgtttttttaggataatcaaactcagtaacttttaactaataatcgtactaaccatacacacagtattatacatgttatattataaggtttgtattttaaaatactttcatttgatgctaattttatatttgttaggaacataacatgaaataaattaatgtgttatttatgaccatgtaaaaaaatataatttgggacggagagactaacacactaaaaaaacataagctagtaactcgtgcacaatactgttaggaggtgaaccaaatctctaaggtgttatcttagatggctaaaacaatccaaaacaataccattctcatataaagtctagaacaataatataatttgagaacttttaggtacaatacgctggtagtatatactgctatataaacaattcaatggtgaagattgatttgatcttccacttaaatagatcatagtataaaatttataagggtaaatttatcttttactttgttattccacaggtttatttatgctaaaaacaaaatagttgatctagataaaaaaatttggtaccatcatcgggattgtataaatatgtgtaaacctagctagcaagatttggaatgtgtaaggcttttcacgtatatctgctatggtacaacctaattatttgatctgtaaatggtcatttataactgacgtatgtatgtagatttttaatgatgatcagaattgatcaggaa

SEQ ID NO: 33620 - DNA, 2999 bp, Oryza sativa
gatcgatcgatcgactctctgatcaaccctgcacgctgcaatatatatgcttagctgctgttgcgtgattccggccgatttcggcggtcaatccgtgcatgattcagcgtgcagactacagtaggagttggtactatgcgcacgttgctttggacccactcgtacgtgcatagtatatgtgcaatgtacgtagtaacgcacggcatgtttcgctattgcccgacacggccgcgccgtgacgcgcacatacgtcgtaccgtgctaactactctcaccttttcatgtggttatcatcatgcatgggacttctctcgcataaaaccatatcaaccagattaactgtagcattagtttgtatactattattataagttgaggcaacctagttagaagggatgtgcagatttattgtactagacttctatgttgtttgatcgagtaatagctatatagtgtgtatgaacgaacaataaaatttactgaaggtagctgtacatgttagacgaccggggtgacaggcgaggttactactctctccgttttacaacgtaagtcattctagcatttctcacattcatattgatgttaatgtaggaatataaacgtgagaaatgctagaatgacttacattgtgaaatggaggaagtagctatgaagatcgatggaggaatcgaagggttggcaggtggggataggagggagaagacaaagtcgcgtgagcccactctcgtgatcggctaaacatccgatcgatatccgtccaagcgacgcgagacaaggtgcaagaagaacatccgccccggtacctgctcctgctgggcaatcccatggcagccacacctcccctttttcagcgcaacaaaggggtcttgctttcttcagctctctctctctctctctacctagctagtacaccatatatagctagcttcactcccatctttgcctcctcctttcttcactatgattaaccaatgctgcatgtgtgtatgtgactacggttgtccaattgtattttttaactagtttgtaattgcactctgttttatcggtggactatattccgttggctttcttaaaaaaaccagtttagtaaaatgaaggtggatatgaaagaaagaccacatacatacatacatacatacatacatacatacatacatacatacatacatacatacatacatacatacatacatacatacatacatacatacatacatacatacatacatacatacatacatacatacatacatacatacatacatacatatatatatatatatatatatatatatatatatatatatatatatatatatatatatatatatatatatattgatgtttattaagagataatgaggctcaaaccttggctggctagtccaccaacttgtggtgctagctgataagactccgagtctttctcaagctagatcggtgaagtaatcttccatctacaagaatgtgactatggctgtttatttcaacaggtttccatatgaagattgtaaaatatacgaatgcgactctacgtacaataggccatgtgtatattgtcacatatcgattcaacacgataagttttagtataattgaaaacgaagtttcaactctggtgagattattgtctaatgtgtgtttcccggttgactcaaaaggcattcttcgagctaaacaacacttcacatgtcttaattttgtatttgtacgatacttcatgtcaacatcagacatgtatctttcggtgatggttggcttataggtatagtaataacgatatgtttgtgacatcaaggcaagatatgtatctcaactaaaagaatatccagggattgggtaatttcaaagatacgactaagttcacacaaatatacataccacgggctagtttgatatcaaccgacgacttaacttgtatgtgactagctagctagcagtacatgttacttggtgagcttagcaattcgtagcctacaacgatgaggacatgaccaactttttcgtgggagaaaggagaggaggaaagtaggagtactacataattgattatacacttggtggtccttttcatcttttgagtcatcttgatttggcttcttctcccggcatcatcagggctcaatcatcactccagttgggccctttctccatttattatgtaattattaatcaagtagtactctgattgttcccattgagccctaattttgaaatgacatggagatggtctctgtcgtccctatgttcaatttgactgcagataagttccatccacatagatcaagaggtcgatcacagcttttcgatctgaagtgaaaaaccatcagttcttcagttagtcatgcatgcagcatgcatataaatatgtgatatgccgttgcatatatatagcattatagactaatcgattgatcaatcaatccgctgtgcaaaaagtgcaagatcactcgaattaaactgtggtcctagtaataattaaccggcaaagctcaagtacgtactatatgtacgaagcctgtctcactcaatttattgtactcatgaatgaactcaaatcaagctctctaatcaatcgagctaactttgcatggcatagcatatggtcagcttctagtagtcaaggtttttggtttcaaaaaaaaaaaaggcaagatgtacatcccgtacggcgacgtatatatacacacatgtatgttgattctctaatgatctagatcactctgattattgctattattagtgtagtacacacattgacgtgtgagtcacggtttcacctaagttagctcacacaaaggccgaccaaggatatatataagatgaaaatttgttatttttctttatatgaatatcattaattaattaattaagcaaacaccaacaactaaagttgatcctgtcgcaataacaagagttaattaattagttgcatatcttatcctaccaaaaatgagagaatggaatgtacactacgaccatgcatgtacata

SEQ ID NO: 33621 - DNA, 646 bp, Oryza sativa
taaatttacccttataaagcttatactatgatctatttaagtggaagatcaaatgaatcttcaccattgaattgtttatatagcagtatatactaccagcgtattgtacctaaaattctcaaattatattattgttctagactttatatgagaatggtattgttttggattgttttagccatctaagataacaccttagagatttggttcacctcctaacagtattgtgcacgagttactagcttatgtttttttagtgtgttagtctatgcgtcccaaattatatttttttacatggtcataaataacacattaatttatttcatgttatgttcctaacaaatataaaattagcatcaaatgaaagtattttacaatacaaaccttataatataacatgtataatactgtgtgtatggttagtacgattattagttaaaagttactgagtttgattatcctaaaaaaacagaacaccctataatttaagatgaagggaatacataaaaatttctttgcatctggcatgtgccatcttgcggaaggacaggcaattcgtcgttttcacacgagtgcgtacttacgttcagggaataatcacgtactgtacggccgatgatcactgagacggtcgtgccaaacagtg

SEQ ID NO: 33622 - DNA, 1250 bp, Oryza sativa
caatactgttaggaggtgaaccaaatctctaaggtgttatcttagatggctaaaacaatccaaaacaataccattctcatataaagtctagaacaataatataatttgagaacttttaggtacaatacgctggtagtatatactgctatataaacaattcaatggtgaagattgatttgatcttccacttaaatagatcatagtataaaatttataagggtaaatttatcttttactttgttattccacaggtttatttatgctaaaaacaaaatagttgatctagataaaaaaatttggtaccatcatcgggattgtataaatatgtgtaaacctagctagcaagatttggaatgtgtaaggcttttcacgtatatctgctatggtacaacctaattatttgatctgtaaatggtcatttataactgacgtatgtatgtagatttttaatgatgatcagaattgatcaggaatcgtgccgttgtggcgtgtgtcattgtctctcaaaggcacacaaacgagatcgaacggaggttaactctcaaccatgaaattcatagaaacccctttcgcattttctataaaattcctgatttacccatctatatgccggcagtatattgtacagtaaaagttctctataattaattttccgttgtatatgaataaaataacccacaaggaagaagtgagggagagagatccccatctaattcatccaagcacagccaaccctgtagggatcaagtagtagtatcaataattaataagcagcaggtgaccagtggaattgatccatcgatgtgtgatgatgatgagcatgaggaggcggcatataattagcagtagctgagcagcagaggtagcgggaacaaagggaggcatcagctgctcgtgcagtttcctctcggccggccggggacaaccggaatctcgcaacatatatccgtgcacccatgcatcgcctgcacacgcatccatcgttttcaccaacaattcaagcacatacatgcatatgcaaggatcgatcgatcgactctctgatcaaccctgcacgctgcaatatatatgcttagctgctgttgcgtgattccggccgatttcggcggtcaatccgtgcatgattcagcgtgcagactacagtaggagttggtactatgcgcacgttgctttggacccactcgtacgtgcatagtatatgtgcaatgtacgtagtaacgcacggcatgtttcgctattgcccgacacgg

SEQ ID NO: 33623 - DNA, 899 bp, Oryza sativa
gactcttctctgtgtggcttcgttgaaagtgtatatagtactatccccaccatttcttatcgtacatgtggtctcgaacatttacatttaattcgttttgagcggtaaacaatatgttaattttaacaataaattaccagttagttttttttactgggaactgtatagtactccctccgtcccataatataatggattttgagtttttagttgtattgtttgaccactcgtattattcaaaaaatttgtgcaaatataaaaaacgagaatttgtgctaaggataataaagtaaataaaaaaaataaataataatttcaattttttttgaataaaacgagtggtcaaacagtgcaagtaaaaacttaaaataacttatattatgggacggagggagtatgtcaattaggaactttgtttgctctcggtcgtaccgagctagctagggcagaagttacatgaattaattaatcctaaaaataaggtaagtacgtctagactaattagttataaccattatcatcaactcttaattaagcaagtcatgtactccagctttattatctactaatttattaattgcatgactataaccctgtttagatgggactaaaatattttagtccctatcacacactggtggagaaaccatctttggtcggtccggcaaaatccacaatagtctcggatccaaaaagaaccgggactaaatattgtttttaatcccggttataaaaattttgatctttagtctcggttggtgttaccatccgggactaaagatgatctttagtcccggttcatcccttgtcagatgtatgtcaaggggccgaggatctttagtctcggttggtgttaataaccgggactaaagatcaagatgatctttagtcccgcttgg

SEQ ID NO: 33624 - DNA, 520 bp, Oryza sativa
agtggattttgatccttgagaggatatcccctcattgtgtgcatattaatcagtttgttttaaaaaaattaaaaaaaattgagaagatgtattaacatgtgatatatcactccacaaacatacaagttcaaattcagcttctacatctcgcaacgaaaaaaataaatttgtctgtgaatatacattaactagttgtatagtttaatttattttttttccttgcgagatgtaaaaattgaattttaacttgaatgtttgtggcgtgatatatcacacgttaatacatcttctcaaattttttcacattttttaataaccatttgagtaacatgcaaacgacaaagatattgatatcccctcgagggatcaaaatagtttcccctatcactactttgaattaggtttactatcatattcatcacaaggtttccccaaaagaaaaggcaaaagtagaaaaaaaaaacaaggctaggaattaatcaatcacctgcagctgctgtagtgaaatactgggagatgg

SEQ ID NO: 33625 - DNA, 527 bp, Oryza sativa
ggatcaaaatccactcccgttgaccgttgtgatagctgatatattggtgtggctgctgctttagtgctagctagacaagttgaggccgtaattagtgtgaacctcgccaaactctttattacccatctaatcatggaagccgtcggtgagcttccaaacaagttatagagtacagttccagaaaagttgtaaatttcatgagaattaatgcaagtcatgtgggacacaaacccactcaaatacaactgcggcatattggattgaaaaaagtacgaattacctctctaactatcaaggtcgaccgaaatacacctacaaaatcgaagaccagatattctacacccccaactattgaaaccggataaataccccgtgtctcaatccggagcggtcccacatgtcagcctccaccttatcctccctctcttaagaagctagttggccccgcatgtaagctgctcccttttccttcgtctcctggccgcaaagatgcctgtgccggcttcaggcttcagggacccggaccg

SEQ ID NO: 33626 - DNA, 612 bp, Oryza sativa
actacgtgtttaattttagtcccgattcatattaccaagcgggactaaagatcatcttgatctttagtcccggttattaacaccaaccgagactaaagatcctcggccccttgacatacatctgacaagggatgaaccgggactaaagatcatctttagtcccggatggtaacaccaaccgagactaaagatcaaaatttttataaccgggattaaaaacaatatttagtcccggttctttttggatccgagactattgtggattttgccggaccgaccaaagatggtttctccaccagtgtgtgatagggactaaaatattttagtcccatctaaacagggttatagtcatgcaattaataaattagtagataataaagctggagtacatgacttgcttaattaagagttgatgataatggttataactaattagtctagacgtacttaccttatttttaggattaattaattcatgtaacttctgccctagctagctcggtacgaccgagagcaaacaaagttcctaattgacatactccctccgtcccataatataagttattttaagtttttacttgcactgtttgaccactcgttttattcaaaaaa

SEQ ID NO: 33627 - DNA, 623 bp, Oryza sativa
ggtaatgggcctatcaccagctagagatttatgttctggaggcccaatttgaattggtagcaatccaattttttatgggccagatgggccgaccatttcatttagactcgactgccgatgttgggtgggcaaaaccgacggggcagagaagcgccggagctccgccggccgcgtcgtggccatcgatccgctttcgccggagctccggcggccttgagccatgatgttacgcctgatctgctgctggacactgttaatcctacctgaatctcacaccagctacctagctagcattgccattgaacctccgacgacgactagctactcgaccgatctgagctttttcatggcaggccaaccggccgggcaaccccgctggcgcagccagagggatcagtatcagatactctacagtcgacgcctttatcactaacatatagagccgatgctttgttactgacatgtggacccagaactcatcgaactcacatgttagtgataaatctaattaaggtaaggtgcactcgactacagaggatctcaatcccggccagaggcagaatccattgtattgcggttcgcccgaccgtgggtgactcgtcgatctgatacgtgcgatccaa

SEQ ID NO: 33628 - DNA, 603 bp, Oryza sativa
tgtgttggcaacaaaacaagctgaaggcacaacggaaaccaaccgtagaggggtgccgggtgcaaatgcaatgcagggtgggtgaggcatccctatccgcgggattttttacattttggttcttttaaaaaacttatttcacaaatagacccctaaaaaaacttatcctagaaatggtccttttaggggcaccagagtggctggcgccgtcatcaacgggaccgtcctcctgccaccgtggcgcacgcgaaccgaagtggcaggaggaggcgctagccatgctggcgccgccccagggaggagggtgccagcatggctggcgccgccgcctccattcctgtttctctgtatggagttgcaacggtgtcatttttattttattttttcggattttttttcacactcaggatcacgatacaaccaaccacaaaaaaaaaatttaaactcgaactaccacttagctaagtctgaaaatagctagcataccacttagtatactttgcaccttcactaaaattagaccataattccattagtaaaaccctttgatcaggatgttaaacataatgcactctaccactatatgaaattacttaatctaat

SEQ ID NO: 33629 - DNA, 738 bp, Oryza sativa
atatccaaaacaaaaacatgcatgcctacctgaacctcaccactacaacaagctcacacacgtttacattggacaaggtaggtttacctggcaatttttatatagcaggatatatcgcacatatatacatttcagtgaattaatggaactgaaatcaacaacacgctggctagatcgacaagcctctcaacttctgctcttgctcgggtaattgcaaaagagaatgaataccatacagagattatcattttcgtaagtacgtaaaacaaccgcaagacatgattacgacacgatacgcttatacacactaattataatagtatactcattgcgtggaagaattagaggagctatctagggcaattgtcaacctattcattcatactacttccgtctcaaaataagtgcagccgtgaatatccgtacccaacgtttaaccgtccgtcttatttgaaaaatttatgaaaaatttaaatatatttagtcacacataaagtattattcatgttttatcatctaatagcaataaaaatattaatcataaaaaaattcaaataagacgaacggtcaaacgttgaacgtgaataatgcaaaactgcacttattttgggacggagggagtatatgctatagatctggggcccaccggaaatcccacctgatgtgatcctacttggaccaatggcctctgcccaccgtgcatctgatcctatccacaattcgtacgggctgcaggaa

SEQ ID NO: 33630 - DNA, 668 bp, Oryza sativa
ttgaactaaaacacacccttcccttcacccgattccatgtcatagggtgtgtttagttcacatcaaaattggaagttttgttgaaattggaacgatgtgacggaaaaattgaaagtttgtacgtggatgtgtttagttcacgccaaaattgaaagtttgattggaattagaacgatggaacggaaaaattataagttagtgtgtaagaaagttttaacataatggaaaagttagaagtttgaagaaaaagtttaaaactaaactcggccatagtataagagagagagagaggtgttgcttcgaccaatctctacaaacccagccataaaatcacacattcaaaacacatagatcacaaactccttctattgcttgcttccattgtgtacacagtatatcttcgctagttactcatttacatgtcccctccgtgataaataatcaccatggtttacagcatttttaataatcagacaaaacaagatgaaatattttcactatgcgtgtgtaccatattacgtgtatatatattgatgattgatgttactgtaaaaaaaatacaaaatgcacgtaaacagaagcaagagatatacatttttttagagggaaaagatcaagcttaaacgactgtacattttaaataaggtgaattaactgtacattgaaca

SEQ ID NO: 33631 - DNA, 522 bp, Oryza sativa
gtcgatgtgaaaatcatgggacaacataacctgccattctagcatcgtttgggatcggagctaaggaattgaactctagttttggcaggtcaatatgatcaggtcaatgatagatgctgactacatctccactgcaaacccaactttttttttgacacgctgcaaacccaacattgactgactgaaagctagctagcggatcccttgactgatgcacatgcatgcatatattagattttgttcatctctcctgctccctccgtttcacaatgtaagattttctagcattgcccatatttataaagatatgaatgaatctaaatattcatatgtgtctagattcattaatatccatataaatatgagcaatgctagaaagtcttacattatgaaacgggggaagtagcttggacctgccgatttgttatacaagcgataaatgcttaatcatgcttatccattaatcgatcactagcttgcatgcgtgggtgacatttatacatgcgtgttactgggtaatta

SEQ ID NO: 33632 - DNA, 1672 bp, Oryza sativa
gggtccacatgggggggacatttgggcccatgggtcatgtaaagcttactttggaaaggaaagaagaaaagttttttttttagctagctatttcctgaaaaaatttctcagaatttagatagtacgttgaagaccgaaacattagagaccaatattaggcggatccctaggcggaggggttaggtggttcacataggtatattgtgagattattagacccacatatcatgcatacatggcttcctcataataataattttttttttgtttttattaaactagccatttcccaaaattattttagaatttatataataccgtagaaatcaaaacatcacacaccgacatccgattctcccgtagtagcttcaatctcaacttccacgaggcaacatgaaagtttcttgatatggcactggtatggctaactggaactaagcgtataatttatggaaattagagtgcatttgattggattcatagtttggaacctatccacacgggtttggatggcttgtttcgggcctattctgaggatggagcaagcgaggatatacacataaatattatgaccaaatttaattagcattgagctagctagcaaatatgtgagcacgggacaaaccacaaaaccaaacccctcgtgtgtgtgcgtgtaaaagaacaattaacgcaagagggagatgataagtgtgtacattaatagattgaatgcgatttacatttttttataggaatgatttttacacttggttattactaagtgtaagaaagaatcaaggcaaatctagaaaataaattatataattcacttaatgcatattatattgaaacttgtttgcatgtatccaatcaattaattacctatacgcacacacatccaacattgccatcacattgtgtgttcaagacattctctgtcttgtacaggttcgtttggcatatgttactgagccatgcataaaaataatgtactatacacattttactgtttgattaaattcctttctgacctattttaacgcatgaatacatgcatgcatgtggaggcctgcatgcaagaactcgacaagtgaaacagggaaggccgtttgcatgtgatgatctgaccttaatattctcgccccaaacaagctagctgttgtcctaagattaattaattggtacactagatgaaatcaataatacaactatatgtgtgcacaagtttagattcgcaaaggacaaaccatgtactgtgcatgttaaaaaagatgatcagccagctgtgatttatgcctgcaatgtcacgaggctatagtgaacagtactgaaaactgctgcactgcgcctggctccaaagccatacatgcatgctcatcacaggatcaattcagtgaacaaacactgcaggcattatttcaaaaccgatgcttaaactggaataatgtgtattacacaattgatctccccgtcaaatttatcaccatttcgtcgcaagaaagaattaatcttttttttagggacaagaaagaattaattggttgaccatgactaacagggcaacggtatagattatatgagagaaggaaccagatatggccaaccaaaaaaatatagtcaaaatttgactatgtacatgcatggtcgtagtgtacattccattctctcatttttggtaggataagatatg

SEQ ID NO: 33633 - DNA, 673 bp, Oryza sativa
tttttgtacgaaatacaccgtttaataatttgaaaaacgtgctaacgggaatagctaagctgcattagctgtttagaacgcggagaggggataagttcacatctactgtgggcttagggcatactccctccatcccataaaaaaccaacctaaaaccggatgtgacatatctactacgaatctggacatacatctgttcagattcatcgtactagaatatatcacatatggtcatagatttgttgtttatgggatggatggagtactcttaacaggtccctgccatgtggaccctacctgcagcagcctgagggaaataaaaaaatatccaaagacaaaaacaattcgatccagtagcttgacacccccacccactagtcgacgccctcctctccccgtgcacgaatcacgagactcacgaccaccaccctcgtttcggtttttgaatcgtcctccaccattggaggaacgtcaccattggaggaaccccttccggtaggccccacatggcagtgtgacgcacataaaaccctaacgcacgaggaaagctatcgaaccaagccaggccgcgcgccaaacaaacacggagcccaaaacactaaccgcccatatattaatagcctccgcgtgatgagaccaatacaccagcaagaccgagagacgacccgagcgc

SEQ ID NO: 33634 - DNA, 623 bp, Oryza sativa
acttgcatatgtaattagtatgtaattttcgaatttacatatgtaattttagtacttacatatgtaattttgagacttacattgtaaatacactaaaattacatatgtaatttagggacttaaaatgtaaatacatgccgactatttttcgatgaaaaatatggcgccataaatatagctacactaaaaaattttgcctaaaaacgtcacatcgaattttttgacacatatatggagcattaaatatagataaaaaaactaattgcacagtttgcacggaaatcacgagacgaatcttttgagcctaattagtccatgattagccataagtgctacaataacccacatgtgctaatgacggattaattaggcttaataaattcgtctcgcggtttccaggcgagttatgaaattagtttttttccgaaaaccccttccgacatccggtcaaacatccgatgtgacacacaaaaattttcatttcgtgaactaaacacacccttaatttatgcccgggcatgattttcaacagctcaaattaatctataataatttatgcccggacatgattctcaacagctctaattaatttatgcccatttagtttcactcaaaaggcatgg

SEQ ID NO: 33635 - DNA, 1757 bp, Oryza sativa
tgttaatcctacctgaatctcacaccagctacctagctagcattgccattgaacctccgacgacgactagctactcgaccgatctgagctttttcatggcaggccaaccggccgggcaaccccgctggcgcagccagagggatcagtatcagatactctacagtcgacgcctttatcactaacatatagagccgatgctttgttactgacatgtggacccagaactcatcgaactcacatgttagtgataaatctaattaaggtaaggtgcactcgactacagaggatctcaatcccggccagaggcagaatccattgtattgccgtcgccgccgtggtgctcgtcgatctgatacgtgcgatccaatataatccgccacccaagccgcgtacatacctttgggctttagctatggaacaaattaagctctcaaagctgctgcttatacatttccggttgcgttataaaaggccactcctaactaatgaccatctatccttcgaatataagaatgatgagggcaactcccaaacagcagaaactaaagaagaaaaattaaatgattttctgtgaaaataccacagtacatagataagtatgcatccatgtgaaataattaattagcagctctccggtaattaaagaattcttgtggcgaaatagagtcgtcggatcgatcatcaatcaaatcatttgccgtttagagacacgttccatcaatcaagcatcaaaacctaactcaaataggagtatatatatgacatatccttgtcgaccaaaagaaaaaccgacctaactcgatcaggttcaggtacatactaagtactacagtactcctacaccacttccattaccattagcgcgccgaccaaccgtacaaatatatattcccaatcaatcaatgaatatcgatcgagttcgatatataaaaaatccgatcgatatatatataaatctatcgaccggtccatctcaaaggacgacaaagattcggtccggcgagcaagaagccaacaactccatcgtccatccaccatccgtcagcatccaatcctgccctggtatatgcatcgaggcttcgctgcgcgagacccagctgcgcagcatatgcatgcgacaccgtacgtaccacacacctaatcccatatgagatcgagagtgccccatatggtcagctgcatatgccgtcttatatatgcttgccggtgcaacaagccaaccgcgcccggccaccaccaaagacaacaacaacacccccccccccccaccccaccccacatgtgtgtacccctcctagctagcatctctctacacatgcgccgctcagtgatggcgcggtgtaagtccctgtttaggagagtttctacggtttctctctgaatctctaacttattcaaatagtctatctatagattctcgttccgattctaagaactcataactgtagagaattaaaaaaatataaattaattggaagtcaaaaattctaaagatatgaaactcaactttgtaaattttgatttttgactagatgattggttttacttctgttgtttcttagaatctcgagctttccaaatagaacctcgcggccgcctccaaaccgcatacggcattgtgcagtcgagcggggggcggcactgtacaagctagccggttggcatcaatgtggcacacaggaacacacggaattcccttttttcagagaggcatgcattatatatgcaggacgcgcgcgtttatgctatgtagggat

SEQ ID NO: 33636 - DNA, 599 bp, Oryza sativa
ccccccaccccaccccacatgtgtgtacccttcctagctagcatctctctacacatgcgccgctcagtgatggcgcggtgtaagtccctgtttagaagagtttctacggtttctctctgaatctctaacttattcaaatagtctatctatagattctcgttccgattctaagaactcataactgtagagaattaaaaaaatataaattaattggaagtcaaaaattctaaagatatgaaactcaactttgtaaattttgatttttgactagatgattggttttacttctgttgtttcttagaatctcgagctttccaaatagaacctcgcggccgcctccaaaccgcatacggcattgtgcagtcgagcggggggcggcactgtacaagctagccggttggcatcaatgtggcacacaggaacacacggaattcccttttttcagagaggcatgcattatatatgcaggacgcgcgcgtttatgctatgtagggatctggagtttgaatgaagtcgatcgatcggattgggatgcaatcatgcaggtgtgtgcaataattcccacaaaaaaggcagttctttttgtcccagggctttta

SEQ ID NO: 33637 - DNA, 597 bp, Oryza sativa
actttttatgctgaccatttttgcagcaacggtccataaagacctggtgcatcgaccacttttggtgcaaaagccaatcacgaggagcgtggggcccgtgaacagtgcaaggcgtggaacacgggggcccacctgtggtaaaggaccctccgtagacctggttcttcatgtgccgcatgaaccaagatgcggaccccacctacggtgcaacgcagtgaacggtgggctgggcctggctgcggcactggacaagtgaaggtagttctgggccattagatgggccgtaaagctaactcactgatggttcgtgatgtggtttatgggctggacgtctgtaccctcgtggacctattccagcgtttgtcgagcccattaagtattagctgggtccagatgggccaggtaaccaggtaggtccatgaaaagaaaacaaactgatttttatcctccataaaaaaatgaatttaaatgtttatcaggtaaattccggtatcagccaccaaggaccgataatccggaatatatatactcgaaaccttactggcaagagacaactggataaaattcaaactcgtcaatcaaatcatgccagaatat

SEQ ID NO: 33638 - DNA, 649 bp, Oryza sativa
acggtttggcatttcaaatggaagtaaagcaaatgtataagctattcggagcaaaatgttttcaccatcatttttctccatcgtgtgtttctgttcatacttgttaaagattcatccagtattgaaaggtatgcttgtgcttgagaactctgcttctgttgctggatctattgcttatttactggtatcggtcgtaatctatacgtaaattttccagccaattgccaccgaggttggctgacgtggcgaggacgggcccacaaatcagcgtctcgcggcctccgcttcttcgcccacctcgcgttcgaaaaaaaggaaagttcaaagcgagaaaacgaaaacagttgcacacacttgctcctctccccgtgtccgctcgtttgctccggcgtcgcgtgtccgcgtgctcctctcctcttcacgaaaaactctccgcaacaccaccacgccggaaaattcccaagtccacactcctcatctctctctctcgctcgctcgattagctcggttccaagccgagcaggagcgacgcgagcgagcatggcggcgtcggcgtcggcgtcggcgctgcaggccgagcggtgcctcctcgtcggggtcggggcggggccccggcggcaccggctccccctccgcatgcccccgccac

SEQ ID NO: 33639 - DNA, 537 bp, Oryza sativa
  unsure (1)..(537): unsure at all n locations
ctccgtccactgcgcgcagcccgatcactttctcatcgtcttcgctaactccggtgacatggacctcgcgctctcgcgttccccgatcccggctcccccctaccagctgattctacgaccatggacccggcttgtgatggctacctccttctccatgccgttcagggtgtcgctggacctcgagggtgtaccggcacacgcctggaacgcgtncacggcggcggccctcgtcgctcccggtcgtctcatctctgtggacaccccggcgcgccccgacgagtaccggtttcttcgagtcaccatctcgtcgcacaacccgggcgccattcccaaggctcgtcttcttctcattcccgagccgacgttgggcttccagtgccttcttcggtatcgggtccttctccacgtgctctcggtggtctgcctctcggcccccttggcgtctggcgatgtcgacccggccggtggcggtggtgctagcggtgaaggtggtggcgctgcgaacgattgtggtggcgctgcaaacgatggtggtgg

SEQ ID NO: 33640 - DNA, 1320 bp, Oryza sativa
aggaagtagtatttttgttctacctttatgcactgtgagaagagaaagcaagaaatattgcttaaggctaaaccataagaaataaaaaattagtttatatcttttacaacatgcatgatactctttcatttatattgaatagagtttttccatgaatggttcccagcttaacatcaaaaagatgcagcatgtgttatatacacaaatgaacataagggtgtgtgtctcatcttggaccatatctaggcgctcgtgccaaagcgatgacggtttccttctcacatctgctttctctcttccacgttagatcgagacaacatatacgggctaatcgtttgcttattagacttgctcttaaaagttgtattctaagtccccaacttatatatatctgcctcgtttttcacacgcatgtttcctaaactgttaaacgatacgttttattaaaaagtttttatagaaaagttgctttaaaagattatatcaaaatattgcatgatccaaataaatcattagcaggcgccccacatgtattgcatatactcgaatttgccatgtttagtcaagctcggacttcagcaagcctcgtgcaaagaccctgatttttttggtacctttaacttccgcagtctttcattctctcttcattaagtccactttagagctgcctggtctatcatttagccaatactctctactcctttttatgtgcaccgacattctataaagcagagagcactgaaaaaactccatttctttcatgaaactaagcccgagtatcttgttgtttgacaaaactcagagaaatctacaaactagcctctttatcccaactacaaaataatgaatctaacatctcagtattccaagtcatcgacattttattaactagtcaatactccacactttgttacgagatatgtggatgaatgcatgttatacattatagaaatgatatatgtgtatatttaaataatatgaaaacgatatgaagataatgattggacattgtttacatatctattacaagtccattaaacttcctataaacgctctcaagctgtcacgtggtttcttacaaacgctcataaagctccatatggcgttctaataaattagtaaaaatcacaaataaatcaaataaatatctaatcattgatttttctttaaatcggtggattcattagttttaaccattagatctccatctaaaaggaaaatgaaaaaaagtggtacccacctccactgccgaacgtatgtacatccgtgctccttcccaccctccgatccttctttcatctctctcctatttttagctaa

SEQ ID NO: 33641 - DNA, 514 bp, Oryza sativa
acaatattattaatagcgtttcctctcacatttaatattttagggtgctcttgtccatggtgaatgccaaaaccacgacgaccatggatgattgtatttttcctttaccattttcagaagtacgatcatcatgcttagaatggagatgcacttaagcatctatgtttgcattgtgtttatttttaaaaaaaatgtacgctcctgctagaagtgaattaattgtttgtcatcatttttctttcttttttttaaaaaaaagtagagttcacgcattccaaacaatgtaatgggccgtgtaaggcctggcgtgttgataagcccaatccaattaggcagggctggattttggtgtcttaggacctattcggctggtattttctgcagctgcagccgcacaacacaagcactgcagcgtaaaggaatgattaccgaacacgcccctaatttgtcccgttcaaactccagacataaaatgaaaaaaaactattagcacataattaattaagtattaata

SEQ ID NO: 33642 - DNA, 513 bp, Oryza sativa
ctataataattagtaataaatctattctacaccctgaataattcctaataactaatagctctcgtccaaccaatcgagcccatgactggcacgtctaattaataggatctttttttttggaaaaatacctaaagtcggtttggcttttctggggtttcggtttttaccgaaacaaatggagcgttctattcgtgaaaagctgaaacccgtgtgtaatgtgttaattgtgtgttactagttctcaaaaaaaaagaaaaagaaaaagaaaaaaaagaatgtgttgtgtggggaactgggggatcaactattccaatttaccaggtggttatttacgtcggttggatgggccaactgatgggctcgagcgggcgagatatatagggccgggctccaaggccctaattaattaaatagcaaaataattaagcttgaatatcatatcgacccaattatattaaccctagattgagaaatatttgagagaggaggagcaccaccgcgtgcgccatggcc

SEQ ID NO: 33643 - DNA, 518 bp, Oryza sativa
ttttgataaagttgccaaaaaagtggctacatttagtttgctgccaaattttggtaactatataagaaatcatgtcaaaattttagcaagttggtaaggtttttttgttaataccaaaatttttttttgaaaggaagttaataccaaaattcggtaaggttttttttcatcaaagtgaacaagctctttctctttcatttttccttcctttcttttacaacttcttttcttaatcttggtaggccttttgggccacatgctgggcccaccacaaccttcttgattggccatctccatttcggattggagctgaaattgcaagtcgccttctcttctttttgccggcgaatggagaagaagaagaagaagaagaagaagaagaagaggcctggcccacaaactggcatggagctacgctttcgaggcccatcatgtctgcttgccctttgcaggggttggtgggggcccacctgtcttccacctggcaccaacatacctcccatttttggtagtagtag

SEQ ID NO: 33644 - DNA, 658 bp, Oryza sativa
aaaaaatccagggtctttgcacgaggctttgctgaagcccagctttgactaaacatggcaaattcaagtatatgcaatacatgtggggcgcctgctaataatttatttggatcatgcaatattttgatataatcttttaagcaacttttctataaaaactttttaataaaacgtatcgtttaacagtttaggaaacatgcgtgtgaaaaacgaggcagatatatataagttggggacttagaatacaacttttaagagcaagtctaataagcaaacgattagcccgtatatgttgtctcgatctaacgtggaagagagaaagcagatgtgagaaggaaaccgtcatcgctttggcacgagcgcctagatatggtccaagatgagacacacacccttatgttcatttgtgtatataacacatgctgcatctttttgatgttaagctgggaaccattcatggaaaaactctattcaatataaatgaaagagtatcatgcatgttgtaaaagatataaactaattttttatttcttatggtttagccttaagcaatatttcttgctttctcttctcacagtgcataaaggtagaacaaaaatactacttcctctgtttcacgatgtaagtcattctagcatttcccacattcatattgatg

SEQ ID NO: 33645 - DNA, 542 bp, Oryza sativa
aactcttaaggttatgggagttaggaactatctttgacacaatattagaaacatttcaaaataaagaaaaagagagtatcataataattagaaactctcgatgatccaaattatccgactgaatataacctcaccacatagaagcaaaattacacagctatatgcatcacatgatgtagaggctgagatttttatttgactatcttaaatatattgagtacaaaattgcaactatatatggactaacgaagctagtccaacataacaatatatataggtactacatcgtcatttggtcggttaatattctaatcaagcaggtctcactccctataattctatattatatccgagcatatcctcatcgctcgtagagaaagaaaacacatcgatacttttaatgttaccgttgcccatcaaataggaacggataataattaagaggaacaattaaaaaagcaacgatgaggacgacgacgaggaccggcagctaaagcgaaacaagacattcggtcaatcggctgctaatttcctcctgtagg

SEQ ID NO: 33646 - DNA, 564 bp, Oryza sativa
ctatagggcgaattcgagctcggtacccattccggtagttgaacacgttattttgagagtaattaagctccaatggattgtaatatataattaatggcaatgtggatgttgttaatcggtcaaagggtcagactttcttctgtcggtcaagagcgactccaactactgtactatactaactaaactacactagtggatcatcaattttccaaacagttaattactcgctggcgatcgaatcatacctactgtactatactatactcggataagcagaggaagaggaaggaccagcccctgatgaaacatcagtcttgagatgcaacttgtgagtcaactgggtgactttcttaatcatcctcgtgagacgaggagcatgcacaagccctttccagtagttgaaggaccttccacacaaagttgaacacatggaagtgaaagggaggaggatcaatgaaaggatcttgatgttgtttaaaggagggtgaataggcgtttaaaacttttaagtaagtatggaagctgaacttttcggatatttccaaatatttttcaaatattttt

SEQ ID NO: 33647 - DNA, 693 bp, Oryza sativa
tatacaagctcctagcttatacatgaaaatctctctatatatatctctctgtctccctctcattcattcatttttatggcagttgaggggaatgttgtctggtccgagacctaacaccgggcggaatggcggattcagctgcagctaagcaagctaggtggggggtttcggaccaggcttcattccccccaactcaactgtttagttcttcggcttcggcacaaatcggcgggcgacactgccagcgtgaagcttctgcaggtaggacgatgtttggccgtgcagccagccgtccgtgctccatccaccatcaccatgcatcgatatatatcttccatctcgctcactggtaagtgctctccatttcctataactctatcccagactcggttggatgtgtacatatgcaccgagaccaagcgatcaacttatgtgtagtgccagttgatgttgttccatggttgtgtttgagtaccagtgaattgtctcatggccttccgtcatcttcgtcttggtagactaatttctggtggttaagttcttggttgcttggagtttgaaaaaggttcagaaactcagcgtattggtgtcccagtgtatatacattaattgggcagttgttcacccgttaaggaattaatgaagcttcactagatagtctatccgatccctcattatttgcggctgcaggaa

SEQ ID NO: 33648 - DNA, 516 bp, Oryza sativa
ctcactataggcgaattcgagctcggtaccctatatgattattagagttttaatattagaaacttagacttagcatatacggttattacactcagcatatatgattattatagttttcatataagatttattagagttttaatatatgatgaattattagacttagcatatatgattattcgacttagcatatatgattattagagttttcacataagattattagagttttaatatatgattaattattcgacttagcatatatgattattcgacttagcatatatgattattagagttagcatatatgaatattagacttagcatatatgattattagacttagcatgtattaatatttatcgttttaatataagattatcagagttagcatatatgattattagagtattaatatatgattatcagagttagcatatatgattattatagttttaatatatgattattagagttagcatatatgattattagggggatcctctagagtcgacc

SEQ ID NO: 33649 - DNA, 599 bp, Oryza sativa
gacctaggagtatgacttatacgctccacccgaggggtagtctacagacggtctagtaccagataagactttgagtgaaacttgcttgcacaagacttgcaattcaaggcgtagtccattgttcaagttgtgagtaagtgtagcttggagttctaggtggatgttcaaccttaattggtctccatcgaaccgctggtatataaacagtacattggaaaaggcaaatctcagtgggattttgagatttggtgggggattgttggaattaatgaatgggccttagcccactcgaagattaattctttggaaaatcacaaaagcccacctcatgggatggcatgcatgtggagtttagtaccaccttgcttattctaggagagggggacctccttaaaagggaggatgccctcctagtcgcttgaagcatgtgtggtggagagaagaggggaaacacacgcgcgcgctcgctcgcctagcctcgcctggcaaggcagggcacggcaaggcagggcaagcggcgcgcgtgcacgtcgaatggtccgaaaaattggctcctcacccttgcgcagatgcagcctccttttgcagttttgttttgt

SEQ ID NO: 33650 - DNA, 618 bp, Oryza sativa
tttttaccaaaatccaaactttgcgctgaactaaacatcaagccttacactactactacatccaccaatggtaggtactgtaaaataccctaatagctaggcacacctttacagctgtggtgttgacatctcctgcttagatttttggaagccctcgaaaagggacctctcgtattggtagttggcatatcttcctccaagtttgcagctgaagaaggtgataacggctaaaccgaataatctacccctgaaacaaataaacaaacaaataaataaataaagagcaaagtagttagataggggactttaagggtaaggacttatgtgttacccctaaaagtgtcacattaaattagatgatgaggtggagatcgaagggaagtgaaaagagaacataacccaactctcatgcaagaggcaaaaagaaagtggaatagtgtgagagtggaccaattcaagaaaatgttaggatttgtgtactaaaagtaacataatatgcatgttacatcttaataaatttatagatgacatagctaaaattagatgtggtaatcacatccgctgtaaaacttgtcgtcttgccctaatgtagcagtaacagggaattactggtggttg

SEQ ID NO: 33651 - DNA, 582 bp, Oryza sativa
atagtcattagctcatgcatatatgcatcattgcaatacataattaatccatcacattcttcaaatctacatgtcaatacatgtatgcatatatgcagtaagctgacagctatgggggtgcccaaggggaagttcagagaggaggtagtaggggaaatcaacattgccgccatgttctgtgtcggcttcttgcttgcctcctcctctactgaacgaatcatggacaagtacatcactcctcaacgccaatcacctgctcaggagaccaagaattaagacgagtccagatcgatcgatcgaaaagcttctgaatttctctctttaattaatctgtgctatagattcactaagtcgtcgtttaattggtctctctccttcagtactgattgattataatatattgtcatgtaattctttattactaacaatgctgatcaagataataataactgtaacttgacaaattaaatggttatgtgcagaacttgttatattttaggattgaggtttttttttcataagacagtaaacgacaacatttaaaaagacgttggatataaaagaaagggctttcatatcgat

SEQ ID NO: 33652 - DNA, 558 bp, Oryza sativa
atggaagaaatagaatgggggacagagagtggatgacaatgtgaggcacgcagtcacactgctactattcagtgcataaacattcacagaatgcatgatgcatgctggctgtaactttacatcatcatgtgcatggataattctgcatgagacagacagtgaagatactctggtaaagcatgagcataagattccttcccatacataggatcatgaattgtgaaactgtatggattgggaaaacaggatagcatgcgctgtctgcacttgaatactgtacaatgcatattcacatccaaagctaaatggagtctatatgtgagaccacttattatcaactatgcgcatatgcttgaaatttcaaataatcgtatatcgcattacaccgctgataatgaatcttgattgaaaaggccgtgcactatcacattcttttgtttactgagaatactatgtgcaagctcataccatgcaatgcactgacacactgatgcaaatggaacatttgtattgggtattcacagttactatgggatacttaaatggaaaagaaaacaa

SEQ ID NO: 33653 - DNA, 680 bp, Oryza sativa
ccacgacatgaagagctatttaaatcaactcggcttggatcgcgccgaattctacaagtcccatatttcctttgtaacctgtgtttcccaccatataagcccatatcaaatggattaggactattacctgtaagggggctgaacagtctaaatctagtcttttgattacttgatgtcgtactacctagatccttgtaccaccgaaccccaataccctctatatccagcctaccaacaaaggcgcgccaagtaggggcacttgatactaatggttctactactatgccattaaacttcgtcgacaacaacgtcaacaccagctccagacaagcactctcagctttgattgtgctggcatggactcaaattggacgaaatcttatgcccggttcacaccaccatgccgagctcaaccgaatctccaatgactggaaacaagaacgcactggctatgaaccataacggctccatgtcgaaaaatccacccgttgaaacacagaacggattatcgactacatccaaactcgtgaaggattatgatgcggacaagtcttgtcccttcgacaaaaccacgggccaacaaatatgacttccgaagatatctggtctttcgggcccatccacagaaccaaaaaacatacccttccagattgctaggtatggatcaatgtccgtgctga

SEQ ID NO: 33654 - DNA, 543 bp, Oryza sativa
ttcctgcagccccctagtcgaacatatgaaaacatagtactactatatatagtctagcattcgcacgactctaatcaagctattataagctatgtatatgaagacatatgaattatattaggtgcatgaattatttttaatcattatagttatggtaacatttctctaaattaaaccaaaagctctacgtattattatgaaaatcgtccaaaaatttagctctttctcgtgcatagtttttttaagtacaagtggccgaacttatagaattaattgttgtatccaatgctaatttaatctagggacttaaaagtacaatacacactaatttttggaatatatcaaaattaggaggtggttttgccttttgttttctgaactttgcaaacctttctactgtcatgtgtcgtatgggaccatggattgcttggaaaaagccttttatttctatagttctattgctagttctattccctatgattttttttgttttctttgctctctcacacatgtgaggcaggcgttgaaaagctccagaaaaac

SEQ ID NO: 33655 - DNA, 5720 bp, Oryza sativa
cctcccagatcaagtggtgtgcctccatctccaagtgaatggcgctcaagttcctctcgttgggaccttgggtgaaattacttggagaatggacacccttaatgtgcagacgggggagatccagtacaatctcacggaacacatatctcaaacgcaagaaatggcaacaatctgctgatgctcacatcaataacatgatgcagcaacaacatgatgaccttcaggcgtactttcgatttcaggggttcaagccttatcaaggaccctgagcgaaagccaaacttggggggagatacctctcccctcactgaggtaacttgtatcacattgcatatttccctttccaattgcatatttgctttccaattgcatcttataaaacttgaaaacaacataaaaatttgcaaaatagaaaataccaaaaagataggataggtttgtgtcatgctaggtaagacaagctagttctctttgttgaaatgatgaatagttgctctgttttatatctctgatgtatgggttcttggtaaatactctctcaaggattaaatataagtagccactaattatccggaaacctgaggtaaatgggctgcacttgctgatctaagtctagattgttgcgagatatgagatagtaaatatgagtagttatgatcctgatactagtttgacttgaattccggatgttttttttttcaaaatgataaattgaaagttcctcatttgatataaattcctaccagagcccaaaaaaaatgtgctatcatgattaaagcatatacattttggttgcttgccattccactgaactttgtcaaactcttgtgacttgtgtagatacttctcaagctctatgatcaagatcatacacccacatatatgcacatgctaaactcctacactgggagcgaagcaatattccattccatttccatatttccactaaaataaattatccatgctttcatgtgatttcttctcctaaaaagaaaaaaaatccttttgaaaaaaaaagagaggagggaaaggcatggttatgaaaaaaaaataaagttatgctccatcaagcatgagcatgatgttgaaaaataaagttgcggggtacttcagacatttcgcagcagttacaaccgtcatacctgcctataaaaggacttcaccttctcacttcactcacacacctcaagcaagagctctctcatctctctcaagtttagtttagtagtatctagctggtggaatagaattagaataggaatcaggagtccggaagtcttcggaagagttcgggtatggctctagcagctttccattcctcttttgtaagctttgtacttttattaaaatactcttctatatacatttatgatattgaaatactttccgagtatatgagtacctactttacattatgttcttgttaaactgaatgtacggctagcttatctgggagatgctttggtgcgggtatagtgtttgcttatgcaattactctatgtcatgacgatgatattagagtagtatctggtagtttagacgtggtgtctagattacgggatatcattatttggggttatatattgcggatgagaggtgagccgctgatggtgacagctcagtacgggtattcctccgcgtctatatataatcctaagttaatttcctgggaagggtattcctccgtatttagccctggttggatggtcatgatgggttgtcgtaaggaactcggtagtcaggggtggcttctcgaagtactaggagggcatcggatagagggtattagctagtatatcagttaactagaatgtatgtatactatgtatattagaagtataggaatagatttcctttctcttttcttttcacctagcttagataaattattatgaggatgagtagaaatgcttgtgtgtcactctacccttggattatcttaaccccttcttagaatatgattatcacaagtatatataaattattagttaagttctctctacgtgatcttcccatgggataaaataaatacgatacccttggaatactctcgggtgaaatgctacaatggtatatccgtgcgcttgtggatgaactctgtaaccataatataccagaagtatttctgcgccattgctgggcattatgtttctagtaatgtcattaagaaataccaacagataacttagccaatctaatctagtaaagcgttttagccgatactggcataaaccctaaagcgaaacttagtcgatacatgtaaatagaactaccaaacaactagattaactaagatatatatgatagataggtgcttacattgacaagatcagagtgtcgaagccctagccctaccgatgcaaacaaccatgacaagtataaacttgttgaaaaagtagaaaagtaaaaggggtggcgatgcgccgaagtttattgatctgtggagatagtttacaatgacccaggtgtatatatttatacccatgggtagatactagtccttcttggacaagaaagaaacttacctaaagataaaaaaggaaaacataaagtccttatggggcactaaacacattttcctaaagataaaaggaaacaaacagactcttcctaattaatagataaattgacatgccgcatcctcctttaactcggtcacttctagataagctttttttaattgattaatttccttaaccgaatatagaaagaatgcgactattggcgacttgataattctcatcggccgattccaaaactctgaagctgatactgactctaggccaataatgacttcggggcttaccaaatttcactgctaacatgactaggccgatgatgtcttcggggcttaccaaatttcactgttaacaagatcaaacaaacgaaacatggtgaatgtgtatcgggggttcagattttactatggatcaggttgacgaggagcagcggacatcccaggaacaacgctcagtaccggacgttatcgtcagcacgcagccctcaagcatagaggaagacaagccgttgtagtagaccaatcagcgatcacgtgaagcgcttaccaagaaccttattggtaccttcttccggggcaggacgtcaagggcgatgggtcgggagatctcctctcctgatcacaggtacacatcggcaagaggaacggagtagactacgagtggtgacataatacagagaaggaggcaaaccctagattggttttcgcgtatattgcgaggaggcggtggctcggtttatgtacaacatataacaggacgcgtgatcaggatgtctacatgatctccaaaacatgtaaccgaaccgaataattcgcgtgtaacttatctggactccacgccgctccatgcatcatattatttggtgcatttccaaaaacaaacaccgaattttacagcaaaaggaagccacgtccacgcaaggatgaggaaccaatttggtggaccattcacacgcagccctgtcatgtgaggcgagcaagggcgcacgtatttctctagttctctccaccacacatacctcaagtggttacgagagcactctcccttttaaggagatatctcttctagaatgaacgtacgtcctcgtgcatgcctttccatgatatgggcttctatgattgaattaaactacaaatgagctaagaccaatctattaattccaacatattctgatcacattcgatttgaccacattaggatattatataattttgttcattccaagtttcaaacttcacagtgaaacgaaattatgatatctatgctttaatttatttcattttaatgtcataaatactactttctgttttaaaatataatatgatgatttctagaatacaaataatgtaccacaatataaacattactgcactgatatccatgactcttatcatttcaatgattctacaaccaatcagatgcttgcaaaggcaattgatcgaagcaattcaaaatttaaaaattgacaactgaatgactttttgacctaacattagtatttgctaaataatgtagaaatttttatattttggaatggagaaagtagttaatttgcccatgtgttactacgaaatcttaaaaaagaaaaacctttggtattcattttaatgcctaaaactaagtactactaaatgaatgggtgaatccctatgatgggcgaagtgaatccatgcaatggtagccagctgaggtcacaaggtggtcatgggaactgcaacggatccgccggtctctcgcagctgcaattgcatatgctttagacacagatcatcacgagcgtgggcgtgccaacgatcagccacgcgctcgtccgccgtctttggcatatgcaaaggcccatttgggatgttaggcttcttagtccaactattcacaagatgccgaagagggctgaatttactcatttgggctaggagggcgcaattgcatgtgcatctatcatcggcagaaacaagaagtcaatatttactccctcaactattggcagaatatgctttgccatcactcaaccataaaaccagatatatcgcctaccccaactatcaaactggttcatttcacctctctatgtggtttgtgttacatgatgcttgcgttgtattacaatatatggttctgatgtggcgttacagtatatggtactgatgtggcattgcaacacgacccaccgatcagcaggtccaaagagataagggaggcaaaatatattttgtttcagccatataagacacagcgcaaagagaggaggtaaatatacatattccaaccatgcaaggcacggcctgaagagatgagggatgcaatgtaaacttattcaaggatgagcacgacgggctgtttgtgccttcgggtcggcatgacatggtatggcccgagtcttattggatcgtacctgggccgtaggcgcaacctgtgggcgagcacggcataacacaacgagttggtcagggcgtgccttggttggcagcccatttggccattttatgggtgcatggatgatggattcttttgtgttggtgcattaataggctatgagaaggcatgcgatagggcaggagctcgatgagagcatcgccagtgcaggacctcgatgaggcttaaggaggtggataaggaataaaggacggagattgacatcatgctcactatctccccccccccccccccaccctcacggataggtcgatacgagggagctcctccacacaccagcaggatgggggcgaaaaggaagaggatgccagcctctgaccttggaggtcgcttgacggcttgccgcgaatgccaggctttgaccttcgagccttcgaggttacttgggggggcctgccacctacagtggcgaagctatatagtgtttgggggaggagtggggggggggggtgcacatgaacccccaaactcctaatttctcacttaaaaagactagaatatatagtattgtacttaaattttctagattctcaatggtagcgtacccaagggagagatgtggataaagaagatgaagacatagccagttatatgtatctcatatcttatttatttatttaataactaggcaaccacgtagacgtcatgtcagctaaaaccacctctaaattagccgatgtaattattttatattggttttaatacttaatgaagatgatatatacaattttatgactaaagattacaaattatattttgccaatagtt

SEQ ID NO: 33656 - DNA, 682 bp, Oryza sativa
attcctgcagcccgtatcagatggtccctttttcttttcttttttcctttttattttctcccgaatcaagtgacatgcaaatccccaaatccccaaatcaaagtaacatcccaaattcacatcacaaaatccacatcacaaatcttaaagttacttatacacacaaatcaaatacatcacaaatcctaaataattatacacaaatcaaatatatcacaaatccataaaataaatcacaaatttatacatctcagtgtatcacaaattaaaaaaaaacaaagccgctaccgcccctcgtcacggccgccgcctgcggccccgccggccgccggcccaccggatgggaaggggaggaggaagaggagaggaggaaggggaggaggtggaggagaggggatgaggaagagaggatagatctgatctgtaggagaggagagggggagagatttgatctgtgtgagttgcgattgtggaggagaggataagtgatagggattatatactacgcgttcaattttagtgccggttagtaataggactaaagatccagatgatctttagtgggactaaagtggtgatctttagtcccggttggtgacaccaaccgggactaacgatcctcggcccgctgacatacatgtgagcggggatgaacctggactaaagatgagctctagtaccg

SEQ ID NO: 33657 - DNA, 645 bp, Oryza sativa
agattaatgagaacttttattttattttactatcttgtgcataaatatttgtagggctaaacataaataatatactctcgtaaattatatctattgcttgaatgcagctcttttctttactttctttgtgatcatttacggtttggcaagcaatagcgatcataacaaccagcatgacgcaaaagttttaaaaagttcgaaatttttagtgatttttattgttgggaattttcaggatgttacactcttcctagactatacctctctttctcctcaatttgtatccctaaacacttgtattcttcagtggattgcaatatatcggtggcatttgtgtgagagatttggtgtgattgtgacagtatccaggtaacataggttcatatagacacacacgttttagtttctctgtagcttcgtagtaaaggctagtagtagctagcagaagtgcagaaaacaaatgtaatttgatcaatttcactctcatccagctgagaaccaaacgtctccgacaaattaaggagacagttaaagtcaaaaggagggaggaaattagggcaaaagttgatgctagtgaatctgacatccacaaagagaaatgattggtttttggatccatctacagtgatctgatcccgttgccat

SEQ ID NO: 33658 - DNA, 776 bp, Oryza sativa
aatttgaaatgtaaacttaattttaagcttgtgaggatgagtgaaaccaagatacgtggagtgaactttctgcttgtttgaagttgttgggttgggcaggtgacaaatcacaatgtaagtgtcgggcgattcctaagtatttgtcctttgcatgcactgaaatgagatcattggtagagtgagctgatgtgactatctggtctcgtggcttaattatcagtaactcaataatagacttacaaatttagtacaaaccaggaagatgaacacaaattgtgtagattgtattgcgtgacttaatttttcatgtttaatgtcctgagcaagttgtgtcagttactcctacctttgctccgctgttagtttttgggtaagtcacactaggtagtagccgttgtttatttttctgatcagtgagcatctgacaacaaaatacagtcaatcattatttctttggttagcttctcctgtgcttttttgttcgagatgtaaacttttatgatcatttaggagctctggacagtaatttcgatattgtgtttaacttcactacatttacatataggcagtacatttacaactagccccctacagcaacgaagagtggtaaaagaattgcaatttgccccttcgtgttacgtaccaccctaaaacccacaaaatctccaaattcctcgcctccctcatcgctattccgtacttcaccaccacccaccgctccctcatcgctaccccgtacttcaccgcctgagtcactaacccaagccatcggggga

SEQ ID NO: 33659 - DNA, 605 bp, Oryza sativa
ttagggacaaatttgggctttaatgaaaagtggggatgtaaggacttttctccttagtcattgaaaaaacaacacgttcaagacaacaaatatgtgatcatatttactgttcaacatgtagcaatataagataggataagaccaatcttagaactacggatttggatggagtatgatccattcccaccaagataatttattataattagactatcccaccaaattattttaggtacacgatgctaccattgaggagcaaacttcaataagaacagggaaaccgcaaatcacaagtcagttgcaggaagttgggtcaaacggaatcgatgacaacaacactaactccagagaggcaaaaataaataaatatattacattgcaatagttaattctcctttattaatactacccccattctagaaaaaacacagttttgcggtttttctatctaacatttgactgttcgtcttatttgaaaaaaaattattggtatgtttattgttattactccatccgtcccataatatatgagattttgactttttcatgcactgtttgaccactcgtcttatttaaaaaaattgtgcaaatatagaaaatgaaaa

SEQ ID NO: 33660 - DNA, 2664 bp, Oryza sativa
ggtggcccatgcttccgggccgccagggcgtggcgctgtggcagcgtggccattgcccattggctgttccccctatggcctggaagcgggagaacactttgccgagagtaggaaagccgtgtccgtgagctactcggatacgagccgcggcagaaggcaacgcggcttcgaagccctaaccccccaaattcgctgtcttgactctgctatcgaaacccgcgcagctttcggattcgagggcgaggcgcgcgcagggaacgcgatcgatcgtagccatggccgccgccggagaggagaaaccgttgccggcggaggaaatccaggggatcaacgacgaggcggagccgcatcccccgaggcgtaagcgtaacgacgacttactccacgacgaggagttccagcgtgtggtgcgcgacatcgtcatcggcccggataacgttcccggcggaggtacgtgattgccccctcctctttgccatgtgagaactatatatcatccggccattccggccggtccgcgtaattggcgaattagtctggctaatcctttgcgaatccggccggtcttgtgcaggacatgcgttgaggattatcagagaccctgctactgcgttcgaagagctcctagagtgctaccgcaaggccggcctgctagaaggtcaagtctggaagcgttgtaacatcttcaaggggttggaggggttggataacttgcaggatgaggtgaagatggaggagacagtgaaagaggaggaggaggaggcgacaggttgccgatgcagatacgcgagccctgatcgtcccgatgagctggcgaagaaacgacgcttggatgggccttgagctggattatggatgcaacctgccatttgagctgagctgtatttagtaacactgtcaatttttacaacagtagagagattcattcagtaactagtgattgttctgcgtgataacgaccgcagttaccatccctagataatactagtatagctagcaatactggtgagccacaatcagcagtaacccatgttccaaattgacccttaatttgtaacttcgttttctgaagactgaggtttagttgaatagttgatgtcatagctggtcttgtggcctatcgaaccttgtgtgtgttttgttttctttaatgaaagcgggagcggtgtggccttctctttggaaaaaaaaagggtcttgtggctcactagctctctagtattctagtagttacaaatttataaatcaggatgatgagcacagcacattgctgcataggtttcatcctatttgaattactttggagtattggggatggttggttcacttgagaacagggatattccaggtaataggctacaatttgtgtctattgcgtgacataaattttcatgttgaattaaatttcgtgccatgagaaaattgtggcagttactcctacttagagcaggtacaatagcaggctattagccagctataaacatattttaatgagataaacgatgagagagaagagcagcgggctacagatttgtagccaaccgcagcacggactccaagacgcaatgtgtgtatgacaggtgggaccatatattaatagtatagtaagctactattgtattaattggctattagctcggctatagatgaattggagctagtaatgggctatactattgaacttgctcttaggctatgttcgcacatagtgattacggaaaacggagcggtctattagcgcgtgattaattaagtattagctattttttttcaaaaatggattaatttgattttttaagcaactttcgtatataaactttttgcaaaaaacatactgtttagcagtttgaaaagcgtgcgcgcggaaaacaagggagaggggttgggaagaggggataccgaacagagccttagctttcttgctagcctttgggtaaatcgagttttaaggccccgtttggcaaagctctagctcccaactccaacttacctggagctggagctatgccaaatggttcatatgctccgtttttaggagtggagttagcagagctactcctgaaaaatgaactacgggggtggtgctgggtttttgctgctccatagctctactacaatctaagactcactaccctctaattttttagtgtatttatgcaaaaatgccattgaactaccccttcctactcctctcctcttgttctctctcctctccatcttcctccctaacctcctcccgacggccacttcatctttcctcccaacctccttctgacggccgcccgcgtcggcgcctacggcggcagcatacggtggcgggggcgacggcgcgtcggcgcacggtcagcagtcgacgcgcggcatcggcatgcggctacgtcgacagtggcagcgtcgtaaggcggcgcgggtcggcgatgggcgtgcggcggcacgtgggagtagcatcggcggcggcagcggagggcaacgcgcgcgtgctgagcagcggcgttggcagcgcgagctgagcggcgtcggcgaggcgatgctaacgaggtgttcgatgaaatgccaacaagggatgtggtggagtggagctaaccaatatagtcaaacacttttgtatccactttagctgctataggagctacttcctccgtttcatattataagactttttag

SEQ ID NO: 33661 - DNA, 1772 bp, Oryza sativa
ttcctgcagcccggcagaaggcaacgcgaaaccctaatccccaaattcgctatctcttggctctgccatcgaaattcgaaacccgcatagctttggagcaagccgaatctgcaaccaatccatcagattggagggcgaggcgcagggaaggcgatcgatcgaccgaagccatgcccaccaccgcagaggatcagaaacagtggaaggtggtggaagtccagcggatcaatgcggagtcccatccccctcctcggcgtgacgataggtgtgacgacctccgcaacgacgaggagttccagcgtgtcatggacaacgtcgtcttcggccggggttatgatcccacaagtacgtgatccgatcctcgatgtccctttcctgcacagtgagatcaagtcttccgatctggctgatcctcggtatgttttgtgcaggagatgacctcaggatcagcactgaccctactgcgatggtcgagctcatagagtactaccacaagatgggtctgatagaaggtaattgaaccctcttctcgtcttcctcttttgtttttcattcccggaggtcaatatggatcctttcttcttgtttctttttgttcgctcaggtgaatgggtggcttagagcttcttggagggggtggatggggtggaattggaggataagacggcgatggatgagaagccagtgatagaggaggatgatccactggtagagaaagggtttttcctcccggttagtaaccccctatacttccggttttgcaatcgggagtagcaatccgggactaaagatactcatctttagtcccgggtgaaataaccgggactaaaaatgtatctttagtcccggttcgtatcaccaaccaggattaaaaatggcgatggcagcgccagtcccggttagcaactgggattaaagatggcgatggcagcgccagtcctggttagccactgttttttttcattattttttcccaaatcgagttggaactacacaaatctcttcccaaatcaagttgctccctttatccccaaatcaaaatcaaagtatcatcacaaacatagattcacatcataaattctcaagaaaaaatacatcaagaagagttggaactgcacaaatctcttcccaaatcaagttgctccctgtatccccaaatcaaaatcaaaaatatcatcacaaacatagattcacatcacaaattctcaagaaaaaatacatcaagaaatacatcatgtttgtacatcacataatgaatcacaacttctaaaaattctcagatccaatgaatcacaacttctaaaaaattctcagatccatcacaaattcttaaaaaaaaaatcaagttgctgccggccggcagccgcgcgccacgctgctgcccgccacccgctagcgcggccacgccgcctccctcccatccgccgccgcccgcccaccctccgcgcggcccgccgtgccagccgccaccgcccggactcggccgcctggagaggatgaggtagggaggggtaggagaggtgaagggggaggaagaaggagagagatgggagacttctgagatggagatctctagagaggccggctgttaatttaatgcaaagaggggagaggaagggagagggggataagatcaatgacgacgactgtggactgatacagaggcgggcggctcggggtgaagtttagtcccggttagtataaacaaccgggatttttagtcccagttatttataccaaccgggactaaagataattggggccctgactcg

SEQ ID NO: 33662 - DNA, 940 bp, Oryza sativa
agagctatttaatagcccggaggatccaaataagaccatagtggtattttataaagtaagcggtgatacctaccgaaattttataccctctccgttccaaaatgattatcatatagtttttttttagttatttctaaatgatcatcatttgtgttcactagatgataccccgcgcgttgcggcgggccattgtgggggcatagacatacttgcatggaagaggagttatcgccacctcctgcgaccaagaagcgcgttgtccccaccaccacctgtgcgcgaccacgccacgctagggtccgccgcactacgccaccgctgctccgctcaggaagtcaggaggagataagacacaccgaatcctaaatccctcattgggctgctttagattgacttgggcctactgggctgcggtatattcacatgggcctcacgtgttgtgtttgaccccgagttttgttcatccaacggtgcagatgcaatctaatctaccgatccaagggctgtaaattagtgatgatgtggatcattgaggattgagctttcgaatcttaattgcacttagtgggagataactttataggaagaagggattcattaagtctatttgttatttgtgcattggagtaaatggacattgatgcatgtatccatgcacacaagtatttataatccacatgcaatatcttgatttgctattggctagaaaatagtggggattgtgcatacatcgagtttgttgctagagtaaatatagtatgagagagttattagcttttattagtcttggtgtatctatgtgatatgtagatcaatttagaatggagtaagtactccatccgtttcgaaatgtttgacgccgttgacttttttaaatatgtttgaccgttcgtcttattcaaaaaatttatgtaattattaattcttttcctatcatttg

SEQ ID NO: 33663 - DNA, 919 bp, Oryza sativa
aagcacttgcgtcaccagccactgtggcctagggccctaggcgtcgtcgttgtggagatctacccatggacaacgacgctacttcgcccgatcgatgcgatggagcacccctccgtggccatcgcgttccgccggtgccgtccagcctcgacacgctccggctcgctgccctccgtcgatgccctcgtgcccgacatgtcctccacctcccgtgttagttcctcaagatgctgtcgttgaagaagatgcgaaaggtgctcgatgagggaagaggaacgttgtgagggttctttgtaaaatgtgagtggaggaggcgggcgtttatttggaaaagtgctacgcttgtgatttggccccaggatcttgatcgaatggctatgaactctcgtgtgcattagtgcagctacatatctgtgtataggatacattatatatatatatatatatatatatatatatatatatatatatatgggagcgtattctatgcacacaggccctcgcgtgtacataccgtgtacaccaactaaaaattatcacaaaaaattttaggaaaattcatacatgtactttcaatagtattacatctacgtgcaaagtcgcatcttcaaattcattctacatagagaataacaaaaaaaagataaaattttgacaaaattgcaaccttaaaactgtcagattttttgtttttttgttacggctaaaatataatgaatttgacgttaagattttaaccctatgtgtaatacaattgaaagtatgtgtatgattttttctagattttttggtgacattttttagttggtgtgcacgtgtgtacacgtgagggcttgtgtgaatatatatatatatatatatatatatatatatatatatatatatatatatatatataacttttcagcctcagattacc

SEQ ID NO: 33664 - DNA, 506 bp, Oryza sativa
gctcgctgccccctacgtccttgccgactgggccgccaggagagtccccgccctcgccgccgcccgcggccgcccggagtcgccgcccgtctcccactccgccctcgagcccgcctggtgcgccgccggaaggtgagtacagaggagggaggagagctctagggttttggcacggtgagaagagaggcaaaaaaaagggggggaagggatggagtctggagacgactatgccgatcgggtgggatgagtctcctctgataacgtcattaggactttgtcactgacacgtgggacccacaaaggttgggcccacacgtcagtgtctcacgtctctctgactggaaaaatcggatgcccatgtcagcacgatgttatcaagcaagcatgcatgtaaaactactttaaactattttttctcttaaattatttatccaaattacgatctaattacaccattaaatccgttacaattaaatctttaaaataaaaccacacattaatatatt

SEQ ID NO: 33665 - DNA, 2800 bp, Oryza sativa
taacaatcttacaatagtaagtgattctgatactcttgcatgtctactattaatgtgttataattaaatctcttacttattacaatacggtaaaaaatcttcacaaattttagccatcttcacctccactcccaatggaagcttggtgcacaaagctataataattagttgatcataggtgttgagttgaagttgacattggtttctggatagggaggccgacaaaaagtggaggagataaggacgcaatggtgttggacataggccacagctagggttgacaacccaaatatggggttggtgacaaccatgagaaataggaacgatgaagccagcaccaatatggaggagtgtgcggagatgagccatgtgggtggtgacatgcctgatgggcaggtggatcaatggggcaccgagcaagatggagtgatcccacaaggagactcttaggcagcggcacacggagagctcagggctgtgttggtgcttcacaaccattgcctcttcatcagagccgcatcactatatccagttggccaaagacacattgtgtttccatgaatgtggtgagccccagggaccataatagatgggccgtccagcaaaatggcctgtagatttgctccggaggagggcagccgtgatgtaggggcccattagtggtgatgaggtgcgcgtggtggagctaggtattggtgcgcaaaagaaaccgagacttgaaattgccatatttgttagaatagttggggtacgcgtaggagcattgggtaaggggtggcaaaataaaccgagactggaccccaaaaataccaaatgtgatcatcagttcctagcacggtcttaggtttgagaagatagatcccttgttcggtctttttgtttactacaccgggtgtctgaactaccaacattatacttatctcctctttattttgttccttatctagtcataccattctcttcgatctctcattcgccagcgccgtttgtagtctccgggtctttcatccagccgcaccctatctgctatatatatagaagacccctcttctccctcgttatcttccatctcccatctcctcccgcctcagattgccgttgcttgttcaccaaacagcactcccctagctctctgtatggctggcccatggccgccgcctgcctggcgcttactctaggttggtccgtccattcctatcacatgtgctccgggttccacgcatatcgtccagcgtggtcactttcactatggccgaagaaggagaatgaaagatatcaattttttttatcaagtttgattgtcattttcgaaggattgaattacccggatcaatatctcagtcatgactgaatgcccaccactagcgctgcgtgggggtttgggggcgtgccatatagtagtcatactaataagatagtaactataatcaaaatttgacatttatagcccgtacatatgggttattgtctaatgatccataaaagccaagctttcaaaggtacaagcccttacaaaagtttaaaagaaactggtggtggtgatggtgtgatcgactttatgacaagcaatgtcgaaggaaattaaaccaaagcaaatgatacatgtgtagacatgcatggagggcgcatccacaccaagcactacgcaatcacgcatggattgatcccttcaggtgttcttggaggaatccatggaacgaagctcccggatacgtttccgtatccccaggcggtacttcacgatagccatctggacatcctggaggatgtccacggtcaggtcatccacgttgttgcgacggcctgacataaggtcgcagacgatgagcttgatctccaattcacggttcttgcgtcgcagttcctctagcctcgctgttgcggcggcgatctgctgctcgaggatggtcttctcgtcgtccagcatcgttgcctgcacaaaacaagtaatgggatcgatcgacctctaactacctctatgtttggtgtatttgatggagtgatgttgtgagaagaaaaagcaactaaggcgctacttttatagccatatctgggtgacacaaagaaggaagttattaagtgcaaagatttgatatcatatccaaattaaatgcaaataaaagtataatgagtatatacttaaaatactacgtacacccgttgttttttaatttttatcaattttaactggcattgtattacattcacaagtattaagaggtcaactttttcgggctgtaaatatttgacagtgataacgatatttgagagggagcacaaatcgggtgtacggcgctgtttcacggcttatatgaaaatgtgcacttctagataaaaaaatgttgcaaatgattaaaatggtgaaacatagttgcataaagattaaacatttcactcatgcactagaaacatcaggattcaactgttgaaacatcaacagatgcacaagtatcggagtaaaaaaaatgaaagaccataagaatctctactaaaacattccgatcaatcacaaagaaacatataaaacatgtgagctgaaacatcgaaaaatcacaaaatgtaccaatgtagatctctccttggtcgcctgatcagagcttctattgatgaacatgtcagctatgatgtggagacccggtgctccataccttggatgaccataccttccttgtcgttggagtcaacggcaatgaccatctccttctctgtcgcttctttgacatggtggtgccgtcccctcctcctctctgctggtggcctcccagatgtcatggcttccttggcaaatcattgcgcctca

SEQ ID NO: 33666 - DNA, 1528 bp, Oryza sativa
attacccagtccaatatcttagcctagaccaaatgcccacccctagtgctgggtggggtttgggggcatgccgtatagtagtcaaactaaaaacatgaaaagtatgagccaaaatttaacatttatagcatgtatatatgagttattgactaatgatccataaaagctgagctttcaaatgtacatgcctttacaaaactttaaaagaaactgatggtggtgacagtgtgatcgactcaactcaaactaggactgatgggaagcaatgctgcagcaaattaaacgaaagcaaatgatacatgtgcggatatgcaagcagggtgcatccccacaaagcagtacgcaattacacatgcatcgatccccttaggtggactttggagcattccttggaacgcatctcctggatacgttcccagacctcctggatgcgcttcttgatggccttctgtaggtcgtcaacaaaatctagggacaggtcgtccaggttcttgcgacggccggacatgaggtcccagatgacgagcttgatttccatctcacgggtggtgcgctgcagcttctccatcttcaccttggcggcagcgatcttcttctcgaggatggccttctcgtcgaccggcatcgttgcctacacaaagctagtaataggatcaatcaatctctggctagctctatgcttggtgtactagatgcggtgatgctgtgagaaaagaaagcaactgaagtgctccttttataaccacatttggataacgaagaaggaagttattaagtgcaaagatatgatatcatatccaaatcaattgcaaataaagtataatgaatatatacttaaaatactatatactctcgttgttttgtaatatttgtcaatttggactggcatgatattactttcgcaagtatcaaaaaggatcaactctttctagtctgaagtgcctattgtgctcaggagccacaacttcaatctaaggatgatcaaaaggagaagttgatggtatccgccttcagagggggtgagaaacgtgccaaggaaagagaagatgacccgaagaaggccactgaacttgccggaccaaaattctttgcaactgatgactgcccaaaaaagttccaacttggcaaagcatttttgctggatcatgcacttgatgatggtccatgggagatgagaagttacacaaagggtaaatggacgccagcaagaaaggcctaactaatttaacaattagatcaccgcctgacttcttcaccggcgaaggtttcttctggctagatttcgctgatctgcacgccatctatcatcacgaaaagatggacataaactttctcagtgcattgtgcctgtgagtatgaatgcatatttattacacaaataaattgataaatcatgtgattaatatcaacaaactgattttataggatgcaatacatggatgctgagaagacaaagcaatctatcggatatctagatccaacaaggatctgtcaaacatagcataccatgacgctatcagggctgcag

SEQ ID NO: 33667 - DNA, 623 bp, Oryza sativa
tggttataaaaatttacaataaatccgcagggggccaatgtccaaaacatcacttttttttactcctagttgactaggagctagctacccacatatacacaggacatgcatatgagctagccacaaataagctgcatacgtacgttttaatataagtaataaaacaatatgcctggtcaagtagtcaacttatagtcgtgcatatatagtacctttcttcttgtagtctacacatcggcaagaccatatagtttttttttttctgaacttgatgtgatgggccacatattaaccctttttttttgcgggaatattaatcctttttattattaatattttttgtgcgcctgagtcactgtcaatgagtgagtgtgcatgatctcgtcagtatcttgttcatgtggtcatttttctggaatctgcgatacaacataaggtcactgtcttaatggatgagctcaaactagctaagctctcactacacgattaatttacataaattaaattgcatgtgtccggttgattgaagcaaattgttttagatgacattaacgcaagagtatatttattacgtactgatcatgacatgcatgtatgattttgacttacatatactaatctgg

SEQ ID NO: 33668 - DNA, 541 bp, Oryza sativa
ttttagatcactgaaaacacgtatataaaagttttattaacaaataatttattgtttgcaaatataccgtttggcttatttggagccgaaagctgagaaaaaaaaaatagtgaattccaaaagcggttcctcaattgtagacgtcagagggaggcgcgtgtcactgacgcgtgggccccacagcaaccacgtcagggcagccgcctcctcctccctcatcggtctcctctcccccgttcctcctctccacgactccacccctcccgactccgcctccgccgccgcttccgatccgcggcggcagccggagctcggagagagacaggccacccgccgcccccccctcctcgccttccctgtgcggcctcgttcgccggtgcgacgcgccatcccggtccgcatcgggctcaaaggtatattactccttcttctccctcttagatgagccaatccgggcttaggtttgatccccttcccctccaattaaccttaacgagacaggttcatggatttatttgagtagcagcagcaccagcatggg

SEQ ID NO: 33669 - DNA, 749 bp, Oryza sativa
aatttaaaaggtgcttatcacatataaaaatgatctgagaggactgtgaacacaaacaacattgaacttaactgaaaatgaacgttcttgccaagagattttactacgaacatatatcataatctgtgactcgtgtcaagcatctcttaatcagaagagaaggaatcagttaccaacaaattacttgggatatattgtctgaaaaactaaaatgtaaattgtgggtaagtgatgccttcattatttcaaaacagcctatagccagcattgaagcggtgggttagtggccggtaccccatggccatctccagcactgtgctgccgcagcatgataccttctgctgtaactcaatataatgtgtagtgagcagtgatacttttgaacagatcgttttcagtttttgacgtaattcattttgcatattgttatctttcatcttgaaaacttacttgaagggttgacatatacacagcattacgtaatttttaatattccctcagaaattaataggtgtaattgagtgtgaaaaagaattaaggtcgaaaaataggagggtggacatgatatcctgctcaaatacctttgaaagaagagataatagttactagggaagttacttagacatgcaagggagagtgtgatgcaataaaccagagcaaacaaggaaaaccatcgacaaattcactcacgagaaaaaatatatacctcacgaaaaggtgagtaaactataaatcacttcactgcaggg

SEQ ID NO: 33670 - DNA, 2478 bp, Oryza sativa
cggtttcaccctggcgtcgtttaagagatctcgcttttgttgcatgtccaacgttcgatctttcagtcttcaacgacgttcttaaatgttgccattcggtctgctcatggtaggagttgatattcttctctctctctctcgccctctccttcggcaacccttctacgtggtgatagttgagagcctgtgggggatcttttggttggaattggctttggcaggtcgtttgtgactccttcgtagggctagcagcgtccggtcacatatagcagaggcccgactcgatgctagttccttttttggggagtgtgtgcaggtgctgttaacatgtgttggtgttgctttggtgttcttttttcttttccttattgttgtctcttaaggtggtaatcttataaatttttttcactatattaatatgaaacttgcaccgtccgatgcctttaaaaaagagactgtctatccatttgtcgggtgatttctagtaaaaaatcacccagattttttctacccttagatttatatccaacggactacaaaagaaaataataaatacatatttacttacacaatatttttatcaaaattacagtgcacttacatatcatatcaactgaatttacaaatgtaattttagttatataggactgtaattttatattttaaataaaataactagcgatttcgctagaaatctgtcgtgtgatttttttcccggtgatttcacggatttgctgaccgcacgatggtggaggctgcatgcgtggtcagccggtcgggatgatcttgttcgcactgtgctcgtccctttgggcatgatgagtggagacgatcgccggacgggacgaccttctctgcacttgaatcttgtgcgtaaatctgaaccaagccaaagctaggatcccacactagattacaccaccatgcggccatgcctaacaaatctaccatcgctagaaacctattctattcaattttttttatatatttgctgataaatttttttctagaaatttgacagatgtaattacaataaaatcatagtgtaattacactgcaacttgtatataattacactgtaacttatatgtaactaaaactatatttgtaaattcagttgatatgatatgtaagtgcactgtaattttgataaaactaaagtgtaagtaaatatgtatttgttattttctttaaaatataaaattacagtcctatataactaaaattacatttgtaaattcagttgatttgacatgtaagtgcactgtaatttttataaaaataaagtgtaagtaaatatgtatttgttattttctttaaaatataaaattacagtcctatataactaaaattacatttgtaaattcagttgatatgacatataagtatttaaaatataaaattacagtcctatataactaaaattacatatgtaaatttagttgatatgatatgtaagtgcactataattttgataaaaatattgaataagtaaatttgtattagttattttattttgtagtccgttggatataaatctaagtgtaaaaaaaatctgggtgatttcttgttaaaaatcacccgacaaatgtgtaggcaatcccaataactaatacatatttacttacacaatatttttatcaaaattacagtgtaattaaatatcatatcaactgaatttataaatataattttagttatatagaactgtaattttatattttaaagaaaataaataatacatacttacttgcataacatttgtatcaaaattacagtgcacttacctatcatatcaactaaatttataaatataattttagttatataggactgtaattttataactaaacatcatgcgaattaaacgaagagaagaaagaaacaagaataaacctggtggtgaagagaacgcggtggccgccggcggagagtcgtcgtcgtcctcggcggagacagggacagagaacgcagcgtcatagccatgccgatttaccgatcgatcgatggaacatggaagggaccgtacgtacatctatacgttgcgtgtataactaaaattcgagtgatttccagaaaaaaatctgtcgcgtgatgtttagcaaaatcgaaaaaaaaaatattggcggctcgctcaaccctggcccgtttctccatcattggggtcaacctgggctgcaggtcttcggaggttgggcctcgttacgaactccatccaaccactgtggcaggtgggcttctccgccaccgcccctctcgagcgtcacatgggccgcctctccgtcatcctccacacgcgcggcctgcgccgttcaccgaatgtgccgagaccccgtactgaaattcctgcgcgccgccaacccccttcgttcacgacgagcagaacgagacaacgagtcagcatcgacggtacgaacatcgcacgcacagagacccaatcggtgctatactcctatagtacaatttgctccctctcaa

SEQ ID NO: 33671 - DNA, 1168 bp, Oryza sativa
aacagatgattcttgatgtgtcattaaatccaaattcatcttccaattacttcaaaattatgttctggatgatgttcgttggcaatctcatcagaaggtactgtcaaccccatcatattatatttgcaatttgagtgtcaaactaatttacttgcattcactttacttcagaagtttggtagatctgcatttcagatcactgctatattcaaatcacctactcacaagaaaaagtatttacaatggtgatatctatatgatgcatggtgcatggatggtttccttttcctttcactgcagcagacaataattgtccattgacaagcaatctattgataatagaccatagtaatctttgttgattctggactactctttccatgaattattagtgttgcttgtgctgggaaaatactgtctcaattctaaagcttagagttttgcatatgaagcatcatttggattattagaattttgcatatggattctttaagcaggatgctttatcgatgcagaacttgaatctgataacccttgctttttatatgacaaatgaatactattcctaccttagatcatatgagcaggtatgttgacttccatttagtgttggccttgcatcaaccccaagatgtagcttgtaatattcaatgaaccacccgagtatttgccttctcaagtttcagcaaagaaccggctgaagcaaaagatttgaagtcgttttgtgtctggcaccgacagttacactgccttccttttttttctaagggaaaaattttaacagaatactagctaacaaaagatccacaagaagataattgaatttatttcactgaaaatgaaaaggcaatattcattattcatgtcaaaacatttttgttctgttttccttaaaaaaaatgggtacttaatttgagcaaccattacaccgagagcgtgtcaggtagtaagacacacacaatttaaccattgcagaagctggagaacagcagaaccgaatcaacttatagccttttatcatgtacagagggacgttctacaataatacatgttagatatttagtctcagatctggttgtgacacatttgacttactgtgtatgtacggcttaatcaaagtacttagggaggctattagatgctctgtccatcggataatataagggat

SEQ ID NO: 33672 - DNA, 641 bp, Oryza sativa
attggactttggttaccctgaactaatccatttgtcctaaaataagttcattaccaatacaaaccaaaacaaaaattagaatactcctactttatcaaatattatgggattatttttcaattttatttatttccaatgcaattattcctaattgcataaactttggtgtaataattactcaaaatgcacctattttggaacaaatgggagggaaatatgaactaattgtggaataaagggagtatataaaattaataaaaaaagatttgggattgtcataggaaacttaacagggttagttttctaacagtgaaagtacatgtaccaacctcttcataaaaaaaagacagccatttcttttccatgacatgagagtatagatggccatctgggctgcccagcatggcatggcccaggcccggtcatgcctgggctgaggcttgtcgggccggcacggctcgaccgacacactaggccgtgtcgtgccaccccaccggcggcatacacggcccaatactactcgggccgtgacgggccggcccgaagcacgatggtccatcgtgcttcctcagagaaaaagtctatttttggcccctcaactctgtggggtgtgtttaaatggctggaaaataagtctattt

SEQ ID NO: 33673 - DNA, 700 bp, Oryza sativa
ctcgctctcgtatgcatttggtaaacttgtctggttggcctttgttgattgattttattgattttggaaatggactgcaatcttccgagttttacacgcggaagtttgtgcagagtactgaatagtgacgtggttgctgcaaataagtactataagcaaggcatacaagttccttaacaaatataatgatatattttagccattctgatcattttgaagaaggtgatggtaaactaaatctcaagttctgattgtgcatttggtaatcagggcaagtactataagcccctatttattgcccataaatttgccacataggattagatgatgagttggaggagagaagttaggagagagagaatgagccatccctcatgcaaggggcaacctccacacaatctccaagaaaaatgtaagatgacgtgagagtaaactaatattggggtttgtgtactagatgtgacatgttgtatttgttacctcttaagtaatgagaagatgacatggtttaaattagatgtggcactcacctccactataaaacttgccctcaggaagctagttgtaatgtcatagggattgctggtatgtaaagagtacttttgatatctagaattacgtagctcagtactgttatgatttttttctgcttacgttggatttatagctgtttatacataaaggtagttctacagttcta

SEQ ID NO: 33674 - DNA, 634 bp, Oryza sativa
ttcagctttgtggttggtagaattttgcttggcattacgaggtttaagaacagtataggcatatttttgtgtatgtaatagcgatatggcacatgtagaaacactgaatcggagaaagcaggcattgtatgcattgaactctcaggtgcttcttggagtcaatccggttgattagtagtgctttgtggttgtacagattttgtacatgtttggtaggattttgtacctctgtttgatggagatggcatgggcataagttgtatttattgctaatatttgttgtttcttactggtccaaatccttctgataccatgccctcgtttttgtgctatcctcatcgttccaagatggtacaggcaattccttgggatcagtcatataactttattatgatattgtctgctacaaatgggttatcacagattattttaatgaccactcctaaatcctttgggagttttcattgcttttaagaaaattgttgtatttattttgtgatgagtagctgatgtttttgctaacacatttcctgaactccataggtatgaaatgaaacagcatcagaccccaataaacaagggttataatacattgtaaaattttgtaattcaaatagatctgctactgaacatc

SEQ ID NO: 33675 - DNA, 602 bp, Oryza sativa
cccctatattgctccaattgattaaacttctgcaggcctttcagtgtcctggccattagctttcaagtgtgtgaagcaaagtgacatggttcatgtttatatgatttatatatgtgggctcgatgggccccgagagttcagaattgccctatggcccatgaagttctgggctgctcatcgagtaacgaacaatggtaagtggatgcggaggtaggttggcacacacctcggaccggatcactctgagcaacatcccgagcatccttttaacttactaggcagaagggagagagatatatggagcaatattacaccttgttacttttcagcctggccagctgtgggtatcgtgtgggtaaagctgggtagacgctgcagagtcgttgagtattcgaatacaccgtgctcccggttaatggagatgtgtctatgggtgattccagattatgggcacaagttaaacaaaatggctattaattaatatggttaacttatttattacttgatgttctattcaagttatttataagtaacatatatatttttatgctcattattattgtttaaattaaatgttcaatagtgttgtttatatcaaatgt

SEQ ID NO: 33676 - DNA, 697 bp, Oryza sativa
tgcagcccacattgtacaatacgtcaatacctcacagttgcaagaaaaaaatgtaaaaagtgtaaattagggcaggtgtaaattgaaagaacgtggtaattgtgattaaatttaacctacccattaagatgtggacccttcttgtgtcacaaaaaacatggaccgccgttgccgaatttggatataaaacatatgaaatgattaactggccattgcttttttaacttttggccaaccttaaccaaatttcatcttattcttgaaatatccacccctggaacttttccaacctggatagatttcaaggtggttaccggaacttatttgctcagaaatttaacttcggtgtgcaaagaggcagtgctaattatttggcatatacaatagtagcacaacaaattgcttctacttaaaaaaaacagtaatggaaattcaccacagtccacagtaaccaaggacattatgtttgtaaacaaaacttgaagcgaaactccggaaatttggcgaggtttgtctcaccaaacaaacaccgattaccggtgatttgaacccaggagtcacagattcgatcggacatagtttttttttttcagcattttaaactatcaaacacgaccaatcatgctgcaaaaatgacagcatttcgcaaggctatcgacaggggaacagattagcgcatgatcgagcacgcaaagct

SEQ ID NO: 33677 - DNA, 673 bp, Oryza sativa
agacatttattttcaggactatattgaccattcctctctccaatttataccgcatttgaggcctaaaggacctcaatttccaggactttacactgtccactcctttctctagtatataccacatttgatgcgtaaaggacctccacacaagcggacatatacgcatctaaccaaatctattgtgtttctaagccgccacatgtcaactctcgtaaattagaaaaatcttaaaaattctgagaaacaaaagcatagccgccacatgtcaactctcgtaaattagaaaaatcttaaaaattctgacaaacaaaagcatagcatatctagtcatttattttcacttcaaccgatgggtccactattttagtccacactactatgggactaatcttgaaaataaatcagcatatcattacaacatatcatttttactcgcatttgagaaagttcaatgtttggtctcttatagtattagcacaagtatgaattgccgttgagccgcttcttattatcaaagtttcactttattactttcaactagttaacttttatgcttattgtactttggaccaccttaattctctattttctagcaatgtttagccttacttttaggtcaaaactaatttaattataaaacttttatgtgttcgtagtgatttaaaaatcaatg

SEQ ID NO: 33678 - DNA, 554 bp, Oryza sativa
agctcggtacccgccatgaggacaaaggctgcctctatgcatggtgatcctcttcttctgtcatgctcttctaatctttcagagaagctgttgatgctattttatgttgcttattaatttggatgtcatctaaactaggttatattctctagattaggatgtgatctaaggtatttttcaaagtagaaattaggacatgtttgttcatcttggatgcactgttcaacatttctcaaatcatcagatagttcatctagtttcttcagacaagctgatttctgcatcatgtgagcattgaacacactcctaaagtcctactagattcagagatggatgagctgaagtagttagtggtcattttcatgtccaagaaaaccaaagatcatgtgagattttgccctgatcaagagggcttcttcaccatttgacaccttttttcctctgtttacctgtgatctctttccctttttgttgcagcctgttcaccctctgctgctgcttctgctgctacgagacctgcgagtgctgcctcgaatgcctctgctgctgctgat

SEQ ID NO: 33679 - DNA, 673 bp, Oryza sativa
tcctgcagcccgatcagtggagattcaatattactttaattactcaattgttttactgttttgctcaataaaatgttttacaactgcctttatgcaaatagccacaaacccctccttgtatccccttgcacgtctgcatcgttggtgtggcttgctcagtacggtggttgtactcagtcttgctattattcccccttttcagaagtgtagtgcttctgagctgaagacgaagttagaagaccaaggctcagaccccagttgagttttgcctgtggagtgaagctgaagctgaagccccgctaggatcgcctttttccgctgctgccgttctctttcggtgtgaggactaagtgcctcttctgtaagtatttacgtttggaactgtatattacttgtcgttttgtgtgccctggctggtcctggatagggatttaataaacaaaatagtctggaaatttgggctaaatttctgggcgtgacagataagggtgcggtcatatggataagaccactcgatcggctcggctcggcttggtataagtgctagttttacaaaaaccgacacctataatttattatagggttgggttttaacaaaatcgacaccggtttgtttaaaaaacggacacctataggtgtcagtttttctttaaaaccggcacctataattgat

SEQ ID NO: 33680 - DNA, 599 bp, Oryza sativa
acttgatggctggtttgggctgtgaaccctgagcgtttcgtgcgacgagatatactaaaccggccgggcggcccggtgcgcgcgcgcgtgctgctcgatcgatcacgtcgcacttgttggtcctcgatcgtgatgcgttacaggtgcaaaagtgtacgtggttttgactggttttccacgggggaaaaagagcaggcgcgcgtcgagcggtggctggccgggtttgcgcgtggccgccgctgccctcgtcgcggccggagggtttcagggacgacgacggccgcgtgtatatgccatatagatatattatcttgatcatcgagagagattgcgagtcggggatagcaccgacaggcgagtcttggagtgcacacactgtgtgtacacatactcctacaggcgatggtgaagcacatgtttcatccaatctatctcgtagaatggcgtgtattcacgtgatacctgtggtcgccgtatgtacggtaggtcccctctgcgtacgatcgaacctgcccgttgggccccggccgcgccttctaacgacgagtttctgacacagccgtgttgaactggaaccacacagccgcggcgaactgggc

SEQ ID NO: 33681 - DNA, 527 bp, Oryza sativa
aaaatttttataaatgggttcttagcaatttaaaaaattaatttcgaaaaataaagtaaacaacttaagtgcgattataaatttgaatccaatttaagctttaaaaattaaattttatgtgcgatttacaagctgaataaattttgggtgcagtagctaatttaaacgggttcgacgaccgcccttctagagtgaaaagaatgtacggagcagtaaaagtttctgggcactgtagtcgtgcctctgaccaaacggcccttctagaagccgtacaaagaccaacaaaatccgcgcaagacgaggcccccaaccgcagtcccaggtagacctgacgaaatccacccgatttcccccaatttcctccccttttctattgcaaacatcacaaacccctgtactacttcgcatcgcaccagacgatgattccggtccacgcgacacagcgccctcaatggcctcaaaaccgtaacaccaccactaaaaaatccaagtaaaacgcggccattcaaaaattttctcaaccacac

SEQ ID NO: 33682 - DNA, 573 bp, Oryza sativa
agggtgatcctgctgattaccaagcaatgctagctgaaaggtaacctttttaattgataataatgtgatatattttatgtttaccctcattgtaaattctgttatacaacctactactcgtttgcaggggacctccaaaaaaaaggcaaaagtctagtaatgcacatgctgaaactagcattgtacatgttcctagtgcatcttctgctcaaaatgcaatattgtctgcaacaatgacatatccaccaagcaaaagttgtcaaaccgggaaaaaaggacaggacctcagtaatacttcatcagggtcagttaggtatattagttccatctaccattgcaataatgacttcctcatatgcttacattttcctttaccatttatgtcaatgtcagatcaaggtgcagtgacaggatccaaccaacctgaacctttgagtgtgttgatgccactagcagcgcctggagagaactctaaggccaaggctaagacagaccaaaactaaagccaagatagctccttaggaagaatacaaaggatagcgctgctacttacgccttggcacaagtcaaaca

SEQ ID NO: 33683 - DNA, 663 bp, Oryza sativa
ttcctgcagcccgtgccaatttctcataatcttcataaattccggccggcagcgcccagtggaaaagaaaaaaaaaacaatccagtccatttccttgtactatggcccgtttggcaattgctagacccaagtgccttcttgaacgccacagctagcctacacagacgcaaagaagaatatacacaaatacatagaaacaaattacagcttaaagctgttaaactgaaaaccactaaggagaccataaattttattatgagaaattttaccgtccttaaaaaaatatttgaggtacctaaattctacttaaaatttttggtaatacctagtatctaaaggtactaaattttacactagacaatacaatatggtacctctggtatcttctcaagaatgataaaattactcttttattataggtaccgtaaaattttgcaactcatgttgttagtactcctggttaacttcaacgtagaacaacaatcacgtaaatactagagattaactatataatcttaaagatgaaaaagccttaggaataacaagtttatatgttatatagttccaatagaaattcggcagaatatttgaacaatttaaacatgaacataaatgttattaacaaagacaatatagttacatcgcgggaatggaaaacatagg

SEQ ID NO: 33684 - DNA, 644 bp, Oryza sativa
acatcgctggagatcgaggaaatgggaagccaaggaaagctagaaccggatgcgaaatgggattatgggagtacgaggcacaggtcaggtggattcaaggctgggaatttaaagagtttgagatttgaaagctgaaagtgatttggtactaggtggacgcatttaatgaaggagtaaaagcctatcgtatgtggcaatgtatagcaataccttgccatatgacacctgatagaataaatttcttagctaagagcacaaatttatcagactgtcttctcttcttttcttttttttttttggcaaaagtatacagtacagtaattctgtgaagttacacacactcgaagattttgctagaaattaataagaatgatgcaagcattgatttcatcccgctgctaaaattaatatctatctttatgcagtactgtagagatcatagcacgaactcaacaaaataagtccactattcataaatctcatttcagacttccacttcaaactttgtttgtttgtatcaatgatatctaaccataggcttcctgaacatactgtcaaatatcaaattggaccaaacaccatctgaatgtttcatcatatgaaaatgaagtaacccaacaagtccaaagcaaccaaaaacatgg

SEQ ID NO: 33685 - DNA, 720 bp, Oryza sativa
ttcctgcagcccattgcagtcataatgtaattataatgtaattgcactttagttatactgtagttacatataaaagtttctgcctcaaaaaatttgctgcatttatttttacatactcccaatttcagagcttgtaaaagtacatttcttaaaagaaaaattgtgcaaaagtacaatcacgtgtcccgtatatatgaaagtaaccattgtttgtaccaaagaaaagacatctcaactttcaggaaattttataggtggggtggaccgtggacgaactaatcaagttctttacttgagagtaactagttcataactgacctgtgtgccaggttgagctggcccatcttgtagggtgtcaggagatgagtgtcctccatgtgtgtttgtatgcttttgacagcccgatctatataacgcacctctgttcctttcgaggctatttcggctcgcttctacatcttctagcttggcatcttgagtacttatagtggaagaagaggtgtagttaattagtcatatcaaattacgaatcgtatatatgcatgttaatggctatgtgcttttctggtagcactcaacacgtactgcttaacaaccggagcgcgcgagccgcgaggattcgtattgatccggcagagttgacttgggaatgagaggattcgtgttgatctggctgtggacttcggagttgggaggggtttgcacgctatatacatcggt

SEQ ID NO: 33686 - DNA, 627 bp, Oryza sativa
ttctcattgattaatgaaatactctgttatctaaaagaaaaggaaaggtgatagtacgagacgttgaaaatggaggatgggtaagttctcatgacttaggagggtgtgcatgctcaaagcatcaaagatgagtaagagagagactaaaaatgcataattggcaaaaggggcaaagaagggcatgttcaatttgatgcatttttaaccataccatttttttggtaaagttgttaaaattttggctacgtttagtttgttgccaaattttagtaagtacatataaaatcttgccaaaatttgataaccttaccaaaattttagcaactttaccaagttttagcaatgctaaaaatgatagcaaagtgaacaagcccgaagtcatcggaggatatgaggatgctactaacgatgtcgaaggatgtaatagatatgaaaatggttaagggatgacttgtgacactcgagatattcttatcatttaagatattaatgtttatagtcaattcacggtataaaaatttctttcttttattattataagataatttacggtcgttataataaatatggagagatatgacttcttttaatatttttttatgaataataaataagtttcatgtgtat

SEQ ID NO: 33687 - DNA, 567 bp, Oryza sativa
gctcaaaattcgaatattttgatccaggcagattatgaatgtggcaagacaagcgaatgaacagtctatctgaaattccaattcgagagcattctcccgacagaagcaagtggcgaggagagacaccacttcttcgacggcgagcagcagcaggacaggacgaggaacacgcggatgcagccgtagaagcgcgttcgcagcgccgtgttctcccccggcgcggcgtcggagtcgttcctccccgccgccaccctccttcgcgcgacggaggcgacgacgagcgcggcagacgcggcacccgtcagttgccccgcggcgcggcgtccgcacgagcaccggcatcgccgcttcaccctccgctcgcgagattcacaccagccaccatgtgattcaacatgtgacccaggggtagaacggtccaagaaaatatgtaattgaggaaaaataatttcgaaatgcaagaaatcacaaaaatagcattgcagtgaacacccatggtttgagagtggtatttcagtgaagcctattttaatgatggtattctagcgaagcaattcgggctgcagg

SEQ ID NO: 33688 - DNA, 586 bp, Oryza sativa
aaagctggcagtgagaaagcagatgatctttacggctttgcgcgtactgtggataggttggcattggacatgccatgtttcaacttcttggtggacctttgcccgtggaactaacttgatgcccttgtgtagtgttgtgcaactataaagggacaaaataatggcgatggaacttatatgccttgagtgagttcttaggcccttagctgatgtgaagtagctccatttttttaaaaaaaatgcagggctggcccatttccgccattaaaaatataaatggagggtcggccttatgatgacaccaactatgtctatggcacgcctagtttgtgtcaccaagtccctattaaatccttcaggcggtatggccataagaaacaatctagggttctactgtttttttctgttctggctcgggtattctatctagccgagccattcattcctttctatgaaagaaagataaggggacaaaacaaaaaaaacaaataaagaaacaaacgtattcaatacgcaaaagaaaagagagagaggaaagcaaaaggagagagagggattcgaaccctcgatagttcctagaactata

SEQ ID NO: 33689 - DNA, 719 bp, Oryza sativa
  unsure (1)..(719): unsure at all n locations
atgatgaatttgaacttgcaacngttgattggcacatttcgttcatcacaaaaaaggaaggagaggaggggagtttgagataaggaaagagataagatgtttgagaggaaaaaaagagatagagggaggagtttgttgtgtggacgggaaaagaggatcggtactatggattatatagtgtgttttgatttttattcccggttagtaacaccaacctggcgtaaaaagacgttcacaatatcgcttggtttgacccatgactactagggggcaccaatataccgactgaccctggactgtgtagtttcaagtgttatgtaatcacctctggatgagagcactagttaactatttaaggtaacacctctcttgttatcttgactacatcttaactgaaaataggaagaaatctcttcttttaatcaagggtgtaaaacattatccgaccacatgatgagatatgcttctacatatatatgttagcacttctacacctaagagtgacccttattgattggcatgaacctttacccgattctttaaagaaagacattgccaccctaaataggactactgacatttaattgcctgcttttttgcacccttcctcacttttacatagctcaccatccgaaataaattcagaattttgcctaggcataaagcgatatttcctttttttttttaacaagagtctctctttattttaataaaatgtt

SEQ ID NO: 33690 - DNA, 722 bp, Oryza sativa
  unsure (1)..(722): unsure at all n locations
tagtagttgttgagtagtggagtttaaggtaagcattttttttttttttccccccaaaaaaaaaaaatttcccgggggggtttttaaggaaaaggggtacctttgggaagtagaacaaatgcatcatataccaaattactcgaatttaaaaaatgagatgattgtatcacgaaggtttaatattcgtatttagtcatgatcaagcaagatcggttcagagtgtgcaacatgatttaccgtactaacaaggttttggtaacgttaatagctcagaaacagattagattaaaaaaaacttaaaacaaaaactccatatttgatagtttttgtctagttttaccagtttattacggtatccgatcttacaattgggattacagtatccccacacaaaatagtgaggcatattatgtagttataccctctcacccatcaacatgtacgaatttgatgctatacgctaaattcttacacacaaaagaatctcaaccgtcagatttaattagtggatagttataaaaatcaagattgaatcacaatgtgccacatcagtttttctaagattaaactgtcataatttttaggatatttttctccctaaattccttttgaacaattggatagaccattctttttttaaaaaaaactcataaacttttattaataaagacagagttcaaggggaatgaatnctaatacatcgcttaatagatgttctgtag

SEQ ID NO: 33691 - DNA, 518 bp, Oryza sativa
cgagccttcttgatcgcccgttgaccccgtcaggtaagtatggagcaatagtgcacggggctctctacttatagccatctctcccacccgcacctcctcgactccgcgaggtggtactaatccccgacgcttccacccgttttcggtaggaattttttttatttataattttttttattaaaagttttacaaaaataattttccattttgaaaattgacgggagtagtcgcctaccgccctctgggagggcgaggcgaaaatgacgtggcagccggccgttcgctctcgggcgacggccgtcaacgaaatttgcaggcggcccccttgccgccctccgctagggcgattttatactgtgcggggggccgcctgcaaatgagcggcgagggggggcatggaattttgcaggcggcccccttgccgccctccgctagggcgattttgcactgtgcagggggcctcctgcaaatgggcggcaaggggcatggaatttttcagcggtccctttgccgccctg

SEQ ID NO: 33692 - DNA, 2341 bp, Oryza sativa
cacccccgggggagatgggccgagagggaatcggcccatcgaccccgggggaggccaaatagacttttgcggaggaaaatgatttggaaggatttggattcggaaatgaactcgacgatagatcggggattgagatcttgagatggcacggacactagacgacaagcgaagaaacaaatttcgcaattagggtttttaagagataattttcccgctaggcgccacgacggaacgggcgctacacttgcctacgtacacgcgccaactatgggaaactattctaatctctcgaggggatgctccctcgtttactcaaaaaccatctaaatggttatgaaaaattctggaaaaatttgacaacattcatacaacacatatatacaacttcacaaaatcttaagtccaaactcaactcacacatcgagatataaaaaagacaaatttagcgtatgaatagtagcgtactgtttatatctaaatttgtcttttttgtttctcgatgtgtagatcgaatttgaacatgaattttggtggactagtaggtatcattatactctacactgtcaatttttttcagattttttcacaactatttgcatcgaatttgtaaaaaaaggtatacgaggggatatcccctcgagggattagaatccactcccaccaactattgaatgacagtccatttagtccgttatgctccctccgtcccataatatatggggttttgagtttttcttgcaacatttgaccactcgtcttatttaaatttttttaaaattattatttattttatttgtgatttactttattatctaccgtactttaagcacaacttttcattttttgtatttgcaaaaagaatttgaataagacgagtggtcaaatgttacaagtcaaaactcaaaatccacgatccttatatcgtgggacggagggagtaataattaggaaaaaaccaaatcatttggtcctaatcaaactagctcaatttgtttatgcaagctcgcctcctccttggacataattaatgtgcgtgcccaacatgcgtacgttgccggcctgcccaactacttctagtaataattatcattgttctgctgacatcgatcacaaggattaaccgtgctaagcactcaaccgcacgtacgtagcggtacttggatcaatttaaccacacacatgaaaatatactccatgatccatgatccatgatccatgaaaatactaacatggagtatactaaataataccgtaccgcatgatttggtttttactgcactgattgctcgtttccgatgtcctttagtactgtacttatcaatatgttcaattttaactccacactatccaatagtaccatgttaaatactatatgtcatctaacaatttttttccgaccaccttccacgacgacccggcacgattttgataatcggatgctagttgatacttgcattgcacgaccgccgttgcttcagatagcccaaatattacaccacaatggtgcaaatccagcacatacacactactagtactaacattgacgctgacaagctatagttcgcacacaagattatacattaaatctcagctgtaaaacacattagtatctcgtttattacagcgacgcggtctctaaaatacaaatttgactttttttatctataaaaatatttattaaaatattatatatatatatatactttcatgaaagctttttcaagacaaatctattcatataatttttacatttttaaactcaacaactttagagttatttgtgatttatattctcaagaattaatttaaatatttttctaaacgattttttttacgagtaagagggagggagtactaatttatttcttgtttatttcgcgccggaccaaccaatacattgcttgttcagttaagcgcgtacacacacattaataattatccgtttaagtgaacacgtatcacaagttttaattcagtcaatatatcggtcaaacagcacacttcttcgccaaaaatattcaaatatacgcggccataatataaataaaagtacgaaactactatacgcatctttctgagaacagacagaaacatgcgaaaataaataaataaaacgaaactgaaacgcaagtgcaattccacggaggcagcgcaagcaagcagccaagaaggcaggcaggcagggtggtgggttgaaaaggcaggcgccgaatcccacgcggccgttgccgcgcagcgcaagcgccgccaccgaacgcgcccccccgcctcctcgcgccgaggcgacgcgacgcgacgcccgcgccgctctcgccgccgccgatccagcccccctgcccgc

SEQ ID NO: 33693 - DNA, 891 bp, Oryza sativa
ctagtcagacgcgctacccccgcgccaccgacgcgcggacgcgctacagtcgtcgccgccgacggagctctcctagtcagacgcgctacccccgccgccaccgacgcgcggacgcgctacagtcgtcgccgccgacggagctctcttagtcagacgcgctaccgccaccgccggcgccgccgatgctccgccgggccgccgccggggtctccgtcctcgacctcgcccgcacggcaacgccctctccttctcccacgtcgccgtcgtcaccgccgccgatgccgacgccctcccttctctcctgtcaccgcccccgccgctgccgccgccgccaaccgtcgccgctgcgccgccttcctcctctctcgcctcgcgcccactgaccagcctagtcagaggcagagaagggtgagaaagaggaggaaccgaggaggggagagagagagaggaggggaagagagaggaggctgacgtggattgtctgatatgtggggtccacgtggggcccacgctgactcagccaccacgtcggacaaaaccaggatcaaaaccaccgagggacctaaaacgaatggttttgttagttagggaacgcccagtatctggttttgtgattgagggacgattttgtatctcgataacaagttgagggaccttgggtgtactttttccttttaaaaaacactcgtctccgtcgataaaaaaagagagcaaattttctatattataaagagagtcagagggcaactcaatgataacactaagggcctgtttggcacagctctagctccagctccatccctcgctcagccaaacagttttagctccactaaaattaggaatggagctgggtggagctctctcacaaaataaactagagttgtggagctg

SEQ ID NO: 33694 - DNA, 1141 bp, Oryza sativa
ccaattaaaatctcagttcacgaacgaagccgctagcaggaatcgatattgtgactcttaacaacctcaaaagacatccctttcaaatatactttctccatctaaaaaacttaatctacaagggttaaccctctcttaatacaacgaatttagataaatggttatctagatttgttatgttaggagggatcacatcctcgtctaagttgagtttttttatttgacgaaaggagtattttgtttaatcttcagcaagtcagtccacacacgcaagattaaattttcaatagtacacaacctcactcctctccctttccgggtggggatggatgattctttagtttcctagttgtcattttcataactacaaatcgctgcaatccacgagcttaacttttggtctcatgcatgcatgtgtggtaggccaagaggcgacctatgtcgccaagtttgactccgtatatctgacaatgtttgtctgataccacatgggtgatgggtgtgcattggtacaatggacacgcaaatctaaagtcatgtcattttagtcatatgaatcaattagaaaaaaaagaatcaattgaaaagacgactgatttcgcgccttataattgttcatggtatagctggacatgacccggtcgtagactcggtagtactccccaagtgatattaatttatatggctctcccatgcttgatcccagcataaattgcgcccaaaaatccaagatcgccacttcctttctacacttgcttcaccatagaaggttagttgatcctagttcagctcctgcttaccttttctctctctctctctctctctcgctagtgacgcttactaattttatgcggcaaacattccctacatctgagaaagcttttctcagattttatacgacacacaacttctcttctgcaaattagaaaatgccaagcaatatttaatattttctttaattttcttcactttgtgaatgccacctatttttgttttgtattcatctcggctgttataccatgtgataatttggctcccatgtcgtctatcattaatttgagtttttctgcgtttgttcgtgtgttcttgcatgtcgttcagttaatgatcgagcaaccctctagcctccaggcttgttcct

SEQ ID NO: 33695 - DNA, 598 bp, Oryza sativa
cccccattgtgaatccgcccctgctggtgagaatggcttctagttcattttccagattcggagaagctgcagttaatggaagctcccccaaataggctcttagaccatggctaaaaaatgcttgaatgttagacttggctaaaaatttcatgactattaaccttgggatatcatgaatatatgttaatcgttcacctgatattccgtgattataaacctttggcctaaatattcatgaatttcgaatttggtacagatcagccacaaggcctgaaaaagcgcctgcatagtattagtatattgtgtccagattttccacaaggcatagtctattgtggtactgttttatactccattggaagtgtgtgctgtattgcctgaagccttcgtcagtggaaagaaaagcccgttaacaacgcacattgaatagcccattaacagctcacctaaagaaatcgtttgctgatgaacggcccggagcgtaagaaaagtttccaaaattctaacagcccatccacagagagttactggcaagcgcagcccactaaaggcccagcaaaagaaatattccacgcacagacgacctcaggtcaaaatg

SEQ ID NO: 33696 - DNA, 718 bp, Oryza sativa
attcctgcacccctggtttttccggagctagcttgattgatagtagtatatatataatctttgccagtaaaaatatgattgtctcagcatgattaatagtaccaattatctgggcatgattagggagctcgctatcccgaaaatttcggaacgggatatgttgccagtacgatgtggagtgggccaatatgaggcccaattgcatttgtgcgatctagtagcaggcccacaggtatcatctgtgtgggtgggccaatatgaggcccaattgcatttgtgcggcctagtatgaggcccacaggtatcagctgtgtgggtagggccaaaattcggctcatatctctagaggtgggccggggtcattgagcaagatgactactcccctgtttcatatcgattttgctatatatttgtcgacaaatgtttcccccaaaatttgacagatgtaattacagtacaatcgtagtgaaattacactgataacggcatgctaaaacactggaactattatgataccatttttaacacataacaaacatattattaaaatatattcaatgctatatgggagactattgaggagtttcaaatatagctaattgtggctataaactaagttaaacttgataaagcttgactagaaaaaactcaaagcgacttataatataaaacacatggagtaataaatataatgtaaaagccacctcctatctagaat

SEQ ID NO: 33697 - DNA, 3068 bp, Oryza sativa
tatggagtttaaaagacatatacaatatttagcagtttggaaaacgtatacatatagaaaacaaaggagtgaaagttggaaaaggagagaaaacacacccttaagaatttaggataatgtatccatcgatcttaatatatttctccactgacacacgtaagtttaaattcaagccaagttgaaaaatatattaacaaacctttatttctacttgtacatgtcaaactaaatttaattttatatgttctctggagtgatatatcacacgttaatgtatgtatttaaaagaaatctcacaaatatttaaatagcacacataaaatgagaagacgtccctcttggggtagaatgacttttgtcctgggcatactattcttcgcgaggagaccttctagctggtcattgtgcacatgcatatcattgtcatctgctgcctctctgtctttatttaattatttgtacaagtagtagagatctagaccttctaattaagctggtcatcgtgcatgcatggggtcatctatcttctgtctctatctttaattggttgtaagtaagtactatatttttcttagataaaaatggctttacattatttccggtctctatcatgggcacacacccgacaggtctcaaaagtaaaaaaagaaagaaattaaaaaacaacgtgataggacaaacccccaacttctgctggatcaactgaaatattagctatcacgtgtccaattttccccaaaatattgcgttgcaatttgctgcaaaattaagctgatcactgacgatgattgaaagatcagagatcgctaacaaatggaacgatgaaattggatgcttcctctataagtagcaatcgaacttgtgaaccgaggatagatccatgctaggaattgtaatataaaaaagacaagaatttgtcttttttttttcaatcggtaggtcaaatttaaaagttgatttttggtgaagtgctagatatcactttactttacattgtcaattattttaaaagtttttaataactgtttgcatttaattaatgaaagaggaaggtataaagggaatatcccatcgagaaattagaattcattccctcctcatcggaaagaaatattatcttctaggaagcagagaaaattagatctgtatatacaataagtctataaacctagctagtgcgcacaaggaagaagttatatatgtacaaagtagagaaagcagtgcatgagaaagaatttccgtagaattagtgcgcctggcctaacgactgcgacaccattatacatatcgtctagtacgtccaataatatatgtatactaatatgatactgatccatctgtttctaaatattttataccgttgacttttatgaaatatgtaaaactttatgtatacatataagtatatttaacaatgaattaaatgataggaaagaattaataattacttaatttttttgaataagataaacggtcaaacatatttaggaaaatcaacggcgtcaaacatttaaaaaaacggagggagtatgatctggccggctagacgatctcatatctctatatatgcatgtagaagtcaagtttagctccattatttctcggtccataaatatctcatacggagtatctatcttttgcttaacgtgctagacacggccggccacaaactaattaacgtgcttaccggccgtcttaattatatatcatgtgtaaacatatgacatcctgttcgatcgatctaattacctactatatattaggctgtaattaatattagtcttaacttggggaagttaattatattctcaagttaattaaaacacctgcatgcatatataaagggcctacttcaaatatgaactaacaaaattggaaaatctcaggggttttctccgatcaatttgagaagcaactagtagtagccagttggtgagaatataaaaagaaaactgagttttgtagcttttggttatttcttaataattttctgtattctatatatagctatatattcttagaatctaggtgggaatcaatctggattgttcaacgtaattagtgattttagaagaagttgcggctactaaaagttaacttctataaacatgaccttaatatacaactctatctatttaaaagaatagctatttttaactttgaatataaacaagaaatagctttacattcttgtacatagggagtactatacagcaaaaagcaccgctcacaaataatctcctcactggtttgttcgccatataggcttctcttcagaaagcctatataacatgataaaggcccatcaatccggacaaggcccaagctagggattttcataggcattttcatatgacatcatcagtttgcaaaaacgtactacgtactactgagcgtttgtatgcgtgtacgtacgtataattaaacgcgcgcgacagctagggacgtggaaaatcgctgtggaaacctgctacacacgcaactcaagtactgcatcactctctctgctgctataagctaagctagctagtgtctatccattagtattgtggtgttgctaagaataatccaacacctataagagattgtgtagtgaagtagtactgtaagttagctttgctaagctatcccaatatatatacttcctccgttttaaaatgtatgacaccattgaatttcacataacgtttggcggtgagcaccataaaatattaaacttcaagtgatttatgggatggttttacaattttccatttattaatagattacatatgcaatcatgcatatatataatcaggggttgtctatatatcttgtgacagaaaatcgcacctcctatcattcgaattttcgaccattggatatactctaacatacgtgcaagcacttaatcgtacctcttcttctcccgttcccctcgctgcctcgaggattccgtcctcgattcaccgccgccaccgccccaccgcactatcgctcgatccatcgacgcaactgtcccaccgcactgctgcccgcctcgccagctggccagaaggagtcaatggtgcctgcgagcccccccctcc

SEQ ID NO: 33698 - DNA, 525 bp, Oryza sativa
ggcgaattcgagctcggtaccccaatcctttttgtgtggcagtgggtccatttgaggaatccatagtggataagcaggtatgttatgtgtgccatggtgtcatggtaaggtggatgaacacacatagatgctcactcaaaagggagcatttgtgattagataaaaaaactcaccattgtggggaggtggaaaaggagattttgacatgccaaaaaaatccccattttttcacatacacactcatgtgttcttgcttcaattgattgctattgacattagttagttaggtccagaaccacatcaggccactaattctctgttaaacatagataagcaacacggttcgccacatatggaaaaaagttggctagtttgttaatcttgatgatgactgactgacctctaaacaaggttactattaatctattatatatgaatacaggagctaattgcatgcccaaattaatgcagtgtttttgtggatgctgacaaggcatgttgtacaagtgatgaagtggtgagaag

SEQ ID NO: 33699 - DNA, 520 bp, Oryza sativa
tacatttgtgcgctgtattacaagatagttatgttgggatacgtataggctacgatagtataaaaattaaaattttctatcacgtaaaccaggaaccatgcaagtattagatcatagattgttaccactcgacacgctgcgcagcggaagaagacgctgagaagtcgaaggaactctcgcgaagtagcgcgcgtcgatgtagaggaagtagtcgatcgcaccggctcgaccttctcctcctcgtgcgttctcctcaccgtactcccacgccgatcagcaccgcaaaccagcggcgcctttaccggtatccgcacgtacgtacagggacagaacgccacgcgcagatgtgctagcacccgcgcgcagctagggttttgctcggggaggaaagtgacggctagggtttctcacgtgatgcaatgctccgccagtcagacccctcacgaatatataggatccatcactcgggccttcaaggcccgtaggactcctattcggatccctatccgattaagctcat

SEQ ID NO: 33700 - DNA, 750 bp, Oryza sativa
  unsure (1)..(750): unsure at all n locations
tacagtacttcatgacgaagtccgctcgggagagccagagaggatcactgcggtgacctcccaaccagcgtggggctgcgcgtcgtcaccctcctgatccggaagcggncctgggcctggtagtccactccatgtgnggataccccaggggccacgcacatgccccgcagctccaagacgaagccagtcatgtccaaaccacgacgggtgacgctgccggccatctacaaacaaaaacaaaaagaaaacaacattttaaaggtcagattttggcgataaatgaagcagcaagacagagagagactagacagtttttacaaataacaaaggatttttatttttgaaaatattgctaaggcttgggatctacggctcgtcctagggtcaagggtagctctgatgccacttgtcacgaccggaaataacccaacgggcgtccctgacgtgcgtgcattaatccttgtcccaggaggcaaggtacaccaaaacttgatacaattcagagtttaacaagcggaagcgtaaatagttaacttattacatgggcagcgaaggcccagcacacacaaagacaaacgggaaacagcggaagactagggcgacgaccacaggcgcttgacggcaggcacgagctagacaccaaagccttcatcttcaaggagctcctcttctgggcttgggaaaaaattgagcaagactgagtacaaccaccgtactcaacaagacacacccacaaatgcagaataaatg

SEQ ID NO: 33701 - DNA, 1438 bp, Oryza sativa
aaaaataactcaaagaacaattgagaaaggctttgtttcaaatttctcattttgttatatcttccaatgggagccgccgccttggagatcatcgggaaagagagaaaaggggagaggtggagacagataggggaatagagtagagagaagggtggaggagaaagacgatagccactggtaaataggacccacgtgggctctatcttttttctttcctttactataagtgccaagtagatgttatatgggatgaaaaatctagaaaacttgcctatgggtgtaacgtaggacggaaccgttgttcaaaccatcgagggattcaatttacacaaattttagtagttgggagacgttctatacctagttttattatagttaagaaatgcaaatgtaactcgatctatagttgagagggacacaaattggattttgttttcttttcgttttccttatgtcgatcaattttttgttgacgggttgttactggcccgacatttgatatgccgttttgggatgcaaattttgtaagaataagttcattttgtccctcaatttatcgtcgaatttgaacttcatccctaaaccgaaatattagttggtccctcaatttatataaccggatcacccaaggtcctaggcaagaagagggaagatagagaggagaagaaagtgctagtcactgacatgtggggtctgcatgggtctcacgttgactaagcttgtcatgtcagctaaaattgagcataatacggttttgtaaattgaggaagtcattatatctgctatttcggtttagggacaaatttaggactcggcaccaaattgagtgaccaaaagtgaacttattccaatttcgtatgttagaccgtttatgggctggcattttgacctgaggtcgtctgtgcgtggaatatttcttttgctgggcctttagtgggctgcgcttgccagtaactctctgtggatgggctgttagaattttggaaacttttcttacgctccgggccgttcatcagcaaacgatttctttaggtgagctgttaatgggctattcaatgtgcgttgttaacgggcttttctttccactgacgaaggcttcaggcaatacagcacacacttccaatggagtataaaacagtaccacaatagactatgccttgtggaaaatctggacacaatatactaatactatgcaggcgctttttcaggccttgtggctgatctgtaccaaattcgaaattcatgaatatttaggccaaaggtttataatcacggaatatcaggtgaacgattaacatatattcatgatatcccaaggttaatagtcatgaaatttttagccaagtctaacattcaagcattttttagccatggtctaagagcctatttgggggagcttccattaactgcagcttctccgaatctggaaaatgaacta

SEQ ID NO: 33702 - DNA, 1561 bp, Oryza sativa
tgttttctcaagtcaagagtctacttatctgttaactgttatcattttcgtgtacaagtcggaaaacgaaagaatttcctccccattaattcctacagaaaatgaacctcatccaccaaatccctagaaatttaatcccctgacaaataaatccgaattagcaaagtgccatttttttcttcgttcttggctgtaacgagttgatggcgcagagtacaatactgcacgtacatatatacgtgtgcgtgcgtgcgtgcatgcatgtataatgatgtggcatgcaagaggcaaacgcacgtactccatccgtcccaaaatataagcatttttaacacaataacaagtcaagcatttttaactttaactattaatagcaaaaaaaaagatcaatgttactagatttatcattaaacaaacaattataatatgtaactctttttattaataatatcttacttttatagatatttattggttaaagtagcatctcggagaccgtgtcaaagtctaaaaatacttatattttaggacggatggggtacgtatatacgtatccgtcggagaagaatacgatgcaactacggcagtatcgtacgtatacgagcagagcaggcatgaattgccaagcctagtataatatagtatccttgaccttttagcttgtttgtgcatgcatgaacagttgatccagtacgaaattaattagctgcaagtatacatacatgtcatctcgaggtacgtacgtgagtagaatttatgtggcaggtcaatggaagtgcaaatgttgaaaaatgtacgctttggatacagtgaatatatatataatcatacagaaaaaaataaaaaaaaatcaagaacttgtacagagaataaacaattatgagcaaattaaagctaggcagtgatctgtacagtgacacatgaaggctaggtctaaaaggctcaagtactattccatctactacaatggatgcacggtcagtgatgagctctcttcttacacgcctccaaagtacatgaagaatttgtcagtacggcactaggtgataatcaatgaatagtgatcgaacatcaaaagatatatacgtgtatataattatacatgtttagagaaaatcgacctattttacgtcactgattttcaccggttccatgatttgtcactgataatattcctttctgtaatataacattaatgaatcaatgatattgttactttctctaatatatattacattgagtttatagtttctataatatgcgattaataagttgggccagatacttcttttaaaaaataccaaagacccttatagatgttaaagattgacaactaacttatccgagtgaagtttgaaattatgatatttttatagcatccttatacgacatagaagtatatgtataagtttcaagatttttgcattattattattattattattattattattattattattattattattattattattattattattattattattattattattattattattatataaaatatgatttatttgttatatgtttttttttgcggggg

SEQ ID NO: 33703 - DNA, 669 bp, Oryza sativa
attcctgcagcccagctaaaatctataattttaaaacttaattttagagttgattttaaatttttttcgtaatttatttattaacactagttttgaagtaactataaacacatcttacaagttatattttttaaattgctaataattaactgtggacgaaacgcgatggaatcatactgttcatcttcgaagaacagatgtcggtttgcacgtccttcttggcgcaattcaatacgattcaggcttgatgtcgacgacgacctgtcatggaatgataccagaattaatggatggggaacacccagcatgttgacgtctcagcaaccaatccaagtgaattatgatctaactagctactgaaaattcctttatccagtgctaaccaatcagctctaacgatgaaactgtcagggaaaaggttggagtgaatatccatgaaaacgaccgggttttctgaagaacattcagggagacgaaatgcttggatggatacatacatacatacatacatacatacatatatatgtatgtgtgtgtatatatgtatatatatatatatatatatatgtatatatacatatatgtatatatacatatatatatatatatatatatacatatatatatatatatatatatacatatatatatatatatatatatatatat

SEQ ID NO: 33704 - DNA, 738 bp, Oryza sativa
agtagctcatcatttgagtttgggcaattgttggacaccattatgaagcatatgttggccggacgggaaaagaaagatgatgtaaaagaggtctctcctatcaggcagttgctgccatgggcaccgctctgtagcacgcacgcttcgctgcacggacaatatcgcaacctgcaacacaacaataacgtcgttaatataaatgaagataaagaaatgatcagcatagttgatccatataagggataatatgaataagattaaggttaaaagatccatttttataaaattgttttttttggaatattcactttcaaactaagaccacttgtcttcttcttctaatatttacaaaaactagatataaagccatgttattaccctaaatataaaaatattttttgctcatttcgttgttaaattgtatctagtggtccaagtttaaatggaaacaaattatagctatcaattattaaaaatggagggagtacaaccttgactattaataatgtttaaaatatttagtttgaagaaatatttataaaattaaatatttaactgcagagattctgaagctggttcaactgccgtaaatgttcttttggtgatggctaacaaacaagtgaacatcacttagtatacataggactgctttaggtcccaagacaaaaacttttcaaccatcacatcgaatgtgtaaattgtgagacgaatcgtttaagtctaattgcaccatgattt

SEQ ID NO: 33705 - DNA, 646 bp, Oryza sativa
aagccttacccactagacatgtggaagtacggtagtgctttgcaacagaggcccgaagaccggtccttaaacggccaaggtgctaccatccaaaccatgcaccccgagcccagcctaaaaccattttagggaattttgaatagagggggcggtgtgaagccaattccacaataatccaacaattccagagtgtccaagtgatatgagaatttcccaagtctagagttgtaaaaccacctaatgttgcctaattaacttgcgaagcatctacctagaattatactagtggtactatgagtagagtgtccactagttgaggttttgtttgtctagggtgaacaaggtagtaataataacaataacaataataatatggtcataacaaaggtaaataggcatggctaaataaaacagtgataacgcgggaatttaaataaagcgataatgcaataatttaaatcaacataattttgtaaactgggattcaatatgatcaagatgatgtgtcttgccttgctcgttttcccaatcgacggcttcgacttcaacgaagagcggatcttccgaagctgcagcgtctacacgaccaacggaaaagaaaaaggcctttaacactaaataactccacataacagcagaaacaaag

SEQ ID NO: 33706 - DNA, 984 bp, Oryza sativa
  unsure (1)..(984): unsure at all n locations
ctgttaatgattgacagatcgacagnaccncatcattatagtgatttaaatatgtattttatttaaagtagaaataaaatgattgatacaaatgttatcaagtgattgcaaattttatattcatgaatttgtgaagcgaggaatatctagctttggaaattcttagatgtgaacaggacattaattagtgcctcgtttttttttattttagtattttcgattgctttgtctgtttatttaagctgccccggtctttgtttggtcaaagagagagcaatcggtggacaaaaggaaagcggttggttttggttatgccttgcttgcacacattcctgctcggtttggtagtacaaataataatatttctaatcctttttatatataataatagggatgatttggctttggtatttgcactttaatcttttttctaattggactgttcttttctttgctgctttattaatgtcttttctttctttagttgttgcttgttgcagtccatggtccagtcaaagggagagatttggaaaaaagggccaaaaaagatgagatagtacatcaggaacatcagatcgatcaccagttgctagctaccaccagctaccattattcagctgtcatttctgcagcagtcagattaactttagtccaaaatttttctctgcctcctctagctcccaacaaaagcctgtcaactctctgtttgaagaaaaaacgcatgtatacactgttttagatcagctgaaaattaacttctctacagaaatgaaatcatatatctgtgtaccaaaaggtgtgtttagttcacgctaaaattgaaagtttaattgaaattggaacgatgtgacggaaaagttggaagtatatgtagaaattttttttttgatgtgatggaaaagttggaagtttgaagaaaaagttgggaactaaaccaaaccaaaatggtcaaatgcctgatgaactactacagagagacacccc

SEQ ID NO: 33707 - DNA, 721 bp, Oryza sativa
acttatattgtgttatgtagtagtacaagatctcttgcgtacatctaatatagtgttagtagtaatgcttatacctatacacttatattgtgttatgtagtagtacaagataccataatataattcaaggtttaaaatatactatatatttatgacagtgcaatattgctagctcttactatccagcaacttacctaggccttattttttaactcagggttgtgaccatagcatttgtttgtgtctaagaacaaacacccagaaaaaaaagagagagactgctcatagtctaaatttcaattttcaagttactaaagtttgtctacctacacataaaaatactctaaataaacatattcaaaataggagtattaatttttaacatggcgtgccaacggcgcgcccacttttctagtttgacctaatattaagctttcgttagctaaatcataattgattatctttaatttatatcaatatatgacttattaagcctagtactcccttagaacaaaatttaatgaaaaaattttctttagtatctaacaacaatatgcactgcttgcgaatatcaacatagagtactggtgaatgaattttcccacctttagttttcatgtagttttccacctcaacctcacttgaattgtttgaaatttccattagagtctagcttcaattttatctacccatcaaatggccaactattttgactcatcta

SEQ ID NO: 33708 - DNA, 837 bp, Oryza sativa
acttcagttaactcgatcgtgccccatatatacttatatacacatcgaattgcatctgcttttgcccttatgggtccatgtatgcattgacatctagctcattgctttttccctttcttctttttttaagagcacatctaacacatctccttgctggaaatgtatgcaatatgccatctagaattgatgtactttgcatcgagtggcatatgactcttaaaaaaatattaagttatatgcagcaaacagttcaacctaaaacttaggatgatgaaaaaatataggcaattcacttgtatttgcataaaatagaaatgtgatgcattttttttaataattatgtgctaatcaagatttaaattcaaggtctctgtctttaataacatattgagttatatatatcaatcaacataaaacttaagctggcgagagaagacaggaaattctcttgcatcccaaccctttgctggccaggcatgatgtattacagtggtggagccaaaaatttttaaagcccaggactcaattaatgtaattactatagggtttatattttttcttctcatattttaaaattcggagtgattttaataggtatttagagtgaggagtaaggttttagccctaactatcctattcctggtttcgccctatattgtttcagttcgtatatatatatgtaggtgaactacttattgggtgtgttattttctcttctttcctaatttttatactcattcttttcaaaaaacttttacacttgtttttcgtgtgcacattttttttaataaaaataattttatatggaagttgctttaaaaattatatcaatctatt

SEQ ID NO: 33709 - DNA, 3215 bp, Oryza sativa
tttgtttgcatcgatacccagttctgggattttgtcgcggctggatcaagaaactgtggttagttggaaacttggaatgtgtgtagcttctgaagtggcaacgtacatccttgccttcttaagtaaaaagaacaaattacaaagttataccgtttctattttcttacctttgtgaatttacaatacacacgagtgtgtaactaggaattattactccctccgtcctaaatgatatcatttttgattatgtatcgggacgtacatttttaggacagggtagtatatatatcctactatcgcacatagtattcatattttaggtgttggaattatatatatttcaatatcttgtgttacttaaactgttgcctttataaaatgaaaggattaataattataaaaagtttcaaaatgttgaaactcaaccgaacgcagagcaccatatgtgcttttcttttactccacgccaatgtgcttttaatgggagtgaagctagctagggatgtggtgttggttttcatgtctttgagcgcatgtttaggaacacacacttgtggtgtatgaatgtggtgtgcggttgtcttccacataatcaataaaaagagtactatttgatgttgggctaactaacccaaagaaattttggttgtatacatcttagctatatatgtagacgccgagagtcacatgtcataatcccttaagatgtattacctcgacataattaactaagttaacttaaaaaaattattgtcttaaagccataccttttacattgtgtgtgtgtgtgtgtgtgactgtgcatgcttcgggcccataagccatgcccacaacttccagggcacagtcgagcgacactgtcccgtgtcaagtggttatgcaagcaacgagagatgtatatgtgtttacaggggcatgacttcattgaacatgaagcggaatatcctgcatgatagtttagagttgtacgtcacctaggtgcattgtgaatagcctgatagctaaagcacaaaattctgaagtcctaacatcgagagagggaaacacacaagcttaaaacgagatgggtaagctcacctggggtgtcacgaccagcagcatctatcgatcgtgagcaagcgcgacagtaatcatggcacgaacactgcaagagcttttaatttaaattcttttggttccaatgtactaaagaaacataacagcgagtacgtactagcaggctagcagtcagattttagtttatttaattctatacatgtttcttagtaagcattactcctatatttgaactaattgaatataaaatcgccgaaaagaagaagaatattaatttaacagagatggaattaattagacgctctctcatatggtcatgggtgggccgcaaacgctggtttttggctttattggatgccgctcctgccgggcccacaatcacctcaaaattgctacatacctgatgttttgcactttggtttttttggttgtttgcatttgtgcctatcttagaaatggctggttttaaatagctattagtgtcttaatgttagcaacaatatggacatcggccaaaagcttggatcagatatgcacaatttgtagcctacaagggacaaagtgtgcaactactctgtagccccctgattgtttgcacttgtttctacaaaaaaaaatatatatagtgtttgtactgaccaatgtttaccatattaaacaatcaaaagacatattttccaaaaaagcatgtgagataataatgcttaacaaaacagttaacgctaatagttcctttcgaagaatgtacttcgtccattttaaatatataataccgttcactcttagatatgtcatttgaccactcattttattaaaaaacctatataagtattatttattttattgtggcttgttttaccattaaagaaaatctaaacatggcttatatattttttatgcaggtacttttaaataaggcgggcgatcaaataccatgtctaagagtaaataacgtcatatatttaaaaaggaggtaataatagtttggagattaagaatttcattaacacaagatatgtaggaaacagattaagtaatcccctcgaaagttaataacttgatatggtcgtttgtgcgaatggatcttactcctgtcatacggataatttgtttttacaaaatatattcgggctaaagaattgctttttaaaatacctctacattaaaggagtaattgtatatgtagccctttccacaatgactgctggcacgatcattgtgttcctttgctaaactcttgtttattgtctgtcactctgtcttggcctagcttttactagtttcttgtcaaaagctccagtgctaaatcgccgtttatacatctgtttaaagctcaaaactcaaaagtgttcccaatacgggggtgttaacaattagtcaatatgcttgttatttgcgcatgattaagccatttctatccagttttagcttataactaaaagctaacctttgaatttgccaattacatcatatggacaacttttcacaacaattttattcttcatacagaaaaaagagtcaaagcaactaggaaacacccatgcatattatcaattggcatataacccaatttaatactcccaaagatcttcaatttaataaagcttttatgcatactaaagagaggaaccaaccatgcatgatgcatgtgtacctttacaaaggtagtaacagccttttgtggtccatatataatctatttagattgaagtttttttttaatatctgctcactgctcactactagtactacaaccttgttaactaggcttaatgctatcttcggtagagcatttggagtgggattttcagcggaacgcgaaacaaaataactcattagcacataattgattgagtcttaattattacaaaccttaaaatgagtttattttattttttgaaaaaatatgtaaaaagtttttgtcaaaaagttgtactccctccatttcaaaatatagggcacaactattttttaaaggtgtttcataatataaggcatgcatgcatggtaattaattagtatctcttatcttctaaattattagtttttaaatcatacaactcacaagatgtttaattctattgggtgcatgtattgtattaattggatagattcaaacaaaaaggtgataataattttttcttggtctttgagtcaag

SEQ ID NO: 33710 - DNA, 10141 bp, Oryza sativa
cccccccccccccctttccttttttttcttcactgctatcaacagcatctcacctgggcaataagttttgttttgttctagtactaaggccatgtttggggaatttaaaattctaagaagtgaccggtgagaatctagagaagtttccaaacttttggattctagtttattttttggattctattactacagcttctgaattgcaagagaaagcttcgtagttagagattataagagaagctatagctgtcagaagctctagacctaacactgatgggcgttgctcccgttgttgcgtcgtcggcgtcgtggtagtaatcgttaggtgaggcgcgcggcggcggcggggaccaaggcgcgcgggcggcggtggtggatgccagggcgccgcgttgcgcggaccacgcggccgcggcgtacgggggcggcagcgcgggtgtgggcgtggggcggtttggatgatttggcgttgtgggcggtagttacgcgcgaggcgggtggggcgggagagggcgagttgtgtgggccgggggtccggatgaatagaataaattggtgtggtgggccatctcggctaggccggcccacatgcatgcagatggaccatgcggtgcgagatccttcttcgttcgtggctatcccgtgttcgtgtttgcttgccggtctcctctcaggcaccgtcttccgacaagctttcaggcgatcgtaggagaaatttccgcgacttcactggtggcatgtactggtacgcgttcatttacaacgtggtactgcatgaatgcgcctgatgcaaaacgtctcctaatttatttgtatagctctatacatgtttgagacgggaaagaaggagagtaagaagatatggggaacgaaatgagagcatataattagttgagtattaatttttataaattttaaaatatagattaataaactttttaaagaaaatttcttattattttttataaaagaattataccatttaataattttgtacgtgcagaacaaattaaataaatgcttatatagttacacttgaaatattttcaataaaaaagcaattcctttggggacacaagtttcatcaccgacttgctccgcctactatggtgacgacacgtactcactagctagaataagcaccccttgacatacaaaaccaaaacaaacatttatattcttgtttctgtttagttcacgaaaagaaattttttgaatgtcacatcgaacgtttgatcggatgtcggaagggatttttggatacgaataaaaaaactaattttataactcgcttgaaaactgcgagacaaatcttttaagcctaattaatctgtcatcagcacatgtgggttactgtagcacttatggttaattatggactaattaggcttaaaatattcgtctcgcgatttctcccctaactgtgcaattagttttagaattaatctatgttttatgcttccatgtatgtgcctaaagattcggtgtgatgtttttgagaaaaaaaaattaggaagtaaaccgggcctaaccccatctaggcatctacagaactctccaccaaaacccccagccgtgtcaacgtgtcgcggcaccaattaatcttggctcccaaccccacatgtgcatccctgctccaaattaaatcccccagaatttttccaaaagcaattgcccttttatcgcgtcattcctgatcattgccacgtacagtgcaatgcaatcgatcgatcgagatcgaattcgatcggaatgtcacatctcacgtacgtacgctagctcacgctgccaaccaaccgcgatcgatcgccatttagcaaacagctcgccgcccccggggtccgggcatctatggggccattgctggttaattggtgtgtgcatctggcaccacgcgcatgcaccggcggttatatccggccatgcgtgcatccatgcatggcactactactcaccggccgcggcgtccctacgtgccatacgtgtaaggaatgggagtaataatatccgaccgatcgggttgctaaacgtcgttccatggagatttttctctattttacagtactttctccgttttatattataaaatattttaatattgcccatatttatatagatgttagatatatatatatatataggtatctagatttattaaatatttatataaatgtgagcaacgctagaataatagtaaaggtactttaaacatgaacatgacttatatttttctacagttatttaataagacaaagatcaaatgtacgcacgtccattaaaaatcagaggaagtggccggcatgcggatccagtggctgccaccgtactcgcatgagtaatactgtaaaggattcatattcattagactagagtaaatcaacaaatactggtgtgagttagtcacatctctgtgtttgatccacttttattttttttaagaaagtcgggacatcttatatctgacttatattatatttaactattgtacgtaggtcaattaggagcggaggcaaacctatgatagcttgggcttaagccttagggtttcctccataatcaagcttaattcatcttaaatcaccatgcatttcctaaaaaaaatattctttgtgtcctacttaaacctttaaggctttgataatttatgtatggttccacaaactggaccaacggttactgccaactttaggatagagatctgccacgttcaatctctatattttttttattttctagagaatgcgtactttttatccagcctatacatccaaatggatatacacattattttaaattgaaaacttatcgattaactcaatctaaaattcgatcgtatgaagatttaaatttagaataattttagagtgctactcaaatcactgcaaccaataaactacgtgctcaagcgcacgtccaatctctacatacacgagtgacacgcacccatcgccggctgctagtaccgtatgcccatacacagtacgcatacccacaccccacgatggaacgcggaatgtgtatctttcgccaggttcagagtacacaagaatttttagtagcatgacgcatcatatcctcataatcatccctgtgtgcgactgattgatcaatcgatcgatctctcgatcgcttttgacgacgcaactgttgccgccatcgatcgaatcggatcggagatctgatcgatcaacgcatttgcgactagtgagagtagctggctggctggctgtggctgtatgaccatgtttagttcccaaaaaccttttcctaaaaacatcacatcgaatctttaatatatgcatagagtattaatatagataaattaaaaaactaattgcacaattagaggggaaatcacgagacgaatcttttgagtctaattaatccatgattagccataagtgctatagtaacccacatgtgctaatgacggattaattaggctcaaaagattcgtctcgtggtttccaggcgagttataaaattagtttttttattcgtgtccgaaaactctttccgacatccggtcaaacgtcctatgtgacacctaattttttttcgtgaactaaacagggcccatatatatgctgctgctgggtgggggcattagctagctgcagttcacgctgcactgaactgaaagcagatagagatggagacgcagtgcgtgtagttggaaggtagctagctctagctagatcagcagctcagctttggcgttgatcgatgatatatcgagagaccgatcgttgcaggtttgaccggcggcagaatggaatggagcatctgacatctctagctaaaagctactcatgcatcatttcttgatcttcagagaaatagagatatatatcagagggatataattaacaactttatggatgtttaggatgcaccaaatagtccattattgatcactttacacatggttattaagacatgcatgtacaatggtgtgacatagcattattcatgatgtatagcaagtgagataaaagagagaaagatgtgtaatcggcagtttaatataatttatattttgcatatatatactaaactaaatcattagctatattatagagggcctggtatatatatatgacttgtttatatatggtcgacatgaaaaagattatatgaacatcaaccatgtgaaaccgttgtccatgccctagttaattagtagtataataatcatgttatctaagcttcggtccaacaaaaaagtactttttgagataccgacatctcacggtaccaaatcattttttatcgttggatttaacaatgtccatcctgtccggttagattcaacgatcgaaaataatttggtgccatgaagtaccggtaacttaagctattttttgctggatttgagcaaatctctcttacttgtttcctatagatttctctcttttctttctctaattaattacattggtgtaggcgcgctaatttcgcattgaattggcagagaggggggggggggggggttgaacctagctatcagacacatgcatgtcgatgagtcgatcgatcgagcgagtgtgtggcctttaacgacagccttttgcataaatgcctctgaatttattcagctagcgctactgtactgcatgctgcgttcgagcaaattaagctagctgcagctagcttcgtctgctgcttagcttccacctaccgccacctgctttgccgccggcggccggccggcctcgccgcagcgggtaatgcggctttcgccggccggccggccgccgtggaatgctgcgttgatccggcgagatcgatcgatcgatgagaggcaggcagcgaggcatggggtgttcgtcgtcgtcgtcgtctgaatatgtgcatagtgcgtatcgctgcttctgaattctgatcagctcggtggcgtacgttattttgtcactgcatatatgtgcagataaatgcaatgcattgcatgtgtctatatggacatgagatactctgactgtacacgagatatacgcaaaaaagttagtgggtacagtgacggtggagctgatctcaggacagtggagtcagaaatgtattttgacccaggaaatgtgtgtgaaagcccagaagctgtcaaaaggaattaaaaaggaaaatccataccatgacacatcctgtttttgacgttctagtcttgtagtaggagtactaattaagttaattatttctatgtttgattattagttttaaaaggatttatgatttttagattcatcgtgagaaattacatttctggctatgtgaatataccggatgaaatagtaattcacaggctaggtccaaattaatcctagtaattatagaggcccacaattaatgttaagattttattatcacattggaaaccaataagaaaggacttcaactcaaataggctgctaactgagagcacctgttgagcgattgaggtggtggccatatgtcaccgtggtgggaatgtcaaacatgcgcgcgcgcgaaggcgaggcgtggcatggtgtgcgtggcgccacggagacagggtagggctagctgctcatttttccgaccgtttgtgtttctatgagcaaaagcgtaaccgacggtatcaatggtgatgttacaccggtaaaggatgagaccataatgcgtcatcaactctgtaacgttcctcttgcgtgcgacactattttccaccttcgggtagacagagagttgtctctttctcggttcaatccctctggttcttcctctcggcacaattctctactttctgttcctacgcagtttcagtttgatctccccggttttgagtaccttggcgcacaggtactcagagcgagcagatctccgaaactccgtccacctgagtacctgcacgggtaggtgagtgatcaagtttttgggagcgcattcgtgactgctctaggcactgccctctacatcacgctctgcttcctctatattgacaatccctcggatcatgtcgatcagtactggcaacggaaggaaacaacggcaatggaggagagaacggtaacggcggcgacaataccaacaacatcgccactggatccagagcgttctccaagtatgtatttgtcatctcagtgttaaacatgtttgatgctattattcttgatagcatatttatgtttatcactatgttagaatcactcatcttttcacatgtcatgtttattatgctatatttttggattaaaacatgtcgaattattattactaaatttccaacagatcaaagataaaaagtataatactctagaaaaaggataaaaatgacatgtaatttacaacggagagagtagaaccgtgacaatgctacacgattaacacttccataggcttattagcatgtgaatgctacgctatcgattaattgcggcatattaggggctcagcctccaccttctctctttacaggagagcagcgtttcaacagtagtttttccttttactttagcagttctttgtttttccttttttttcttgcctcaaggaaatggccgtccgatcgattgcattttgtaacttaaaattttagatctgctttcttctaatatactccctcctttcctaaatgtttgacgccgttgacttttttaaatatgtttgaccgttcgtcttattcaaaaacttttgtgaaatatgtaaaattatatgtatacataaaagtatatttaacaatgaatcaaatggtaggaaaaaaattaataattgcttaaattttttaataagatgaacggtcaaacatgtttaaaaaaatcaacgacgtcaaccatttagggacggagggagtattattatgcaatcgtttgcgcgttagtgaaagaaataattgcggcctatcaccctatagtttggtggacgctagaaactcatttctagcggacatgttgtaatcaaaagacacagctagcgatgaaccgagatgacagtagacagcgtcattatcgcgcggcagtgcatgttcctggccattgatcagtccgagcccaccgctgatcacccgctaattaaactcttttcagacatcgccccccgtcggcccatgcagccttgccggccggccggccggccgccgccccccggccccggcgcccatgtcgccgccacggctgtcgtcatcgcgtcgccgtcgccgtcaccgtcgctgcctcagataattcattcattcatttggtcatgaatacttaattgttccttccgtttcatattataaaccacttaatttttttcatttatttggttatgaataattatttcctccatttcatattacgagtcattttattttttttcaaagtttgtttaagtttatagaaaaatataacagagttttcaacacaaaacaaatatattgtcaatatacatttagtgctatatttaataaaactaatttgatgttgtagttgttgttaaatatttttataaacttgatcaaatataaataaaggttggtttggaaaaacgtcaaaacgaaacgggggaagtatctacgatgaaagacaattaatcatttggttattatgatggggttttgtttgatcgattgatacacgttggttggatgggatgattagttgatttggctctgtgccttgctggagatcgacaggtcaggccgggaaataattttgattcttggagatgattttgatcgatcgatgtgacgcggggtttgtgtttggtttgcagctgattgtgattgagaaggttgattagatagccgtggggcttacgcgttttaatcaggctgtacctcgagatgggttgatcaatggatccatgaaaaccgctaaatcgcagccgactgattatgcacccggtttctaaacctagctaggatgtaaatagtcatatagtacgagattaattagtagctcgcataatgtatctctgttttttgttgtttcttttacatttgttcgtatgattttttttaagaagggcaaaagtattgtcactttttgtatcgataaatagagaagtgttcgtatgatcgattttgttgtagcgttattttgttgtcgttgttagtgtgccagatcgtgataaaggctctatttttttaataaaaagatagtggaatttattctcatctttagttaataactaattattatagaggttacaaatcttttttttgcggggtacagaggttacaaatctaacgactgtgaattacaaatcttcatatagataattatgtttagagtataagtgaattacccgattttccttatcagtcttaacttttgtgttaaattggttggtgcatataactcaataataatgtatttttttttgaaggaaggcaaaagctttggtaaaacttctacctatagttggcgagaaactacatagccattgtctctctagagatttgaaaattgtatgtaatccttgtctttcccaaccaaaaaataatatcttcgaaaacagcttccaattattatgcatatcgaattttgtctgcatcaccgttggagaccaacgttgaaccaaagcaatcctctaatatactccttccgtcccaaaaaaatcattctagtattcgttattataggaacggcccatccaatgctaaattggttttatgtgggatggagggagtattatatacgctaacttcagtttttcttgttatcaagcacgatcactttgctaatttgcattatattgcatcccaaaattgtcccttggccaatggctaaccgagcagcatctagctagcaatccaaccaagcagacttgacatgtatcaagtattcaacgtactacaaggctccagcatccaacctgaaaccggcatggtgcgtcgctgatctgattctgacctttccttagctgtctatgtatggctctgcaggcagcaaaccaaggaggctaccatccgtgccacccgtgcttggatgcatgcatgaacgtcatgtccagcgccagcctctgaaactctgatccctgcattgtcaatcgatgagcttcagattcgattctttgcttgtactacgtataatctctttcatcatctcaagctgtcaaaacaaccagtactctactaatgcactagtctctccatctcaaatcatactaatctagtactcaattagagacaacctattactataaatttagacaattctattcgacacaacctaatactaagagtattaggttactatattttaaaacagatggaatagtagtaagtactactcgtttcattttcgtcgtcatcagtaatttaggagtagatagtataataaccgtccgtcatgatagttgcaaaggcgaagccagtggcaccgtcaagcttgaattacaaagagtgtttgttagtgatcgagaactttttacatttgatgccgaggaaagtacagtgaaaccgttgacggtggagcctaggcaatcgcccgacctgtctgagaggtggcttctttcctatatagttgtggctaacttcttctctacgaagagagtaattatatctacggttctatatttatacatttcttttgggtcccgaattcctgaaaaagaatttggaaactttggtccggaaaaaagtattaaaatttaaataaaatttgctaaattcaaaaaatatcgtgagaagtagcttcctgtgcttgggatccaaaatttcgttccgaaatattgaacctgacttatatcctgaattagaggccggcaacaatgggtggtcagaataaacggtgtgtgtgatgttgcatttagcgtcagacaatcagttgggctaggcacagcgcccaatctgaagaagaatctgatccaaggctagctgataaatgttcatgcagggaccagtacctaactacacagcaacatttactcctcctccttaagattaattttcatctttagtaacatgtaaggtaggtggtatgtgtggttaatttactgcgtaaagatccagagacttttctgacgaaaaagttgcaaagattcagagattgttgcatcgcccttgagacagcagcaaattcagtgaccctttcatatgaacaaatggtcgcttgtttttgtctaagtagagtacaatggcaatgacaaagaagagactactacttctaattaaattgatcctagctctagtacaactctttaattactg

SEQ ID NO: 33711 - DNA, 580 bp, Oryza sativa
aaaaaatggatttttcttttacactttaaagtgtaaaaactccaagtatttgaaatactaactactactagtaaagtgtaaacactttatataattaaaaaagagaaaaagaaaaagaataatgggcagtagacgggcccctttggttggcccagtccagtagtacaggtagaaactaaagcccattccattgaacaagaaggagtagaaaagcaaaattgaaggagaaacgtacgagcgtgcgaattggatgcagctgagaaggtgttcgtccgctgcatccgcatccaatccttcccggcgaccgaataccggccgggaaacctccaaaatcgagctggccggcaaggccgaatttcgctacatcggtttcatctatttaagttgagtaagagggaatcatgcgctggactttgaactatgtaatgaacttcattatcattattatgacgatgaactttaaggttgtggagtatgtaggactttagatctgatcgttgttgatggctaaacatatagtttctcaatatttattcatcaggacaatatttcgttagaatattctactagtgaaaaattt

SEQ ID NO: 33712 - DNA, 1400 bp, Oryza sativa
caatcaaggaagcaagttagtccaaaggcaaccgatgaagcaggcagatggagaggagccatggaggtagaaagaagaagaaaagaagaagaagaaagcaagaaagaagatagacaagatagaagcactgtgcactgcagctgcacatgcctgatggcaccaccaacaatcaattgcattaaagttacccaactgcactacgctagggaagtgtcctcttctcagcccagcccagcgtggtagtaccaatctcagcacctctctctttttcgttttgctttttcaaccacctactggtttcaaactgatttttcttttctttccccccattgaaaccgtttcaattccagtagaagtagggaaagggttcatatgcgttccaaagcacccccaaaaaattatcatctgcacggtgcagtttttaagaccttggaaaacaattatcatttgcatagaggagtatttctctactattatgtcatccatatttaagttggtttttaagttttttcgtttttggaaatacatatccgtgtttgagttgtattttaagtttgttttctttaattgaagatgttttttgtggtattttggtatgccatctgtatttgagccggtttttaagcttgtttccttttggaagcataaaaggtgtcgtataacaaatcttttaaaaaaacttgcatgctaacttgagatgaaatatggactaataattgcaactcatgattttctgaaaaaatatcaagagaattcctaaagtaaattttatcctaactaaaacgtatagcaataataaaattttaaaaaaatatttacatgttgtaatgcacggacattttttctagtcaaacatatataaaagaattactgacaactccctattcttttaaaattatttaccggattatgaaataaattattcgctgcacacttcaatttttctataaacttttttctactgcattatttagaccacttattactaaacggaggagtattttgttaagtttatttattacaatatttcatccatccaaataataagtaaataatgtgcgataattaattaatccactcactaatctatatcaaatggggcctttaagatgatgccatgtctagtagatcttataataccattttgcaaataataatttgtaaataaaaaaagagaaaagtacgaattacccctgaactattggatgagtatgaataacaccactaaactcgaaaatcaaacatcgctcaccccgaactttcaataccggacaagaaaccccctagcactattgcgagcagtttagagttcgtatagcacacgtggcagtccagttagtaatttttttctaaaaaaaatagcgggcccacttgtcagaatcccacatctatttatctct

SEQ ID NO: 33713 - DNA, 825 bp, Oryza sativa
atacactgctagctttgaatgagagaatgtagcagattgtttttagtcttctcaactgttcattaggaccagtactccttccgttttaaaataagtgtaattttacacggttaatgtgcaacgtttaaccgttcgtcttatttaaaatttttttataattagtatttttattgttattagatgataaaatatgaatattattttatgtgtgactaatttttttagtttttctacaaattatttaaataaaacgaacggtcaaacgttagatacggatacccactgtacttattttaaattattttaggacggaggtagaatctatctatctattatctatcttctattattatatactaaaagtccattaaacttcctacaaacgctctcaagttaccacatggcgctctaataaattagagaaaatcctgtaaattctaagaaaaaagcaaaacatctaccccttgattttcacttaaattggtgggtccaatattatacaccgttagataaaattgatcctaaaataaaccaaatactatgggtcccacctaactcacgtacgtacatgggtatgcagtacgtacgcctccttccaattattttggtatgtagtatgtacgcctccctccaattatttcttcctttttctctcttcttttttccatttatataattgatatatatattctaaataaacataatttacaaacaaagaatataccatcatataattctttataaacacagttaactaaattagctctacaatctttgaaaataaaatttacaccattatatgtttacccattaaatgggctgcag

SEQ ID NO: 33714 - DNA, 736 bp, Oryza sativa
tcctgcagcccttaataaaaaatcttaagccaccacatatatgtcaactgttaaagatttttagaatgagaaaacaacgagttctcacctacattatttagaaacattagaaaaacaatgtcccctccacctccctctccaatcacatgtgcataacactgttacactgccaacccatctctggctcgagttgtatgctattcattcctctccaatctcctccctattttcagcataatattaacacatattaatagaattcgtactaggataagagtaataagggagttttaaggccctattttttttattgattccatcttttgcattttcatttgcacgctccacgcttttccaagtttataaatggtgcttttcttaaacgactttttaactatttagaagttaattcatttgtttataatctcaaatagctatcacataaatcagataattcatcaatttctgttgtcctaaaccctaagtatacatatttttttcgtgcgaatcatggtgatcaacgaataatcaaagtggtaacatgaatcttaagagctactatgaacaattgcaaatatgtgtcaaaattatttgctattaattagacatctaatggtttgctagcaacatatttaatttctctctacatgtatataaacatggacaaagctagaatgaatattaacatatatcccatacatatatattacatgttaatattctcattacatgtggt

SEQ ID NO: 33715 - DNA, 709 bp, Oryza sativa
tattttttggtgctataaaaaaaacgtgaacttttaatgttatataaccaattttaccaaaaccatatgagccgaatagaaagtttgtgtaaacaatactgagcatttctcgcaaaagaaattactgatagttggataaaagggtatatagataataaaaaatcataaataggctgaacatgtatctctagaggtttctgctgtctactggacagatgatataaagagagaggagacgaagataatgaaaaaaaaagaggtttatagtgatttctctcatatatctataagtataacttagctaaatttataatttgctagactaattgatactgtgctaatgttataactttcttaaaagctgagataaactaatagatcagatacagaacttgttaaacgggattaaaagtcacgcaaaacataactacgtggctagtaataaatggaagttattgtcgctatctatcgagctaaatcctttaagacgaaataacactggtggagaaatcgtttttagtcccggttcgtaacctcattgagtatcaacggtaattgggcagtaggctttaaaggctagcagccttggcacacttaatatttagctgaacaattttagtacaagtattttaccaaaggccaactaagatatcagtgaatatcgctagctcactgccagtgactatctgcttgtaagtgtttcgtcatg

SEQ ID NO: 33716 - DNA, 536 bp, Oryza sativa
gagtggcagctcgatggtataacctcctcctcactgcctcaccttccgtactcccgttagcactgcttgttgtgtggtccttcattctgctgagctatatatatgttaatttaaagaattatgaaaatgaaggaggcgcgtcactaatatttatttcctgcaggcgccactgtgccaagaaaggaagttgttgatctcatcaagaaattcaatattcaagttaataacttaacacaggtgtaccttcagtttatgttaccgttccctttgtttacattcgttatcattttgctttgcatcttaatcaagaggagccacttatccatttgtcgtgaacctattcctgatttctgttttcctgctcaactgtgttcagcttgaccgatccttcagcgtgcccttaattcagtgacttaataggcttggcactaaaaacttatgctcgtgtgtatatatatgtatcttctgtgttctaaacgccacgtcagtgataagtagtactgtcgtccttacgctctgaacattctatatttctt

SEQ ID NO: 33717 - DNA, 740 bp, Oryza sativa
ctcttcttcctcctcactctcacgcgttccacggcaagccaatagcccaatactacgtacaatcgccttcctattttatgttaacaagaaaaatgttactaactcactttataggaaaaaaccggaaaataattctaaagcgaggagaaccataaaaacaactatatggagagaaaacagagaaaaaaaactctgatggcatcaagtccaccactactgcaagcagatatttccaatggcttttcgtagacctgccacaaacgccaacagccaatctatctatctattatattattaaagaaatagaaaaaagagcctccacgttcgctctcatggcctagaaattctcacattaatcggagaaaaagaaaaagcagagtctatatagaaatacaatttaaaaataacgaaaattcggaattaaaaaaataaggaatattagaagaggagactagagtagttattacacattagtagtttcgtaaagttattgcaaaatttaaaattatgttgtcattgtaatatattttaataatataatgagaaaacatatatgctattatatgagagaaaatataatgatgttagccgagcaatctgcgcgggccaccatgctagttatctttggatatcacaattttttacaagcgtgcaccttaaccacgcgtataaaaaatgatttttcatacgacctccttataaggcgaaaaaatcgatttttttcaagcatgtacttaaag

SEQ ID NO: 33718 - DNA, 1294 bp, Oryza sativa
tttttgagtatgaaatcagtatgatgaagttccaaactaagcttcagcttctacccagaaggttccaattgcattcactcaggcaaaacaaaaggccaatgaacctgctaattaaaaagttaagccacagtcaagaatctcatcctgtgcaatgctttgaaaataatgtctacagagggccataatagtgaaggatcatgacagttgaagaacaaagggaaaccaaaatctatttaaaaaattcagtggacttttgacatgatcaacactagtagatcacatggtaaatggtctttacagtttaatttggattcaattcaatgtttgcatatctttaaagcaaatccttgtgtatgtacaacattccgttactcaaatatactgcattcgtctgtaagtgaatcatttcggacattagtgtctccacaattaactttaaccattagtggttacatgcatatgttaacaaaagattgaaagtttcaaatactatgattgatgatattcttttataatgtatacttctatatcggtatcattttcatgcatacaatattatggacatgctaatgctcaaagttgggctccattggtagatgccatctggactgaattgaatggtttcacttacttaacaggtagctaaacctaacagcttcgcaattttaaccctgactatgggtaccatatcaagttattactcttggcaactttaaccgcgactatgaacacattttcttgttattgaaagcacaaagaactgagattagtgtgtcgttgcatataacgtgaaaccatgattaacgatgtgagtaccaatggtccaatgaagaaaattgtagctactctgggcagaaaatagaagataggaaaggtgagtggtaccaaataaagcaaggttctctcagtgtaaactggctttcttgaataacagacggaggaatgcaagtaccaacaatatcctgcaaaaaaaagcatattgtgaatatcagtaacaaaacattacgacttatatcaaatacttgtatataacactgtttcgtttatttgtaaagtaaataggaggagggaattggcaaaatctatgtaacatcgaatatatagtcaggttatttgtaccccatggtattgtgcagcataactggttaggtattagccacagggtaattagaagaacaccaaattcttttcagattccattagaactaatactagatagcccatctatcagttttgcagtctccatcgaaacaaacaaatgtcttcagtaggtgtgtgaagccactaaacactc

SEQ ID NO: 33719 - DNA, 728 bp, Oryza sativa
cgataggagtagctacatctcacgcataaacaaatataaaaaatacctttattttattaaatcataatgcaaatatcccctattttctctacttccaatacattcatcctatatttttcataaacaccgatgcgatgattactcaaagataaacttattttgttataaatataagagggagtaaaaataatcttattttgggatagagagtattaaggtttaacaatagaagttatctctctctagactagagttttaagttttttttttaattgagatgcgatttgtaatttgcggacgggctctataagtaattgtatgcaacgttttttaagataaaggccaaaacattatcttcaaaaagtacatacatggttgttataaaagagagatacctcatggcaagagtatgttaaaaacaagggcaagatatagagaaaaatgacaatgctttctcatgtttttttttcattttgatatgtaaattgagttgctaatgaagggttttcattactgataggaacgggttgattttcatgaaaactgaccttgccaacctaggtcccaaatctattttcactagaaattttggtgaaaccactcaaatttcaaggtgctctaaatttgatttcaaattttggtttttaaaattgggggggaaactatcaatttttgcttgattttcgcgaaaacggtgctacggccggtcccttgtcatcactcgcact

SEQ ID NO: 33720 - DNA, 511 bp, Oryza sativa
actaaaaagaaattacattgaaaatgcttcaaaatcaagtttgaaagttcatattttgcccttttgctttggcttattaggcataccgatgaggctctaaaattacataatgagatagaaaagagaaaaaaagaaagaaagagaggagttgccaccccttatgtaaagggtagtctctatacaaactcctagatagataagggaaaaaaatcaatggattgaattaaaaaaaataaggtatgagtagtatattgggacaagtgcattagaggcaatatgttgtatgggtaattttatcatccttaataatgtacctagaggtaccatattttctagtgtaatatttggtgcctctaggcactgagtaccttaaagtaccaaaaaaatttagagtaaaatttagttacctcgaggttgttaataaaatagatacacaacggagacacgaattttatgtggaaaacctttgcaggaaaaaaccacgggcgccgaccggcaatgatcactacag

SEQ ID NO: 33721 - DNA, 609 bp, Oryza sativa
actagctgcgtacgctagcttagctagtatagaagctacgggtaccactgatgtttatatagtgtacgggtaggtgatttttgtgttgctactagtcatgtttcagatgatgtagctaggtcgatccggagtatatatttgcttggttggatctattcagctgctgaccttgctcccattgtcagctaaggaaaaagaaaaaagctagccctccgttcttaaagataaatatagtatttctaggttatttagtaaaattcaaagttaaaagagaactataggctaaatttaaaattacatgatttttctcttttaagcacttgattggctgaaaatgttttggatatccggaatcagcgtaaataaaatactccatatacttatttgtaactaaaaagccaaagcactagcaaactactaagtaacttctaaattagaagcctaattggtcccatgctggcttttgccgcctaaaataacctcggcaacaatatttaatgagaacgcacattttcaattttcgactaataaaatacttaagtaattatattgtaagctccttggagacttcggagtctgactctgatactgtagtagtagcattcacct

SEQ ID NO: 33722 - DNA, 668 bp, Oryza sativa
aaacccaagcaactagtactcatggtacaacaattttcaaaaagcgggagaactctgaaacaaaagatacattaagagcatattttgaaacgaagtacaccattttttttgttgaagaaatcattactacgcaatactctgcaatttgaatgtactttgggagatcatattttttattacatttctgaatgtttgtatgcactactatgttaaaatgattttttttgtgatataaatgtatctgagagttcatttggtatcagcataatatatactgttcatggaaatgtatttcacttccacattatcattttttaacttctgtgaaaagggcgtatggaaaatgtatatatgtgcaccttggctctaccaattgggtcattgagcatttgttttttaacattattttaaatcatgcatcatgcacaaatacttgtactccatttttgcacagtggtttgtatacgcatgcaccgtggtgcagtttaaatttgaaatggccccgtcccaaagacatgggtcccaagcctaacaattgaatctaatcgcacagtttctggaattacatgccactctacaacactttaactgctcattggtataaacaagcacgtatctcaaagcgggctaaatggtcaggataacaggtgcaactgcagttgggtgct

SEQ ID NO: 33723 - DNA, 698 bp, Oryza sativa
tgcttcactgtgtgcgtcgttccgcttaatttgctcgatcgattcacgcgagcacaatcgcatgtgcgtgcatgcgtgcggcattcaatcaaaatactcctcctatcattcatgatcctctcgctacaccacttacaggatctgcagctgatgatgatggttgatgagctgatgttgagtgaacaaaagggatggaggacacggccgggcacgcggctggccgccgtggtccgccaatccggcaagatattatggcagagatgataaggtgcgtgcccatgtcgcgtgcagtccagtgctctcagcctctcgctatccgttccagtcgcgattctcgtctccaatgccggttactacgtgtcttgccgccattcatttattttcttattccggttttgcaattacgtgcttatgttttctgttaatcattcttgcaaatgttgtgcaagtacagtaccagtactagtagtagtgagttgtgaaagctgacgtgttgctgtgcccaaggttgtactagggttgtagcacctcgaggacgaacatgcccacatagacatttgttgcgatctggggcctattctgtttttcggtgattctccaatctatcgttgagtagcgtgcctgacaccattcttttttatctttacagctaaagaaacacagctttcgatccatttgtttaatcaatcttgtccttg

SEQ ID NO: 33724 - DNA, 677 bp, Oryza sativa
  unsure (1)..(677): unsure at all n locations
aaatgtttggagagatgtttcttccttcaagtcttcttttttcttatccagctggaaacggagtagtacagtagtttttcatttatcatatgtgtgcatgccaaataatcttgcagtgcacaccgctttcgacgccgtccgagaaatgtccggttaaatccgcacaaatatacagtgtctgcatcaaatgtaaagtagcagctatagttggtgatgcagtaccattggcgatcgagatacttaattaattaactagttggcaaattgtctaaacaaatgctttatgcgcttcatttgtcagtcttgttctcctgcttggaggtgatcaaaccctagctaacttttccatttttattgtgcaatttggcctcccattccgcatacttttgccatatacactgaacctctccctgtgggggcgccgcatgcaccaagaaaatttaaagttgtccatctctctctctctctcaatttgtttctctctcttagcaagctactagacacacaccaatgctagaaaaaggcttgtctttctttctcagctgcttgtgcatctactgttaactgtacacacacattaacgtggacaaagaacaactagataaggtcatgtgcatcanagagagagagagagagagagagagagagctagctagggacagtcagatcgaaatctt

SEQ ID NO: 33725 - DNA, 971 bp, Oryza sativa
tgtttgattaataagatgcagctagcacaattgtactggttgatcatacaatttactgcaaaatgacatggcagtgggtatagccagctgctagctatactattgaccttgctctaagtgatttcatcatctaaacaccagcacacatcgcggttggctaggaaagggaggagccaacccaactcgagagtcaggcagtggggcaccaggctgattcacaccggcgcctcgaatcgaagcggcagtggtgcttgggggagcgatgacggctgtccactgccaggcttcggctgaagtgcagttgccaccatatcatgcgccgccacgaggaagaaaaattgacactagggaatcatgggggagctacagacttattccagccagccacgggaagacaatgctggtgacgggatagatcgacacggcggtgtacgagagcgcgaagaggagaacatgtcgccaaccacgcgcgaaggagtgaagtacgatgtattgggaggcagacctcgtccctagaagtggagagcaaacaatccagaatcgggatttccaactattgggagcttcgctagggactctgttggagtcattttttgaacaaaaatctgattggaaatcatatacagacactattggtgatgctctaaacaacgtgacacttaataatagcttgtcaagtagccttcttcctggaataatgctatctttttctcgatcgcttcgtacgtgcctaccacatagctgttctaagagatacttaggttgtgttcttcccctattttcccaacccacatctctcatttttcgcacgcacgtttttcaaactgttaaatggtgtgatttataaaaaactttctatatatgaaagttgttttaaaaaaaatcatattaatccatttttcaaaaaatatagttaatacttaattaaccatgcaataatacgtgctttgttttgcgtgccgggaaggaag

SEQ ID NO: 33726 - DNA, 635 bp, Oryza sativa
attacgtggcattggacacccacaactctagcaacatactccatgtgttgtttttatatgtggaaactttttgtaaactagtacttcatccatcacaatttattcatcacataagattttagagatattctcaaaaaaattattattttaacaaaataccttatgtttatttataaatgtgcatcgtggaataccatgcatgcgtgcaactatatgcgtgtagccaatcaatattaacttgaattggttcaactcatgcaacatgtagcgcccgttccgtcatggcgcctagcgggaaaactatctcttaaaaaccctatttgcgaaagctgtttctttgcttgtgatctagtgtccgtgccatctcagatctcaaatccccgatctatcgtcgaattcaatcccgaatccaaatccttccaaatcaatccctccgcaaaagtctatttcgcctccctcgggttcgatgggccgaatccctctcggcccatctcccatctcctctctctatctccctctctctctccgctcgcgcgggcgtgcgcgtgagccgcgccgagcgcctcctccctcccctcgctcccccctccccgcctccatccctggcgagcaccccgcccgcgaaatcggccccc

SEQ ID NO: 33727 - DNA, 3363 bp, Oryza sativa
cgcccacattgacagaagtgtcggacaccatattttggttggatatctctttaaacgcagtgatgggtgaagaatattaaaaaaaggaaagggtcttatgcatttgggttttaaaaaaaagagtcaaaatgtttagatcctgctatgtgcagtgttaaaagacaatctttatccccaataatttattataacatgaactagcttttttgatgttttgattcacaaggatggaaagaccagtttccgtccatttgaaagggggagtaattcactgagggactcaaaagtatactgttttgtttgttacagaagatttgtggataagctgtttctgttttcccaaaagaagatgacttgtttggtgatggtgaacatatcgagttaaataaaaaaactgaaaatcccttatattgtgggacggagggagtacttaatcaatcacacattaatgaactgctccggtttccgtgcatgataggagtgttcccaaccgtgacaaactaacacagccgaagaggtgtgatctctttgtgcactttccttttttttcctatgacactatcaattaaagaacttttattgtcatttatgtgtttttattcctataggatttaagaaacatactattgcattttttcctattcttttttctgtctgacgaatcaaagagacatttattttgaatatcagatattcctttcgtcctaaaatatagcatttaatactagtcctaaaatatggctacttctccacctaccttatcatctcaatcaatcacgaccatttcatattttaatttctccactcacttgcttatcgtagctaatgacaatgtttttcatttaattatacccttcttcttaattaaaaaaataaagtataacgataactagtatatttttggatgaaggggtaactattatgatcgtaagggagtattaagatgtacctccatcctagctatacaaatgcataactgaaataacatggccaccattttaatcagacaaagtctcatttatatagatttcacatgagggccaacctttcagtatcattttatttctatcacctaaaaatctaaaacccaacttcccgtgctcatggataataaagaccagtgagcgtagatcgatcaagatctacacttgcatgctcataaataagcacacagttaagtgataaatggttggaagaagtagataggcagaggcaggccggcagctgaactgatgccaaattgacaacgacccgtccttgggtacttcctccgttccgtaataaattcacttttagcttcttttattggtttcaaaacaatttatttttaataaaaataatcattgtgccgaatgttataaaaagcaaaaaaaaattatattaaaaatagataaagtaaaaaataattgcattagaatttgataaagtagggatattatattttttctattagtatgcttgggatgaaaaaaaagtaaacttacttatatttttttgttttctacggcccgttcgattcttctgtaaagagaggattaaattttggatactcgtggcacgttttttaaactgctaaacggtatgtttcatgcgaaagatttctatatgaaagttgatctaaaatatcaggttaatctatttttcaagtttgtaataattaaaactcaattaattacatgttattacaacatcgttttacgtgaaacacttaatcttcatcttcaggatattcaaacaccaccgtaggcgtagtacgtcaaaacactgaattgtacattggactattattggagtgctggttcagtgcaatatacatgtagaagtatctcactcattactccaagatgatttgacattttgtccagctgctattgtaggtgaacccaatgctacagttatgctaggctatcatcgtctgctcgttgatttttgtcagccttaactaaaatttaaagtttaaatacccctatttttaccgcacggttaatttgcacactccaattgcctccaaacattcagttttttttccctattttttgagcagatgttacaagtactagcccatgtaggccgcccttatcttcctcagcccatataggctgcccttctgattctcaaatgaattaggggacaagatgtcaatatctttcagggccccatgattaatgaccatgctataccaacattatggtgcacactattaacattatgggcctaatacagtcatctgtcttggaacaatacccggcctgcaagtagaactgctgtactacttaaacaacttaattattacgataggggctgtctataactagccaaatgcttgtgcgttgcaacggattttcttaaagtatataaaaatattgaacaaaatgggttaatatttctcaacaaaacgtatatattttgtcgttgagcataaaacttcacaaagtagatttgttgaagcaagtatagaagtccgttgccttgtcaacgattatagtggttcaatcatatatacgtgtgtattttgattgcctcaaggtgatgaaaaaatgtgattagtaattattcactccaaaagaaactgatgttgaataggtagttgaatttgagagacatacaggttacaaatcaaacacccataacaagagcccgtgcccataaattagtgatggaggtggtgatgacaaaaccaccacaccactatcaacatttaaaatagtatagatatagtacaagtggattttatatttcttttatgctactaattactcattgtatccattatatgaaaacgcaatgggacccgcatatcaatgaaacatcggttcttctttcgtccttttagctatgcatctggacaagcaaacatataactagtattgtagaaacaagagaaatagaaggcgtaaaatatacgagtggaaaaatacgagaagctagaatctactctcaaacacacgatgggattttgtgagaattctaggaggaccaaattaattcctatgaaaaatcctattaaactcctccatgttctaaagtatcatattatttccttaggattagctctgcccctgtcccattggttatctttttccctgtacctctatgatcatataatcatagtggacgccatcaactcattaagctaatccatccatcctaatatgtagcaacctcatcttagattgctagatattgagacggtgggagtacgtggctccacacatcatgttcccagttgacacacgtagcatctgttattcattcattcatactggagtactcctagtatatcctaaacaaattactaacatatttctaaggtggacaaaataaataattaaatattctctaatagacaattgagagactcag

SEQ ID NO: 33728 - DNA, 854 bp, Oryza sativa
  unsure (1)..(854): unsure at all n locations
tcggctttgatnactgatatacncatcgctcgcaacnnnccaaganntatnctgtgcaactagaaccatataataatatatcaatatatacggttcttatgaaattcactttattttacctacagcaacaacgcttaaaacgggtgctgtatcatttaaggattctagttgcattcgagttttcttcagccgattgaactcatgggcttaacggcaacgatctgtaggccttgcaatgcacaagcatattgtaggcccatattttcaaagcacaagcatattctaggcccatataggcccaggacatttttaacgaataattgtatttggaataagttcgtctgaggtctcttaacttgtcaacgaatccgattttcgtccctcaaccggaaaaccagacacaacggatccctcaactatcaaaaccagtgcaaatgaggtccctcggcggttttgagggtggttttggctgacatgatgcctacgtggctaatttgactcggtcttcatctgacgtggtgcttacgtggcaattcgacccgagaaaataataaacccgtgggatccacatgtcagttcacacataagataataaaaaaaatggcgggccccacatgtaattgtcattgtcaccccctctttattctgcttttcctttaatctcctatttttaattttcttccctatcccttttccagcgccacaggtaaggcaagtgctcaacggtgttccaccggaagaggagggaaccgccacgccggccgaagcaacgctctcccatcctgggccggaaaaggaaggacccggcgtatttggtcctggtttcacaataaggtaggcaggacttcacaact

SEQ ID NO: 33729 - DNA, 680 bp, Oryza sativa
attcctgcagccctgtaataaaaatttatgtgacattttttttttcgaaactaaactcggcccaagccaacacaaggaggtctagggtcggagaaaagtcatcgggttctgttctgttctgaccttggcccacgcctccttggggagcttgtcggccttgatgcctgaaatgtactcttaacaatattatatatgctattcaatagcaattgctgaccatacaaaaacataacacttaatttgcagtaaagaaattctctgattaattatacacagctgctaaattctctcctcacttcaatccaccgtgcaatacagctgtttttcaattcgcaacgacccccatcgctgaagatgaaagacaggtacgcatgtactattcttctactacaaatggagcttattgcagctttgtgggacagccaaacggtcagccccggcccggtggttgatctgaagatccattgcatttgcacctgacgcgctcacaacaatttgacaatttgaacctgatagtgcatgtctcaccaaactatatagtactatcaattttacatgcatgttcatcactgaattggagaaacatgcaatgaagagagatcgacatgacatatactagtacatactattccatatgcaactctagatctgaactcaacttgtgaaattgcggcctaaat

SEQ ID NO: 33730 - DNA, 506 bp, Oryza sativa
tttgagatgataaatgttagattatataaacttctctaccttacctctatttggtattgccaatttttttataagactagagaaaatgcatgtgcgacgcaacgggtgaaggctattctaatcttataattattataaggtttagttcaggtaaaactcaccgttagaattcgcttggatatattattttagaaaatcatgagttgttattaggagtccaatcgtctcaagttagcatgcgagttttttttaagagatttctatgcgactcctttggtatttctaaaatcaaacgaacttaaaaaccgactcatatacggatgacgtaccaaagttctggcaaaaacatgttcagtttttataatagcagagatataaatgggagaagttgttctgatatcgggctaaaaataattgggtgaattaatgtgccatttggaaaattgagcccatggggaattaatatatgtgtatatatgggtattacccaaattttggtaaaattg

SEQ ID NO: 33731 - DNA, 684 bp, Oryza sativa
attcctgcagccctgtcccccggccgggctcggtacggctgccacgggcgacggcacggagctgcctaacccatggaacatcgaacaccttcgtcgcttctacccctgaggagggggggtcgggtgtcaggttttggctcaggccaaccccgcacccccctcgggtgtgtagggttggccgggggctaccacacatgcattacattcttatttctcttttttcaacatttcaatagaagcagtttcaatttcctaaaggttgtgtctgtgctgttctttccttttgaagaatcttggcttaaaataaggtcactcgtactcaaccttgccatcgggggttcggtccggtcagctaaaatcgccaaacggggcccagaaccgagccgtgccccggggcgtggtgaactccgggggggaatcgacaaaaacccacaatcgggtcacccatacccctcggtcaccacgttcccggcctggccagtctcgacatgtggatctccccaggcactagccccgacccgagccattcgaggactgggacttgggcacgagcccttatttcaagctaagacgcaaaaggaccacggcacagatcatcctcatctcgtatgtatagcaaaataaaactaacacaaaaattttttcatcatttctgattgcagattaagttaatttgtacacaaa

SEQ ID NO: 33732 - DNA, 524 bp, Oryza sativa
gcaaccaatcaggatgaatattcacctatagttcccgataaaaaccgatgttttatgccgtgttctcttgtgatagcttagttagaccgcaacttacaaaagggacactatcgaccaaacgctgacgtctcttgaaagagatgttgaaagagctcaacaattgaagctaatggaagatttgttatgaataaactctagcaaatgggaatatcctagattccatggatgacgtacatacagagttctttttcccttttggaagttatgggatataggtagctatagtactagtattgcatcggaaatgcttgcttgcaacgacctagagtatccaattagagtggaactataacccaactatttgcgctcttgtacaaacaattgctcttttgaagctcttttcttttccttttatgtgtaatggaaggaacaaccttttgcactacttttgttgtctagcattgtgctgaattcactagttaaaatggttagggtactcaatgtaccaagaaaacaaggtcgac

SEQ ID NO: 33733 - DNA, 925 bp, Oryza sativa
ggttagagcccgttggatgcatgatcggacggctcacaccccatgcaatttctgcatgtgaaacctacctagaacgcctattcgggaaactcttctcatcacggtaaattcagcaagttcaggcaacaattgagcatttgggccagtgacagcacaccattcgcctgcgtgctagtattagccagtcaatgtacagcgatggccaaaaaaaagaaagaaacgggagagatttttttttctttttagcaactgctgtgtgctgcttaaaaatggggctgcgaaaaacctctcgcggttagcagcagcacgcacgattcaggaaggaaacggccgcgtttgctttgctgctccccataactccctgcagtttaagcccctccaaaacggcgctttcctgctcctttttcttcttgtttcttctccttctcctcgtcggcatcctggtcatcgtcctccttttgctttggagactcctccccctttccttgttgtctctcttgcgggatctctacgtcagagctctcgcacctctctcttaagcttttcttctctggccgatccttgaagcaagacgccggtccatggtcggataaggatttcagactgctgccctggtgccgcgatcctacaagcttgtgtgagttatctttcagtggcatctttcatgtgcatgttttttttttaatcttctttgtttcgatttcatcttttggtttcttgtttcctacagtatgttttttgtgtttgatggattgaatagttttttagtttatttcgttgaattatttggtgtttgaatatgttccgttcagatgaaaagtactgaattgtgcagtgttgatgaagttttgttttgctgattcgatgcttctcggttcacaccaaaatgttcctaaaatggttggaggctggaagaaacagatgg

SEQ ID NO: 33734 - DNA, 667 bp, Oryza sativa
cattgtgggtagagacaataactgctactgggctattgtgctactgccggtaccaaaataaagaacaatatttttttagatatgtgaatctttttgtgctagcatggttagaagagatagtttaacaatgattctttttaagatggaccccaccttaacttgcataagagcaagtttaatagtataataacccactactatctccaattcatctatagccaatctaatagccaataattgcttactacactattagtatatggttccacctgtcatacacacattgtgtcttggagtccatgctgcagctggctacagatctgtagcccgctgctcttctctctcatcttttatctcattaaaatatatttgtagccagctaataatttgctattgtacctgctctaataggcatagcacattgtgagctttgtaataactgttaccacctaaacccttggcccacattattattagtttagtaggatacattacggttgcttgagaggtactaccaagaagtattaatatctgtagtgcaaattttggtattttttaataccaaagataataagagatactaaattttacgctataaaatgtggtatcttttggtaccttctaaaaactgtaaaaatcattcattagtaatacgtttgtctataat

SEQ ID NO: 33735 - DNA, 510 bp, Oryza sativa
tagtccatggcaattagaatagcatacagattaaatttagtgaagagcaaatggctaattcaaagaccctgtcagaaagaaaattgtagcctgtaaaactaccaagagagcaccttcaaagaccctattgatgagtcagtaatcagtacatatatgagaaaggaaacaatagaacttctatgttgtaaaaaagcacaaatgcattaaggatctgatttgcaactagtagagatactgccttcggagttagtaaatctgaaagatgttttaggctacaagcattggttatcctttctaacaaaacaataccaattgttcagcttataaagtgcacactaactattgggtatatatcatgatgatggatatagatgcaaggcatggcaaattaagtcagagaggcaatatatacacaaaaacatgttgcatcatgtacaaattaagtacctgctcgctggttagtctttgctgtcttcttgtgtaccttcttttgtagctgtacattattaa

SEQ ID NO: 33736 - DNA, 608 bp, Oryza sativa
tagaatgacttacattatgaaacggatgaagtattcttttagcaatattgtataactttaagttaaattaatctttgtaagtacttgtacagcaccaatattgaaaggaaacaaaagtggatgggcactggatcctggataaaaggaaagctccaaatgaaccctgctatatgtacgacttctccatccaatcggcgtatgaccgaaacggcagagcaacacactacatgacggcgtgaagcttggtatgacgtatagcatgttgctaacactgcgtacgccgtagtcgtccaaaagtcatcacatccactaaaacatagaacacatcatcatccactaacaataattacatatcaaatctcgtgcaagcatacaacatcatcatctacaatttgttgaattctacaaatcaaaatacaagcatatttaatcatcacccccacatcatttccataatattttaacatatctatttattatttttataatatttagaatatattcatacatatattccgtagcaagacacctcagtatctcacttagtggttgaaaaaaacaaggcaaaatgaataatttaacctcatgtttcccatcatataactaaa

SEQ ID NO: 33737 - DNA, 613 bp, Oryza sativa
accaaatcaaccattttttaactttgactattaatagcaaaaaaaaataaaaaagatcaatatgtcaaattgatgttactagatttatcattaatcaaattattataatatgcaactctttttatttaaaacattttatttttatagatattgtttatcaaagtagtatctcgaacactgtgtcgagatttaaaaatatttatattttaggacagatgaattacatagcaagtcttatgtttgcattgtccaggggaaatatggctttgtttcaatagccacaattatactccctatattaggggttcaatcccatctcttatgaaagaatggacttcgaccttgagtatcaaactgaatttaaaaattgatagctcagtctgcttcgtcgcatattgctgactcaaagtcaaaaactctattatatctagctccttaccatttaaaaatcacataaataattcttacattctggaccgctctcatatagtacagatccatcagcacgaataaacatagactttttaactcccggccaggcggctagcccacgaggatataggaatagtagtctggaccacattccagccgtgtgcccctaccatcgcccccc

SEQ ID NO: 33738 - DNA, 663 bp, Oryza sativa
tagaggatccccactggaataaatttttgaacgagaaccattaaaacagattatgaagtgcttgtgctattagtttggtttaattaaaagagaaagggaggagaacagttctatttttccaacatttttagagggcttttatgggtaaccatttggcataacctagggtcaaggaagctctgataccaacttggcacgcccggaatttctatccaaaattccaaacgcttacatgtgtgtgaaccctcgtccaggaatcagccgaggcacacaataacaaattgataatagagtacaattaatactctaatttaaacgaataaaatattattacagaggtagatagttcctctcaatcaataaagatctaagcagcggaaaataaaataaacggcgcggacggctccactccacaggcagcttgaccaaggctacacctaatcctccacaccatcagccttattggagaactcttcctctgatgaatgattgcaaggggagtatatgacatactcaacaagtcacgcagcaaatatgcaagtgcacaaggataccaaaagaaggcataatagggttttattttgcaaaagcaggatttagtaaacatttgagaatttaataaaacagtgaagttttaaacaataattaaccaacgctttacaa

SEQ ID NO: 33739 - DNA, 557 bp, Oryza sativa
aatgcaaaggttagtgcagtggcaggcgtgcacgtttgacgttacagctcccgggtttaactcaagaggaagaaatctctctctaaccgcttgcattatttgaaatggagtagtaggtaggacctactcccttcatcccaaaatataagctattgtcaaacttagtacaatcttcaaaactaatttttaacttaaaatttctcatatataaggtttgttgcaacaaaattataatcatcttaaagtaaatttaaatgttaatccaataatttaattttaacaaataaaatttaatttatattataataattattggtcaaatgtttttaaagttgaatattgaaatgtgtgcacgtcttatattataagatagagagaataaaagttaattaagcctaatttgatttatacttattagctgtgcatgagtgtaccatcttacagtttagatcctctctagacaaaataagatctgcagtttttttttttgttggcacaagatatgcaactgtatttatttcaatacaagcctagagctcgtgcgttacaacggaaaa

SEQ ID NO: 33740 - DNA, 569 bp, Oryza sativa
tggaatacatggaaaaatggattaaccgcaagaagggcctgcgccaagccggatttttcacaatttgttccttttgaaaaacttatttcataaataaactcctgaaaaaacttattctagaaatgcctttttggaatgccaaaggcactggcgtcgtcgtccaacgagaagcgccgtcctcctgccaccgtagcagggcggcgctaaggtggcagggggagcacgccaatgtggctggagctgccccccccccccctccacgccatttttaattttgggataatttttttaggggtctatctgcgaaataagttttttaaaaggatcaaattgtaaaaaattcagttgcgccaaaaggactccatctctccctgcttgttcattttagtttctaatgtgctgcaacaactcatgagacaaaatgaagaattcaagcaatctaccacagcagtcctgtgccaccatacagtatgctgatgacacccttatcatttatcatctgccgtgcaacggaaagagatgctagcgtcctaaagaaaggactggagcttttcgcatatgctacagga

SEQ ID NO: 33741 - DNA, 647 bp, Oryza sativa
cgaatagaagtagatgagtgcatagaaatggacttattcagagacaaataaacctataagatttaaaaatttattatagaatatatcagcttacatctactttttttatcacaaccaataataatcaatcaaatttatccaccacttcctctctcaacttatcctaattgcaatgattttttttcatttaattattgttttctcttatttaatttcacatgctttcttaataacccataattaactctagaaattgttataccatattttatcacccaacgaatagtaacaattaatctctccgtctcaaaataagtttttttcacccatttcacacaaaccaatacaaaaccaaatagactaaaatattcccattttatcaaatcccaatacaattatttttctttttatctactcctaatgtattatccacactactttcataaactttgagatataatgtttacttaaaaataaatttatcttagaacatataggaagaaataaagggcttatttggtctggtaccctaccaaaattttggcagtgccaaaacctggtaagttttggcactaccaaaattttggtatggtagcacagtaaatacgagtgtttgggattagtgccaatgttgtgccaaattttta

SEQ ID NO: 33742 - DNA, 570 bp, Oryza sativa
ttaatattgcttaatttttttgaataagacaaacggtcaaacatatttaaaaaagtcaccgccgtcggatatttagggccgtagggagtaattaatcaataatcttctatagatatcagccaatttgatacgggctctatatgagtaaatcagattttttttaataatgaaaatatatcacacaagcaaataaataaattagatctaaagatattctctccatcccaatttgatcatcacctggcgattttgaggtcttcctaaaataattatcatataataataagtgtctctttatttatttattatgcaaagggtaattgggcatcgctgaatggaatgcatgcatgaagccatatgcatgctacgactgttagtgcaattccatgcaacatttaaagtgtgatgcaatatccactggatatatggagcaccttgattggtgataattaatttaaaaacatgaaaattttattgtccttgtctttgcaccttttatttaggggatgatcaaattgggatgaaggatatactattaaactaataataaatagaaatattagttgtttc

SEQ ID NO: 33743 - DNA, 663 bp, Oryza sativa
tcgtagttgttttatcacatgctttttcgctttgtcttctatgtgggtttttgccggtttccccgtagtaaacagtgcagttgtatggtttttgggcctggttttccttataaacagggtcaattctcttatgcttataaattcgatagatctcctaccgtcgtttcttaaaaaaaaacttcttattggaattatttgataaacaaaacaaccctaaccagaatttccgagttatggattggaattctttttcaggactggggtttttagaaagatttaggtcgattttgaaacagatttgaacccgattttaaaggaaaaggaagagaaataatatattagttttattgatgggctattgtttcaatcggcattggcttaattagaaggtgtggtcttgtcttaatagatcttatagttaaattaaaacatcgtccaattgacaaaatcaatttattagttttaccttttcttttttctccttggccctttaccctttgaatctcgttctctcttttatttctactacctaggtgtgaagatcagagatactgtatacgcgcatggatagcatatccaactaaagataggaggtgggctatatatgtatattatgtaaatatagactagacttgtttatccaggcatattccataagtctta

SEQ ID NO: 33744 - DNA, 1290 bp, Oryza sativa
gcagaggacagcgattaattggcacaaagaaaattcttctatactcaagtttgaaaagaaaacaccgcatagctaactgttcgtattgaggaacagttccctttcatttccagtacatgttcccaaaacaaaaaatatttttgcagcacagactttcatggcttcctattgacacctaacctgtcttataaaaaaaaaatcaatttctaactatgaagttggacgtagtttataggtgacttataaatcaatttctagctacgaagttggatattttatgggacgaggggagtagtactattcatccgtcccaaagtaagtgcaaccatggttttccgcgcccaactttgaccgttcatcttatttgaaaattttttgaaaaaaattaaaaacataagtcacgagtaaagtactattcatgctttatcatctcatagcaacaaaaatgctaattatatataaaaaaattaaataagacggacgatcaaagttaagcgcgaaaacccatggctatatttattttcggacggaggtagtacaaaataactcgaggaagcatgtcagacagtggagcagtgacacagtgacaagcggtgatattgatccataattttgccctgattgtgtcaggaaatcaagcatcatcaaacagaacttaagtgcttacacaaagttgttcttactaccatctttctgtacacacaaagttgtaccaatatctacaacatcaaattagtttcattaaaattagcatttaatatatttgataatatgtttgttttttaaatattgttatatttttatataaagctaaagtaaaaaattcaaaatgacttataatacggaacgggagaactagtagttgtatgatgattagagatgtactccctccgtctcatttcaagtacaaccatgagttctgtgctcaaccttgatcatccttcttatttgaaaattttttataattaatatttttgttgctatgagatgataaaacataaatagtactttactcgtgacttatgtttttaatttttttaaaaaaattttcaaataagacagacgattaaaattggacgcggaaacgtatggttgcacttaaaatgaaatgaaaggagtaatgtacatataaatgttatagatttcatcattatattaaactcctgagcaatactctcgtataggtgtcaatacattcagggacaccttgccggtcaaacaaggacgggtggtcacagcatcgcactccaaacaattaattgaaaacttgaaggatgcaacaaaagagca

SEQ ID NO: 33745 - DNA, 856 bp, Oryza sativa
tcagcacaacagtaacagttgatggccattcatgaaaatgacagtaacagttgatatgcactcatatgtggatgtgtcagtgtcaatggccataaggaaatgcgcagtgagttatggacttcacatagtattaatctggccagtcatcggatgtgatttctgaaatagtaatgttaatatgtttttttttcatggagaagtgcaaatgttcttgtccaagcattttctgcaccttgaatattagagaatctttcatctagtcccgttatttgcttatttacgtacaaaaacaaactaagaacaactttgtgtataatttcgtgatgatcatccttttttatgcgaatgtttcaccgtgcagaaggtgagaaggaaatacttaatgagttggagacttcacataagcaataacgtcaatagctttgtgatggagaagtgtatactgtaaaccctcttgtccaagcattttctataccgtgaataatcctcctctaatcccattatttgcttatttatgtgcatagaaagatgcacacaaattaagaaccttatgtgttcacttaattgtctggttatgcttgattgcctgacataatcagcgcaaaattgtggatcaatagcacctctttgtaatcctttcttttttaaaatatattttaactgtggggcttcccctgcagtatttcccctaaaaaaatcaatactccatcaaaagagagaaatacttttatcacggggttctgctataagattcagttgtataacgtatgtacaactaaagacatgcaaccatatatcaatcaaaggacaatatgttcatatgcattgcagccatttacaactattgatcaaattt

SEQ ID NO: 33746 - DNA, 670 bp, Oryza sativa
cattcctgtattctttttgccctttattgttaagtgcaatgacacctaaatggctaaatcgatcatacaacattgtttcctttatcttctctttgcatttttcttgtgggttatgaaacctaacatcaaactaaatttattgcaagagcagatcttctgcataaaaaaataacaatagcaaatcttttagggcttctttaaaacaatgcgttgaaaaaagagaggaataggaaaaacacatatttttaacaagaatacaagtgtaaaacagataattgcaaaacacaaaaaaaaatagaaatagaaacattgcaatgggataagagagatagactcgtagggaattttctaagaggtttgagctcttgttaactttccatcaaattctataggattgtcaatttcataggaatttcaaaggaaagaataggatagtttcaaatgtattcataggattttttttctacaagattaaaatccttcaattttcctatattttttctacaaatgaaagggcattagtttcttttttaaatcaatagccataccattgaagaaagagatggattactgtgtcaccggtagtatctcttctaaactacagtatggaatacttcttttcaaaaaaaaaacagtatggaatacaaatatatgcatttaaagtggttct

SEQ ID NO: 33747 - DNA, 671 bp, Oryza sativa
cccagcagaagaactcacgactcgtctggagtgactccgccgctacctcatcggcccctcccctattttcatctcctcgcgtcctcattggagacaaggagggatgaagatgtcccccatctggttgcatataaatgcatccgccctacccaaacagaaggaactcacaactcgactgttaggagtgactccgccgccacctcgtcccctcccctccatgtcatctccgtgcgttatcgccggagataaggaggaagagaacaagttcctcgttcgtcttcggtaggttttcaataaatcttgtacgaggttagatcgattagatgttgatgggactttggcttctctaaagtcttttgctttttatccctttggtggtgggtattccattcgtaaggctatatatggaaaatttgggaagacttctctattaggtcgtcgataattatatttgcggtgttgacttaggaccttggtttccgatttattcgataacatcgggtcaatgttgtatgggaagaataaaaatgttgacgggtgtttgttcatatgttttttgctgtgttgagattggttagctaccatgacagtggctgtatgcatgtttatcttgtgtcgttcaaagatgtagagcctcttatgctatattttgattggttctatattttaaa

SEQ ID NO: 33748 - DNA, 1066 bp, Oryza sativa
aaaacacctcatcaactaactcgtcgaacttgcaagaaacccaagtccaggaagcctcagcccaccaaatctgcccgtgcttgtgtttgttcctgtgcttgtgttccttcctgtgcttgctccagttgaggatgaggctccatttgaagattcaggagatccttccctcatagacgacgttctggtcacaacactccgctgctgctgcaaacgccctaatccttccctactagatgatgctttgctcacaaaaccccactgttcctcctgcaaaagtccagcaatagctcgtttcaatcatggaaagcgcaagaggaaactgaaattgcatgcaacaaagtgcaacatcaaactgaaaccacacctgtggcacctctgccctaggtgatggttcagctgcaggtgcggttgtcggcagagctggaagagcagtagattgaggcaacgaagaaacctgcaaccagaaacacatgaacccaagtcaacaaactggggccatgttccgaccatgacaaagctgggaaaagtgcaagcctttaccctcctaacaactcgctctgaagatccaatagctggaggaacggatgctgctgggacctgaaaataaaaacatctcttcagaataagcatataggaaaagaatatgcttatagttgaggtgcaactggttttgttaaataaagcatagaagaagcatggcattaaggaatcactagaccattcaaacttgcccggcgaatagtggctttctgggtgaactcaaccaagtcagatattccattagccgtatgatcctaaaaggattttaagaagatagcattaggagcatgtcgatgagtttgttggtaatatgtagtggtaacatgagcttctactttcctaaaaaaaaaaacatgagctttctactcacctgggtgtattccagactcacaagctttgattcctgcatgatacaagatacaaaaaatgtacacgagtaatattcagtaaataaggtagaaatctggatattcagtaaataaggtagaatctgttccggtacgaggcacataccagactccgaact

SEQ ID NO: 33749 - DNA, 847 bp, Oryza sativa
  unsure (1)..(847): unsure at all n locations
cggaggataagaacaattataagaattaagcccctcccccgattgatagggccatttaancactccctntnantcncttaaccttcncccccnnnncnccagtgnttttgtgatcgactggcacatagcncannacannacanaaaaaacncngaaccgggacacaaacaanaacaaaaancaacagggcagaagacaaacggaaggaaactaagagacaagaaagccagcaagggaggggaggggcgccggaccagagggaggcacgcaaggcnncggacccaagagnaccncaaccggacccncgnnaaaaaaaaaacatttatgcaacatttacaacctttggtccagagacacactgcacactgcacaggcagctaaggaactacctgtttggttctatcaccttccgaaacttttggcagtggttaagaacagctacccgaaagcacatgacaagcacacacagctttaaattcctcagttatcacttatcagttaaccaaaacagtcagcttgccgactggtcgcgatccctgttgctcggccgtcaaacaatcgaacaaaagcaaaaggtaaatctaattacctcgtcggggggggtagccacgatgagccaaggggacgcggtcgtatgtgtcgatggggtgccacagattgggtgctgaatggtggtcttaataaatggcggcaagggcgcgggggacatggaggacaaagggccaggtcacggtgtgggacaaaaacgtcggggggaaatcgtcgcaagcgcgggggccaacgggcctgaacaaaaggggagggaaacgggaaaaaaagagaataaatggcttgaccaaagtcaaag

SEQ ID NO: 33750 - DNA, 866 bp, Oryza sativa
  unsure (1)..(866): unsure at all n locations
cgtcacttcatacaatcattatataacttatcaatttcncgctcttcttacctactcttcactttcttactttttaaatatgtttactcctattctctcccccccccccccccccgtgggaattgctnatacatcgtagaacccnnccncaacacggcaggnaanaggaaggcgcgccacacccaacgnggctagcaanncaaggcgaagcaccgcaggncccgactattactccaacaanngngcaagaacgccgagggggccaagccatgaccaatactggttgctttcagccaaagcgctttaactagaattggatcaagttgagttggggcggtcatcaaggcgggagttttcagtcaatactaacaggtgtgttatgctcggaggcggttgacaaccatattgtcttaccatactgcttctgatgaaacttcacttgacatgtttgttacccttgccatgtgtgtgatgtgatgggtgtttttgcagccggtctagggagagataccgtgaaagggataacggtaggggacagcaagaaggaaggagcctaggtggaggaggaggggtggaggccggtgggtctgcgacaagatcattttcaagcaaccttcccacaatactgcagcaaccttgagagcgtactacgagtgacgagcgtactagcacaggaggaaattattattaggagaatgctgagggaagtggtgacgcccagaggtccgagatccaaatcagcggtgggtttgtgagcttgcaccaagcatactccttttggtgcaacaagtcttcggcgtaaccttaacctcaacctctaagcagggtgtaatacaacgcagggagcgttaaaaaggaaatggacg

SEQ ID NO: 33751 - DNA, 751 bp, Oryza sativa
  unsure (1)..(751): unsure at all n locations
acgacacgaaacaatattaatctaaaanccncnnnnnnnnnnnngngngannnnagggggcgcatatgattgaccgcttaaacattaaagcatttctctagctcacacctactttttatgctggtaaaaacatgctaaatctagatttgatttacaacgttattctctctaccttggatccgcatatgccactcccttctgacatagatctctgcaaaagttcaatgcctgagattgatcaaatatctctgatagttccaaactgtccaccgcactcctgcagtgctgaagatgctgatgggcgtgatacatctgaaacaactcccagggcagatattcttgaacagtgcaattctttatttgctccagaagaattagagcaatctgagttgacaaagactttggaagaaaaaaagcatgagaaaataagtacagatttggaccagaacttcccagaggacacaaaaagtaatggaaaattaccagctggcctttttcagttagataatatttttgctactgattactatgatgcacatgctgattatctgcagctggtgaactatcaggactgtgaattaagagctctagaatttcagcgcttagcactgaatctatgcacacaacaagaacctacagttgaggggcataatgctggaatagatgcttttctgttagctgctgaatgctatgataatccactctttctcttggatttccattctaaatcggagtcttcggatgaaattga

SEQ ID NO: 33752 - DNA, 594 bp, Oryza sativa
ttagtctgaatacagtggattctcatccacaatgtcacataaaggcgataaagttcaatctgcaatcaactttctgtacattaagctcttgtatcttcacaagtttattaatgagaaggggaaatcatttatgcaggagtaaagaaacatattatcccgtcataggtggggtcatactcatgcatctcaatataccaagagaacctaacagaatgatcctaactaaaaggatggatatggaagaactagaatgaagagagcaggtgcggtcctggtatatactgtaatgatgatggctgattatggttcttctgccatggtcccaggcaatcagattcaactaatttgcactaaccataaaaatacagtagttgtaatatacagttttaaaaacattttatttgaagaaaaataaagcatgcacactagaaatacaacacaaaattgtaaacaaatgaggtggaagaaaatgtttggagatatatgttcattctagtataataatcacccagtgtagccacttccaatagtgagctagcaacctatcttcttcaaaaatgcattcacatttatgctacataaaaattgatgaga

SEQ ID NO: 33753 - DNA, 703 bp, Oryza sativa
  unsure (1)..(703): unsure at all n locations
cggcggnnaattggactacaagttgagacagtcacacaacaacatgcgaattgttgcacgggccgtacaggcacatgagactcggtggtgcgatgcactaaagcgagtggcacaacaagggtgccgactggaaagcgatcagtcggcagctccccactgacttcaagacaccacactgagatacgcaccccaggcacaacaattctgcttcagggtcgcatgttgagagagagaaaagagcggccaacacaccgcacacaagagaacaggtatgggctaaaaaaataataaagcttttggttgtttaacgtgactattatactctccaactattaggttgcttttagatgacatggtacacaattatcgctagcaatcgacgataatattaaacctgccctaatgccgacgtagtctgtcttcacggaacaaaggtcgcagccatgtccccgaggtcagtttttggctcaaatttcggaatcatgataaacatgctgccccttctggtggtttttttcgcgaactgtcctttcttgtggttccaaggagatgatgataagatactctttttacatgagctgagacataagcgtgctctttgtgttggcgcttaaatgggtgcagatgatttcaacttatatatacaggagaaacttgtgttgcccataagatatagccaggtatttcaactatactagaattg

SEQ ID NO: 33754 - DNA, 900 bp, Oryza sativa
  unsure (1)..(900): unsure at all n locations
cggggncntttgccttgcatgcacttcccgnncatcacaataggaccagccagcgagtaacgggggaagagccctcccccccggggcgaactcatgaaaagggggtgttacgactccctggtatttgaggtcttgcctgaacacaatcaaaggatgaataggggctggtgccccaatattatttttggattatatattttttaaccatataaagttaaaagggctgaatttgccttaatttttcaagagcccaaaatattcccctttatttatttcctcttaacatattaacttggggtgaattttgccacttaaccatttcacggatggttgcttttaaaaactttttggaaaaaggataccaccaaaacttaaattagaggatttattatattccttataatacattttgttacgataaaaggcttttattttcttaaaacatgtactaaaaaagatatcatgatcaaaatattgaaatgtgaggcgagaaaaacaagaagaaatgtgaggggggaggaaaaaagagagaaaaataggcataattaggaagaataggaaatacatgagaaaatggaaaaaaaagaagaaaatatgaaaaaaatatgtgaaattttaaaaaaaatatagggggaaatacggaaacagatgggtcggttgggcaatgctcatgcttgggtcctaccttgtcggaatatcggcaaccatgccctggggtgcccaaaatttatataaaatactttgtgtatgtgtgaacttttttgcttgtaaatatataacaagaaagttattagtttttgcaataatttccaaaatctgaatttaatagttacaaagttatttatagaaacaactgcgtattcctaccgttaccttttatgttattagcctaatagtcct

SEQ ID NO: 33755 - DNA, 553 bp, Oryza sativa
gacttttttttccctaatcaaactttgttaagtttgaccaagtttataaaaaaacagtaacatctaaaatatcaaattagttccatttaatctaacattgaatatattttaacaatatgtttgttttgggttgaaaatactataatattttttctataatcttgatcaaacttagagatatttgactggttaaaaaaaatcaaatggcttatgatataaaacagaaggaatatttttcaagtccaaaagaaaaattctactatactattggtatttattattagtatctttcaaacctaaaaaaagtgtgcaacacgaggaactggccattacgtaccttgaacatatatatgccttgaattaatacacgttatatgatttgtgccggcccccatcggtgcacttatttaacgaacaagagaaacgacatatttgtaaaaaaaaattgtgaaaacaaaaaaaaaaaatttttgtgttttttttaaaaatattaaaaccatgttttagcgatctaaaattattaaaggataaaaaataaacttcgataaaaaaa

SEQ ID NO: 33756 - DNA, 577 bp, Oryza sativa
gaagcaaaaggcagatgcatcaacgtgatgtgtttttggaatggcttagacctatacaaggaggaatcactgaatctgtaccactagattagtattagtttggcttggccaagaaacggagcagctgaaatctgaacacctttttgatgttgctacaaatttattatattagtatcaattactatcagattgaattctgtttgtgtcgtggctggatctagattcgagtggctaaactgtacccatgttcttcagcatttctttaatctacggcattgagaaaatcatatcttcctcatcataggatgattgattacctaaggagctcccgcgtgcctctgaactcttggcatgtcaagagacaatggaattgatggcatcacgcatggcattaatcaaagaaaatatcatgagtgaatacacagtactatgacgacgataaggttggggggggggaaatgtttttagagaaaaaaaaactccataacaaagatgttggaaggaagaaaaaaaaatgttgggaggaagaaaagaaaaaggctcagccatatatatatatatatatatatatctatat

SEQ ID NO: 33757 - DNA, 549 bp, Oryza sativa
acattatcatgttgcccatgtggtggattatctacctaagtgtaaggccctggttgtgtgtagacccaaggtggttggaaaggagcatactgtgggaaaaagtatggggaattgtgataattcatcatgtgagcatttggatggtagtactgagttccaaaactagtatgaggtggagtggtatgagttgggaagaacactgatgtattgatctcaggggcagtaaaagtgggaacttggggtatgtggctaccaatactagtagtgtgagcagtagtaaatagatcgggttgagtcatgggacaagtgactccccttaagtccaccctccctggagtggatggaaacatcatcataccttcacttctttgaggattttgtgttgaggactgagtagcccccggcatctttaccacctctgcttcaccttagctttcttccgagagcaactgggcgtagaactcaacatctcctgaatcatcttcatggattgcattatctcatctcgatgaacttgagcctgcatagcttgattttgaatctgctcat

SEQ ID NO: 33758 - DNA, 664 bp, Oryza sativa
agatgggccgagcaggccacggcccactataaaaaacgtactcaggcctctcacagtgctcctagctggatcagtgctacaccatgccagctaggcttttcgtgtgcgtggcagatgaatgcgcgccctagctgagctgctcgcccccaagcagagccgcgcggaacctggtccaagcgagggagcgcgcgacgccgaaattcccgggcatgcgcactgtgggcagcatcgcctcgcacacgcgtgccctagcaccgcgaaataccacaatcgtgcttccaaaattcacttccagcccagcgaagttcctactcccgacacaacactagcgctcccgccacagccactctgtcttcagacaccaagttaggcacgaaaattttcgggattggaagagaataactcaaataagacggattcaacaaaacaaatcgagacgtatgtacaccacatgatgaaaaaacaaatccgccgtgtccgccaaatccgacgccgaccgccgcatcggagtcatctcgccgccagggggagctcggggagaaggagggaggcctggagcggcagcgtccccatggcagcgctagaggaggcggaggagttcaggtgcgcggcgacatccaccatggcggcggcgtctcaccgacggatctacgcccccaccacc

SEQ ID NO: 33759 - DNA, 551 bp, Oryza sativa
ttcaatgagacgcctactcatgtatctggagtagcagttgattcatgtctttagctgtgacatcgtactgtactcagtagatatgtcgaagtttcttatttggctgattttccagtacttgttgcttttcctttctgttggaaaaaatggtatcatgaaagtgtgggagtggaactagctcccaggtgctaaacaagttggcgttggtgaccaatgcacaccaattttctagacttggaactggagagttttaatggggattacactaaatctagactccatgggtatataatacagtctgggaaactgatggatctttcatctcggtttaattgtttttttcaagatgtgcctactttgcccgcatgttaaaagtctaattcatttcattgtcttagtgttatttttctgtgtccattttaattggtagactgccttgtgtgacagatgttgggtttgttcaaaggaagcctgggcgtggtgacactacattattaatgagttgttttgacaaaataactcgctggagtgttgttggaattcaaggtttg

SEQ ID NO: 33760 - DNA, 580 bp, Oryza sativa
gagaaagtaccgcactgttgtttcattgtggaactgtcaaatctcaaatcgcacgtcgctgctcgctgctctctgttgatcttgcgaagtgatttttattttatatactctgatgtaaagtgaaacaagatacattctacccccgtgtaaaatgcaatttattctaatcagaatttaaattttaagttgattttaacttttcattgtgatttatatattcagcattgactcttaaatcgctaaaaacaaacgtaaaaacatcttcgtacattattttgttatagcatgcgaaacgatgcgactaaattctcttggtacgcaaatccaaacggatagataccctgatgacacgattagttttctgcacgtttggaacaaacacaaatggatggtctttgacgtgcccgtgcaaattccgctaccactagcatctatgcttaaagaaaaacaccaaaataattagggaataccagcgtattaataagcatcttcttctacttctactccgtggtatctgttgcacgccacggcaccacaaaaccaacagacacaccaacccgtcgcccaccgggtcactgac

SEQ ID NO: 33761 - DNA, 594 bp, Oryza sativa
ctttcgatccaacttaaatagagctacaaatagtacaaaatccaaacacgacataacacaatacattataattattctgtaattaactctcgatttcaacttaaatagagctaagtgttagaaaaaacgcaacccatattgcttaattctgctcttgctgcatcacacctctaattttcttttcatgttattaataaattaatcttctccatgtatgaatttatatgtggcaaaacgttagtgctgcggcagtcataatcaccttagatgcctcagacacgatgctttgtcacgcgtgcaaaaggtaaaggtacagacgtgcattgtgtagcgggccaaaaagagaacttcggacgctttatttattagcaaataatatatcagatgatttaaatgatgagtccaccggttctttataagtgtacattagttattatagattttaaatttttaatttaatgggtacacaatataatgatgtagactttagtgcattatttgagaataatagtccaatgtaataaaaaatagttccgatgatttaaataatgggtccatcggtttaagtgcacatataaatcagttaatatagat

SEQ ID NO: 33762 - DNA, 594 bp, Oryza sativa
agaaatttaagccatgtaagctacctattgggatcatatctggaaaagataaaagggaaaggaaagaactgtgcgccgcaagaatgagtagataaaattagggtttgaattgttcgatacatccttcagattcagaagcggcttatattcttacgccattacaagcacacacaaaaaatgacgtagcacagtacggcaacggacagctacagctactacttcgatcagtgtgatcccttggatcttcattaacttctcctgtgaaccggtatcgtgtaatatgggccgtccatctccttatctcctcttcttctcagaacttaacttcaactgaacaatttcttttcaaaactctgcattctcagttcctgtcacgcttgctatgggaggccatgcggtggaccggtggtgagcggcgcggcgcaggagacagagatggtgtggaagaagatgcaagaggagagacgagagatctaccttggggaagagccccattataaaggcacgtacgtacgtatacgctgccctgtatacgaagtacagtatgctacattacactgtacgtgagcttcttgaggcttatgaaatctactc

SEQ ID NO: 33763 - DNA, 675 bp, Oryza sativa
tcaagttaaggatgtatgatattacaagacactatcctaagtttgaaaaaccagagtttgtcatattcatttataataaacaagctgaactacacacatactcatctgtgcgtgctcgcacacccggacacaccaaaaacatataacgaacaaacagaaaatgcagacggtctgaatcaggatacagtgcaggaaaatagttggtatgtttcccctatttgtatcttcacaataatctctagttagcatgacaatgtctcgcagatccatgctgaatagccatatgtctgcctgcaactacaaaaccaaaaaagtttttttgagttttttggtgcagggtacacagtatagagtcggaagttgtaggaatcagatgaagatgaattttgctgtccaaagcaaacaactaccacatacgggatacagtgagctgaaaagtaatgcaaatctgcagaaagaaaaacaagtggcctaaactagagcttgaacacagaaacatgtgcttgtgttgcttgggcgcaatgggtgcctctgaattggctgcagaaagagaaacatgtggcccaaactatatattgaacacatgacatgctacttgctaagccccaaatatctcttactacaaaacaaaagtatgatgccattcctctaaaaaaaagacttatgccatttaat

SEQ ID NO: 33764 - DNA, 2339 bp, Oryza sativa
acttgtgtgtattcatgtgcagttctttggttgaatccttgtgttcctccggcgtgcgtgtttgttagaagtgtaaaaaggggattgaagtgtagatgtctgtaagatagaacaagatcttgtttcttgtatgttgggcttaaaaagttttgagcaagagaatgaatgaatggttgagggagccgtcggtctgaatgtggggttaaaatgatggagatggtgagctttgagcattattatggccagacagcaacagctatcaatcaatctgattctattgtatcttgggtagctactgactgtctgatgtggccaaccaaccggagtgaccatttgtccccgtgaaagaagtcaggtaccgtgctacagtagtactcattgcttaattaatgacgagtttagtttaatacaattagaaaaacctagtgcactcgtagtataatactcccaccatctacttttaatagtcatatttcatcttggcacacagaccaatgacaagcaattctacttatcatccatttaaacatgctaatggagagtcacgtattaaatctgagaaagtcattaagatgataatttgttggattgaaatatacctattaaaaataaattttccagatttagaaatatgacaaccaaaaaatagattgagagagtattctactactagtactagtacttactcatggaggataggagttgtgatgtggctaatttagggcaggagtacattattaatcagtagaagctgtagtagtacgccttacaaatagtagctgtcagtagcaatgtcagcatcattacattaatctgttgcttgtaggagtaaaagataatgttggatggatcggtttgtggtttgcttaattaattaattaaaggctggcctgcagctgcaggcaggcatcgaaacccaaccgcaacagacgagaaatcgccgccgctgcattggcagcgatcgattagaaaacaaaaccaaaaccaaaaccaacctcgcttgcctccttcccatgaccttgtctgccaattggtcgtatttggtgttaagttcgattagtagatagagtaatcaaaacaaaagagagattagcggcggccaaatggcacgtgccgtattctacgccgcgagtctagtactccgtactccgtattgcagtttgtatgggagtcggacacctgggctcagctgtcagtgacacactctccggttgagcagagctcgtcgtcgacggcgaccacggccaatcaatcacgtgcctttgacctgtttttggtctacacgtgagccatgtagtagctcatagagccacgtgtagagaattcttgtgttccagggcgtgacggcctccggaaccggaatggtcgtctcccttctctcttgggttacaatcgcatgctccctccgtttcaaaatatttgatatcgttaactttataacacatgtttaaccgttcgtcgtattaaaaaaaatatgaaatatctaaaattatatgtgtacataaaagtatatttaacaataaatcaaatgatatgaaaagaataaataagttaaattttttgaataagacgaatggtcaaatacgtacttacaaagtcaacgatatcaaacattttgaatacgtacttacaaagtcaacgatatcaaacattttgaaacggagggaggatgtactactcttgtcatttttttaacggaaaatagcacagtagggcctttccgttaagaaaaaaatacattcatgctgctgcctagtgaaaaatctgaaccgtactagtataaaaataccgaaattccaaatggagctgcgtattggccggcaagtggagtacagtagtaaatatcaagtcgatcgttggtacgcatgactaatcaacgtcgctacaaggtccgagaacagtcaaaacgtatactacaccacaaaaatattgagacgtacagtacaaatataattatacagcctccaaaatgttgctttaatccaggtgggaagagttgttggtgtgtcaggttgtccaatggaaactacagggaggctccaaattatgtacaggaacaggatgatatctgcatagtgtaaacattactaatactcagcgttttaaaagcttgattgagattagcgtgcaaaacacacgttgggagtgtacacaatacaggcaggcgtacaccagggcagtagtatagtagattaatggtagggagggaaggccctaggcagccagcaacgcgacaggctgagccagggtggagacagaccacccctgaccccacctcgtcagtcagatatcaccagcagcgctactcctccaatactcacagacggacagacagacaa

SEQ ID NO: 33765 - DNA, 515 bp, Oryza sativa
cagttaattagcagtagctcaccaatacaccaaagatgcagaaggttgtactactactctaaaaggtatacctaactcacacatactactgttctgcaagtcagcatccaaggtaccccataattgattgctagtatgtacaaatcaagcttttcccatcagccaactttctcttatgatgaccgcaaccaacaaagacaatcaagtagcagcacagagaggctgtcctggcccttcttaatgatgggatggaattgcattgtatggcatccttttcaggttgcttagaaggcatgcaaggctatgtgtacatgaccattcaactttcaggagggacttggaagttgtgaaaaaaaaaatcagctttttttggagtacatagaaggcacatactccacatcacggatacaaatcatctgcggtactgcatgtgtcactgacatgtgggtcccacctgctccgggcccacatgtcaaaggcaccaactgcatgtgcattacagccgaggatcccca

SEQ ID NO: 33766 - DNA, 674 bp, Oryza sativa
tgtttttaagtataagatggtgcaacatgccgaaataaaaaattacacctgatgaaccaagtttattggctcattctgaatctctctgagtgttcattaaccaaatcaaaatttacatggagaaaagaagcaaatcctaatatttctgtcaattgacagaaacatgagaagcaagcatgagaaatgaacccttgtttttgtttctatcctgaagtcttctcgaatcaaatatgaatgattccccaaaacaattcgactaaaatcaaacaacaaaaggcaataaaccggaagccaagaatcagctcaaatcttacagaactgacagggctcaagcttcagacttccttcctataaccttagccaagaaaccaagaacacccagagagtcaaccccatggctcatccatccctctgctcatcatccatggcagatgaacaagtattatcttctccctccaaaacccagagcacaagaacaccagaggagccaagccaagaactctgaagaaacacacagataaacatgatgcagctgagcagtgactaagtacctgagcttcagaaggttgcagtgttggcaatctgaatctgatcagaagttgctctcagaaagagaacgggagacagcagctcaggaaaggaagacatccattggaagcaatggatctctctct

SEQ ID NO: 33767 - DNA, 520 bp, Oryza sativa
catatatcacacaaataaatacctattagttctttttctttgatgacttgtttagcttttttgtcctacatgtcgctcagttgagtagactctccaaatacattttttcctgcaaaatttaacaagtgtataggattatatagtcttttagaaaagaaaatctgaaaatataggtagttacaggccaattccactgaaattacatatgtaatattagatgtgtgcctatgtaattttgagtttatgcattttgggaagattgattttaatcatatatcacacaaataaatacctattagttctttttctttgatgacaagatctgctcctgtgcccagcatgttgctcagttgagtagactctccaaatacattttttcctgcgaaatttaacaagtgtataggaatcaagatgtaaacttacatgatcattgtactataagtactactgttacttcagaaaactgtgtatgtaaattaattatgaaataaaaaaaaataattagttagctggatttaaa

SEQ ID NO: 33768 - DNA, 901 bp, Oryza sativa
cacgtggcgccaaacccacagggggtcggggacgccccagccctcggggccgaaacaggagcggccccgacccctcggggagacagagggaggggcggccacatcaccctcgggcccgaccccccgagggggtcaggccacgtgggtgaccgcggctgccccaaaacctctagtcaagatacccccggtcccatgtcaccgacacgaacggtcaaacatgtttaaaaaagtcaacggcgtcaaacatttagggaatgagtaagtatattatattgttacaataagtaattttgtgatattttagttattcatttgtgatagttgtacatggtgttttttcttcagcaatatctcgtgatgttgcagtttatatacctgcttgttttcttttatttttgaaaaagctttgataatttcatcccactacatattagagaatgttccatgtttagtcaactgttatattttgaccagcatatggatttttacgctcggatcagacatccgacgtctactcttgtcataatatatactccctcgttttaatgtaggacgtcgttgactttttaattaacgtttgaccactcgtcttatttaaaatttttatacaaatataaaaatacttatgtcatgcttaaagaacatttgatgataaatcaaatcaaaataaaataaattataattatataatttttttgaataagacgaaaggttaaacgtttgtcaaaaagtcaacgacgtcatacattaaaatacggaggaagtacttaatttctaaacattcggagcgtaacgaatataaacacagaaagtccccgtaaggtagcgagataataaaatacacaatgatcttttcataatactactaactcaaaaaaaaaaagatgcaatgtaatggagt

SEQ ID NO: 33769 - DNA, 553 bp, Oryza sativa
agcgccagccatgcgttaaagcaatcaagtggcggcgagcggtggattccgacatacgttgaagcaggccgaggcggcggcatcgaactcgtccttcccagcgacagcggcgttgaagcaagcggtggcggtagcgaactcgtcgttcccggtggcggcggcgtcgatgtcgtccttcccggcggcagcggcgtcgatgtcgtccttcccgcggcggtagcggcggcgacgttgaagcaggcgacgccagcagcaaactcgttgttcccggcggcggtggcggcgtcgatgtcctcgttcccggcggcggcggcggcggcggcgatcgatcgagaatcccagcgcttctagggttcgagatgcccgtccatccctcccgatccggttattgcacgtgaagttacgtttttgcccttccacctcagttctccacgtggtactgcacagggacagaattggtaccgccggtaccaaactctaccagccgttggatcgggccagatccaacggccaggattttggtaccgggcagtaccggtaccgaccgctgtac

SEQ ID NO: 33770 - DNA, 653 bp, Oryza sativa
gcagggccccaagcagtttgctatcttgcctgaaccatgtgatttgcaattcagactcagacagactcaccatgtcctaatgcttccagttctaacaggtggctggccactaacatctcctgggcacttgatatgtgtcttactgaacttctttaattctcccaacagctattttcatttcctacccttatcctaccatttttggtcccattttacaggtgggacaactgagtcatgtcactagtaagtggaggagatgggacatgaagccaggctgtctggcttcatggtccactctggtcacctctctatcacagctgctgtgatggggccctggcccctccctgcttggtaccacaccctatctcttccctgatggatctcttccagctgtgcttctctttggtggcctctctctccccaaccagaagaggacacagtgtggaattgcctgttggggtcataaggacaccaccgctttatattaatgatacatcagcttttcatcgcattacatggagggtgaattattgcagccttggaaaccctgactgtacaccttctcgttattcttttttgctgacgtgctctacaactggtagaggcaaaggcctgcattgattaattttcatagcaatttttgcctctaatga

SEQ ID NO: 33771 - DNA, 738 bp, Oryza sativa
ctttataggcatgttacttaatttatctcttcaggtgttttagacggtcttttctttcaatagtttttattttatatcatcatttttagttatttacaaattgtattcctaattgaaatctttttttctttttataatttcagaatttatattttttttcaaatttttatttaatttatctcgtcatgtgttttagacggtcttttctttcaatagtctttctttttatcaccaattttagttatttacaaattttattcctaattgaaatcttttttatttttctaatttcagaatttattttttttcaaattttaattaatatcatatagtgtaattttaatattttttttttgaatttaagttgtttcaaaattatattcctatttgaactctcttttagtttttataatttttgatattattttatttttattctgaattttaattaatctcgtattgggtttttatatggatttttcttccaatattgcttatttttaattctgaatttcggttaattttaaattgtatttctactcttcttttctttttgctaatttcagattttatttttatttttattacgaatattaattaatctcgtgtttggttcttatatggactattctctcaatatttcttattttcaattccgaatttcagttatttttaaattgtattcctacttggactctccttttcttttctaattttggattttattttatttttatt

SEQ ID NO: 33772 - DNA, 703 bp, Oryza sativa
cctacacgtgtctggtttttaggttttttctttcggtttttctctggttcttctgtttttttgggttttttaatatatatatatatatatatatacaaactttgtatacatacatatatatatatatatatatatatatatatatatatatatatatatatatatatatatatatatatatatatatatatatatataaagattatatacacgtataaaaaatatgtatacatcatatataaagtgtgtatatgtgtatatatttatatacataaaaaaatatatacgtataaaactccgtatatatatatatagagggagtataaaaaaaatagcacgcaccactgctagatgtattagccgccgcgcgcccaccctatccgcccattagacgcacccatacatgcactggtatcactaaatttttcactcattaattatacactcacactcagagtcatctaattctagatctacatagatcattgttccctgcttcatgtacacgataagcttcaaaatctttataaatgagggctccctaaaatacatatggggaagagcagatacaatcacagatattgagcccgctctaaaacacatatcacagataaatgaagagagattagaggagcggcctacatatttggtacccgctccaacataaactacgagagataatgtgtgtgtgatatgtgggacc

SEQ ID NO: 33773 - DNA, 659 bp, Oryza sativa
  unsure (1)..(659): unsure at all n locations
tgggaagaagagcttaggaatacactttagaagtaactgaaattcgaaactaaaaattaaagaatattgaaagatgagtttagagtccacataaaaatacaattagaaataataaaaattcagaaataaaaataaataatattggaagaagagcatagagtctatatagaaatacaatttatagaaaattcggaattaaaaaaacaatattaaaagacgagtctagagtctatataggaatatatataatttaaataaggaatagtagaagtagagtatagagtccatatagaaatacaattaggaagtaatagaaatttggaattaaaaataaggaatattagaagtagagtatagagtccatatagaaatacaattaagaaaaaaaaaatagaaattcggaattaaaaaataaggaatattagaagtagagtataaagtacatataggaatttaaaactaactaaaatttggaataaacataatacaattaaaagtagagtttagagtccgtaaaaaatacaatttacaaataaataaaatttgaaattaagaaaaacatgggaagaagagtttaaagtcaatataggaatacaatttagaagtaactgaaattcgaaattaaaaattaaagaatattgaaagatgagtntagagtc

SEQ ID NO: 33774 - DNA, 547 bp, Oryza sativa
ctgcagccctattccttatttttaatttcgaatttcagctatttctaaattgtatttctatttggactctgccttttctttttcttcgattaatgtgagaatttctaggccataagagcgaacgtggaggctcctttttctattcctttaataatataatagatcatttagatattagatatatgaacataagcgaaagagcctgtagcctagtggttacacgagcctcagtggaaccataggtcacagtgggttcaactccccatgagagcgaattttttaggatttaatggctttgtgctttcaatggtaggtgatgcaaccgtcgacagcgaggtgttctgtggtgtgtttgcgttgtagtgttgtactgtgtattttttttttaaaaaaagaagatatatgaacagtcaacctgctcgcgacttctaagggccttgaaacagcagcctgggccacaaacggcccgtccgatagtgtgacgatgtggcccaagctgagcaccacagctcgggctcattttcgcccatgcgcctgcagagctcgg

SEQ ID NO: 33775 - DNA, 532 bp, Oryza sativa
ttttgcataagatgttttctgagttctgacaatttgctgcctgatcaattgctaacagtttgattagtccctgtgtaatttagtagtactgctttagtggacgcggcaatgtggcttatattttcgtcgtcttttcattatatgcgtaataaaaactgaatgattgaatgtgtgtacaatacatctgagttggaccagcatcgctggtgctactctaggacagtatgtttcataattgaaagtttgaaaagaggcacctaatcatgtattccactgacttattttaacacttggaatagccttttggattgattatttggcaagtacaaatatactaatgcctgcagaacaattttcattttttgtcgaacttggaagtgagtgattagtaaattaagtaggagtactaatgcaacctgaggctgtcgactctgatgaagtatccatgcattctggatgtcactacatgtctacatgatgtctgcttttgcttctcagtagagaaattcatgccattactgtttgagaactg

SEQ ID NO: 33776 - DNA, 738 bp, Oryza sativa
tctagggacaaaaatccacttccggtatatcaccaccacccatcactctctacacctgtcgctagctcgatagtgctcacggtaacggccggaaactgcccctcgaatctcgatcagcttagcttagctataaattcagcaccatgcatgccattgcaacctgcgcctgagaacacagctagctcactctcaagctaagctaagctaggagattagacgaagaagaagacctctagctttttccatggcctactcctcatccagcacattgaggtcgccgctggtgcgcgccgccgtcgtgctgatgctgctgctcgtcgtcatgtccgccgccgtctcgcgcggcgagcctgatcatgatcatgtgcagctccagctggccgtgatcaccgggcggagaatgctcgtcgtcgccgggagcaacactgccactacgatcagctcgcagacggcggtggcggcggcgatgccgtactccgagtcgaagaggtcgagccccggggggcccgatcctcagcaccattgattgatcctgtgggaattttgcatgaggctgtccaactccctacgtggaatcaatcaattagtaactactaattaattcactgtgttgttgtgcgcagctaattaaggtggtgtttgggaggggagggacttattttagtccctctcacaaaaacataagtctctcctctagagacttatgcttttgtttagcccctcccacccaaacaccat

SEQ ID NO: 33777 - DNA, 1129 bp, Oryza sativa
ttgtacttgcacctcatcccaccatcgccgccgccgccgccgacgccaccggccaacgccggctgcacggcgcaccagcagaggcagcaaaccaccagcacgctgccgacgacgtcgacggcggcggcggcaagcgcgcctcctcgccgcgccatcactcgcaacgccacagctcagtgacgacgcgagacagtggcatacttacattatatacacttggtcttggttggtttaatgagcagtgacgtcacctcgccgccattgttgctgtgcttttgtacacacgtacacgtctgatatctcgtcgtcatcgttgggctaaggctaagctgcgcaacgtttgcatgttgcaaccgatagaccgggctgggccggcacgacaaggcccatgggccttactgggctatctcggccggaaagtgttctgccgtaaagtaagttcactttgactcccttaactagaggcttaatctaattcgtatccctaaaccacaataccgggatatctcgactccctaattactaaaagagaaagactacacaacggtataccgttgaatggtataccgcttatcccccatgacgcggccccgcgtgccggcttctcccgagtatgtcgcgtgctgctaggattatcatcacgcatgtttgctatgtgtatcagtgtatagtcttgttcctgacagctagctaatacccagcatgcctgtcctgcctttgatactagcctagctattaaataaaaccgaaagtactactagcttgctgtgcatgtcaaatccctgtaatagctactagtagtcccgtaccctagccatgtagggtacttattatggcagagcctagtagcctagctatgtgtttaagatgggttgcatctatttgcatgtgtcctataccatgcatggattagaccagacaaataattacctaaattatatatggatacaatgtattctaattagatatgtcatgttgggctcttggttataccacatcttagaaactctagtatgtgatatatagatgctagattatcatatctgatatccaagtactgggtcgaatacctaggtaccaagtatgaaacctataaatacaagatctgatgccgagttatcgggtctga

SEQ ID NO: 33778 - DNA, 525 bp, Oryza sativa
gtcagtttcagcacttctatcgacatgaagaagatagaaagggccatgcgagagagagtgtgtgagaaagagaagattctaccgggcacaacaaagtgtgtaaatgcataaagaaaagattctactgggcacatcatagtaaggctattctcagctcaataactaggatggtgtccatagcattaaataagctgctacctaatatgaaaaatgatgtggcaagtgagtaaatgaggaaagagaagaaaacaaggtcttgcatgagacatggtttctacacaacattgaagacatcatgtgagataaatttaatttaagcatgaaaaagtggtgtttgtattgaaaaagtagtgtctaatactagtttattgatgatgtgaagtttatgaaaactaccgtgtagtgtcttgggttggtactgcctaaaggggccggctagctatataaactgtacagatgcagagaagcttgcacaactagtgcatccctgtcactgtttggctagcttaaccttcctgacatcta

SEQ ID NO: 33779 - DNA, 671 bp, Oryza sativa
aaccgttcatcttattcaaaaacttttgtaaaagatgtaaaactatatgtatacataaaagtatatttaacaataaatcaaatgatatgaaaagaattaataattacttaaattttttgaataagacgaacggttaaacatgtttgaaaaagtcaacggagtcaaatatttaaggacggagggggtaatggagtatattgatatatatacttgatctttattactctcttcatgcccatttgtcaacgtataaattatacaagttcctccacgtacaaatccactttcaaggagtacctgcagtacacaaaaaaggccttgttaaaagccaaataaaggcataactaaccaacctatgtggccatatataggtgaacatgcatgtaggtgatagatcagagagtacaatatgcagtacacacacattcagttacctagttggcctcttcttccttaatttttccctttaaattttcagagacccatatatgcatctccgtgtcattttccactggtcacaaacggaagcaatgggcgtacgcgaggccgccattaatcgcgtgtgtgttctagctatatttcttcttttgctcaaccaccgggctgctccaatggcggccggcccaggaggaccccatggctctgtggccacgaacttcacctgccattgg

SEQ ID NO: 33780 - DNA, 576 bp, Oryza sativa
aaatattagttgcctggagttttcttgatctggtgtaagactgccacttagtctccaaaatgtccttttgcactcttagatctatcaagctacaggtgaaccttcactaactcagatgtgacgggtgtcatcttgtcaattcaggaatacaaaccaaactctatattacgaggcatggtctcaatgcttatactgaaggctggattcaaaagatatgcaccagtgtgtaaaggcctatagaaagctgtgattcccatctttcatcaatgattttcaatataggcatgtagtttctcttcacattattgttaaaattttatttaattctttctttgcatggaccatatgctcataaatgtatggcatggcaggcttttcatctgaatcaactaagcgcagaactttgaccaaaggcatatgttagacgattaggccaaaatccattagtatctagcacgatttgtcctactgtcttccctcttcagtttttggaaatcttcatgaatagaagtaaacaagtagtctttagtttacagcaagaatgctaaatacaaagtggttaaagactaaaactat

SEQ ID NO: 33781 - DNA, 781 bp, Oryza sativa
cgtgaaacatatactgtaattgtctagatcaatagtcaattcctatacacagattatggtatagtgcttcgcacacggattatggaagagtacttcgcacgactaaggctatgtttgtttcagcttaagattattataatctagattattaaattagattactctaagctggattataataagctgacataaaataagctgcgagttgttgctgacataaaatagctacgagttatttgtttctcaggattattagaggcatataaggtagtgggtctttagccactcaataatctggaaaaagctcatctagaggagattattggattatactaatctggcttatagattataataatctaacataataatctacttgtttgtttcagcttacttctaataattcagattataatactcctaagctgaatcaaacagggcctaagtggctgctaaaatttaaaattgaaaagaaagaagtaaaaggacctgaccttgaattagacctctatccactactctgaaattgtgtggattttttagttaaacacggtaggataaaatgattaatttagaagggataaagattttcctaactatgtcaatctttaatgggaatcttgatggagtcgaaccatcactcccagcaattgctcgctgggatgctctttccaattcagagctataagatccacgatgtcggagagttcattataaaactaggtaataccccgcgctttgctgcggaatttatagatgaatatatgttaaatattgccga

SEQ ID NO: 33782 - DNA, 548 bp, Oryza sativa
tgtcctgcaatgaaccctgtaaacggttaattaatttgcctagcgagtttacaagatgaaaactttggtcatcgcatattttatcacgagatggtggtacagcaaagggcaaaattatgagagctggtttttagtttgatatgctaaaactctctctcatgatttacgctggtgactctgcgttgccactctcaggtacaatctgatcctgatatttcaatcggattgtacctttcgttttcaaagcatgtccagtttgggcgtttggagttggaccttttggatgtcgaatttgaaaacaaatgacagcatcatttcagaacgtatgtcttcttttttggatccggtaagaaatggactgatttgtatgattgtttgcatactaagggcccctttgaatcgcaggaatgagaaaacataggaataggaaaaacgcgggattttgataggaatgtaagtgtaaaacagaggattgcaaaacacaggaaaaacacaggaatggtcgtttgattggaccgcaggaaaaacacaggaattagaggagagat

SEQ ID NO: 33783 - DNA, 556 bp, Oryza sativa
tggccaggaaggcaggaaggagcccatgcaccaaattgtaagtggcagaggataaaaataataataataattgtacgaggcataatcctcggggtggtatacaagcctcagatttagaaaatgtgctcaacttttcatccaagtagaattgaattcagtgaacttttcccctgtcgctgctagaacaggctgggacaggtacatgctatgttttccctaggatggtgaaatacggttatttgatgtcatggtccttggaaacctttagtatgagaatgccatttcattgaattcgtgggtggtatatacctccacatcccttaaagaggcaaaaaaaaaaagagaattaattagctaaacggatgaaaaaaagactggacgattggcaaggtacaagatggaatttttgacataacatttgatcattggtcaaattaaaaatacaaatatatattgatcaggtttaaagtacatttggtaaaaaaaaaatcaaagcaataatacatatcacgaataatgaccaaatatcatgtctaaaagttaatgttgccataca

SEQ ID NO: 33784 - DNA, 1998 bp, Oryza sativa
caaggaattttctggtcgaaccaagcctagtcaaatcatgtggtgagcttagctttcacctctgatccaccaactaatcatatattaaaacaacacaaagaatatgtggaccaagttagcaatttggattcaaaaaagtttttttctgagtaaagtgtatggacggtccttaaatttatagcggtatgtcatctaggttcttaaactctcaaaatgcatatacaagttccagaacttgtcatagtgtgtcatctagatcccaaatcgccacagccccttcaggatcctacatggtgcttgtggtgctgatgtggcatgtcacacggacatgacgtggcataattttgactgacaaatgggacccatttaaaaattttcttttttcttttttttcttctcttgtattttcctttcttctcctttctctgtgacccgagcaaaagagaggaaaaaaagaagaatgagaagaaagcggaaaagaaaaagaagaagaagaaaaaaagacatgtcacgtccatatggcaggtcacatcagcgccacgtaggatccaagaggggatgtgtcgatttgggacctagatgatacattttgacaagttctagaacctgatatgcattttgagaatttggggatttagatgacacaccgctacaagtttaaggaccgttcgtgcacattactcttttttcttgtggaaaaagagctactcgtttgtgtcccctccttccaatctgttgctaacatggcaaccttgtaaccccggttcacaaaaaaccaacacattctggcactttgggcataactaaggggttgtttggttcttaactaacattgtcataactcactttaggcaatgttaggcaagtgtggcttgccacactttttgtggcctacaaattgtaagccacacttgtggcaaagttagacaaataattgagtctatgacatgtggggtaagatggtaagaaagtgtggcttgctatatctatggcaatgaaccaaacacaaatctaagaaggtgtgacagtctaaagtgtagtgtggcaatttgaagtagtgaaccaaacaacccctaaggtacgaccttagtatgctcaggtacgacgacaacaaaacaagcaatccactgaaactcttaactacagtctacatgcgccaaagtaatctatctcaacagtcaaacattccactggaccttacaatacatacaccaaagagagctaactccagttatacaataaatcaaacaaactatgactctatgagtcccgtcggttagcctaataaaccaaaataaaagtcaatttgaatcctcaaacttaattttaagatattttcaatataatttctttcagcgttggcttttaagttgctacaaatagatatataaaagtttcacctaaaaattaatttttattccctaagggcaagtactatgggcatccaagcacaatttcctagattccacataagctaaaatagtgaggtggaggagagaagagatgagagagataagcatccacctctcatgcaagaggcaaccgctacacaaaattcaagacaaaatgacagagggaaagagtagattgggcaaacaaacattgaggctagtgtattagaattagtatagatgtgatatattgtacatgttatctctatatttatttgttgatgatgtggtcaaaattagatacaacatccatctcttttataaaacttgccctaataagccattatggacaaccaatgaggttctattaggcttcgcaccacgtgtcctgaaagtgctagttacagctgtacaacgggcaattaagcgcacacttaaggaagagtattagagcgtgtttgtcatgatatgaaaaagtaaaagcatgggttgccatctaaaaaaaatcttcaatgtacactactttatactaagtgtttgtttataagtttagtgatcaaatcagaaaaaatatgtagtgcaaaccacatatgtagtagaaacttgg

SEQ ID NO: 33785 - DNA, 3188 bp, Oryza sativa
gggtagcggagggatggtggtgccggcagagcccgagccttggcgggtgaccagcgatgcgcgacacgcatgccaggttgcgccggtagcgatggtggaagagacgacgtggcgacccaacggcctcggcgcggcgtagccttccctgccggctttggatgtggcggttggcacgtgtggtggacgattggcctctccctcagcaagatcaggtcccctccgccggatttgaggcgagagcgtcgtgcttcggcggacgttccagtgccgcaagcactgtgacggagggtgtcatcggcatggcgtagaggatggcaaggcgacggcagagacggtcttgtggcctgaggatgacgcgggcaacaggatcatggcggagtcggcagttgcattgtcaggggggaactgcggttctttgacgggcttcaatccagacttttgtcctcttgcgacagcgcctttgccaacaaaagatggtcacgtcaggcaggctagtgtgcgggagaggggatcaattcttctctctcaccctctcctcatccaacccaattgcatggatggagctggagcgagccggggtcgagctcctcaacgatgattggctggcgatgtggcgccggcgcagtggccgcgtgttgaaggctttcgtcgatgttggcagtggaccgtgcagaagcttgttcttgggagggttgaaaattatgggtgaaagttctgccttcgggttggcaacaacgacgcctgagggcgccattttcctcttgtggtgttgctgcattttctttccctctcaattactttctttaggtgaaaaccttgtcctagctctctgggacgggacacaacggtgctattggtgttgttccctttttggaggcatcatctcgaagatatcatgtttcattcttgctgcgggtgttgttgtagacacgcgttgtggttgttttttttcttttttgactatagtcttccaggactatagaattgtatttttctcctgctatatcaatacttgaaactcgtattgtctcgtgcggtttgttaaaaaaatatatagataaaagtgatatttgggggtagttttttaattttctcattaaattaactgtgggtccaccgtgggccgtggtgcgggcatagctgcacacgcggcagttgcaaagtccgaaaatgggtggttggcacgaacggtacggacccatctcaaatttagtcacgtttcctttgtcgctttcgctgtcgctgctatatgcttcaatgtgatcatcgattaattaagcagcttaattttgttctagattaatcgacgccctttgccgatctaatagtcctacgttaatagtcctagattaattaagcagcttaattttgttctagattaatagtcctacgttactatgtctactgttgttgtacggttttctgaatttctgtcatcttttgaggctgggagaacagaatagtagagaaaatagctccactcaacgaacttggctccaacggcgcaaaaaaatcttctttatctgtttgttatttgacagcctcttgcggtttaagaaaaaagataatcgccacacgtgccaattattaactttcacgtgatcaaaatatcttactgaagcttagatataacaacaaaccaaacaacctacttcactactcgctctgtccaaaaaaaaaaggcaaaccacggatttccgtgccaacatttgattgtccgtcttatatgaaaattttttataattagtatttttattgttgttagatgataaaacatgattaatactttatgcgtgacttatctttttaattttttttataatttttttaaataagacagacggtcaatcgttggacacggcaaccagggtttgtcttttttttaggacggagggagtagccacttgtgactatggctggctgcagtacagtacgtacaagccaatataaattttactgtatttgttgtagatgttgtatttgttgtagatatactacgtccaccaaacacacacactagaactccgacgacacatgactataatgagctagctcaacaaaccattggttgtgtatatcctagatatcaggcttttaatttatttatttatttattaaaaaactcaacaaaccacagtgatcttgtctgatctgttgctaacatgataacctccttgcggccccgattaaaaaacagccaaatttaccaattataaaatataattaagttcataaaactaccaaatttaccaattataaaatatactccgtaattaaattattaagctcatgccatatattccgtacatgaagaacattatctaactttgcacatatacgataataaaccaacaatccactaaaattatgattatatgcgccaaaatgagctagcttaaaaaccaaacaacccactaaacctcaaactatggcccgttattttctccaacaaaagtcggatgaaaatttgaatattcgtggcatgcttttcaaactgctaaatggtgtgttttgtgcggaaaatttctatatgaaagttactctaaaatatcatataaatatatttttcaagtatataataattaaaactcaattaatcgtacattaataccacctcattttacgtaaaaacacttaatctttatttttatcttcatctacctgagtttcaaacaccattaatgtacaagttcactagctccatttgataaatttgggaagtgtggttatggtaaacgagggagttgcaaaagcaaaacgagctttcgaaccagagaaaattccttgtgtacacctcagaactctctcaatcccttctatgcacctgaaaaataccgaatcccttgtgtgccctcgaaaatttgtttggaacccttgcgtacccctcccgtcaagtttctgtcagtttagatgttaattttcttagaaatgtccattatgccctttgagaatggtggatatgaaatttgatcatagttggctgattaaagagctccctatatgttgaatattttttttcatgatgtgtgctttatgatactaaataatcagttgatagaaaatttaaaataaattttgagaaaagttagtacactgcaattttgaaaataaataagtggatatagctagctgaaaatactaagattagtacattgcaattttaaaaataaatatgtggctataactag

SEQ ID NO: 33786 - DNA, 727 bp, Oryza sativa
ttcctgcagccctttcgtcgtcttgtttgagctaatactccaaaaattgagggcagcgcatcatgacagattgacgggacacgtagagacaaaagttgtgatgaaacaggaagtgtttcaaattagtaattgtatacgtaatatttttagtatcaattggaggaaccagcgagtcatccgctacagtgcaaatgcaaccagaaacagacgggttctttttttaaaaaaaaaaagaaaaaaaaagcagaaacagacggagatgctcatctactctacggagtatagtgtactcctacttgccactagtgtggtacgtagttttatactttattgttgaggggaataccacgtgtggtatttgcaatatgctgccaaacgacaacggaagtctgtggactgtgtggcatgtatgctgaccttttgttttgcttcactacactcgcaacaaaaaaatgtcatatttgtttggctggaccgccgtataaaagtaaacgagacagcaaaaaaggattttatatttctactctataagcgtcatgaaagtaaaggccgaaaagaaagataaaatatctactggttaacgaggatcattcttttgcggtgaatgcttaattaagtatttaataactactggcaaaaataacttcttatatatcgcagaatcactcacatcagtgtcagtaatttgccctatgtttttagatcaagatttgagctccatatgttc

SEQ ID NO: 33787 - DNA, 575 bp, Oryza sativa
aagcggcgcgagggagacatgggtcgcctggcgaaaggatcaatcacaatcctatggctgaaggcggcgactggacttagtgactacctggtggttaaagagaataccactgcaaatgctgagtcactgcttcaaacaaaatgactacacaggaaacctcctaactcaggtggatattataaattaaactttatagcatgggacacatgcatatatatatgaatagagcgaaatatatatgtacctagactctgtgacatatatatgaatataaacaatgctaacaaatctgataacaatattaaataaaatcattgaatcgaacatgtgagttgatcgatcatgtacctgggagaaacaggctcatgtgacgaagaacacacgaggcgtagcactcggccaacaccttcgtcaccttgagtgagctgagctcaatatgctggacaacctgagcaccatcatacagggtgtccacgaacaccatgtcggtgccctatgctaagcccaacagacgaggtaacatggcgtcctctggaatcacgaggtcgaggacgatcaccctgaactgaacccac

SEQ ID NO: 33788 - DNA, 656 bp, Oryza sativa
ttgctcatctatatctgaattttctttttaattgtgaattcatttgtgttcaggaaactagaaaagaacatgagaagattatgccagtggtgatggtgccactggaatggcatcctcgacatgtccttcgtcaacgttcgtcgccggcagccaacacaaagggtcagcccaggacgaccacaccacaattgatgacaggcttcggtggcaggcgatgcgatgccctctggattgtgctttttttttgggtaccgggtgtatatgtgtttgtaacgatgatggcacgatcaattgtaaaaacaaagtccattatacccgtattcgtgcagtaaaatatttactaccttatatatcaggcccaatcaactactaagtaacttttttactccctccatgattggataatcccaatacatatcaataattttttttattccatgaatatgttgcttcttatctattagtaaatcatttactcatgggcgagtctctattagtaacgcatgtactcattgccaatatgagatgtggctagcaaacgatattcttatctgttagtaactcattgtgggccaagtctctgttagtaatgcatttactcatgggccaataagggaagtgccaaacaaatgttactcttatctgttagtaactca

SEQ ID NO: 33789 - DNA, 1001 bp, Oryza sativa
ataaagctccattgatatgaaccatgcaatgtaatgattagtttttggctgttgcagcttggccaggtttgaggagctttgtgagcaggattgaaatttgagtagcatgttgttacatgctactcgtggaatgaccttctggtaatcagtttatcctttgctctggtctttatgttgtatggtccgattcatgcaacaaacaaatgttgaattaatcttctgttctccacaaggctcatccgccgtttggcatccttgtcagggtggccgctgcaaaatggaggtgcaatcagcttgattatcttctcttgatttactagtatacctttagccctacttttctgggcctaatttcatgttgcttatgagttacatgaaccattagcagtgaaatactcattctcctgtctcgccttaaaactgattgatcattttcatacgtgaacactagcctgccccttgaaacgaatgaaattatcctgtacatgttactttctaactgaactctcctgctacatcaatacatataaggcatttcttgcctaagttttcaaaacaagaaaaagaaaagaaaagaaaatgaatgaacgaatgaatgttacttcactagctagtagcctagtacgaagtactatttatttaactagcgtgcatatactagttactttgatagattgctacaattcgatagagaaaatgtgaaacttcttaattgatttgagagagaaacaataattttgtagtgttctatgtagtgcagcttggtgagcctaacgtattggactggaccagcgctagagctgctacataaatgtcatttcatattggccaagttttatagtcgtatctggctaactaacccgtacgttggtttcgccgtggtgtgcggctaactgttcctactatatgcgccgtgacaagtgactcaaatatgtttcttttattccatttgcaggcccggattgacttggtcagtcaggtacttcgtgcgatagacaatg

SEQ ID NO: 33790 - DNA, 517 bp, Oryza sativa
tgataagagaagtaaaataagttatgtcacataataaagtgctatttcactatttatcatctaataacggtaaaaatattaatcgtaaaaaaaattcacatgagacgaacggtcaaaagtgagacataaacagtgcataaactgcacttattttgggacagaaggaatactgtgttattattttgagggaaacgggataggtacgggcagaaaatttttgatatttgcgtaaattaactacgaagctagagactccctccgtcccataatagatgacgttgtatgactgtctattggcaacgtctgaccattcgcacttttgaaaaattagtgcaaatataaaaaaggataagtcatatgtaaagtatttgagatgataaagaaaatgacaaataaaataaatagataattttaaatttttttgaataagacgaatgatcaaacattgacaacaaaaactcaaaaagacaagtgatatgggacggaggtagtactatttagcagcaattgtaatacg

SEQ ID NO: 33791 - DNA, 553 bp, Oryza sativa
ttgttttgctactaatgagtcaagttggtgatagcttggtctcggaatatggtttttttgtttgtttcatgtgtaggtgactcgatgcctcgagagagtatttgcactgatggaccgggagtcggcttggtggtaagacaatgtccgtggtggtcagatatcatgcgggatactaaggctagagttgatgcacgtggttgatggagattccatatggcatacgatggaggtattgtgtgcgtatgggatacggagtcgaatttggaaggagtccaaatttggtatgattggttatgtagagtttgtttcttgtactaagaggtttcctatggggattaggactcttagtatgagtttggttcgtggctttaggttgcttacctcatgtataaatagagggggagcgtgaggcttcccggtatctttttggtatcgcttttcatagcgttgtgttttagggtttcgagtttagtcgagatttttgtaaggagtgctggtgttgcacgttgtaaacatagagagaagtaataaagttgtcatctacttttgagag

SEQ ID NO: 33792 - DNA, 1259 bp, Oryza sativa
accacgatgcaaccacccgatcaccagctagaccgttggactggtgaaccaacaggttagctaatgttgatattttcttttacattgcatggaagaaacactcacaactatgcacgctcgccacactcgtcactcgttaaggtgccctataacacatgtttgaagagaaagaagtcagcggcaaaattaatccctaatcttattaaaatcttattgaaaatacgtcgagcgtacatgatttttggtgtgcaccaagacttaaactcttgtgtgtacatgatctttaatttcttccgtaaatccgtctatgttcttttggaattggggatgtttgatttgaacagatcacaatgagaatgcaaagaggtgtttcaccctactttcaatcaccgatcgatttcacacactagctaaatactgactgatcaggaagaatgggatgatcctaatctgctagctttgcgtggcgcctgatctttagactcagtttgcactcatcttatcagcttcttattaatatccacacaaaatgcttattattacctcatctgaaccgtgggtttggaaatccctgttctaaactttgtgggggcatgttcaattatagactctagtataaacctacagtacgaggttatttaaaaaccatgtctatacaacagtcaaaaggaaaaaagactctaaccattaactaaaaaaaaaatttgttgttatctttttttcactcatataaccttgtttccattttatggaggctaagtagatgttgagttcgctgttaacccaacaatgatgttttgtctctcatgtttctctcttctaaatctaaataaatattcttaataattagtaaaactaaaagtcatctattaatgatgattgtacataccctgataaataagtagcgaccaactttccatcagataagtctagcgaaagacgaccttttcactctcagtactccagctaattaaattcatacatacatggtataaacacagctttccttctgcaaaagccaagttggcacagatcgaaaagatgaacctgtttccttctctagttcacactcgttttcacgaatatggtgacgctgccatccagacaaacggccatcgtcggcttgacaagctgatgaacacccaacatcgccatctcctgcacaattgccacacagctatagcctgtttgagagggagtaagaataggagatgaagagtttgagaggataagtcatacggattatatacggtacatca

SEQ ID NO: 33793 - DNA, 739 bp, Oryza sativa
gagatagctcatctgtttagtttttctagaacctatgtacccggatttgagttctaaactgggtctttttataattctatggagagtaataatctgcaattccctttctcagagatttgaatgttgaaattacctttcaaaattaaggtggtctcatatatggttgctccttagaaatggtatccttaccaaagataatttccttagatggggctggaaaggggataatttccttattggtataataatctaattgtgaaactattggacacttatttatgaaatgtgctcaggcttgatttgtggagaacgtaattaatatcactttcaatttgggtgcaatttagaatatcccacacatatttgagggatgaaacaattttggaaaagaaatgaggaagctaatagaggtaggtgtataaccgttgttccgtgagcaatttggacaaaaagagaaatggtgcttttttttaaaaaaaaattactgctaatagaggtaggcttgattactcgcccgttggagcgaatcagacatgtctatttttgagtttcattccaaactattttaaataaatcacaggaagagacataagaaatataattttatgagtgagagatgtgggtaggtcagacgctaaataggatggcaagtgacatatatataatgcgagatatggccaacgaccttggagaagaagactaagatgaattctctaagtcttggcatgaaggttttatt

SEQ ID NO: 33794 - DNA, 785 bp, Oryza sativa
attgtgtgagtgatatgtgtctgaacataccattaaatttcttcaaaactgtgaaaaaaaatgaatttgttgaacttctacataggaaaaaaaatcaaacatttgatctatccttaatttggttgtcaatatatcatgtgccttaatgagacgattcaatccaaagaactttgatttccttactctcacaagtttagcttagacatatttcacactgtcacactatgtgtataaatgatagagatgataattacctagcagcattttattattcagttgattcaaatgtcatgtgaccttaatctattctctattaaaatttcgatgaatgattttttagatacgtgtgaccttgagttgcccttaatttataagatatatcttacgaacaaaatataatcttatatttaaataatatggatgcccgcgcgttgcgcgggccacctttctagttattattagttattatgttttaaaggacaaaatgtatgtagtatatccatccaaatatataaagatttttggatggatataacacatttagtactacaatacaaatttagacagacttttggagcggagggagtatgtaaggatacggcatttaaaagtggatcagtatactcgatccatgacctttgatagtgaagtgacctctagccatgttgcccctgactgtgatggtgataaaaagggagccatatctttgactgacaatcaaagctagctatatcttctaacaagatcgatatatatgctcatgcatgatctgtttatctgggagt

SEQ ID NO: 33795 - DNA, 722 bp, Oryza sativa
tcatagtttaagctagagaggaaatattaattagttgtttccatatatgacgtgacatgtatatgcatatatatgacttccaggtgcaccgttaccgtttgtttatgacactgaagttaaaccttagatcggaaattcggaaaggaaaacatttgacctgtacgcataaaattctcaagggtccggtgtagttatatttatagcgccgtattttttacttaaaaaataggcaacacgtatttatattgtaagtctctaaattacatatgtaaatttagtgtatttataatataagtttcaaaattacatatgtaagtctcaaaattatatagtttttacatgtgtaaatggtgtgtaagtgggatgtaagtggggtgtaaatttgtattaaggaatagcatgcatgcatgcatataacacgaaattaattaggagccgtttcactcggatttgcatgactttagaggttagctagcatgctttcaggtctcttggcaaggaaaaagtatggaagcacggatcttaaacacagatccaacggccagagaactaattgtaatcaactaaaaaatttgtcgacacaattatagcaaatacgaattctcaatggctacgcgttgaaatggaaggcgacgatcaatttgtttcgctggtcggtcaatttgttcgtcttacaaccttaaaacatgcgtgtacgactcgatctatatatgtgtcacgtt

SEQ ID NO: 33796 - DNA, 575 bp, Oryza sativa
tatcatcaacttgcatgctctgcgtgtgcaagaagattccagaaaagaagaaaaaatgtgctagagtggttgtattaaggtagcagatttggtagtcctagctttgcttgatccattgctttaggccatgaaggcatataacggagggataagcccagattagcaccacatgacatggaagtgaaaggcgtgtgctcaccaaccatgtaaccactcaaaatctcacccttttcttttgtccacaaagctttttctatatgcaactatagtcttaattaattaattcaacaggaggcatcttattaccatttgaaagctagatatatgaccaggaggcatgcatgtacacatatatagctagctagctatttgatttgaacaatataaaggccttgataagtgctactaatccataacaacactagtagtatccgggttctcaatcacattgtggaccattttggcatatcattttgtgcgctcaatcttgataagtactcccttaagtttttgtttgcaacgtttgaccactcgtcttattcatttttttttgaaattattatttattttatttg

SEQ ID NO: 33797 - DNA, 1069 bp, Oryza sativa
ctagcgggcaccaagcctcttgtctctcgagccgtcagatgatcgatcagctgcgaggatccatcacaatcttccattcttcctgcatgtagtggagattgcaactgatacatctcacgtttgtcaagagttagatttgttactgtattttggtgataaatataatgaaataatgaggcgaagaattatactgttatgtacacacagctatacatgcaaaccacatcaatgttcacaccagctacagttgacaaccatttacaactgctgcaaccacagcagctgtggctggaggcctgaacacactctatgagtgtgcctctaaaacaagcataaatagattgtttttccctattaagtttatgttcaaaaaaaatagagatatctctccaaaatgacaatggtttgttatgcttaaggctatcactggatttagtggagctacatgcacaggtgtaaatattttatgtttaaggtaaaggtttggtgcaacttgtaaaacttttaaaccatcaattttgtattagaataaattaattatatcatgatagttctttcaagacaaatatacccataccattccttttattctttttaaagctaattaaacatttgataacattgagtagttaaagttttagaagtttgaccaaatatatcctaatcatcaaatgtttataattggagagagaggaagggggaggagaaagaaacatggatgttaagcttaatatcaaccatgattgctatttcacgcgtacgcgccagcttgccagctgtgcccgcctcctagcgctctttctttttttctgattttctttcctatttttctgttacacgtttatcccatatcacggaaaaaagtttctttttttatttttcttttcttttctggaaactatcatgtgtgtttctttttcctttttttctgactaaaacaaacttttaagtaagatttgaaatcttctcaacttatattcgaaaattttcaattcaagatttaaaagcttaaacatatatttaaaatcattccatatagatttgaaaattttcaagtttgaaaactttt

SEQ ID NO: 33798 - DNA, 766 bp, Oryza sativa
ctaggttgagtactgaacacaacaacatgtactagatcaaaaacattagttagagcaggtacatagcaagctataagccgaatatgatacgcgatgaaaagagaagagagaagaaagcaagctatttgtctagctgtaacatagactatgatatgcgatgaaaagagaagagagaagaaagcaagctatttgttatgtccaacatattactccctccgtattttaatgtatgacgccgttgactttttaacaaacgtttgatcttttgtcttactaaaaatttttaatcttttgtcttactaaaaaaatttatgtaattatcatttattttattgtgatttgatttatcatcaaatgttctttaagcatgacataataagcatgacataagtattttttttatttgcataaaaaaattgaatcatgttcttttaagcatgacataagtattttttatttgcataaaaaaattaaataagacgaatggttaaatattggttaaaaagttaacggcgtcatacattaaaatacggagggagagggagtatatgggtataatacctgagaccaggtattaatggtgtagtatatttttatacttaattattgtattaattgactgttagaatagcgatagatgatttagatctaacatttggctatactattagggacaattgcatccatgcccctacttttaattccaactactgttttaccctcactttttaaggtttgcaattttacccccatttttttaaaacgt

SEQ ID NO: 33799 - DNA, 777 bp, Oryza sativa
gggcgggcggcggcgccggcgggcccgggtggtggagcctcaacgtggagggcgtaatgctgctgctcagggtcgtccaggcggtcagggggcggaagctgccggcgccggagaagaggacgcgcgacggggcgagcgacgccgccggcctgagaggcggcggcatcatgggcggcggcggcggcggcgccgcgaggcggtggtgcggcggccggccgaagaagctgggcaacacggtgggcgcgtgtggaactcctgatctgaggctttgtgttaatgttcccaaaagtgaaccgagagagagagagagattattaataggtaattaagcggaggattaggttaatgatatagagtttaacaagttgatctgtactgttagatgcatgatcaggtactaatgcttggtcatagtgtttcttgttctgcttctaataatattcatgaatcggtgtttaattagttactggttttacatttgtgagttgtgactgatatcctaaattaaaagcggattaaattaaggccgcttgcgtttgaatcacacaactctagctattgacggctgaaaaaaagaacgggtcattagcgtataattaatcaataataaattgagtattacggatataatcaatcaatattgatcgagtattagggtatgtttggtgcctaactcttcagaaaagattagcgcattattaattaataattagttagtattaggtacgtttggtagcagctaagaattaatcgagtagccacttataagagcaagtg

SEQ ID NO: 33800 - DNA, 783 bp, Oryza sativa
ttctggccggtcggcggtggcaacatgaaccgaattggttttggaagtactccgtatttgacgttactgtaaaattatattagctgtataagtaatttctggtttgtagatatgatgaaactggccactcatgttttagtttgtgttaattcaatccagtctccactgattattttatttggtgaagacgagattaattgttgtacatgttttttagactaattaattaataatttgttaatgtttttcaaaataaatcggctagccgtcaatttaaatgaatagagtaggaaaaaactgtatgcaaataaaaactgtaagaacatgtacaagttaggtcccgagatgtgggctagtgattaagataacaagtacatctgtttcacaatgtaagttattatagcatttttcacattcatattgatgttaatcaatctagatagatatatatgtctagattcaatatgaatttaagaaaagttagaatgacttatattataaaatagagggagtagtagcgagttccctagccattgcaaggacccgtgttttgccctcttcttttatcttggttagggatgttgagatctcttaataatgttaaaattgaaatttcttttgtatttttttcccatatctcttagaggactagcaaagctaatatacggactacttgctttgaggctgcacaattttttcatgtaagaccgacttgagttcttaatttttattcagactttcaacttttccatcacatcaaacttttctatatacataaacttt

SEQ ID NO: 33801 - DNA, 1002 bp, Oryza sativa
ccaaaaaaaaatctaacctatttaaaataaatataatttagtattataaatcaaaacagtattaaaatatgtcacatctctaaaaaaacaagtaatataatacttaatgtgttattcataaaagatactaaatgagattggatgatgaagtggaggagagaaatgagaaaaggagaagatatatcacttttcatagagtgacaactttcacacaaactttaaataaaataaaataaaaagtgaattggacaaacaaataaaattacatcatagggttagtatgctagagatagtgtaaatatctattttatcttacatacatggataaaattatacgtggcaaactatccattctataaaacctgctctagttggtgttaggttcttttctacggacaaattactctatccatccaaaaacaaaccaccacgttttgtagtacgaatttaaacagttatattatttttgctttatatggaatgaaactagtactcactctctcccataaaaaaatgaatctaggattaatatgacatattctagtacaatgaatctaaatatatttgtatatttagatttataatattaaaatgtgttacatatgttggtcttttagtgacggaggaagtaggtgcgtaggaaggccatggccgcacggccgccgccgggtcagtggctggaccagtggaagcgtacgggaaatactagtctccagaaaacggctctcacaacttctttattggctggcactctaccagcagtactatacacaaaaacggtgtctcactagttctttactagtacactagtacacacgtttgagctgaaaaagtctccagagcacacttctctcagaacttctttggcagcactccacagtctccgctacagcacgctgtccagcttactagtcctttacactcagctcgtttcgagctgaaacttgttgtttcgaggcaatgttctttttttagagctagggatgtaaacagagcgggtaa

SEQ ID NO: 33802 - DNA, 1269 bp, Oryza sativa
tgattaaatttcgttagctgttcgtgtttagctttttgcgctcagaagttcatcaacatggcaacttgcatcgcatgcgagtaattaaatgattgggttcagtgctggtaggctgggaccggggtggctggattcacatccaaataatctccataatacatcttgataacaaatattgaaatatatatctacattctaaatattaattcttctatttcatctgtactttctccatcctataatattaagcacacccaacactaccaaaaaagtctaaaataattatcgcatggtctgaatcatatgttcaaatatgatcgagaatatacgatcctagaggatcttctctaattaatatcgatctagtatttctgatgatatccatttatctcgcttcaattgttattttgctttcctttttatccaaccaaactaaaatatgtgcatgtcaaaaacctatatcttttttattatgttaaatataaaatggcttttctaaatagaaccgatggcatttttttcatctagttttttatgaaatactcggactataataataaaaaagaccccttcatgtttttagttgatgtatcttttttttcttgctagctatttccttttcatgtttgattcctacatccgttttatagtacaagtagaaaaacatagcaatattttcaacacaaaattaacatattatcaaagtatattaaatattagttttaatgaaactaatgtggcattgtagatgttgttaaatcttttctataaacttaaatcaaactaaaagaaattgactagtaaaagagacaaagctagttataatataaaatggagggagtattcttttttttcatttaattatatgctttgtgccatcggtgtacttatatataccacagcgccttttttttatggaaaattgcaaccaaaaaaaaaaccccaaatgttactctgtgtttgaaatttccataagatttaaaaattgcccctcgatctcctaattcccctttgtttgagattcctcctgtatttttctctttccacctgtgttatatgaattagggcatctcatgatggatactatttcaaacacattttcttcctcatcttaatctgtccaataaatcaggcagctcacgaaaccccatgaggcaagcgtaatatatagctcatcttccgtcgtccgcaatgtcttgtagaggagactcgtgacccctttcgcccaatgacgtactgagtaccatgcataggatgccggaacccccc

SEQ ID NO: 33803 - DNA, 1623 bp, Oryza sativa
acctttttcgctgcatttgtaatattttgtatttttgtaagacgtggatccgtatgtcaacaattgtcgtttgtgtaccctggctggtcctggacaggggtttaatacacattcagcttagaaattctggttcgtgaatttctgggcgtgacacaacctagctatgatcagttacaaaataccatattgtcttccttgacgagagaggttagacaatgctttgccaattttccattttatagctttataaaacagttttcacaatttcaatgtactttctgcagaacattataaacaactcttctagatttgaccttggtccactgccggaatcaaattttattgccacaaaccgaaaagctgcagtgcagccgccaataacgacagcaaccaaagagggcagggcaacaattcggaagagaaaagctgagccaaggaagagaaatacgcaacccaataagaaatcagagttgaagaaaagggaggagacaaagaaaaagtgaacaatatattcaacttgataaaaaggattagcttataatttagccagaagttctgtttattttttgccaaccaatcagacatgtttcattttggactgtgctctgttacattgctctaagttccaattcaggaacatctcttgtttttcctgtttatacaacagctatttatggtaaaacatttcagaatattaggagcacatttctgccaggatttgtctatggacaagaaaacataccacatatgtctgtacagaaattgctactggtcaaagcaatgttagcaaaattcaggttatcacttggacatacaattccaaaagagagaatacaagcagtatttgctacatcgtgttcaccattcatttaagtagctaaaaaattcatgtatcccttatataacaaaagcacttccagagtatttacaaaagcacctacattgccattattcactcacatactgctttgacagcaacaaagagtcaaagagtcctctcactgtggtacaccagatgcagttatcatgatgctgattccactatggacgaagaatcccataaaattacagcacaaaaaaatggaaggttcagattctcatcagttgaagggaacctactacggccatgggcagcgatggtggcttcaaggtctaacaaccccctgcactggctttgagtcctgacggtgccgtggccgggcttcgtgtcccatcgaccgctgacccacgccggtttcgagtcccgaggaccgccgccaccagctttgagtcccgacgactgctgccgcacgccggctttgagtcccaccgaccgctgcagccggaagctacatatttgaggtcctatccctcatggtgattaattgatcgtactagaaaatgtcctcaaatgggaaaaacaacaggggatttgtgcaaaattaatatgatgtgtaaagggccctcacgtagactttgtccaaggtggaaagctgacgtggcaaaaaatcttatgtggcagtcttttgaaccacaaacgcacccacctagccaagttgttgcatcgatatgtctaattttcaagttcttgtacttaatcgcacccacccgccaagttcttgtaccgtcaacgcaatttactct

SEQ ID NO: 33804 - DNA, 813 bp, Oryza sativa
ttcatccattgggcgtcagcttgtcatggttaattcgccggtaattactatgtcatcgcactgttggcaaccaaaatctactgggaacacgtatgttcttttccttttcttactggtattttttttctcataatcctctgttatcaaaagcagcaaaatatagtacgtactaccaccatagtacttgtattacacggcatatagaataaatctccaatagcaacgtctacgggtgcatgcatcaggctggcattcagccgaacgtcgtaggtgcagtcgcgcgtccagatcaatgcgcggcggcctactacatgggtcacatggcctgtgcgtgcgcccacgagcgccgggggatcatggccttgtttggttgacttgagggctctcgctcaggcaggtcgatccagctgcagacacaaaattagatgtcggagaattgcgtctgagtcaggcaagattttcagggcaagaagtaaccagaccccatgtccttcgtttgatcgactcactctcacctatgtgttctcccagtccctccattgctccggcaaagagagatcatgattatttatcatctagtctatggtcatgtttgaaaaagattcaagcagcacaatgtgtattagtaaatctctacagctactccaaacaatctagatttgaagaatcagcaactgtggaataaaaataaactaaaggcatttttcagcttcgctaaattgattactaagtgattatcattggttaattctcagaatctcaaacccccctaaatagagggtacatagatggttttatatgcatcattgtcac

SEQ ID NO: 33805 - DNA, 684 bp, Oryza sativa
tatcagtatcataattttaaaaccctaattaaaacacagtagaaacgcatagccgtcatgccgataatgtcacgccccgaactagtcccgaccggaactagcccgtgacgctccaaattaacctgttaatcgataccagtcccaggaaacagtgctggtatcacagggagacagagtatcacagcaacataggtctcttttttatagagtagaagtacagtcatgttgggctgcggacagatcccgagatcacaactgcattacaaaaggaaagcggaagccaggacttggaccaatcgtcacaggcgcgacttgggaactaggccgaaaccctaaaactcatcgtagccgacttgctcctgaagaactcctcgtcagcaggatccacttcatcttcttcagcaactggggggggattatttatatagagcaagggtgagtacgggagtactcagcaagccaggggaaataagtgtttaatgcaggcttcaaggaaaggctgttgttttcgtaattgattttgtttgaactcttttctaaaaagtctaagtgagtgcttctcaaacaacacggaggagacagtgcgtctcgtccggtcggagtatgtgcaatgtatcagtctttagatcttgaaacagggttggcacccggccaatagcttttcaaacggccacccgggccaac

SEQ ID NO: 33806 - DNA, 517 bp, Oryza sativa
attattgaaaaccgtgtaaaaaaatataggttttataatttggaacaaataaagtatatatttatatgaaactactatgtgtaggctattatattagttataaataacatggttaatttttagagctatcagctgagtatactattaaacgttgctcttatgtcgttagctgtgatatgctgcctcgggcaacctagaaaaactcgaggagtcgcgcggccacttgcggttgcgggggaaaaaaaacacgaaagcataggcatccacgcgatcctacgatgccagcgcgtgcggatgccgcgcccaaaaaccggtagctggtttcgccgccccgtagggagcgcaggcagtttcacgcgcgcggcccttggttcgctccgcgcaacgcgcgcgcgagcccaaaaaaaaaaaacgacgggggaatcatcgcctccgctgctggggttgtggcttttttgccctttggcgcctagctacgtaccaacccacatcacgcgcgtgcgcgtggtggcacact

SEQ ID NO: 33807 - DNA, 616 bp, Oryza sativa
attttttttctaatatgtcattcggcatattatcagtatatggccaaaagatggggcattaaatttataaaaatcaaacattgaaagttgggagcattagaacaatttagttaatcaacaaatgtaatccttctctctcttgtttttcttacatccacgtagttaaaagccttacatgacaatatctcctaaatagtgacaccgcaaaattgttcatgtcataagagaaaagcgatgaccattagaacgacgctattagatggggatcgctttcgagagagtacacggtgcctcgtgcttacgcatttatataaatgacatctagcggataaaaacatcgtataaaaaatactacatataattttgaatagaagaatgttttgaaattctacttatcctataataatgatatcgcaataaagcctctttactttcaacatttttctgctacatatttttgtaaacttttgaatgtgccatgaaatgctttaatacaattggtaaatgagagatacactttgattctgttaattcctttttcattcgttggatcgcatgatgagctctaggataaatgtcattctcgtatccacaatttgatttaattaaccatatc

SEQ ID NO: 33808 - DNA, 633 bp, Oryza sativa
ctgtacactttcatccaaatgaccaaaatacccttgagacaaaactttcaaattttgcaaaaaaattttgaaatgtcagactttaagtttttggccaaattttaaatgtttacaatcttatgtttataatatggtatttcgaaatttttgtccacattttggaagtttttatatcagaggtattttggtcatttggacaaaattgtacagtagtaacggatataaaccggacggcgatggtaaatcataaaagttaagtaaaaatcgatggcatattgtagaacgtgacaaagtcagtggcaaatcgtagagctctaacaaactcagtgacatataatggattgtctcttgatcgagactaccgaatccagatagaattttgttaagattcctttattccaatcccacacaaaaccaatcagcctaccatcagcgagcaaacccaatccaattccggtcaacacctaatataatactctactcttgagtagtactacccccgcttttttaatactagaaaaaaaaatctgtgcgttgctatgggtgaactacacgttgtaaacatacaaaaggaaaacccatgaacaatttataagtaagcttttaattgagtttataaaaatacatacattt

SEQ ID NO: 33809 - DNA, 650 bp, Oryza sativa
cagtccacactgtgaaaagtctgcacttcctcctatttgggctgggcctgcaatcatcatcacttcaaactgttaaatgaggcatcaccaaaagctaagctttctgtatgagtatgatgatgatgatgatgaatcagtcgtcttctcatccaattcaagctagttacagccagcagcagcatcgaaaaccaaacaagatatttcaagggcagagccgacaagatactaccaacaatatgctatactagtaacgggagtaaaatgagactttttttcaacaatgactccagcaatgagctatctatcttatccaacaacaagctgcttgccttcaatgattacacgttcgaattcgccaggaaattctcccatatttaataattcattcttcttactcctacacttctccttcagtgatcatatcgagttacaggtctaacacgctgagagttgagagttgctgaggctgggaatacaattcatcagtatactaacaccaaaagttctctcacatatagccaacctaacaggtaaacatcacagccagctcaaccgctagcccatacatcatcttatctctagttactacccatatttgtaccccaagcatagattctatctcccgtcttcatccctttcttcctccacct

SEQ ID NO: 33810 - DNA, 530 bp, Oryza sativa
cataaataattaagatttatatcaatttattggtacagaattatggaccaactcgcttgtgctagagagataatattcatggatgtaaggctattatggccccatttggcacagctctagctctcaactccaacttacctggagccggagttgtgccaaacgtccaaatccactttttttgagtggagttggcagagctactcctagaaaatgaactacgggggtggggctggatttttgatgctccccagctccactccaccccaaaagacccactaccctctaatttttttagagtatttacacgaaaatgctactcaactacccctacaatcctcctttcctcccgttctctctcctcccctcccaatcccgagcgggcgccggcgacggcgggcggcggtggcagcagcagcgtcggcggcggtggcggcgggacgacgacaggcggcgacaggcggcgcggcgtgacgatgacgagcgggtggaggccagcggcggcgggctgcggcagcgtcggcggtgggggc

SEQ ID NO: 33811 - DNA, 733 bp, Oryza sativa
ccgaatgtgggccgagacagcgcagctgatcggccattccattcgtcccgctgcctcgattctattctttgccgtcgccgtcgcacgctcatcctattcccccacaccgactccccgtcagctgcccagagctactcgcctgaaatgttcctcatgtactccacgtagtttcctgcatctgggcaatttcatctcgtcagatatagtgtctggtcactggtgccctccaagaacgggcaaagctttgtcatcgctctagtctgtgggtaaattatttccgtcacaagatgctgccatggaatgctgacaaggacctcagtcctctcctcactcagccatggtccatggaccaggggcatccgcgttgccagaaatcagatcctgcacctgcacagaaccctttcccgtaccgtatgggccgccgcgtacgtacgctgccgtgggggcggccgagttgctgcagcttgcaagctgtgctgcgtcgagtaattcattaaaaataactcttattatccgaaaagtttttaatgtgcaccgacaacgcattcgcatatcgcaacagagaaattttgcgtgctatgttcgcccattggcatggaccatgagttaaggtaaagtgttaattggtagtcatatttggtccctactggagttgatttgatgtaatctcgctaccttgtcgctatcgattccgttagcgttttaaagacttgatttgccgggctgcaggaat

SEQ ID NO: 33812 - DNA, 584 bp, Oryza sativa
tcactactgcacgtccatagacatatatagttctcataggcgtgtttcgcggtgcatcggccgctttagctagtgacgtttgacaacgcctaggagtgacacgtgccggtgataataagctacatattctgaatctgaaagtcaagggaccagcccacgaatcatgttcgtccaacggatgccatttgacatatatgtaggattggagttgttagttttttaacaacagcgcacgtgcactagtgtaccttggggctccttcggattgcagaatctaaaattaattttgttaaatttaacattgaatgtattttgataatattaatcaaatgacttataatatggaaaggagggagtagcaaattttggtcgtaattttaaaaatgataatcatgtaagtatcattcgcgtatgcacatctgaatagcaaatccgtctgaatatgcgacggctgctatactctagatcgcacatttttttagatgagattgtacactcttgtttcggaagtttccagagagcgccgtatgttggattgcaataagtggcagcgatccaaattcttacgattaccaccctcccct

SEQ ID NO: 33813 - DNA, 1220 bp, Oryza sativa
tcacctcactaggtcaccgggttgaggtttagcactatgaaccatagtggaaaaaatcggaccaatagatgacccggtcatcttgctggttcaccgatctgacagtccaaccgtgaaccggccggtcgtaaccaatcaaccagggatcgactccccactagcgcacattttcattcgatttttgcgaaaaaaaaatcaagcctgcgcacaagtatggcccaaacacactaactgggccatcgtgtggcacattcattcactaacttgccttagtctggtccgaccaaaggcggtttattgcccggttcatcacaaaacaggccggttcaagcgatctgaagcggttcaattgtacgtccggtctttctattcgaccgaaccattgcaacctctggttccggttttttcgggttaaaccgctgacctagtctgattttttccactatgaaccctaccagcactagaccgatctttggttttggcgacgagccttgagagtcctcttggccgtgcatctctccctcttatacaagtgctagtgggcttgggggctaaaccgataaggatttaagttggttgttaactgatcaaactacctctagttcttatctactctattttatgttaggaagataacggtggaattatctatcctttaaaagtcatatgaatttatttttaaatttaaaatacttaatggctcaccttgttttatatatgctcttaattttttcatttccccctactctcaaattaagtggttacttggctagaagtccgtactccatagtgatggtgtgtggcaaagttacgatcattcgctccattgaaccgcaatcattctacgagcaatccgttaacaaatctaacaagagacacaaagcacgctgaacagtgaatcggacgaggagaaaatgcatgataattaagcactagccataggcgtggaaccagtgagggtgacaacaaagtcaactaataaccggtgatctggattattaatttgatattcttagttccagctaagtaagttccatctgcccagctgttttctgggatcaagctgttggtttaatttgatcttccagaggtcaggtcaacttccttgcattgcattatgggagagccaacagttacacatgaccaacatctttttgtccataacttatggaccattagtacattatgctagtaccattaatatattgattgatactttc

SEQ ID NO: 33814 - DNA, 707 bp, Oryza sativa
tacatctcagcaatagactagattaatagtaaaccacctcaataatatgtctacatgggtatctataactctctcatgtattgccttaatatctttcaattagaaaaatatgctgacatggatatgttgtagagagtttatatataactgttgtgggtgtcataatgcacatgggtggcgggaaaccgcgtagcctcagcgtccgcgccagcgacgactctcgtactctctctctctctctctcctctcgtctacaaaaaggatgggcctcattggccccacccacgtcgccctctggatgagggtggcattgaatgcgtgtgttggtgggacccaccaccacgcaggaggtgggcccacctgccagtgtcacaggggctcagtacgcagaaagagagagagatcaggtaaaaatggaatggaaaggagagccgccaaggcggccacaggtgaaagccgacgacgaccacgaccaggcgtttctctgactagtgagtgatacactgatactcctacaattaactgtggtgctttggttggttgctttggcatgtggtaactggcaatgtggcacgcgcgctgtccgtcactagcgattcttgtagagtgtagtacaactatctcatcatattttcacctgatctaagggcccgatcgagagcaggccattagcacatgattaattaagtattagctattttttttta

SEQ ID NO: 33815 - DNA, 874 bp, Oryza sativa
agttaatgaagtttcctaccctgcatatgcatcattgatttgctaattgctaccaccgatagtttgtatattccctcctgtttccattataaaacttggtgagaggttcatttctgttctccaccacctcaagtttaagttctcttggattcaattggggcatctatttcattaaggtcctttttgacataggaccaaatccatttggagttgagtatttagtcatagaaatctatggatatagagtcatgactgcattgataacatttggatgaattattttgttcctattttagagaaactttaaaccattgtagcttaactttcaaactccagatctagtgtggatatgggattttttttttacattcaatggatatgggatttggagttgtgccaaataggatctaagttgatactagcttagtatcaatttagtatccttcaaatttaaacatttcattttactgtgaagattacaattacatatttaaactgtggtgactatatgcaatggtggatctagcgcaaatttgtatctatggcgaacaccaaagtgtaaaccaaacccaacactaaaagaactccaaaaatagtagctgaacacaatttacaagggattagggtggtaacattttttttctaaacctgaagttataaacagatctttgtaacaatcaaacaatgccttcgtataaataaataaatgcaattggaaattagcacgttgaatgattgtttacatggttcaccatatgaatttccttccagtcactctcttcaacaaaatacctagcttctacaaagaagactctaattattaatctaacaatataacctatattatcttcctttcttttcttcatcctcatgt

SEQ ID NO: 33816 - DNA, 683 bp, Oryza sativa
ggcgatcgaaccagacaagattgaaatatgttttgacacaagaggatcagaagctgggattactgcaaaggtggtcttctgctgcgacagtagctggatgagatcttggcgatacatgctgctgtaagccctgcagatttgcttcatctcctggctgctccttgcggtgaagatctccaggaccggtctcgcattgttcggggaaacatttcctgcagattttgtgataatcaatcgtggttaatctctggcaaggaatgaagctaacagagatttgtcaaaaaaaggttaacaaagggttaaattacggatttggagatgtcagtgacatgacaccatgtttgagtcgtgttagaaagaaaacgtatggcagaaacatgtatgaacattgaacagtgcagtgaaacagaaattgatacagaataaaatgtaaacagattgttctgataaactgttcaaatctctgaaaaaagaaactgatgaactgttcttgatgctagcatgagacaagatggcggtgctgatatcatcagttgatatgtaccagaaaagaattggttgaggtgtctgcagtcagcttcatatctcttggcaaaatctctaatcgaggccattttgatcagggaattagaagaacccaacttatcagctactaccactgaactcaaaagcgatcgatggtg

SEQ ID NO: 33817 - DNA, 576 bp, Oryza sativa
ttgttgtattaggatatgtcgcattctaggttgtcttattttacgacagagagagtataacagttgccggatgaaaatccctcgtaggtgtcggattcccaaccagcattaatttggaggcgcctttgcccgttcgcataggtgccagttataaaatcaacacttatagagattataggtgtcaattctatagacagacccgacacctataatctttggaaaaaagggttgtggaggcgcaagggatcaccgacctggtagcaaagggcgacaaagctccttgtagaagtgcttgaagtgtcctagcaactcgtcgacagcggggaaagataggcggtgggccccgggcgtgcagtccctgtggaacttcaataggtgctcatccaccagggttccgagcgttgaacgaggagtccccctgtgcatgagcacgcatgtgcacacacaatgacacgaccacaccttagacaccaccggaccaaatcgttggagggaggaaggggaggggggagtggacattatacttgtcagctttttaattaattaacgcctatgatatattatatgtgtcattcg

SEQ ID NO: 33818 - DNA, 684 bp, Oryza sativa
tagttaacatatatttgtgatcaaatttatttttcccttgcaacgtacaggttaaatttgacattacatgtttgtggagtaatttatcacatatttaatctatgttgttgaatttttttcgtaaccatttagatgagatgtgaacaacgagggatgtcccctcgagagtttaaaatagttttccagctccttacggctttggttttttggcaacatgcacacactcgttcttatggacacaaactattcctgtgagtattttcgaaggactaaccaagatatatcttaaaattgttgaagtcgtcataagcgtctcgctgtcgaccgatatattgacgggtacttgtctaccactgaaaaaataattagtcgtaaatacgattactcgtgtcaaatttaaaacttgaatcaagtaaactgattctttcacaacaaacttgaccatatttgaagctacgttcgcttggcagctttagcttcgttgagcaaaggagaactcacgttgggccacacccagcccacaaaattaccaagtcctgaagcctctttacgctaggatttagcccaatccactattacacaccgactttgctgagctaggtcttcggtttcttgaggacgacgacgccccaaagcgcatgaacttgcataattcgaggctacttgcggacttcatttaatttt

SEQ ID NO: 33819 - DNA, 1305 bp, Oryza sativa
atttccacatatgttattaaagggagagagaaaagtatatatattgatgcgcgttgatcgatttaattaaatacgaaacgctattgttaggacctgttcattttagaggaatttcaatgcacgggaatagaaaaggtgggcaaagggtgaatagccaaaagtggtccttcaagttttatctaaagcttaagtttagttcttaatgtttcaatttatccatattagtcctttaagttctaattttagttcaaacttatccttgaacccatttagaagccacatggctaaatataacaacaactttcttgataaatgatacttataccccccctcattcatatatataagaaaaacaattgcattcaatgattgttttatagataatgcacagtaatttatgtaaaatgaaaataaattatgtacttacaagtgtatacgatagccattgcttaagtttaatgtgcacatattgaaataatgagaaataaatctgcaaatgtggttaattattctgggttttatcttttctaatgtatagtttgtatacaaactaaagggcaaaagagacattctctaacagaaatattgaatagaaatagccacatggcatattaagtgggtccaaagatgattttaaccaaaaacaaatatttagacgacatatgtggacaaaatgaaatctaaagtatcaaattgagcatttgatgaaacttgagggactaaattagctattcacccgtggggaaaataggaatacatgcacactccaatatataggaatttttcaagagatttgagtggattgaaaattttctaggtttttttctatacaacgtgtggaaaagaaaaatcttttatttttactatatctacatttatattacccgaatagtatccatagaaattaatcctgagaaatctaaatactttaaatttctataaaacaaaaaagcccttaaattgtcgaactatatattcacgaaaaaaaaaagacaatataactagcatcaggatgttaaactcacaggacacagcaattatgataattcgaatgaatttgggttcgttcaggtgtgtcaaaggtctgaagaaacggctggaaccaagtcaggaaacaacgtatatttgtttccacccagaataatgcaagatctcccaaggccactttgccattcgtctgcccaagccccaacggtggggaacataactggaagagtgcaccccctccgttgtttgtactgttatctctcctcttattaaaaagtttgtgcaaatataaaaaatgaaaagttatgtttaaagtag

SEQ ID NO: 33820 - DNA, 537 bp, Oryza sativa
cccaatgattaacaacgctcatggattggaactaattacacagattcatcccgatctgcaggtaacaaaaatatgcgaacctttctgcagccaatctatgcaatggtacagaagtgtaaacagataattggtggcttgcagagaagatgaatctgaattatataagcaggttgggtgcttcttgttggtggccatgtgagtatcagtatgtgacccagatgactcggatgacacagctctgctcgccgaccgatatgaaaatgacggtgatcgactgcgactgccaccagttggcggcggccgaacgagaccccccgcgtcgttcctcgtcgtcctccaccttcggctccctgcttaaactgcttcgccgacctgttaactatttggcaatgtacctgtgattggctccctttcctaaaccttccgatcctgtttctataaatcggttgagcgttctatagaagcttgatgcctatttgtacagctaccatgtatcaacatgcatgattatcgcattgagctgtatcatccaacatt

SEQ ID NO: 33821 - DNA, 1277 bp, Oryza sativa
aacccccaaaagttgaattggagaattcagctaaaagaatcaaaactttctaatcaaaaaattggacttggatgcaaaagagaaaaaaaaatcttaagctcatcaaaccgataaatttcaaaacaaaaaaaaggttaaagtgtttttttttatcaaaacacagtgagagaggccctcacggtaaattttattaagagaggaaaaaagagtatatacaaaggcccaagggccgaaagaggggagaggagaaaagagagaaaccaaaacagcaaaattacaattgatcaatccatgattgcactagaggtttatgagcaattgattcaatttatgataatttgcataaacaatgcaaaaatgtgggggtttttttttcacagaaagtcaactctatggttactctactataggaaatatatgagccgagtttgaaactcttggagctcagttgaaaaatgaaccagctggttgggctaagactagctatctcacaaactacaacatgcattctgatatatcatctctattagttcaaaaacatagaaaataagttaagtcatttaggtagcttatgtatttgatctgatcagttagttgaaattctcacatattgttcaataagttgacctaattaatagtctcgccgtggccggtgctttgctatctttaagaatttctttagccgaccatataagaatgtatgtacctgtaccactgcaatttggttagttcgtgcgtcacctaattcacttgattagatgaaatacttttataattactcggctgtgcatgtagtctatcttttttgagaaaattccctatatgcccctgaaaatttactcaatcccttcaatacccttgaatttgacatcatctcttatatacccctgagtttttattttgatctcctctatacccatctccgttagttgaccattagttgaccgttaaatattttaaaatgactatattacccatcctatacatatgtggtacctacccaataaattttcatatgaaaaaaataacttatacaaaatacaagcaatataatcatttaatgcccaacttaaaaaataaaacttattattttttatttttaaaaaattatgattaaatccatacattagtttcaccagaaaattaagagcaaaaactaaatgttatttaggtttaaatttttgggaagatatacgaaattcatcaaatttgatctgaaatttattttctaatttgtgataaactaagagaaaattccctatatgcccctgaaaatt

SEQ ID NO: 33822 - DNA, 912 bp, Oryza sativa
gggctggtcggttttgcaagctccagtggctttattgtgggggtaatggagctgccgccatttcgggctcaacatccttagagcatggcatcacaacaggtgttgatggtggcagtggtcagcggcgtgccgcttgcaaccatccaaaagggggttggtgtggccatcgcctcgtcatttgttctgctcttctgccctgtctcgtgctcaacgtcctataagtgtcttggtgatggtgactggatggttcgtcgaggcggtgagatggaggtggctgttgtggccggttggacaactttagctcgatgacgacaacttgaggtgatggcgaagtcgtgggcagtgccaatggcatcctgctctccatgtgataataaggtgcctgcacgagaagtgaaaacagtgggatccttagtagtgccggcggcaaccggattcaccctaatggccagatctgtttctacttcttgttttgcaagacaactacaacaaggagcggcattggcaggatgaaggcaagctggttggcaatgctagtgatggatggggtgcgacattggatctggggcctaaatgttgttgtattgtatccgaggtatccgtgcgtgacattatctatttgtgtagtagcaaaggtgaactggagggacttcttctttttctcctctgaatgacattggcaagcgaaggaagtagatgctgggagttactaaatttgaatcgattggatccagctgtcgatagggatatggtggggaaaggagcgaatcaaatatggatgtaacgtggatgaggagtataggagtttggattccatatcaagatcgacttggtgtggttcttggtacggcagggctcgttaagtagaagaaaaccgaagattagtcttctagtccttttctttttttattt

SEQ ID NO: 33823 - DNA, 680 bp, Oryza sativa
acctaatacaatgggatgcatatccatccgtgccccccccccccccccatacaatttacacatgaaaaaaaaaatttagcctagtcttttgataaggaccttgtgcacagaaaaacttctagctctctctctctcatcgccactgccgctttggttcacctattgcaatgggcatatgtagacaacagagtaagaatgggctaacactggctatgtgtcgagcgcaaagactagggttgtgtttagttggatccaaagtttagattttggttgaaattaaagatgatgtgattgaaaagttgtgtgtataacaggttaatgtgatggaaaagtactaaagtttggatccaaattttagatttaaagacagcctagctatagttgctagtggagagctagcagatggatgtagtgattgaaccgagcgatgacataataggatgatagttggatgcatcgaacatggagaacacaatcgtcacttcgatcatcatcctcgaggtcacaacttctgtcacccccaacaaactatgcccatcgcgtcgtctttgagcgctttgatctcaagtccccacgctagttgacattgcttttctatatttgttatcgtctcgccgcattcctactgctattgttactcccacagtttatgcattgtcttacatgtactccataactct

SEQ ID NO: 33824 - DNA, 1426 bp, Oryza sativa
atcgactatgcttttcgacctgatcttgggtcctcctaagtcctactcaccctcctccaggacgaaccttgtggacaaatgacatcttcaattatcagaaattgtaacattagtattagtaaatttatattatatctaataacaatgatttctttagttatatatttgctttaacaatggcacaatgattggggtccatttaaaagaccgttcccatttttatgtccattttgtctccacggatcctgttttttatcatgctatcataagagttaagtacgattgtctctttcagaaaaatgtttaagtacatttttttgtgacaccctagaagttttgttgtgacagttgctaatgattgtgtgcactataatactttattaaaatgctatacatgctgccagcttcttggagatggaaggaattacggagtagcacaaataactgtgattggctggttcaagacttcaagaagacacaacaactctcaggagcctctctaagctacaacacatgctaattacgattcgtgatgcatcgctttcctgaggaaataaaacactgctggctgttaaatgttactccctgttaatgggactcctatttgtatccaagctgttgaacatcaaattgtttcatcattgaatggtaagacatggaacactaacgtacagttgttggttcgaatactccgataagggttcaatagagcattcagtttataattggaaagagagaagttatctgaaaaatataattgcacattgctgatagtggtaccaattagagtttttttatggtacattctactgctagtatatactaccagtatgtttgatctgacggtgtaaatttatctgatttccctcccaattatactgcagtataatttggatagggtatatttgtttttttatctttttgcatgggggtatttttgtaaattaacgcgaactcacttagtcagatccgtttcaccacatcgactctaaaccgaatccgctcggctcgcatgggtgtccgccgccgctggcttctatccaggagcactccagtggctgcagggcaggcagggcaaccaggacggagatgggaggcgtggggaggctgccggctcgacgagggcactctcgccgttgtggtttgggcaaggcacaagctgtgggaggtcggatgtgggggagaataggctagggatggaggcaaggcgccggggacgtgggagacgccgggcacgtggaggttcggcttctcccggcgccggaggaatcgggatggaggcgtcggcgcgggagcgatgtgcgccaggagcagcgacgccggagacgcgagatgtatcgagaagaagcggatgacgacatccacagaaaaaactaaggaaaattaatccgggtgaaattataattctctaatttaaatgaccaaa

SEQ ID NO: 33825 - DNA, 1108 bp, Oryza sativa
tcctcttctaatattccctattttttaattccgaattttagctatttctaaattggatttatatatggactctgctttttctttttctccgattaatgtgagaatttctaggccatgagagccaacgtggagactcctttttctattcctttaataatataatagatgtgcgatgcatgtccagcagccgaaaatatccaatagagtaaagtgtacgggcggtccttaaacttgtaggggtatctcatctagttccctaaactctcaaaatgcatatccaagtcccaaaacttgtcatagtgtgtcatctagatcccaaatcaccaaaacccttcaggatcctacgtggcattgatgtggcatgccacacggatatgacgtggtattattttggctgacaaataggacccatttaaaatttttcctttttcttttttcttgtctttttcccctgtattctcctttctctgtgacccgagcagaagaaaggagaaaaggaagaatgagaagaaaacggaaaagaaaaaggaaaataaaagaagaaaaaaaaagaaaaggacatgtcacgtccatgtggcatgccacatcagcgccatgtaggattctagacgggacgtgtcgatttgggacctaaatgatatactttgacaagttctgagacatgaatatgcattttaagagttttagggatctatatgacacaaccctaccagattaaagaccgccaacacattttactctatcaaatatatatatttgcaagtttgtaataattaaaacttaattaatcatgtgctgacagctaacttattgttgcccgtcgtcgtcctccgattcgtgcctaccttgttgttgcccgttgtcgtcctccaatccacgccaccgctgcttcagccgcctctccgctcgttggccactgtctcttcgcttggacgccctgctatagtggaaggaggggaggggacgagcaaggaggggggaagagaagtaggtggttgagagggaaaggagctcgagggagaggccttccgtgggtcgtcggctgcggccggggcagcgaccatcatggcgcccatgctccatttcctccgctgatgtgaaaaaaaga

SEQ ID NO: 33826 - DNA, 738 bp, Oryza sativa
gggttctcattggaagatagataggtaaacataagagggtaaacttataaatactacctttgtcttaaaacccgttctaagcagatacatcaaacggctaattagccgcacatgaaaaatgtgattagcatataattaattgtattaattattaaaaactttttgatttttaatagcttgtatataaaagaaattttgtaggtaagacatcgtttagcaatttaaaaacatactaacggaaaatgagaaatagctaagttgaattagcacttcagaataaggtcttaaaattagtagctagaaataaaaaaaaattaggacgaagggagtagataaatactaaaccttctaaaccacttaagggcaatcccaacactcaaagggaaaaatatgaagaaactattatttcttataaagacactagctttaaaggaacaaaaataaggataaaaagaaagagaagggagatgatttgatgagagtttattttaaataaatcgtctatattgggtatatagtttctgcgtacattgtcgatataacatggtatatatgaaaactagtaatagtttttgggttaagattgttctaatgatcaaccttctatttatttccgctgaatgccacctcacagttgtacgttcgtaggcaagtggccaacaagataacagtgcccggccccatcatggttatgggaaacccattgcaatagcaaaccagttggatccaattggccat

SEQ ID NO: 33827 - DNA, 761 bp, Oryza sativa
tataactataaattcttagaatctaaactaaaagctaaactgtgtagggagtttttaagtctaaaagatactacgaagatccctagacaggccctatgagcatagctaataatacaaccagctactgagattatagatttttattagtctatctttcaacccactcatatagttgttagcttttcactgtaataaatatatggtccatctgcccttcatagatttattttttggttttttttctaaaccagctgtcacaaattcatagaccgtttctcctcacttttctctcctctctcgtctactttcttacagagacgtctattatgcttgctctaagcccctgattaggcaggccaatgccgccggtatttgattcgaccggcgcgcagcgcgcgaactcgaacggctcggctcggcgcgcgcgcgcgcgcgaagcggtcgcggattcgcggcgcaggcgaggcggcggcatgcaaggggtccagcgctgcgggacgcgtggccgtcgtcgggccacgtcgcgctgcggtgggggccgcgtgtaacgcctgcgggccccacgcctgggcccctaccccccgctcgatgtggcgcgcaggtgtcccgcgtgcgtggcgcgtgccctgcatgcatgcaatgcaatgcaatacgctctcttctcccgcgcgggcgcggccttcgtttcgcgaccccccactgcttcttcttcctcggtcggcgaccatggctatctactactaccactacctccctcttat

SEQ ID NO: 33828 - DNA, 594 bp, Oryza sativa
atcattttacaagcatgcaaattatcactcgtacaagttaaaattaaaaaaaaacaattagaatgatatatcacatattaatctaacttatatttttattattattttttaattatctatatgacatgtaaaaaataagagtacatctctctaagagattaaaataagttctcaaataatattgcatatgactgggtgaagcaatagtttaattttgtagaacacatgttttacaaatatcttttttccttttatgatatggtgagaaaaataagtttgtgatatcttttttccttttatgatatggtgttgtgtgtgaccattattttgctccacttggcactaggtgaaagtatctgttaaaccagatgcaaatccccgagagaagagctcgagctccacagcctgagctttcaactgcttccacctgtgccaacagacgttgtcctcgacctaattataagcctccagttgcctccgtctaatagaaggagataaagagagggagaggtgatgcatatgacatgtgttctatgaattatttttaatgctttttgctaattgatctgtcacgtttgtatcaagtaagtcagc

SEQ ID NO: 33829 - DNA, 710 bp, Oryza sativa
ccatgaattcagaaccccagagtccgcacatcctcaaatacaaagcacttccctagttagatgtaagttagacttgccgttcgaaaaactctttacttctttacttgccttcatttaatgcccaattaatgaatgccacctgggtggaaccgaaaggtggaaatggaaggtcttagttcggaggtgggatctctacctgatagttgcattgcattcatgatgatcccctggcattcgtccattcagccattcaccattcacccattcaactggaattttggttgaatgccggaattgtgtccacaaattgtggatggatagttggttggctggctggatggctggctggatggctggctggatggatggtgaatggctggcggcggttcggttgctttgaagcatttgttgctatctaaattccatttaaggtcgtaccttatcgcccagcatcatcttattctctatttgtattccctccatctttcaaatacggatgtaaccttggatgtgcccgtgcccaatgaagaagaagagcgcaacatgaaacgtaagtaccaaagtaccggacacccacccaaatcccaataaaatccgccaaatcctgcgggaaattgtaatcccattcaccagctcctacatttaattaacaagagaactattgtatttatctaacacctggattatctccacctttcatttgatcccta
